United States Patent Application Publication US 2005/0228172 A9 - sequence listing, part 171

SEQ ID NO: 763676 - DNA, 614 bp, Homo sapiens
gctaagattataggcatgtgccaccactgtcagcctatcgtatttaattgataatatgaatggaaacgctttaaacctcatacttaggggaaagtgaagtgtataaaacataaacaacagcataaagtttccgacgggattgcttaaagttttaagacatcactgaatgatacaaatatttagaccgaaataactaaatgaattaattttcctgattatacaaactaaagaaatgaaatacatcaagttccagaagttttgcagtccataattcttacaattgacagactaatctgcaaggaggaagtattttcttgaaaaattttgacasaatcatcaatttttacagggtaagggtacaaataattttaaagggagaagttaccaactttgattttcaagtgagttattcatgttatggagtgttttcattcacctgtagcattgtgaggatgaagtgaaaagataaatctcccgagtcttgtgtatcttactgtccatgtgtgacggctcaggtctctaattctaacacttggggaggccgaggcttgcagagcactttaggacaggagttgaagaccaggctggccaacaccatgaaaccccatctctac

SEQ ID NO: 763677 - DNA, 470 bp, Homo sapiens
ctgtgaactttagttaatagtcatctgcggatattgactccccaattgtaacaaatataccaaactcttgcaagatgttaacaacaggggaactgggaggtgaggtggaggtgctgggggcgggggctctatgagaactttctgtgcttctcattcattttcctgtaaacccaaaactactcaaaaaataaagtctattaattaaagaacagaacacacacatctgggtctgcccccgattaggaagtgtggtagattkcaaatagccacacactgtcatggcccttcccagcaaaaggtgaagcttacgtctccactctcttaaccagggctgggctttgaccaacagaagtggcaggcgtgaggtagtgtgtgttcctagcccaggtctcctgaggcctggcagcttccctggtcaccctcatggtcccctgaggccgccacgtggcagaacccagtctcaccccttg

SEQ ID NO: 763678 - DNA, 563 bp, Homo sapiens
  misc_feature 1, 2, 3, 4, 5, 6, 7, 8: n = A,T,C or G
nnnnnnnncattttatggttttaatttttccatgtgtttatatttctctgaaaaattgagcatttgttttcatcagaaaagaaaaacacatgtacaaagtcaaatcttttctcaaggtttacgagggaagactaaacccgaccacgactggtcccagcctcccagctggccccaagtcctgcctctcagggtytccccagcctcccagcccgccccaggtcctgcctctccgggtctcccccagacagggccccagccagggcggcggagttaggtctgtggagggcccagaatctgcatctccaacaagtcctggtgacttccatgctcctggccctgtggtgacttccatgctcctggccccatggtgacttctgtgctcctggccccgtggtgacttccgtgctcctggcaccgtggtgacttccgtgcttctggccccatggtgacttccgtgctcctggccctgtggtgacttctgtgctcctggccccggggaccccagttgaacaagcattgccccagggagtgacccttgacttccacaatcaatgacttctgtc

SEQ ID NO: 763679 - DNA, 563 bp, Homo sapiens
  misc_feature 1, 2, 3, 4, 5, 6, 7, 8: n = A,T,C or G
nnnnnnnncattttatggttttaatttttccatgtgtttatatttctctgaaaaattgagcatttgttttcatcagaaaagaaaaacacatgtacaaagtcaaatcttttctcaaggtttacgagggaagactaaacccgaccacgactggtcccagcctcccagctggccccaagtcctgcctctcagggtttccccagyctcccagcccgccccaggtcctgcctctccgggtctcccccagacagggccccagccagggcggcggagttaggtctgtggagggcccagaatctgcatctccaacaagtcctggtgacttccatgctcctggccctgtggtgacttccatgctcctggccccatggtgacttctgtgctcctggccccgtggtgacttccgtgctcctggcaccgtggtgacttccgtgcttctggccccatggtgacttccgtgctcctggccctgtggtgacttctgtgctcctggccccggggaccccagttgaacaagcattgccccagggagtgacccttgacttccacaatcaatgacttctgtc

SEQ ID NO: 763680 - DNA, 563 bp, Homo sapiens
  misc_feature 1, 2, 3, 4, 5, 6, 7, 8: n = A,T,C or G
nnnnnnnncattttatggttttaatttttccatgtgtttatatttctctgaaaaattgagcatttgttttcatcagaaaagaaaaacacatgtacaaagtcaaatcttttctcaaggtttacgagggaagactaaacccgaccacgactggtcccagcctcccagctggccccaagtcctgcctctcagggtttccccagcctcccagcccgccccaggtcctgcctctccgggtctcccccagacagggccccagccagggcggcggagttaggtctgtggagggcccagaatctgcatctccaacaagtcctggtgacttccatgctcctggccctgtggtgactkccatgctcctggccccatggtgacttctgtgctcctggccccgtggtgacttccgtgctcctggcaccgtggtgacttccgtgcttctggccccatggtgacttccgtgctcctggccctgtggtgacttctgtgctcctggccccggggaccccagttgaacaagcattgccccagggagtgacccttgacttccacaatcaatgacttctgtc

SEQ ID NO: 763681 - DNA, 563 bp, Homo sapiens
  misc_feature 1, 2, 3, 4, 5, 6, 7, 8: n = A,T,C or G
nnnnnnnncattttatggttttaatttttccatgtgtttatatttctctgaaaaattgagcatttgttttcatcagaaaagaaaaacacatgtacaaagtcaaatcttttctcaaggtttacgagggaagactaaacccgaccacgactggtcccagcctcccagctggccccaagtcctgcctctcagggtttccccagcctcccagcccgccccaggtcctgcctctccgggtctcccccagacagggccccagccagggcggcggagttaggtctgtggagggcccagaatctgcatctccaacaagtcctggtgacttccatgctcctggccctgtggtgacttccatgctcctggccccatggtgacttctgtgctcctggccccgtggtgacttccgtgctcctggcaccgtggtgacttcygtgcttctggccccatggtgacttccgtgctcctggccctgtggtgacttctgtgctcctggccccggggaccccagttgaacaagcattgccccagggagtgacccttgacttccacaatcaatgacttctgtc

SEQ ID NO: 763682 - DNA, 539 bp, Homo sapiens
  misc_feature 1, 2, 3, 4, 5, 6, 7, 8, 9, 10, 11, 12, 13, 14, 15: n = A,T,C or G
nnnnnnnnnnnnnnnttttgaatattgaaagaatgcttccttagttttctgtgccattcacaatgtaatagctgtagaaataccacatcttaaagttatatctgcgttattgccatttatccgttactctttcaagtctagatgatcaaaaaacaataaatccagcctgatgcgtacgcttgtcaattttggtagcatgaatgctcccaccayggcggatttcaagacattgcgtggcgtccagtttggagttagctgcatggacccactgttaagcttccttccactctgtagctgtgagatgcaaataacctcaatttaattttaagttatcctattggtagcccttatgaaaaattatacaaaattgtgatgcaaataaaataattatgcacttggatattaagaaaaactttattttccttccataagcaatgtattttaaatatagttgagatctttattataactgtaactaatgcattttcctccaacttgcatacttttctctttcttggtcatttgaatacagatctcat

SEQ ID NO: 763683 - DNA, 642 bp, Homo sapiens
atggacttgaatccaggagagtcactaaccaaatacagttactatttccttctggggtatttacacagaaagcgatatattacaaatgtaaaatcttagccgtttctttgagaagtgattatacctggcctactgtatgaacatgattctttctaaaaaaaaatttaatcactaattttcctatttaaaattgtgacatgaataattatgttccatattcttgaggggaagcmgtaaattccattgtaatatgtttgtgtaataggagcaatagctatattgtgctgcgaagtctggcattaaggcagtctaaaatattgcctgtacatttttttttaatgatctctttgcagagaaacagaacaaagactaaacctaccgcacattaaaatatatattaaggctatggtattcgaaacagtttagtacttaattcaggtagacatggaaaaatcagtggagctaaatagaaggttgccgattaaaataacagcgaagtaccagtgttagccaaatagcaatgcaaaggtcaaaaggtttgcgttttaacatgctgtcggtgaggctatgcgttaaggcagtttctaccgtaattgaaaaagcacgtcaaagaatgtgtattcaaggatgccacatagtttg

SEQ ID NO: 763684 - DNA, 613 bp, Homo sapiens
acaaaacaatccaccatggtgtaaataaatgaagagccaaatcctccgtccaaacaaaaccgaagtggcctggccaggccttcctctccacgcgctgccccgcgcctcgcctcccctcaaccgcaggaacatatggagtcggaaaatgcacgttaacaaagcgctgcacgtcgccaggcgctggctagtccctggaagagacacaagcatttcccagcctctgctgaggggccagatgttttcctcattaggttttcctcgggtagaaataattcttgcctgtttaatgttcaagtcaattagtaatcactctacaaggcctgggagctgtctactttcagttgcctttagagatgaaactctaaaaacatatcctagcacacagcatcatctatgaaacatacctgccaaaaacgctgaccctggacccagcctgctgccaaacttacytccagtttaccggatataccaaaagtagaggaacaagctaagtgacaccagggataaacaggcatgcaaatccagaatatgggatattatctaagacaaattttctggactctttagtcaactcctgagattttttttttttttttaggtagcatgcattatt

SEQ ID NO: 763685 - DNA, 603 bp, Homo sapiens
tgagcagttcgacttcttccccaactgcctttatccatagacaattcatccatccatccatccatgcatagaatccatagtttttaagttactggcacatgccgaatactgttttagtggagagggtttatcagtaaagacaggcaacatcatggctctaatggagtttatatttttatgtaaatggacaatcaacagatacacatcaagcaaatttcagcctgaaaaaataaaagcacttgatgataataaggtgattgggaagtaggttaaatactttagattccagaaaaaaaaatcagcaagagaaagacagtagaatagaacctgttcctgttgtatttctggagaagcacctggccatgtggaaggctctttatgttggctggaagaaaaattgaatgtggaatrttatttagccaacaacaagaattcattatatctgcacgtggtaacatgaaagggtttctgcgagtagaaacatgtaagctgcagagagatcatttttgtaaactccatgcagatagatgcacagagaaagagctggaagaacccacactgcatggttagcactgggaaggaagaacaggctttcacgtttta

SEQ ID NO: 763686 - DNA, 567 bp, Homo sapiens
aatttgggaatggcagaacctgtatcttggatcccttgactgatcttgggttgacagttaagagggctgggcttgtctctgcagatggctgtgttgcttccatgctaactgggcttgggttcggattatacggtttcccttcctcaaagcccttcaggctgcactgccctcagcacagcgttagtagctctggcaccttgggttgttagataaatgttccagcaactcgaatgcagccaaagaccacaagctgcaggatgcctggcacgtatctggcctcttcaaactttgataaatgaagtgcccatgtctcaccgtcaggagggaaggctggggttgttgggggtggggttctgtgcatctgggtttgcatatggcktatgagtggcttgtgatatacttggagagatcacaggaaacaagccagcaagcacacagacattgcagccattgcgttgaggctttaattacagaaggcagagtttgttttaagctaaagcagttgtgcttggctctaacttgtgtgtgcaatgtccaggcttcagaagagccaaacgtcttgaaaat

SEQ ID NO: 763687 - DNA, 607 bp, Homo sapiens
aataaaataaaataactgctactccaataggttaaaaaaaaaaaaaaaaaaacagtgcttcaggaagaatagctaatggatgctgtgcttaatatctaggtgatgggttgacctgtgcagtaaaccaccatggcacatatttacctatgtaacaaacctgcacatcctgcacatgtacccttgaacttaaaataaaagttgggaaaaaaaaaaaccagacagaaacaaaaacaacctccaacataaatttcaagatgagttgccttaacctgttaactgccaaacagaactccttcaaaaaggggttccctcccctttgatgcaaagctgcttacacagaatgcagacagtagataatcctcaaactaagaaaattcaacacaaagtagactatctgcatctaacccacttcaaaacacataaaaggtaaatgaaraatgatgagcatgataccactgatcattccagctagtaaactcccacagcgagcacacaactgctttcccttcagcttttgggcagtaactcattttttcaattctattaaaacacagagctaacaatttctctgttatgttcctctcaagatacagtccttctccaccag

SEQ ID NO: 763688 - DNA, 505 bp, Homo sapiens
aattgttatggagaataatgtagcagggcaggagaatagggaatgctgggattaggggtgggtggcagttttggataggatggtcacctaagatggtgacaagggagctaagacctgaaagaaatgaataagtgaaccaggagccatgatgatacctgagggaagtgtgtttcaggcagagacaatagcaactcaagggccctgaaatagaagcatgctggcgaggtggttcagagcagcagggaggccagtgtagagtggtatgaatgaatgaatgaatgacagggagagtagcagggccagatcatgtaaggccttgtagggcttggcaygtagcaggtgcaaaaggtattattataacatgatcagcatcacctaactcatatatttaaagaaccaccctttgctgggttgaaaataaactgtagaagggacaagggtggtagcagggagatcactgaaataactagatgagaagtgatggtggtttggataaaagtaatag

SEQ ID NO: 763689 - DNA, 640 bp, Homo sapiens
ctgataaatatatacaattgcttaatcatccactatatacaacaatttcatcaccccaaagattcccttgccacagcgctgcaatcactgaccagctttctatcctcgtgaattcgattctattaaatgtcatgtgatgaaatcacatatgattcagtattttgtgtctactatcggttagcataatgcttgtaagaatctatawgttgttgtctgtatcagtagttcagggtttttattgctaattagcattcattgtataacatagcataaattctttttttttctttttcttttcttttttttttttttcttttgagacagcatctctgttacccaggctggagtgcagtggcgcaatcttggctcactgccaattccgtcttctgggctcaagagatccttggggctcaaggaatcctcctgcctcagcccccttagtagctgggagtacagtcatatgccatcacacccagctaatttttgttttcttttgttttgagggggggttatttttatgttttggtagagatggggcataatttatttgtccattcacctttcatgaacattctggttattttcagattattgctgttataataaagcagctgtggacacttgaatacaagtctttgtg

SEQ ID NO: 763690 - DNA, 640 bp, Homo sapiens
ctgataaatatatacaattgcttaatcatccactatatacaacaatttcatcaccccaaagattcccttgccacagcgctgcaatcactgaccagctttctatcctcgtgaattcgattctattaaatgtcatgtgatgaaatcacatatgattcagtattttgtgtctactatcggttagcataatgcttgtaagaatctataagttgttgtctgtatcagtagttcagggtttttattgctaattagcattcattgtataacatagcataaattctttttttttctttttcttttcttttttttttttttcttttgagacagcatctctgttacccaggctggagtgcagtggcgcaatcttggctcactgccaattccgtcttctgggctcaagagatccttggggctcaaggaatcctcctgcctcagcccccttagtagctgggagtacagtcataygccatcacacccagctaatttttgttttcttttgttttgagggggggttatttttatgttttggtagagatggggcataatttatttgtccattcacctttcatgaacattctggttattttcagattattgctgttataataaagcagctgtggacacttgaatacaagtctttgtg

SEQ ID NO: 763691 - DNA, 653 bp, Homo sapiens
tgctttggctacagcttccagtagcatgttgaatatgagtggtgagaatgaacatctttgtctttttccagttcataggaggagtcctttcaacttttctctattcagtacgatgatagctgtcagtttgctatatatgtaatcttcttattttgaggtatgtgccttcaatgtctaatttgttaattatttttatcatgaagggatgtttaatgaaatgcttttttccacatctataacaattattgtaagtaataaatgtggtttagtttttaagtctgtttttgtggtgaatcccatttattgatttgtaaaggtttaaccatccttgtatttgctgaaataaaacccactttatcatgatgaattttctttttgatatgctgttagattctatttgcttgtattttactgaggatctttgcatctatgttcatcagggatattggaccgcagttgtcttttttgttgttgttgtgtctgcgactgttttttctatcagggtagaactggktttatagaatgagttggggtacaattcctcctccttcatttttgggaatattttctgtagaattaatactagtccttctttgtacatctgataaaatttgtctataaatccattggatccaagtcagtttggttagaat

SEQ ID NO: 763692 - DNA, 656 bp, Homo sapiens
catattcgtagtcatgcactgccctgtctcgtttttcctctttagcgagaatgcagttagatcctcctctatcttaggatctctcgtttccaagcaaaaattccataggtctattaaaatgataatcctgttaatttttcttcttgaaaatgtcttcattcaaactcaactgtcacgttacacttaaagccatctcagttatcacattatttttgggaacagtgtttaatttgtccctcasaaagtccaagttgtgtgacggtggttttctttctcttattaaatatataaatccaaagagatgttattgcaagtattaatagctttcctagccatatcctctagtccataactgtaatacatgataaattcatattcttcccatttaagaaacattggttatattttggataattgatatgataatcatcaaatattattatttgcaactaacagaccttaatgttctaaggtcaaagctgacctcttggctgttttagaatattcaatggtagatctagtttctttcaccagagtaggcaatctatttaaattaactacatatttcaggacacagagatgaagaattgtacattattaacatcttcccttgttttgattgttgatcactgttatttatggatgacatcttttat

SEQ ID NO: 763693 - DNA, 629 bp, Homo sapiens
tgtacttttttttaaaaaaaaagaagaaagttaaaattgtcaaatagaataaaggcttttattaaatttaataggggaagaagagaaattttatttctcttctgttgtagattcatagattaatcagtgaagagaaatttactaccagcttttatctttatttctgcactttgttgcctatctccaactgacacactgctccaagaatactttacgtggattgaatagctatgctgagacatttgtgtttccataatgtaagtggatttaagggttatgcaattatccaagaaacagaggaacagtgatggtaaatataaaaatgcacacctggggaataagaataacccagtgtgggcctccctctaatgtctctggttgtggaatctcagcaagtctcttctccttccatgtactcagttttttcagctttgatgagagaggagaggtctgcataaattcctcctgttrttactatgaatctcacgctgaggaaaagattttagatactattagacctctcagccgtaaagatctgacttgagaattcaccctagctttattgccaccaacttccaacatcaacatcttttaaatacaaacgaaatggaggaaaacactgcatttga

SEQ ID NO: 763694 - DNA, 614 bp, Homo sapiens
agcccaatttatcacttttttatttgatggatcatgtttttatgtctaaagacacaataatacgtgcccaagaactctaatctctatgctttttatttcctgaacttttaccactgtattgaataagaacgttgaaggcaggcagttttgccttgcaaaacttttccattaggaaaaaagcattcagctttttgccattaagaatagtgttagcgacctggcacggtgactcacgcctgtaatcccagcactttgggaggccgaggtggatggatcacgaggtcgggagatcaagaccaccctggctaacacaatgaaacctcgtctctactcaaattagccggccgtggtggcaggcgcctgtagtcccagctactcgggaggctgaggcaggagaatggcrtgaacccgggaggcggagcttgcagtgagcggagatcgcgccactgcactctatctagcctgggcgacagagcgagcctccatctcataaataaattaaaaaaaaaaaagaaagaaaaagaatagtgttagctctgagtatttgtagatgctctttgtcaagttgatattcgcattttttctgagagttttaaaaattatgaatgggtgtt

SEQ ID NO: 763695 - DNA, 646 bp, Homo sapiens
ctgaaagataaaattcctacaatcaaatatgctactctctggataaattttctcagcagcattttgcagaatgtttacctctttcatagaagtgaatttattaaaatttcaaatggcacagtgctttacaggaatctcatttattaacactcctttatttgttaaaactaataaataattaaactattatatatacccttctctgtattacaactacattttgtacactttatattcacttttctctttcaaatataattactaatgcatggcttttcacagtctcaacttgtttcaattaactactatgattattatcactattatgatgatggtctttgcagcttagccaatggaagccttgttaagtttgctcttctgtcctttagcactggtcctgacatttttgaagcaatagctgatttcagacaacaaaaggatattcyagaccaatccattttttttcctgcttgaacactggaatcaattttcctcccaggtaccctgattctttttagtggtgtgcattatcagaggcaaaatatgggcagtacaggacgcaggagagctggtggtagatgaacgaacagctgcccttggggtacttagcggtgacaattagaaaataggtatctttttaaggtca

SEQ ID NO: 763696 - DNA, 531 bp, Homo sapiens
cattttgcagcaaaagaggtaagcatggtcccatgaccacaggatccactggtcatatcacatgctacaccatctgaaagcagccagcttcacagagcactgaaatggtcttctaaagaaagctgagttgacagcttaatggcaactcttatccttcacaatacggtagatgcatcaaattaraaacctttatgtttcccaatagggagactttatgggtctacttgccattgttctcagtgatccacttggggggcttcatacttataattcccacagctctgggctggagttctatggccctggggggcacattctttccagaggacacttaatggtcttattgaattgcaagttatggctgttgccagggaactttgaccctttatgcccagggttttgtagacaagaaagacagtcatcactgtggtaggcattaccattctgatctgcaggaggaggtggcactcctaacatagatagcgctttacacatggggataatacgtgtggagcctacatgatctacttg

SEQ ID NO: 763697 - DNA, 634 bp, Homo sapiens
tataaaacatgagagagtttgttcagaagagactattaagggtatggctgagcaaccatttgataaaaagaccatgagtgtggctcataaacttattcagccatttcagcagaggccaggaatacagatggaattatgccagcaaagacattgcccatttgaatgaaaggggacagaaaaagtgggagggaataaaaaatgtctgctgggtttttctgattctacaaatgggaccacagagctattcagccgtgamcaggtaccatccttcaagaaaaggaagaaggaccacaaacgctatttagatatcgtcaggaatgccactatcaccacgggcccagagcatacaggcccagggagcaagagtacctccatgtcagtttcaaaaggaaaactgcagtcctgcagagagctgcagtgtaggtgggccgctgcagagagttgcagctccaccaccaaaaaaggcagggccacactacccacccatggggtgatgttgccacccccgtgggcccacaggacagagcatcaaaccaaagaggattattaatagtcacaccttactattaatgtttagtgaaatttgccttgctagattttggacttgcttgggacctattactcctttcttctt

SEQ ID NO: 763698 - DNA, 668 bp, Homo sapiens
ttgaaatacaagtctaattgctttacatcctgttcacacacagtaatgacttccctggtcttgaagtatatatttttttaatttgatccaccaggctttgcatggtctggctcctgttaatcttgcaaggattactttgttttattttgtttgtttgtttcttgattgcacttgtagtgggctgcttccagccctctatatgctcttcccttggcagtatttgaggcctgtatcttctttcgtatccttttgcatatttaatgctgtttatccctagagctaaactcagaccttttctgacctccctgagtggctcaaattttcctttttttatgctctcattgcatcttacatctttctttcatagcagccattacaatgataatttctcatttattggtgtgatgagtagattaatgcccatctcctatgcttttatsttggattaggatgaaactaccacatgttcagtattctgtcctcagcaccaattactgtacctgatacagatactgagaatttgaaaacagaagttagattattgatggtgcaaattttcttgcacataggaggaggtcccagatagcagtggtaggaatttgctgaggatagggagtgggacccgagaagagagctactttatgatgcagtggaccaagaaagatgcc

SEQ ID NO: 763699 - DNA, 575 bp, Homo sapiens
gattcatgcagatttttgcagatatttatagctcatctatttgtctcacttagtagtattctatggtatggttgtacttcagtttgtttaaccactcacctgttgaaggacttctggtttgtttccaggttgaggttataacaaataaatyctctataaacatttgtgtacaggtttttgaatcaatgtaagccttcatttctctggaataaatgcccaggaatgtgatttctgggtagtagtctcatgtttaatttttaaagaaacgatcggttttccagagtgtctgtatcacttcacaattccaccagcactgtatgagtgatccactttccccatgtccacaccggtatttggtgtcactgttcatgctagctgtgctaacaggtgtgtaggatatctcattgtggacttaacttgaatttccctgatggttaattatgctgaacttcttttcatgtgttgatttgtcttctgtatatcttcttcagtattatagaacttacagtattctgctaaaaacattttatgtaaaaacagcattgcctttccactagaagactgaccttttcaca

SEQ ID NO: 763700 - DNA, 647 bp, Homo sapiens
gcttaatttcatctggaaaataaaaactatcttccagaattgttattaaaaaaaaaaaaaacacatacgaagggaaaaatcccacaaaagttctttgcaaagaataaacaaagtacaaatgtcagttaatcaaaacctccaacaggtgatccttacaaagttttaagcaaaaacagcaatctgggggtgggggggaaaacaaacactggtttaaaaaaaaaaaaaaagatggtagtctttgaacagattaatttcctagccttctaaccttgagagttgtatcttttgttactgtatttgtagcatttaracctatgttttctactggctgaagccaggatattcattaaaggtcaacacaggaggagtcagaaagagctcttgaactggagtgggctagcagaggaatgtgaagtggccacaacggaatgaagagaagggagaacacttgttattctgtggtagagagacaatcgaatacacagcacccagatggggacgacatcgggttccagactcaaccccaacactttcttcaaaacacttcttatactccatcttttcacctataaaatgatggattcatttaagggcttcatctgttctcccgttttagaattattttctaattgtgttttggaaacttc

SEQ ID NO: 763701 - DNA, 616 bp, Homo sapiens
aaggttagcaaaatcctctacaacttcaacctctcctatgaatgtcccctgctctaagtgaaatctggctgtctcatataataatgctttcctgtgcagcactttcaagcaggggctgattttctctcacttctcaccttcccctaggccttgaaccacttacagacccttctccataaaaacattcagttctgaatctcacatcatcagaktcaacatcatccctctttgtagccatttactgcttccaagtaactttcctcttatgccttaaagattgtggctcctagctcactgtcattctctctaatatattcttatcataattcctggtaattttaataactatataagtaatgattataatgcattgccctctcagttatctgatctctcctccactgatcttgacatttccacccaacctcagcctctcatttccatggttataatccttgaccgtgttattactaataactgaaaccttttttctctaatcttaatttcaaatatctcattcgccaaacaccatctcttaactttctagtttgctctctatagtacaccaattctaacaatccctcaacctatcaggacattcaatctactaattcta

SEQ ID NO: 763702 - DNA, 619 bp, Homo sapiens
tgcacatatttggtaaaagtataaagaaaagcaaagaaatgattcacataaaatttaggaaactgtttatctctgagggagagagaagatgggagattcaatcaagtaggacctcacaagaggctttaaaggtactagaaatctcctttttgttaagctgggtagcaagtagaaaagccttcaatttgttattctttaagttgtgggtttatgttaaatatacttttatacatatgacatattttacaatttaaaaaaaggatataaatggggatgacaaattagaatttgggggctgtaacccagacttttccactgactgtgtaacyttaaacaagtcatttaacctctcagagcataatttttcttcttattttattaatgaggaagctaacagctaacatctgtttaggactttggcatttaaagaactgtttaaagttcctagactgtaaacatgcaaatatgcatgagatcataaaacaaaatcatacctcattaataaataccacaatactaagaactcattggtagggcacacaaggctattcaccattctagcctctgcctatctttctaacaataaaggcaacaactaatttttttaatgtgtactata

SEQ ID NO: 763703 - DNA, 599 bp, Homo sapiens
agccactatgcccaacctcattttttaaaaaattttggctcttgtaataacacttcacttaaaacacacattgtacagctgtacaaaaatattttcttttttttttgaatcctcatcctcattctataagcttttttcttttcctttcttttttttttttttttttttttttttgctttttaaactttttggttcaaaatgaagacacaaacacacagattagcctaggcctatacagagtcaggatcatcaatatcactgtcttccacctccacatcttgtcgctatggaaggtcttcaggggcaataacactcatggagctgtcatctcctaggataacaatgccttcttctgtactccctcctgaaraacctgcctaaggttgttttatagttaactattttttaatacatagaaggagtacacgctaaaataacaattaaaaagtacattatagtaaatacataacccagtaacatagtcgtatattaacattatcaaatagtatgtactgtacataatggtatgtgctatacttttaaatgactgccagcacagtaggtttgtttagaccagcatcaccacaaacaagtgaata

SEQ ID NO: 763704 - DNA, 599 bp, Homo sapiens
agccactatgcccaacctcattttttaaaaaattttggctcttgtaataacacttcacttaaaacacacattgtacagctgtacaaaaatattttcttttttttttgaatcctcatcctcattctataagcttttttcttttcctttcttttttttttttttttttttttttttgctttttaaactttttggttcaaaatgaagacacaaacacacagattagcctaggcctatacagagtcaggatcatcaatatcactgtcttccacctccacatcttgtcgctatggaaggtcttcaggggcaataacactcatggagctgtcatctcctaggataacaatgccttcttctgtactccctcctgaagaacctrcctaaggttgttttatagttaactattttttaatacatagaaggagtacacgctaaaataacaattaaaaagtacattatagtaaatacataacccagtaacatagtcgtatattaacattatcaaatagtatgtactgtacataatggtatgtgctatacttttaaatgactgccagcacagtaggtttgtttagaccagcatcaccacaaacaagtgaata

SEQ ID NO: 763705 - DNA, 527 bp, Homo sapiens
ttttcctttgggtaaataaccagtaatggggttgctggattgaatggtagttctatttttagttctttgagaaacctgcatactcttttccatagaagttatactaatttacatttccaaaaataatatataagtgttcccttttctatacatcctcaccaacatctgctaattttttttttttactttttaacaacagccattctgactggtgtaagatgatatctcattgtagtttcaatttgtaatttctctgacaattagtgatattgagaattttttcatatgcttgttggtcactcatgtcttcttytgaaaactgtctgttcacatcctttgctgactgcccactttttcttatctttcttcttttttttttaaatttagagacagtgtctcaatctgttgccctggctgaagtgcagtggcatgatcagagcttactgcagcctccaactcctgggctcaaggcatcctcctgcctcaggctcctgagtagctaggactacaggtgtgtgcaacaacac

SEQ ID NO: 763706 - DNA, 575 bp, Homo sapiens
ttacaaagcataatatatggtatcagaccacaaaattagcaaactaaacccatttaactgtaacagtcccacgaaagaattgtggtccagccataaagccggagagtactggacctccttccaaggatctgagaagctgataatgcagtaaaataatcttcatcgttaagaacaactattaaactattgattgaaagcttatgttcccagtgccctaagaaacatgttacattctttagcccactttttctccccatgaagtgtattattattatctctttttttttttttttttttttttgagacagtttcgatcttgttgcccaggctggagtgcaatggcgcgatctcagatcaccgcaacctytgacccccgggtttaagcgattttcctgcctcagcctcctgagcagctgggattacaggcatgtgccaccatgcccagctaattttgtatttttagtagagacagggtttttccatgttggtcaggctggtctcgaactcccaacctcagatgatccgcccgcctcagcctcccaaaatgctgggattacaggcgtgagccactgctc

SEQ ID NO: 763707 - DNA, 638 bp, Homo sapiens
gtggctcacgcctgtaatcccagcactttgggcagccgaggcgggtggatcccgaggtcaggagttcaagaccagcctggccaagatgatgaaaccccgtctctactaaaaatacaaaaaattagctgggcgtggtggcacgcgcctgtaatcccagctactccagaggctgaggcagagaattgcttaaacctggagaggcggaggttgcagtgagccgagatcgcgccactgcactccagcctgggcaacagagcgagactccgtctcaaaaaaataaaataaataaataaataaaataaacgatggactttagtgaataagactgtatcaacattgactcatcagtcataacaaagagaccacactgacaggagatgttaataacaggggtagcagtggggagtgaggggtatacaggaactctgtcctttgggctcaattttgctgtgaacctaaaaccgctctaaaaaatgaagtctattggccmggcgtggtggctcacgcctgtaatcccagcaccttagggattacacacccgtaatcctagcgaggcaggtggatcacctgaggtcaggagttcaagaccagcctggccaacatggtgaaaccccatctctactaaaaatacaaaaaag

SEQ ID NO: 763708 - DNA, 441 bp, Homo sapiens
cagatacagaccattatgtagatataatctagtcacaggttcttgggaaatatttaacatttttgttcgtttgtttgttttgagacggagtctcgctctgtcgcccaggctggagtgcagtggcacgatactcggctcactgcaagckccgcctcccagtttcacgccattctcctgcctcagcctcctgagtagctgggactacaggcgcccgccaccatgcccggctaatttttttgtatttttagtagagacggggtttcaccatgttagccaggatggccttgatctcctgacctcatgatccacctgtctcggcctcccaaagtgctgggattacaggtgtgtacttggtgttatctttactctccttgggtatagtaagaatttgctactagtttgaaggtcatggggactttttgaaaggcttcttatggggat

SEQ ID NO: 763709 - DNA, 506 bp, Homo sapiens
taagaattttgtgaaaaagagggagggaacagagacacgtgaaaagaaaactggctggataacttcctgcagatactatttagggatattagtgccttctaggtgtccattctagcttgaaacagtaattcccagactgccgacctccccctgagactattatcacatccatcccaaagataaaggygctggggccctgagggaggccatgctgagctctttgatgccaaatagagatgctttcctctgatgcctgctgagacagactttccagaagttgttctccctcggctgtcacttgggtgccccttcatgacctctgcccaggggaactctgctcccagcttccccagctcccctgggccttcttgcttaatcacctcccctttactcctctcatttggacaccctgaggaatgccaacctagcatgacttgccagcacatatactaaaaaaaaattggaatgatacagagaagatcagcatgggccccgcgcgaggacgt

SEQ ID NO: 763710 - DNA, 628 bp, Homo sapiens
accctacctctgccagccctgctactggaaaaaacacttaggacatgccagggattatgccaagcactttgcatctagtctctcatttgctccttactacactctatgagtctaatatctccaaataaatagcaatctatagtaacaaaggcaatattcttataagaatcatgtttttaatacctggcacctatgggaaaacctctctgatggaagaatttaagagaagggtggaagggagcaaattccatttcttccagagtgactaaactacaccgaagtcaaacttatgctacccagttagttttgctctgatgatcctctctgcactgacaggtgaaagcacatgcagaacatgcatggcttattattctgaaaagtccaaaatactgcgcttattcctatagcaactcggaggctaaacagagacccagtgttaacttcatacagacgtcctcagagaarcccttcctttgcagttttatgttctttataattataccaaacctttagctcagaatccctttcactttaaaaaaaaaaaaaaaagaacttacattatcatctagttatatatgcaaggcaccaaagaaacaacaacaacaaagtaaatatggaaaaagacttg

SEQ ID NO: 763711 - DNA, 657 bp, Homo sapiens
taagataatatccagaatatataaagaactcctgtgtccaacaacagaagaaacaacccaattaaaaaggacttcaatagacgtttctccaaagaagatatacaaatggctgataagaacatgaaaaacgatcaccattgctaatcactagagaaatgtaaagcaaacccataatgagatgccgcctcacacccattaggatggctactatcaaagaaagaaaataagcatgggtgatgatgtgagaaattggaacccttgggcactgggttggtaggaatataaaatagtgcagttgctgtggaaaaccgtatggcagatcctcaaaaaattaaaagtagaattaccatatgatccagcaagtccacttctgggtatayatccaaaagcattgaaagcagggacttgaagaaatatctgtacactcatgtttatagcagcattattcacaagagccaaaatgtggaagcagcccaagtgtcccatcaacagatgaatggataaacaaactgtggtataaccatactgtggaatattactcagtcttaaacaggaaggaaattctgacacatgctacagcttggataaaacttgaagacattatgttatgtgaaataagccagtcacaaaaggacaaatactatatgattctactta

SEQ ID NO: 763712 - DNA, 645 bp, Homo sapiens
ttaagggaggaaaaaaatgtttaagccataaaaaaaacctcaccagattttatattaacaagtttcattcatcttctcaaaagtctcctctgcatagttcttaaaagacaaggagtatgaatatagatgaaaatagtgggattttaaaagtgttttgtttggcttaatattttggaggaaaacagatttattttattttttgtagagacargatctcattatgctgaccagtcttgttgaccagtctggtctcgaactcctggcctgaagcaatcctcccatcccagcctcccaaagtactaggattacaggcgtgagccataacacttggccagaaaaaaaattttgttttccatctacgtttgtatctttctaagcaagccccattatatttctgttttacagattgtaaacattactctgccacttcccagtggggaaaaaaaaaactttttttaaaaaaagtagcgaaaaaaaaaatctataacccttttcccctcaaattttcccccatcaatacacagtatccaaaataaaaaccatcaggggccatggaggagtataattgaaaaagcaaccaaatcacagcacaaggttgagatgcaaatagtatggctctggtgaatgaatatcacactcttaagt

SEQ ID NO: 763713 - DNA, 501 bp, Homo sapiens
gggtgttaacaggcagaaaaagccaccaatgcaacattcctggaacgttcaatagcaaggaggcctgtacggccgaaacagaaccagaaagggagagagctgcggaagaagtcagaatactaatggagagtcccatcacattcagaaccttgtaggcccatagcaacgataacagcagctataccaggtaaccactgaaaggtctgcaccagagaagaaccatgctgtaaagtattttgtcaagactcattctggctgctacgtggagaagactgcaaagaaacaaaagaggaagaagcaaagagactagtaaggaggctacagcagtcatccagatgaaagatgaagatggctcarggtaagcaccaatcagtgctgagaaatgctaagattctggatatattttgtatgtagaaccaagaggatttcttgatgaattagatgtgatatgcaagcatatgcatgcgtacaccaggtacaggtaaatgtgtaatcaagtat

SEQ ID NO: 763714 - DNA, 514 bp, Homo sapiens
tgcaaaaattctcaacagaagactagcaaactgaattctacagcatagtaaaaggattatacaccatgacctagtagaatttattcctggaatgcaagaataattcaacatatgaagaaaaaacaatgtactataccacatcaacagaatgaagggaaaaaaatccatgatcatctccattgatgcataaaaatcatactgacaaaattctttttttcatgataaaaacacttaacaaaaaggaataaaaggaaactrcttcaacataataaaagccatataccaaaaaaccacagtgaacatcatactctactgaaagcttccctgtaggattagaaacaaggcaaggatgctgctttcaacacttctattcaacatagcactggaagtcccagtcagagtcgctaggcaagaaaaagaaaaaaaaaaaaggaatcaaattgaaaaggaagaagtaaaagtatttctgtttacagacaatatgaccttattttgtatgtagaaaaccctaaag

SEQ ID NO: 763715 - DNA, 514 bp, Homo sapiens
tgcaaaaattctcaacagaagactagcaaactgaattctacagcatagtaaaaggattatacaccatgacctagtagaatttattcctggaatgcaagaataattcaacatatgaagaaaaaacaatgtactataccacatcaacagaatgaagggaaaaaaatccatgatcatctccattgatgcataaaaatcatactgacaaaattctttttttcatgataaaaacacttaacaaaaaggaataaaaggaaactacttcaacataataaaagccatataccaaaaaaccacagtgaacatcatactctactgaaagcttccctgtargattagaaacaaggcaaggatgctgctttcaacacttctattcaacatagcactggaagtcccagtcagagtcgctaggcaagaaaaagaaaaaaaaaaaaggaatcaaattgaaaaggaagaagtaaaagtatttctgtttacagacaatatgaccttattttgtatgtagaaaaccctaaag

SEQ ID NO: 763716 - DNA, 650 bp, Homo sapiens
tatcttatttatccatgtacggacacaggttgtttcactttttggcagtgaataatgctcctatgaacatccttgtacaaagttttgtgggtatatatcttcatttctcttgggtatacacctagaagtggaatggctcgctagaactcatatggtaactctatgtttaacttttcttttttttccccaagacagagtctcgctctgtcacccaggctggagtgcagtggcgtgatctcggctcactgcaagctccacctcctgggttcacgccattctcctgcctcagcctcccgagtagctgggactacaggtacatgcsaccatgcccgactaattttttttttttttttgtatttttagtagagatggggtttcactatgtttggcaggatggtctcgatctcctgacctcatgatacactcgtctcggcctcccaaagtgctgggattacaggcatgaggcaccgcacccagcctctatgtttaacttcttatcttaggaactcccaaactcttccaatgtggctcaccattttacattcccactggcagtgcatgagggttctaacagctccacattcttcccaatgctggttattatctgtcttttccagtatagccatcctagtgggtatgaagtcgtatct

SEQ ID NO: 763717 - DNA, 650 bp, Homo sapiens
tatcttatttatccatgtacggacacaggttgtttcactttttggcagtgaataatgctcctatgaacatccttgtacaaagttttgtgggtatatatcttcatttctcttgggtatacacctagaagtggaatggctcgctagaactcatatggtaactctatgtttaacttttcttttttttccccaagacagagtctcgctctgtcacccaggctggagtgcagtggcgtgatctcggctcactgcaagctccacctcctgggttcacgccattctcctgcctcagcctcccgagtagctgggactacaggtacatgcgaccatgcccgactaattttttttttttttttgtatttttagtagagatggggtttcrctatgtttggcaggatggtctcgatctcctgacctcatgatacactcgtctcggcctcccaaagtgctgggattacaggcatgaggcaccgcacccagcctctatgtttaacttcttatcttaggaactcccaaactcttccaatgtggctcaccattttacattcccactggcagtgcatgagggttctaacagctccacattcttcccaatgctggttattatctgtcttttccagtatagccatcctagtgggtatgaagtcgtatct

SEQ ID NO: 763718 - DNA, 563 bp, Homo sapiens
atagtgaagctgctctgtgtgatatcacagtggtacatacagtgaaggtcctctgtgtgatatcacagtggtagaaatagtgaagctcctctgtatgatatcacagtggtagatatagtgaagctcctctgtgtgatatcacagtggtagatacagtgaagctgctctgtatgatatcacagtggtagatatagtgaagttcctctgtgtaatatcacactggtagatacagtgaagctgctctgtatgatatcacagtggtagatatagtgaagctcctctgtgtgatatcacacttgtagatacagtgaagctgctctgtatgatatcacagtggtagatattgtgaagttcctctgtgtgagatcagastggtagatacagtgaagctcgtctgtgtgatatcacagtggtagatatagtgaagctgctctgtatgatataacagtggtagatacagtgaagatcccctgtatgatatcacagtggtagatacactgaggctgctctgtatgatatcgcagtggtagatatagcacagctcctctgtgtgatatcacagt

SEQ ID NO: 763719 - DNA, 534 bp, Homo sapiens
tggatattagcattggctcccttttagtcctgctaatctctttagcaagtagttgctccacagcccactgcaaatttcccacacttttatgctcttcttcccttttaaatataagttccaactttacatcatttctttgctcctgcatctgaacataggatgttagaagcagctaggccatatcttgaatgcttttttgcttaraaatttcttccactagatactctaagtcatcgctcttaagtccaacccttcacaaattcccagcacgtagtcataatgcagccaagctctttgctaggatgtaacacagatgacctttactctacttcccaaaaactcttatttccatctgagaccttgtcagtctggactttactgtcagtatctctataagtattttggccaaaaccatttaaccagtctctaagcagttcaaagtgtcctttatcttcctgtcttcttctgagccctccaaactctttcaacctctgcctgttacccagttctgaagctgattttatctttatagca

SEQ ID NO: 763720 - DNA, 534 bp, Homo sapiens
tggatattagcattggctcccttttagtcctgctaatctctttagcaagtagttgctccacagcccactgcaaatttcccacacttttatgctcttcttcccttttaaatataagttccaactttacatcatttctttgctcctgcatctgaacataggatgttagaagcagctaggccatatcttgaatgcttttttgcttagaaatttcttccactagatactctaagtcatcgctcttaagtccaacccttcacaaattcccagcacgtagtcataatgcagccaagctctttgctaggatgtaacacagatgacctttactctacttcccaaaaactcttatttccatctgagaccttgtcagtctggactttactgtcartatctctataagtattttggccaaaaccatttaaccagtctctaagcagttcaaagtgtcctttatcttcctgtcttcttctgagccctccaaactctttcaacctctgcctgttacccagttctgaagctgattttatctttatagca

SEQ ID NO: 763721 - DNA, 571 bp, Homo sapiens
cttcccaaagaactactccaaacactctcctgctcaactcaacaactttcggtggctcctccttgtcttttttttttttttttttttttttttgagacaaagtctcactccgtctcccaggctgaagtgtagtggtgcaatctcggctcactgcaacctctgcctcccaagttcaagtgattctcctgcctcagcctcccaagtaattgggattacaggcgtgcaccaccacacctggctaatttttgtatttttagtagagacagggtttcaccatgttggccaggctggtctcaaactcctgacctcaagtgatccacccaccttggcctcacaaagtgctgggattataggcatgagccaccatgccaggcctctccttgtcttaataattatgggcaagggctctagatagtgttcccagycctttttgttctcagataagcagcctttccaacctctcctccagcctctcccttgcacatgccctggactctagcagaactctcagtcctatcctccaaactccgcaaacactgacagtatccctaagcaacttcaagacacagct

SEQ ID NO: 763722 - DNA, 644 bp, Homo sapiens
agtgaggtcccatgcctggcccatgaaaccattctttcttcctaggactctatgcctgtgttgacaggggctactacaaaggtctccaaaatgccttcaaggtctttttctcattgtcttggatattggtagttggttcccttttatttatgcaaataacatgctaaacatgataaatatcctgacttcaaaaatcatgcatattccatggcagacgggaggcaggacyagattgcagctccagacagagcagcatgtggagttttgcattgtgaattttagctccaggtctactgcaagaacaaaccagcaatttcgagagcacccagagaccctctgaaagaagagaactgttcttacaggacccaggagacactgcaaatactgtgagtgccccagctagggaagtgggaaacagagactctcctttactgaacacacacccccactggagaagctgaaggtctgtttgtgggagaagtttccaactttatatggagctgaatcaagttagccaagcgaaatacaggggtagaggaagcagcaaaaaggccctgggggttgctgggtccccaagcagcccattcctgcctgacaccacagggatccatcaggagggtggccagaggagcagcgcataaaac

SEQ ID NO: 763723 - DNA, 644 bp, Homo sapiens
agtgaggtcccatgcctggcccatgaaaccattctttcttcctaggactctatgcctgtgttgacaggggctactacaaaggtctccaaaatgccttcaaggtctttttctcattgtcttggatattggtagttggttcccttttatttatgcaaataacatgctaaacatgataaatatcctgacttcaaaaatcatgcatattccatggcagacgggaggcaggactagattgcagctccagacagagcagcatgtggagttttgcattgtgaattttagctccaggtctactgcaagaacaaaccagcaatttcgagagcacccagagaccctctgaaagaagagaactgttcytacaggacccaggagacactgcaaatactgtgagtgccccagctagggaagtgggaaacagagactctcctttactgaacacacacccccactggagaagctgaaggtctgtttgtgggagaagtttccaactttatatggagctgaatcaagttagccaagcgaaatacaggggtagaggaagcagcaaaaaggccctgggggttgctgggtccccaagcagcccattcctgcctgacaccacagggatccatcaggagggtggccagaggagcagcgcataaaac

SEQ ID NO: 763724 - DNA, 617 bp, Homo sapiens
gtcatattatttaatttgcatactctgactcattaattggaccaagaaagaatatttgaccaaaatccaccaatcaggttctgcctccagagaattttgaatggggacctagcaattatagttagcctagtttgtactgtggggccaattttcatcatgtgcttagagaagcaaaataagctggccaacatagaaagagaacaataaatcagagagggaaagtgagttgctagactcagcaactccaggaaaacagagagtggtttcctttgttgctggcatgtttcaaagtcttggttccagtcctacctgagatcccactgtactatctgactgtttggcaggaaatagccttgcacttatcccgtaatttcccccttttagcttaagctagggtggatgatttgtaataaataaaccctgactgtaatacatcctttcagcaagactgatctgcttgctgaccccaaaatgtcactgrcatttctaaaaatacaagtttatcatatcctttcaaagtcccaacaccccagcccaccttactgccaactcaagtcctttacacttaataacattttctccaatccttgtagccaacatgcttcagtaacaattat

SEQ ID NO: 763725 - DNA, 542 bp, Homo sapiens
tatcttttgtttctaaatcactagaacaacatctgctaggtgtaatttcattttctcacagtgaatgctgaagaaaattgcttcaccttcttgtaggcgaagtgcactactttgagtttgctgctagcccttttaaatttcagtcactaagtgtgaacctaagttttcagcttcacacctcttttcctagtatttaaatctgtcttaytgtcaatggatgctcattgtcttaaagctctgcataacatccaaacatagtgacccataagacttcttttgctcattaatctccaagtgtctctaatgtaaacctacaaaggaagaatttggtaactccctgcaaaataattaaatcaagactttatggtcctcaaagggagagtactccctaaagtaactctagcagcaaaagctcctcctttttcacttaaaccaaatatccattttctgtagcataatagagaattcatcaaatgaaataaattcttgtaacagcttaatctgatgttaaaagaaataagtaaaagaattaataaaaggga

SEQ ID NO: 763726 - DNA, 584 bp, Homo sapiens
tactgtagtctgggcaacaagagtgaaactccatctcaaaaaaaaaaaaaaaaaaaaaggaattaaggtaatatgattcttccatccttctctgagaaaaatttggcaagatctttctccgactctcttcaggttgacctgtgttcaggaacatgtaaagatgctgtattagacaagcatgaaaaattaaaccaactcacaaaagaaagacatagagcctccaagaaagaataaaatatccattgaaggtggaaaatrgatttgtgggtgaagatatggaagagcctttcatgtcgtgtttagggggaaatgaaaagaaaaatcaaaagggaaaaaagagagtaaaaacaaacagatttataagcagcttttattctgtgtgtcatttttagagtagagttgcagaaaagaatttaaaagttttgttgtgtgttatgaacataaacttgatttgccttttcaagagcttctactttaatacactcctgtcaagaactttcttcaaattgctcatgatgaatagaatagtgtgatgtttaccagcacaggctctgaagccaaagttccttgtataaatcctgggt

SEQ ID NO: 763727 - DNA, 644 bp, Homo sapiens
tatttagaaggcaacatttattcctcaaattgcatgttaaagatcttaaaaagggtaagtaagtcaaagagagattactcaaagtaaataaagcatatagaatgtctgggtgagcaagatataaagaaatgtcactgcaaacacacacatattttacaataaaaatataaaaggagaaaaaatattaagcaaaagatagatgaagatctyagtctgaaaaaaaaaaatcatccaaacactataagaaaaactcaaagatgtctttatgttacagaagaattcaaagaacacataaattttaggaaaaactactcaaaaatgagattatttataataacagagtgacattaaagaaatattattgaaataggggaaaaattaagaactaaaatggcattgttacaaaactgtatattgattataaagagtatcttaaaaatagagctaattttttatcatttctctggaaaaatgataattacaataaaagtagagaatggaggaaataggcaacaatgaataaaatcaatcaagaggaaatgaaggacaaagacaatccaacatcagagcaattggtgtcttttaaaaccatttaaagatatactagctgacatttctcctgaaatgaatctatagatcatagg

SEQ ID NO: 763728 - DNA, 623 bp, Homo sapiens
gatacagtctatgtcctcacagtgctttttttctaatgggggattcagacaactcaatagcatcctaattatcaggtaccatgattggggtgatgagaatgcacacagtacagacgtgtaacccacctaggagggtccaagaagtcgtcttgttggaagtgaccaccaggacagatagttgaaaggataagtagaagtcgtatgtwagttcgaaagacaaaggggttctgaagaaactaggaggatgttctaagtagttggaacaatctatggggaggtcctgaaataaaaaagaatatggcatagttgaggaagaaatttggtaggactggggataaagtgcatgagagaagatgctatgaaaaataggctaggtaaagcttggtttatttatttgtaccatttataaagagtttaccattttattgagactgtatcctaagggctgtaagacaccagtgaaattatttaagtggtagacagatagatgcaatctggctgtgatgtttaaagtgattagagggggccccaaccagaagcaaggtggccagactattaaaagagtccaagcaaaaaatgatgaaggtttgagttagggtagaaatgaagaaaaaagaaaaaca

SEQ ID NO: 763729 - DNA, 536 bp, Homo sapiens
actttccatccactactaaggaactactttattcagcatgagacaatacaggctgtgcctatgggtctccattatccataaccaaagagtataaggaaattcaactctgaacaccctctttctctcactacagataggaagcaacacaataagagatgcatgtcctgaaaagtgtgtggttttaagaacaacttactcaaaataagtagtyacaaattttaagacaatctttcttctggttgtagaaaaatggggcttgtagaaaatgctatgcataaatagtttaacatccatgtttgtctcattaccatctaaattttggtaatacaagttaagttcctaaggggtaaaaacatgttcaaatgccatctatactctttcataaactttctcttgggtgagtatttcatcacagactccttctcttagccacttaaaggtaaaaatataattttttaagaaaaaaaatcctcctatgtcatcagccaaagaagtggtaatagtagctgaataaacctatttactgaaaataaagg

SEQ ID NO: 763730 - DNA, 536 bp, Homo sapiens
actttccatccactactaaggaactactttattcagcatgagacaatacaggctgtgcctatgggtctccattatccataaccaaagagtataaggaaattcaactctgaacaccctctttctctcactacagataggaagcaacacaataagagatgcatgtcctgaaaagtgtgtggttttaagaacaacttactcaaaataagtagttacaaattttaagacaatctttcttctggttgtagaaaaatgggscttgtagaaaatgctatgcataaatagtttaacatccatgtttgtctcattaccatctaaattttggtaatacaagttaagttcctaaggggtaaaaacatgttcaaatgccatctatactctttcataaactttctcttgggtgagtatttcatcacagactccttctcttagccacttaaaggtaaaaatataattttttaagaaaaaaaatcctcctatgtcatcagccaaagaagtggtaatagtagctgaataaacctatttactgaaaataaagg

SEQ ID NO: 763731 - DNA, 536 bp, Homo sapiens
actttccatccactactaaggaactactttattcagcatgagacaatacaggctgtgcctatgggtctccattatccataaccaaagagtataaggaaattcaactctgaacaccctctttctctcactacagataggaagcaacacaataagagatgcatgtcctgaaaagtgtgtggttttaagaacaacttactcaaaataagtagttacaaattttaagacaatctttcttctggttgtagaaaaatggggcttgtagaaaatgctatgcataaatagtttaacatccatgtttgyctcattaccatctaaattttggtaatacaagttaagttcctaaggggtaaaaacatgttcaaatgccatctatactctttcataaactttctcttgggtgagtatttcatcacagactccttctcttagccacttaaaggtaaaaatataattttttaagaaaaaaaatcctcctatgtcatcagccaaagaagtggtaatagtagctgaataaacctatttactgaaaataaagg

SEQ ID NO: 763732 - DNA, 609 bp, Homo sapiens
tcaattcttttaactatggtcgaattaaatgccccaaatcacataaagatctatcctttaaagttatttttagttgattgaccaggtttacaactttctttagctcaccatttatgtatgtatgcatgcaagtatgtatacttgcatatatgtatatgcaatatcataacctctgcttaaccargggcattgtcctagaatttccttaaccccaaaatggaatatttgacctttccaaaaagttatagttaagtgaagaagatcttattatagcaccatattacttaccagagaaagataaacttgaataataaacaaccattagcatttatgagaataatccctctatttctatcctaatagaatattgaaataaattaaatgttatccccaaatacatttcccagccgttaaattctattttatttataaagaatatcattaaaatactctcaaataatagattcataatgtaatttattttactattattcaaatatttcttatttgcttaaagtacctatgtccctatggggaaacaaacatgaattccacttgtagcctgtatcagactaaatatgctatcagtgaatctgatcaatgcaaatt

SEQ ID NO: 763733 - DNA, 601 bp, Homo sapiens
gtctggttttgaactcctgagctcaggcaatcctcctgccttggcttcccaaagtgctaggattgcaggtgtgagccaccgcacctggccccaacctttttaactctcgtgcttagcagtagtgggacctatcttgcagtgaggggctgaaaagaaagcaggragatgggatgaccatatgccattccacagtcagttccagggtggttgcaaacctaagttatgaacacaggcaaccagcttggatttgaagggtaggctgaacaataaaaatgtctgtacagttctctagaacagttgcattaaccagccttggaaaggagaaagggcttctatttatgccaagatctaagcaaacagatgaagcagaagcacccagcttaggtgatctcaaggttctctcaggtatgtaaatggatgtggctttgtataaacataggaggaaaggctggggccgaccctaaacataaaatgtgcttagttcatctagacacacccaaatttcaatcatacatgatgaaataaagctctacactgccctaagtcatccgccagatttgactcactgcctcacattttgtctactctggcataaatagtg

SEQ ID NO: 763734 - DNA, 629 bp, Homo sapiens
tgttttgacttccaattatttataaagtattttaataatcactttagataaattacttctaacatctataacacccattctcttaacagtcaataaaaatctgaacgggaactacatgtacgaggtgtacatgaaatgtttcataaaatggctattgttattaaccttcagtttaacatatgagaaatttggagtactgagaggttaagtgacttgctgaagtcacatggatgataggaaccaaagtcatcctaactctaatactcatactctgtctaccatacaatgcttccctggatagacatgaaataggttctgataggtgggaatgaaaatctgagaacacgctttgagtgtcatcaataaagaagtatcctggagataggtagatagggatgtagaaaaaaacagcagaaatgaaatagcatggggttcaaagcacagaaatctgatatataagagcaaaggaayaatggctcaaaataaagatggcaacagagggatggtgaggaggggagggagtgtattaaacttgttaaatattaaaataaagatacttaaaaatgaaagtgtataaaatgaaagtcattaaatttataaagaatgaaataccaaatcagatataggta

SEQ ID NO: 763735 - DNA, 551 bp, Homo sapiens
ggggttgcatttgttgctctaaggtgatgcaaagatagactcattttaatatatattgagataaaataaagtaaaatttgaaagtacctgaagggcatcctgatattcagcctctctgcatacttgcacagcgtgtcccatggaatgtgaattttaataaacatgatatcggggcttgcaatagctggctgcaaatgatagtaagataggcaacattatttagaatcagagctgatgatatcatgccacagtttgatttgggaataaagaacattgtccccttgactatgcatgatcactgacactgatttaaaagaaatttatatggataaaaaaaatyttaatgaagaaagaccttgataaaaatgtaataatgacatcgtgtagaagaaataaccacctatgtgcattagtgcattttcttacattgatgattttcaacctgcagaatccccaatcagaacaatcaatcatgagccaattaaaaatctgaagttatttttgatgggctttttatcatgaccccattcctgttcagagggggaagaaaa

SEQ ID NO: 763736 - DNA, 587 bp, Homo sapiens
cttagagaacataaatactaaaaactcaaaccaattttatttcttgtgttacatagtactcaatccaggcattattttcctaaatgtatatttagtaatactgaaaccaaaaaataatccctaagttgtttgctctgggaaatacttgttcctagaatatatgactgcaaaccaactagaacagcttacttttcaaaacaaactgcttgctcagcaagactgctctagggccttcactctgttgtatccaccaacctaagctatttttaatggtctctgcccaattttcaaccaaattcctgccttataagacctactgattacccagtccaggccatgggaatcctttgaaaactgttgcctaacttcattcttctaaaacactacttagactatccrtgtggtattcttatttgctgtaaggaattttaataaatcagctttattgatcaacacattttcctcatggtcctcttaggggggcttttccagtacattgcccaagatcaatgaggagccaggacttgaacccaatttcttctgcctccaagttcatgttcataactattatctaccccatccttctt

SEQ ID NO: 763737 - DNA, 363 bp, Homo sapiens
gaaaaccccattttttgaggagaaatttaagctggctgcagaaattgcataagtagcaaggagcctaatgttaatcccaagaccatggggaaatgtctgcaggccatgtcagagaccttcatggcagcccctcccattgtgtccagaatttattccttcyggtgggttcttggtctcgctgacttcaagaatgaagccggggacccttgtggtgagtgttacagctcttaaaaatggtgtgtctggagtttgttccttcagatgttcagatgcctccggactttcttccttctggtgggttcttggtcttgctgacttcaggagtgaagccgcagacctttgcagtgagtgatacagctctta

SEQ ID NO: 763738 - DNA, 568 bp, Homo sapiens
ctcttacaatgaggcaatggagttgcacggacctcagctactctccagactggatttgaggcctgtggggattaggggctgtcctgtagcaaggattgctggtgtttgtggttgcaatggggaccactgaggatctttaacttatgttttctccataggaagaagtccccctgactctgagctaattctggtaaggaagagagagtggtagaagtagggtgtcttcctctctctctctatggtatccttggtgtctgtactccacataaattttaccattcccctggtgctgcctagcactctacttcagtcactttacttacaatatagttgtttatttsttgttttggttcctttttgttggggagggacgagtgccaggtaaccgtagtcaaccttctttctgacatcactctctacatatatattctattctatttatattatattctataaaaagaatataactttttcggatcatttgaatatttatctctgtatataggtcttgatttataatcagaaaaaaactcttagcttttaaaacatcctactatttatataaaat

SEQ ID NO: 763739 - DNA, 657 bp, Homo sapiens
agtcaggattgactatcatggctgtctagcaccacatacatcgtgccttgtcacataaaccatttcatttttaactatttatttattttcgagacaaagtctcactctaacacccaggctggagtgcaatggcatgatcacaactcactgcatcctaaacttccttggctcaggtaatcctcccacctcagcttcccaagtagctataactacaggtacacaccactatgatgcctggctcattttcttttctttttttttttttcagagatggcttttgggcatgttgcccagtctgrtctccaattcctcatccgccccagcctcccaaagtgctaggattacagacatgagccaccacgcccagccctattcaaatttttgtcttaatatctagcacatagagccactctgcaaacttaggatggcaatatctgcaactgatgcattaggggggttacaataacactgggaaaaaagttataaattacaaaagatgccataatgctgttgcaagactttctggggtatttgcaaacctgcatcatccaaggcccaaatgctatggctgactggcaacatcactgatgagctacaaaatcagttcaagcagaatgaattgttaaatctcaaactacagactacaaaaataaataa

SEQ ID NO: 763740 - DNA, 587 bp, Homo sapiens
taccaccatctttatgtatcctgtttctgaaatcttttccacaattattttattttttcatgaggataacatagttgtcctggaagagtttaaacaactgcaagatttggtttgttttgctattttcttcttttgtgtgggaacagaagcaatgcacgtgtatgtgtggtgtgtgtaggtttgtgtatctcttttcaaagaagtttctttagtacttaagtgaattgtagtggaaggwagtcatggctttggaatacaacctaatctagttctcaaatgtgacttcattccaggatgcaaacttattttagaagaatcaaaaactggatggcccaaaacccaatggttcttgacaagtcagcttttccagacctagaggagtcagactgctatactggccccttcagccgtgcacggattcaccagtgagttcccctcttttttcatactgcctacctttatatcttggtggggcttgtttatagaataaaaacacctgggaccatttccattgtttaccaaatacgtcagagaacttatcattgtattaaaatacacacttaacttataaacaacactaagtgaat

SEQ ID NO: 763741 - DNA, 655 bp, Homo sapiens
cgggttgtttctttacccaaaacctttatgcaagcaaaacaaaacttaacttggaggcagttttgtctgtcttgaaaaaaaatctagcctcaatcacaaccaggcaactagctgattggttatataactaggggtctcttctcagaccacacataaatgaggcaaatgactacgtgtagtcatcaggtaattactttgcttctgtcwtcaggctataaaagctcactgcttgtgccgctggagcagagctctctgaatttcttccagttttatgtgttgcccaattcatgaactgtcctttgcttaaataaagtctgtcaagttcattttgtctaaaagtttttcaagagtaagaaagaatgagacagagaaaaaagcaaaaacaagcatcagaattaagagatggagatagagaagaaatataatagtagagtaagaatcctgacagctccatttggattttcagaaccagctgttattaaagctaactagctctggacttttcagaggtagagagctgaataattttggatacatggacttaaaatttttttgttaggagaggctatgattggttcaaattagatttctgtcatttagaactgaaagagtcctgattaatataactacagtatactgttgaataagaatagat

SEQ ID NO: 763742 - DNA, 655 bp, Homo sapiens
cgggttgtttctttacccaaaacctttatgcaagcaaaacaaaacttaacttggaggcagttttgtctgtcttgaaaaaaaatctagcctcaatcacaaccaggcaactagctgattggttatataactaggggtctcttctcagaccacacataaatgaggcaaatgactacgtgtagtcatcaggtaattactttgcttctgtcttcaggctataaaagctcactgcttgtgccgctggagcagagctctctgaatttcttccagttttatgtgttgcccaattcatgaactgtcctttgcttaaataaagtctgtcaagttcattttgtctaaaagtttttcaagagtaagaaagaatgagacagagaaaaawgcaaaaacaagcatcagaattaagagatggagatagagaagaaatataatagtagagtaagaatcctgacagctccatttggattttcagaaccagctgttattaaagctaactagctctggacttttcagaggtagagagctgaataattttggatacatggacttaaaatttttttgttaggagaggctatgattggttcaaattagatttctgtcatttagaactgaaagagtcctgattaatataactacagtatactgttgaataagaatagat

SEQ ID NO: 763743 - DNA, 421 bp, Homo sapiens
cagcagccacgctaatcgtttttaactggctgatgggtgcccggttattttcctccaattctaaggaaggataggacagaatagcaagtgaaagtggttcaatattactcaccgctttggagaagcgccgtacgggccaccaaatgttaccggygggtctttgttcttagagttcccaagatggtggcaggccactcccaagatggggcgggctgctcccaagatggcagcaagccttttgttctctgacctggggttcttggcctcacggattccaaggaatggaaccttgggccatgcgatgagtgatatagctctattagaagccatgggtcacagaaggaaccatggaacccagtgactagtgttcagctggattaggacgaacctgggcacttagccgtgcaggaacaacggcaag

SEQ ID NO: 763744 - DNA, 602 bp, Homo sapiens
aaagcaatacatgggctcatgccgagtggaatccatccagattgcagtcacgatgatggtgtttcctaacagggctatgatgtacatggcactcagtgagatagccagccaaagatgtgaagattgcagtcctgggatacccacaaggaggaaggaggcaggggtttccattgtgtggttataagctggacccagcatcacaagtgagacttttttyctgttaatgcacaaatgatgtatgagaagaatgcaatcccgtaagatttgttgacacatgtggtgctgggaaaacctaaggatattctcagcttggtggtaatctcaggatcaaaaatgtggcatctgacaaaattatcctgtaccacttttatcctccttaatattcttcccttccaaatttgtattcattgttcatggatcagctcatggcttacctcctttggaaagccttttctgctttcttccttccccattccataccctttcatctgagctttcatacaatctcccatcgtgacctcagagactaaattgatcattgtaatgctctccctagactttattgtgtgcattaaggtgtatgtctcttgtttatgatctta

SEQ ID NO: 763745 - DNA, 591 bp, Homo sapiens
ttttatagttaatcccaagagattatatgaattaagtaaggtcatcctcctagcggcagaacatgagatgtagctcagagctccaaattccattccagggctctgtccttccctcaatataggacccagggcaggctattcttgtgttttacccctgcccccaggttctctctggacctgctccttgggaacgtagtatggagcacaagggaaggcatctctttaaaagcaacccaacatagggcctgtgattaacactactgtattgtacacttaaaaatgtgttmagagtttagctcttacgttaagtgctcttaccacagaacgaaaaacaatagcaacaacaacaacaataaaggaggtgagaggaaacttttggaggtgatggataagtttaccacattagttacggtgattgttttaagggtatatcacttatgttcaaatatatcaagttgtatacattaaaaatctataactttttgtatgtcaatcagacttcaatgaagtggcttaaaaaaaaaaaaagaaaaagaaaatctcacatcactctcgtgggtagaacctgtgggaactgggacagattggctt

SEQ ID NO: 763746 - DNA, 632 bp, Homo sapiens
tgtctttactaaaaaatacaaaaattagccaggcatggtagtaatcccagctacttgggaggctgaggcaggagactggcgttaacccgggaggtggagcttgcagtgagccgagatcaccccattgcactccagcctgggcaacattgcaagactccgtctcaaaaaaaagaataatctgtcagcaggtcagcctggacaatgaagattgaatggcaagggcaggggcatctgttaactaggttactgctcataatcttactgtctttccttgttttttgttaaggtgactttcttgaaagcataatttccaaatgcatattttacatctggcattaaagtaaaatccattaaatgtgctttggtatctactgttgtattaatcctttctcatactgccataaagacatacctgaggctgggtaatttataaagaaaagaagtttaattggctcatagttccacaggctgtacaggaaacatggctagggaggyctcaggagaatcacaatcatggtggaaggcaaagaggaaggaggcacgtcttccatggctggagcaggaggaagagagtgaagggggaggggctacagactttaaaacaaccagatgtcccgagagctccatcagga

SEQ ID NO: 763747 - DNA, 604 bp, Homo sapiens
gccaagggatggtggttcagaaccactgcttctgatcaattccagtgttgccatcagggagagatttgaaggaaaccagtaccagtgggatggagtttggttggtcacagaaaaatctggcagcgatggaactatcagagttcccttggtgcacacagccagtttcctggcaagagcataagaagagtaatgaagagaagacacaggatggatgacacmtaagtctgatgctctgatagcagcagaggggattctgagggcactggggtccacgagccattccagcccagagaaccaactatctgcctggctgcatcactaagagctggagaaaaacgcaggcaagaccacttattcaccaattccctccccactgtctcctcccaaagaaaggaaatgaatggtcagtcacctccaaactaccaccacctggaggcaatttgttggcccttatctttccgacataaggctgcttttctcatgagtcagttaccagtcagacacaaggctggcacagttcctaagcagcccaccaaaacctccttgtctacaggaagtgggcagtgagagtatctttcaactgctgctgcttgagccacagagt

SEQ ID NO: 763748 - DNA, 605 bp, Homo sapiens
tcaaagaggatatacaaatagaaaataagcacaagcaaagatgttcaatataattagccattagggaaatggaaaataaaactacagtgagatctcattacatatctatcagaatggctaaaataaaaaacagtaccaccaccaaatattggtaaggatgctgggaaattggatcacatgtacgttgctgatggaatgtaaaatggtatagctgctctggaaaatagtttggcagtttcttytaaaactaaaaatgcacttatgatatgatccagcaattgaactctggggctttatcctgaagaaatgaaaacttacgtttagaaaaaaaaccagtatataaatgttcatagcagctttattcataatggccccaaactagaaacaacccaaatgtctttccacaggtgaatggttaaacaactgtggaatatccgtaccagggaatacagggaatactactcagcaataaaaaggaatgaacaaccaatacgtgcagtgagttggacagactccaggaaattacgcttagtgaaaagccagcttcaaaaggttatatactgtacaatcccatctatataatattcttgaaataatatatttat

SEQ ID NO: 763749 - DNA, 608 bp, Homo sapiens
tagttatttgcgcattatttgggattttttgtgttaaacaatcatgtcatctgcaaacagaggcagttcttttccatttttatgctttcagcgttttttttcttgccttaatacagtgtctgagatctccactagtgagttgaaaggaaatggtgagagcaggcatccttgctaggaccacgtatatctgtggtcccagctacttgggaggctgaggtgaaaggatcacttgagcccaggaggtcaaggctgcagtgagccatgttcacgctactgcactacacactgggcgacagagagagaccctgtctcaaaaaaaaaaaaaaatttaaaagccatactggtgactgtctaraagtatttcattgtgatttttgttttgttttgctttctttttttgttgttgttctcattgtgattttaatttgcatttccctgatgagtaatgatattgagtgccttttcttctgctattggccatttgaataccctcttctggggagtgcctgttcctgatttttacccatgtttttcttggattctttgtcttttttcttactgatttatagggtgttttttttttccagtattctgaatataagtcctat

SEQ ID NO: 763750 - DNA, 577 bp, Homo sapiens
tctttttatttttttagtgatgtgattgattttccaacattttattatacagcaaagttgaacattctccagtgagctcacttatacccagtacctacatgctgtgattctcattttactgtatttgtcttatcatgttatctgtttatttctctctctccctctcttcccccrtctatccacccatccatccattttttcttcttttaaataatttttttaatgcctataatcctagcactttgggaggccaaggcgggcagattgcttgcagccaggagttcgagaccatcctggccaacatggtgaaaccccgtctctactaaaaatacaaaaatgagctggatgtggtgacgggcacctataatcccagctattcaggaagctgaagcatgagaattgcttgaacccaggagggcagaggttgcaatgagctgagattgcgccatgcactccagcctgggcgacagagtgagactatctcaaaagaaaagaaaagaaaagaccagcctgggcaacatggcgaaaccccatctccacaaaaaatacaaaaattagccaaatgtagtggctagca

SEQ ID NO: 763751 - DNA, 577 bp, Homo sapiens
tctttttatttttttagtgatgtgattgattttccaacattttattatacagcaaagttgaacattctccagtgagctcacttatacccagtacctacatgctgtgattctcattttactgtatttgtcttatcatgttatctgtttatttctctctctccctctcttcccccatctatccacccatccatccattttttcttcttttaaataatttttttaatgcctataatcctagcactttgggaggccaaggcgggcagattgcttgmagccaggagttcgagaccatcctggccaacatggtgaaaccccgtctctactaaaaatacaaaaatgagctggatgtggtgacgggcacctataatcccagctattcaggaagctgaagcatgagaattgcttgaacccaggagggcagaggttgcaatgagctgagattgcgccatgcactccagcctgggcgacagagtgagactatctcaaaagaaaagaaaagaaaagaccagcctgggcaacatggcgaaaccccatctccacaaaaaatacaaaaattagccaaatgtagtggctagca

SEQ ID NO: 763752 - DNA, 609 bp, Homo sapiens
ttgtcttctggaaaagccaccagactggcagtctgcctgccaagccacctttgacatccatgccaagatgttccattgggccttccctcccagtcccaagtgtcttagtgccagatgggggtggaaacaaagggcaggaaacatccgcccctgcagaggctgcagaaccctggggggttgtgggaaacacgttagcaccacctgagaatgttggcaccgaagcagccctcctccctgcctccaccctccccgtcttccttcccctccccatgtggcctggccagaacctcttaaatccaggcccttagacctaagggaaggctttctrctcttcaacagtagaacagtttctgtcaccaaggcagggcagcagaaccatcacgttgtcccaggctttcccttctcctcgctggggcgggctgccttgccgggtcatatgtctctctgctttcctacccaggagcttttcaggggaaagaaagtgttttgctagatggtcaggaaagggtacaactgaaagaggctgtggacatctcaggagccccctaagagccgtaaggtgcctcagacgccgtcccaggctgccagggttttttgtcaccaggactg

SEQ ID NO: 763753 - DNA, 492 bp, Homo sapiens
ggtctcatgagacttattcactactatgagaacagaatggggaaaactgcctccataattcaattatctccacctggccccgcctttgacaggtggcgatttttacagttcaaggtgagatttgggtagggacacagccaaaccatatcagtggctgaacctctctgtgctctggtttcctcttctgttgaatggacacattccagcacctaccccaaggctgaggatcaagtgaggggatgcacagagtgtgcttagaaggaacctggcattctgcaagcatccaacacatgtggctatgacgagtagctgttgtcattattgttattcctygatattcttccgtgtgctttcccttaaggccagttttgttgcaccggcctgtgataccagggtgcagagggcacctgacattgctcagggaaagctagctgccacacagtagtcaacctcaaatatgtccttgatggcaaatctacctgacccagatgc

SEQ ID NO: 763754 - DNA, 472 bp, Homo sapiens
cttcacaataaaccttgctactgctcactctttgggcccgtgccacctttaagagctgtaacactcactgcaaaggtctgcggcttcattcttcattcactggaagcaaccaacttgggacacaccaccatgcctggttaattttttgtattttcagtagaggtggggtttcactgtgttagccaggattgtcttgatctcctgacctcatgatctgcctgcctctgcctcccaaagtgctgggattacaggcgtgagccgctatgcccggtgaacacrtacattttcaacagaagagcaagagagcatagaacccagaatagcagaggcatataggccccgttttgcaggagtcaaataacttaattcttagcacaatcctgtaagatgaattctgttataatcccactctctagataaagaattcaaggcaccaagagtttagttcatgagcagtaagagatttgggccc

SEQ ID NO: 763755 - DNA, 481 bp, Homo sapiens
ttaaaaagtttaagtcttatgatttgagatgattttttttttgttttcatgcttctacacagcttgaaatttttataatcggcattatttttaataaaagccgaagttattaccaaaacacatagggccttatatctccaaggagttggcagtggtgttggctgatggaggctaatgcacctttaaggctgcaagcttccatgcgaccatcacatgctggtggacagggagcctcggcaaggagactgaatttattcacaggccgctggtaggctggagaggyggggaaagcggaggggagtaacgatgtaatccagcaggaaatccataagcagggagggtcagatgagccgctgagtgctggggagcagggcagacaccactgcaaggttgacgacagtaagtgtccatcagccaacgagtgaatacataaaatgtgcatcccacaatggaagaggatttatccacgaaaaggaaggaa

SEQ ID NO: 763756 - DNA, 574 bp, Homo sapiens
cccctgtctcccatggggagctctctgcagacaggatgctgacttgggactgtctgtgtccacagcacctagcacaggactgtcagcttgtaagcactcattaagtgtctattgacttgaagtaagtttgtaacacagtataagaaaatttgccagccacctccagagtctctagctatgacttttgctcccccgtggcaatgctgttgcatgtgctacttaataagtgtatttgagtgttttatccaaatagaaaatcacacctttacacagtaattgtgctttattgggttttgacaaaggagcttccttcctgccctgaggtttgaatgtcaggatcaatattagaagcactttctccagaggcgaaaagttaaacratcagccagtgaaactggtcattttagatttcctgggtttggaaattggtgatgatttatagatgctatttatagctttcattgagtgaaaatatagaaaggcactacttttctctgaaaatttgcaggaattttgcctgtgtattaaaggacctgctctttctatgagtaaaatgtcaagctgaatactccca

SEQ ID NO: 763757 - DNA, 633 bp, Homo sapiens
gaatgaaaatgagttgttatgtttaatgttttccaatggaagaatcttattttacgatggcttcatgtttcagaaaaaaaccaggggttaaattacattatgtagcatggtttaaaattcagggtagcagaagagacatttctctcatggaacagattaatacaagacctaatagaattttctgaccctaaaaaccaccaagagaagatttcatttatttctcttctgtatataaattttacatattataaaaattatttcagaaatgttattgccaacaaaaarcataaaatatagtatgaactaagataaaatggcagaataccatttgcaaatgattaatctagcctaacattgctttttaaaaaggccaacaactaggtttcatcttcagaatctgctttccaatcccagtgagcttgctcagttatgaatgcaacatccaagactgctggtttcacctccaacatgtgaatcattttaaagtcaccactcccattcataaaacaagaaaggagctcaacaaactgaaaacccacgacttttattatgcacatcagaaactgtaggtcacagcacagttacccccaaacctggagagacagggaaatatagataatcacaattaatgtc

SEQ ID NO: 763758 - DNA, 633 bp, Homo sapiens
gaatgaaaatgagttgttatgtttaatgttttccaatggaagaatcttattttacgatggcttcatgtttcagaaaaaaaccaggggttaaattacattatgtagcatggtttaaaattcagggtagcagaagagacatttctctcatggaacagattaatacaagacctaatagaattttctgaccctaaaaaccaccaagagaagatttcatttatttctcttctgtatataaattttacatattataaaaattatttcagaaatgttattgccaacaaaaaacataaaatatagtatgaactaagataaaatgrcagaataccatttgcaaatgattaatctagcctaacattgctttttaaaaaggccaacaactaggtttcatcttcagaatctgctttccaatcccagtgagcttgctcagttatgaatgcaacatccaagactgctggtttcacctccaacatgtgaatcattttaaagtcaccactcccattcataaaacaagaaaggagctcaacaaactgaaaacccacgacttttattatgcacatcagaaactgtaggtcacagcacagttacccccaaacctggagagacagggaaatatagataatcacaattaatgtc

SEQ ID NO: 763759 - DNA, 634 bp, Homo sapiens
cccagcccactaagaaaagtttgcaagtaaattctgcctgttgactgataggttcaccttcctatcagggtcagttgaagaaagtgtggaaggtagattcttagtcacagatgtgggtacaactaaaactagtgctaaggactcaatattcttctggtgacataagaaaagtatatgaaattaagaaataggactctaactccctttgcacgtgtatctttcttatcagaagacagcagcagagccgtgctaactcgattttaccaacaagtttagaaaacccagagatgttcaaggygacgtctccttggcagttgtcggcaaaatttcctatgaattactgggcatgaatttccttccctttgttaccaggagtcaagcatttaagtataaattgtcaatcggtgtggatgttattgcctaattttgtctttttttacacctataatttaaacatttattttttctttctaattggatgtgtggcatctatttcctgttgacttcgctatagataaagctttgttcttaaccttttgctctactatgtagattctgatgtcaataataattagagagttctttcttcttcatttctgttttggctcgcccagtccagaactcacattcttag

SEQ ID NO: 763760 - DNA, 378 bp, Homo sapiens
atgtgcttgtgaatggctaaaattacaatgctgagataagtgtgtgtaataaaataattgcaccccgaattgaagaatgtttcactgtttattttcatgtttcaatatatgacaccctgtggtggaaagatgtctttatgctggaatatgaactcttttcactgctgaagtaagtccaggaaaaataaaatcacaaggaaaacagagagactagaacatgccwatgataccagcaaccatcccaaacgtgggccagatatttaaatgcagtgcattttaccttgtcctctcgaaatgcctcctcccctttcatttaaatatttcagagttcgatggccgtgcgtttaaaatctacacctttgcatgcttttacttgaa

SEQ ID NO: 763761 - DNA, 618 bp, Homo sapiens
catacactttaaaatttgtgtatacacaatggaatactattcagccataaaaagaatgaaatcctgtcattcatggcaaaatggttggaactggaggacaccgtgctcagtagaacgagccaggaacacgaagttaaacgcctcatgttctcacttattcgtggaagcttaaaaatgctgatctcatagaagtaaaaggtagaacagaagatcctagaggctgggaaggattggagaaagggagagatagggagagatttgttaaagaatacaaaattacagctagaygggaggaataatttctagtgttctataccactgtaggatgactacagttaacaataatatatagttttaaatagctatagggaggatattgacaaggaaataataagtatttgagatgatggagatgcaaatcaccctgatctgatcactgtaaaacatatgtattaaaatttccctgtttacccccatgaaggtgtacaattattatgtgtccatgaaacataaataaagtaaatttttaagactccaacaaatgctgaagtaggaaatctatctgtttcatgaggtaattgacatcaggcctcaggagaagcaggaatgctcagcatg

SEQ ID NO: 763762 - DNA, 602 bp, Homo sapiens
gactattaaagcaacacatgaattcagattgaatttttttttcttcaaggtttactccacaaatagtagattccccaggagaattactgtttcatgtgcaggccctgggcaagcagtaatcaattgtttcttaagaactttgttccttgaaaaagggaaggttaataccccatttctcactctgatgataattggcagaatgccatggctgagttgtgccaatattaagggaaagtgagagctaagaagcatgaatttattttgagggtgcttagctcctttaagggcaggccttggtgaaaatagtctttactccattttctttatttccccttttytgcaaaaaaaaaaaaaaaaaaaaaaaaaagaatatttcgctatgattctttggtttagtaacctgtatagtttatctccctttttaaaagactgccatattgctttttttggtttgccttatataatggtaaaaagagtcatgcatttgttcaattatactgcaatatcatggaaccctttcatccttcccataacttggttatctatagccaaagttgaaacaccctgtaaattgcctttacaaaatgaatggcatatcaaag

SEQ ID NO: 763763 - DNA, 533 bp, Homo sapiens
cccactctggccatgcttgaggagcccttcagcctgccactgcactgtgggagcccctttctgggctggccgaggtcagagctggttccctctgcttgcggggaggcatggagggagaggtgggggcgggaactggggctgcgtgtggtgcttgcgggccactgcgagttctgggttgagatgggctccatgggccctgcactcggagcagccggctggcgccacgccaggcagtgagaggcttagcacctgggccggtagctgtggagggtgctccgggttccccagcagtgccgggccggcgcttcgctcaaattctcactgggccttagctgcctcccygtggggcagggctcgggacctgcagcctgccatggccgagcctcccaccaccgtgggctcccgcatggcccaagcctccccgatgagtgccgccccctgctccgtggcaccgaggcccttcgaccacccaagggctgaggagtgtgggcatgtggcgtgggactggcctgcagctccacctgtggccctgg

SEQ ID NO: 763764 - DNA, 590 bp, Homo sapiens
taaatatttttagcagctcattttttttcttaccaatgggctctccatttttttttccttttttaacctgaagttctgtacttaagcaggatatttttgacaaggcattcttatagtcagagacaatattagtgtaatgatggcctgggacaagagctggtagcaagaacagatggtctacgcaaaagccccccccaaagggatatgatgatgccatgtgtgtgatagctgttttagaagtccaagagggtagcatgctgcagagattaagtggggactctgaaaccagactatgtgacctgaactcaaattgattgatttasccagtgaatttaatagatgggcctcattcattttgaataggaaaagaaacctgctgcatcttccctattcatgagctcattctccaatttaggaaggtcgcctcatgcttaaagcaaaaaacagcctcctagctgggaagcaaaggtttattgcagtactcagatgttaatgttttctgggctcagactatttttatttggcagcacagacggtagtgtaagcacagatttcttcagcagattttattatagcaggtgtgggatcct

SEQ ID NO: 763765 - DNA, 576 bp, Homo sapiens
attggagatatttgacatctgaacaatattgacactttcaatccatgaatatgttcacttatttaagtcttccttagtttctctcagcaatgctttgtaattttcagtggacagatattatatatgtcttggtagatccattcttaagtgtttcatgtttttgatattattgtaattaatatttttaaattttctatttcagattactcagtgcaaagtatatagagataraatttatttttctatattgatcttgtaacttttcaaattgataaactctcttattagttttaataacttttttgtaaaatccatggggatttacaccagacagtcatgttgcttaaaaataaggagaatttacctatttttttctaatttctatggtttttgttcctttttcttaccttattgtcctggacagaacatccagtacaatgttaaatagaagtgagtagggtgatgtccttaccttgttcttgatcttaggaagtaagcgcagtatccaaaaaatgatgttaggaccaggcatggtggctcatgcctgtaatctcaatactttgggatgccaaggca

SEQ ID NO: 763766 - DNA, 576 bp, Homo sapiens
attggagatatttgacatctgaacaatattgacactttcaatccatgaatatgttcacttatttaagtcttccttagtttctctcagcaatgctttgtaattttcagtggacagatattatatatgtcttggtagatccattcttaagtgtttcatgtttttgatattattgtaattaatatttttaaattttctatttcagattactcagtgcaaagtatatagagataaaatttatttttctatattgatcttgtaacttttcaaattgataaactctcttattagttttaataacttttttgtaaaatccatggggatttacaccagacagtcatgttgcttaaaaataaggrgaatttacctatttttttctaatttctatggtttttgttcctttttcttaccttattgtcctggacagaacatccagtacaatgttaaatagaagtgagtagggtgatgtccttaccttgttcttgatcttaggaagtaagcgcagtatccaaaaaatgatgttaggaccaggcatggtggctcatgcctgtaatctcaatactttgggatgccaaggca

SEQ ID NO: 763767 - DNA, 604 bp, Homo sapiens
tttagtgactaatcactcttacccacagtattgtcttctttatcttattagtacttatctcttactttatttcattactgtcttctgtgttcccaatgaaaatgtaagtgccctgagagcctgtccattttctttactgatgtattcccagcacctaacacagtatctggcacatggtggatatgcaataaatatttttgagtaaataaatgatattctctgtatcttcactcttttagaagatctgacatggaagtagttgacttctattaaactcaatagataatactcaatagataacaacccaaaacaaggttgcagtagataataacccaaaagtaggattgcctaccaattcttttggtcatctaccatataaatactaactatatccaacagattwgcttccagtgaaactgtttgatcagatgaagtatggtgccccaggatcacaaaaacagttactttatgaattaagatatcttaaaattgtgggtgagattttctttcttatttgtctttcatttccaataatctaagatcttgacaacatgaaaaacatcaagagaaagtcatgctggttcagtaggaatgaggaaccaat

SEQ ID NO: 763768 - DNA, 651 bp, Homo sapiens
aacgagcattatctgcaaagctcatgttcttgtacactatactgcctaatgaaacactaggtcctaaaagctaagactaaagatctgagcttagggctaacccctacaagattctcacagatctactttattaaaacatggaagccagagagacagcattgtcttccccaaacacagacactcactaggcatagttgtaggcactagaaccacagacactggttccaccattgtctagctccatggcagagagagagccacaactggggaggatcccagtagctgactgtcagccagtcaaaacctgaatgactgagaggtggataaggaacacgaatgtwctgaaactgggaacttgagtccactcagcacccttgtgagtcaaaggctgctatagccaggggatgctggttttccaagtttcccttcccaagatagtctgagattagagagtgctttgactagacaaaacttagaaccatttctgtgctccctcaagtgggaacatttggaaatgccattgttatttaggaacccagaagggatcacaacaattttcatctgctagcatcaacagtcttggctccattttctctgggtgatatctccaaaataaaaccatacttcatccccatagcttctgtagtaaca

SEQ ID NO: 763769 - DNA, 592 bp, Homo sapiens
gccagtaatctaaccatgtgactctgggcaagttacttcacttttccatatctgcacctgtaaatggaagggggattgaactagatgatttctgaagtcccttcagttctgacattctaccctatacccaaaggcattgtaagatcattaatgcccctccctcccctaaccttacttaccctgagacttctggcaagggtgggagaggagggagcggaataaggagtggctctctgtgactcctgacaaggttcaggcttgccagtttcccaaggtttatgctttctcctttaatcaagagactctgcctcttcccttcctatatttttgcaactccatytttcttccacaccaaaataaaggaggaataagaaagccgcactcttaaaagaagccgatcctttacactctgtggaatgccagctgctaatgttgtgccctgttcaaacaacagtgcactggcagtagagaggtggggtatggcggggctacccctttactcctcagctaggtgcatccttggcttactgtggcccatccaaggagggggctgtcccacatggtcgctgcaatgaggcagtcatctcattgg

SEQ ID NO: 763770 - DNA, 586 bp, Homo sapiens
cagaacagccccacacagccactgctcctttcccagtgggtaccataggcccattcccctgaggctggtccatggcaacagggactctagcaggagggagggaaatcaaagtacctgtggtgaactcagcaggcttcttgaagcgggtcargaagatgtggcagaggatgtacagtgttgcaaacagaagtgttgatatctgtagcagaatatgagctgggatgagaagctctaaccttcagcacactccacagccccaagggcctctctgttaattccaggccatcacttcctcaagataaggctccatacttccaagggttccatctggaagtatgttctgttctgatcccccaggtacttccttctagtcagggccccaggggcctcaaagaagggccagacaggggctgccccatgcacctggggaaacagcaacatgcccagccctacaaggacttcattgggagaaaatagcttcagcccaactctggttggtaaatgggcaaagaaaactcctagaaatgcacatgcacacgcatttcaaaccagctacagaaccagagggaatttactccgagcacat

SEQ ID NO: 763771 - DNA, 596 bp, Homo sapiens
ctacctggaaccccattatgctttcacctccttgactactgagctcaagggtcacaaaggtgagggacatgaagagtcaacttctatatgtaaggaagtctggactactacagaaatgctgctagtatacctccagcttctgaaagtgctgtgacaaaaccccagaaagtttgcacgactgatgcttttagtggagtggtgaggaaagaagtgatcggaaggcagcaaagtcagtcagaagtggccaaagaatagaaaacatttactgagcgcctactccacatccagcacaatccttctcaaccatcctgtcacggaggtatcattatccccagatctagctggcttctaagccaaatcatcatcgcctattttgttgatggtgaaaggtgctgcaattgggaggtgttgcatggccaagtgaatatgcccacctgctgcaccaagatggtgcrcattgccgcttgaaggcaagtcatggatttttttttttttgagagttaggaggggcctcaaaggaataaagataataaagggaggaagtgagggttgagaggtaagcctcaagcctagaaagttacttacaggatgtagtt

SEQ ID NO: 763772 - DNA, 618 bp, Homo sapiens
attgtcttgaatatttactttctctctaatatccttatgatgtaacataaaattattaactttttatcagtattaagtattattaccactacatcatagtatttaagttatgtgacattacttaaggactttacattctcttctggggaagggattagatttttggttatatgcaagatagctgtattatgttatatggaatgaccttattattgtctttatttgtgtatgggtgccaagttgataaagggtcagyatttgctggttaattgtatgtgtcaacttgactgggcttgaccaaatagctggcaaaagattatttctgggtgtgtctgtgaggatatctccagaagtgattagaatttgagtcagttgcctgagtaaagatcattcctttcgcaaggtggcctggcattatgcaaccttttgagcactctaatgaagcaaaaaagggagggcaaattctctctctcctattgagctgggacatccatcttctgcctttggatgtaggagcttttggtttttataccttctgaatccagaacttataccctcatccctccttccccacaacccctggttctcagcttttcagacatgggctggaatttacac

SEQ ID NO: 763773 - DNA, 618 bp, Homo sapiens
attgtcttgaatatttactttctctctaatatccttatgatgtaacataaaattattaactttttatcagtattaagtattattaccactacatcatagtatttaagttatgtgacattacttaaggactttacattctcttctggggaagggattagatttttggttatatgcaagatagctgtattatgttatatggaatgaccttattattgtctttatttgtgtatgggtgccaagttgataaagggtcagtatttgctggttaattgtatgtgtcaacttgactgggcttgaycaaatagctggcaaaagattatttctgggtgtgtctgtgaggatatctccagaagtgattagaatttgagtcagttgcctgagtaaagatcattcctttcgcaaggtggcctggcattatgcaaccttttgagcactctaatgaagcaaaaaagggagggcaaattctctctctcctattgagctgggacatccatcttctgcctttggatgtaggagcttttggtttttataccttctgaatccagaacttataccctcatccctccttccccacaacccctggttctcagcttttcagacatgggctggaatttacac

SEQ ID NO: 763774 - DNA, 618 bp, Homo sapiens
attgtcttgaatatttactttctctctaatatccttatgatgtaacataaaattattaactttttatcagtattaagtattattaccactacatcatagtatttaagttatgtgacattacttaaggactttacattctcttctggggaagggattagatttttggttatatgcaagatagctgtattatgttatatggaatgaccttattattgtctttatttgtgtatgggtgccaagttgataaagggtcagtatttgctggttaattgtatgtgtcaacttgactgggcttgaccaaatagctggcraaagattatttctgggtgtgtctgtgaggatatctccagaagtgattagaatttgagtcagttgcctgagtaaagatcattcctttcgcaaggtggcctggcattatgcaaccttttgagcactctaatgaagcaaaaaagggagggcaaattctctctctcctattgagctgggacatccatcttctgcctttggatgtaggagcttttggtttttataccttctgaatccagaacttataccctcatccctccttccccacaacccctggttctcagcttttcagacatgggctggaatttacac

SEQ ID NO: 763775 - DNA, 422 bp, Homo sapiens
agaattccctttctatgctctttgtacgagctgcamtttggtttctcatacttacattttgtgaaggtttctcataaaatggggttttctagcattatctgggccatttatgtcactatttctatctctctctctgtgtctgtttctttttgcattagagtgaaagagtacaaaatgtaatttgtccattagtaaaaaattatgagtccaggttggcaagggcaaatggagacctcaacaataggtcaattgtgatgtaattaattacagtcatgtagcttggagttcaggctgatgacgattcagttacacatcccagagagagggagaaagagaacacagactgattctgttccaaacagttaacagaaaatgtcgttgtgccttattctgcttacaagtgaaactcttgaaaaatctta

SEQ ID NO: 763776 - DNA, 588 bp, Homo sapiens
agattttttttccaaacaatttttaaaagccaactttacctcaaagggaaagattcagtacttgctagatagtagactactgatggctgctagtcacagaaaagatcagaaatttctatttttgcaggatacaaatgcttagtgtatctttatattttaaaatttcttcataaaatttgccatggtattatgactaaatctctgttatacaatatacttagggttactctcatttattgtaaagatcctattaatttagaaaatctatttcatgaatttggagctgcaagttataacatgtcgaaatgctttggggtgaaaagcacagcaacaggtgagcatgctattatttctcctttgttttgtacaaagaggtgttttgtcccactctgcccataaaatttgttgtgttcaagataygatacgggcaagtgaagacactagttttcattcatatgttgcattaatgtattactaaatttagatttccttcttctgtgtttagaaattagcagaggtgacagttattctacttgtttccattaccacaaatgaatccacttatgcattccctacggtttgcactgc

SEQ ID NO: 763777 - DNA, 601 bp, Homo sapiens
aaataataagaaaaataaatgaagtattttacatttttgtaatgagtctttaaaatttagtgtgtattctatgcttaaagcacatcttcattcagacaaaccacatttatttacttgttttgttatttctctacaatatacatgggagcacaaaggacattgtgytaagtgaaataagccactcacacaagaactaatactacagtattccactcacatgaggtctgtaaaatagtcaaactcatagaaacagagtagaagtgtggcttccaggggttggggaagtgagaatggggaattgctgttcaatgagtatagagtttcagttattcaaaatgtatacattctagagatctactgaacaacattgtgtctatagttaataaccctgtattgtacatttaaaaatttaataagatggtagatctcatgttaaatgttcttactacaattttgttttcccttacaacttttattttaggttctggggtacatgtgcaggtttgttagatgggtaaattttttttttttagacggagtttctctctgtcacccaggctggagtgcagtggtgttatctcggcttactgcaagctcgacc

SEQ ID NO: 763778 - DNA, 496 bp, Homo sapiens
acaccatttattaaacagggaatccttttcccattgcttgtttttgtcaggtttgtcaaagatcagatggttgtagatatgtggcattatttctaaggccactgtgctctttcgttggtttatatatctgttttgataccagtaccatgctgttttggttactgtagtcttgtaatatagtttgaagtcagatagcatgatgcctccarctttgatctttttgcttaggattgtcttggctatatgggctctttttcagttccatatgaaatttaaagtcgtttttctaattctgtgaagaaagtcaattgtaacttggtggggatagcattgaatctataaattactttgggcagtatgccattttcatgatattaattattcctatccatgagcatggaatgtttttccatttgtttatgtcctctcttatttcctggaacagtggtttgtagttctccttgaagaggttcttcatacccttgtagtttgcatt

SEQ ID NO: 763779 - DNA, 496 bp, Homo sapiens
acaccatttattaaacagggaatccttttcccattgcttgtttttgtcaggtttgtcaaagatcagatggttgtagatatgtggcattatttctaaggccactgtgctctttcgttggtttatatatctgttttgataccagtaccatgctgttttggttactgtagtcttgtaatatagtttgaagtcagatagcatgatgcctccagcyttgatctttttgcttaggattgtcttggctatatgggctctttttcagttccatatgaaatttaaagtcgtttttctaattctgtgaagaaagtcaattgtaacttggtggggatagcattgaatctataaattactttgggcagtatgccattttcatgatattaattattcctatccatgagcatggaatgtttttccatttgtttatgtcctctcttatttcctggaacagtggtttgtagttctccttgaagaggttcttcatacccttgtagtttgcatt

SEQ ID NO: 763780 - DNA, 496 bp, Homo sapiens
acaccatttattaaacagggaatccttttcccattgcttgtttttgtcaggtttgtcaaagatcagatggttgtagatatgtggcattatttctaaggccactgtgctctttcgttggtttatatatctgttttgataccagtaccatgctgttttggttactgtagtcttgtaatatagtttgaagtcagatagcatgatgcctccagctttgatctttttgcttaggattgtcttggctatatgggctctttttcagttccatatgaaatttaaagtcgtttttctaattctgtgargaaagtcaattgtaacttggtggggatagcattgaatctataaattactttgggcagtatgccattttcatgatattaattattcctatccatgagcatggaatgtttttccatttgtttatgtcctctcttatttcctggaacagtggtttgtagttctccttgaagaggttcttcatacccttgtagtttgcatt

SEQ ID NO: 763781 - DNA, 615 bp, Homo sapiens
taaaatggctaatttcatctttcacctcttgaattgtattactggattccttagattacttagattgggttttaactttcctgtgaatattgatgatcttccttgccatccagtctctgaattctatgtctgtcatttcatccaatttagtcatgaagaattattactggggagctagtgcagtcacatggaggtaaaaagacattgtggctttcagagtggccagagttcttgcactggctcctttaatctgtgtgggctgaggctcttttaatctttgaagttgctatgctttgcatgaggcttcttgcttttatattctctgaggcccttgacagtttgwctctggtttaaattgggtttagttgactggcttcatttctgaatgatttcagggggccaaggattagctcagtactcctggactgtggactctcaccctgggaggctgggaccaggtctacggtattgttctctggccccttgagatcaagcacctgctgcactggaggggccagagtgttcctggtccactgataacaacacaaatggaaggtgctggaaaaggtgcttcatcagggcagtggcagtgggtctgttcttgcccacacatgc

SEQ ID NO: 763782 - DNA, 556 bp, Homo sapiens
cgtgcagacctgtgagtcagttaaacctcttttcttcacaaattgcccaatttcgggtagttttttatagcagtgtgaaaacggactaatacagtgagatattaagaatgaatactaggcctggcaaggtggctcatgcctgtaatcctagcatttggaaggctgaggcagcaggatcacttgagttcaggagttcaagaccatctgkggcaatatagcaagacctcctccgctaaaaaaaaaaaaaaaaaaaaaaaaaaaagaaaatagttaaaagaaattagtctggggttgtgggtgcacccctgtagtcccagctgcttgggaggctgaggtgggaggattgttcgtgccctggagagccatgctgcagtgaactatgatggtgccactacattccaacctgggcaatacagcgagaccttgtgtcaaaaataaaaataaataaagaatgaataaattctaaaatatttagatgttcagatgatcttatacattagaaaataattatttgtatctgattaaaagatacatgtctctcctttaatctggaagg

SEQ ID NO: 763783 - DNA, 598 bp, Homo sapiens
ggtcattgctgcactgcttcccacccttcagctcccaagccgtattggcatcttgctatttctgagtacttgctgctgctgcacctggtgtcacagaacccatacatcttagttccawcatctcagggtctacagtcaccactgtgtggtacctcataccccactgtgttttgttggttccaggtcctgcattgctgctgtatcctgctccaggaggccttagcctctggagaacctattttcccccagagacatgtcaatactgtgcctggacccttaggatcaaaactacagccacaccccagttccctgggtccaggttgctgggatgtacctcagagcaacagttcttagcttagtgggagaactgcatctactcataccttggaaagtgaagctgcacctcaagtcccaggtgctataatagttagttttacaagaccctgatcccagaaacctgtcttcacagtttctctgatcacctgtgctttgactccaagtaccacgtgcctgtgggccatgtcagacatgacaccaagagagatcccctcagataagactcctactgtagggaagataagaagagaaggatccctaa

SEQ ID NO: 763784 - DNA, 598 bp, Homo sapiens
ggtcattgctgcactgcttcccacccttcagctcccaagccgtattggcatcttgctatttctgagtacttgctgctgctgcacctggtgtcacagaacccatacatcttagttccatcmtctcagggtctacagtcaccactgtgtggtacctcataccccactgtgttttgttggttccaggtcctgcattgctgctgtatcctgctccaggaggccttagcctctggagaacctattttcccccagagacatgtcaatactgtgcctggacccttaggatcaaaactacagccacaccccagttccctgggtccaggttgctgggatgtacctcagagcaacagttcttagcttagtgggagaactgcatctactcataccttggaaagtgaagctgcacctcaagtcccaggtgctataatagttagttttacaagaccctgatcccagaaacctgtcttcacagtttctctgatcacctgtgctttgactccaagtaccacgtgcctgtgggccatgtcagacatgacaccaagagagatcccctcagataagactcctactgtagggaagataagaagagaaggatccctaa

SEQ ID NO: 763785 - DNA, 591 bp, Homo sapiens
taagccaagaagagtaagaaatttatataaaatatgactgaactaaatgagattaattataaggtgttgcaggttagcaattttcccagagactcctgttggttatttttaaataaaaatctcaaccgagaaatttttaaacatacagaggatattgccagatatacatatactcaagacccaaagtcagcagttattattattttgtttgatgtatttacatatgacttgttttaaagaataaaacattgaagtcctctaatccctttcttaaccccctgtccctccctctattcccagaggtaatcattaaagagacataactcttattcatattttaatactcagacctctattttatttatctttgctgctatacaatatgtawaaagcacagtttataaatccatccccctattcacaggctgacgtttgtttgaagtttttgtctattatacactactgaaattagaattagaaattagaaacagtgttgcaaatgacctctttctacatgtgtccttgtgttcatatgtgagtgttggtcgttctgtgtatccaggtagagaaattgtggggttgggaggtaca

SEQ ID NO: 763786 - DNA, 576 bp, Homo sapiens
gaagctaagtaggttacagaaaaatgcctgtaaggcaagtttattgtactactgaactagcactttaaccaaatggcaatgtgtacaaagagtcagagacagtttttagcaggtatgtccataattacagattggcatctgtaatcggcatctgtaattggcataattacagactggcatctgtaattacagatttacayatactaacatacagatacatccatacatcaactaaatatgtctaataatttcatagatacatttaaataaccaaaaagtcattttataatatcaacccgattagctaatatgtaatacatcttgagcccttaactaatagataaaagataaccaataaatataaatttatgaggcctcctgttgagctagacaaatgcctgcaggattattaaatagagatatatatctctaaaaatacgagttttttagttaatattatatagccacattggtcggttaacaacctttaaattagaagcaaaataataaagattcaatcagtggctatatattttaaaaattgatgaataaaagttatttctctctgatccagaa

SEQ ID NO: 763787 - DNA, 600 bp, Homo sapiens
caaaggggaagcaaggggcagatcttccatagtggccagagagagagagagagagagcaggagtaagtgccatacttttaaaccatcagatcttgtgagaactcactcattatcacaagaacaacatgggggaaccgtccccatgatccagtcatctcccaccaggtccctccctaacacatggggattacaattcgagatgagatttggatggagayacagaatcaaaccatatcacttgccaatgtaggtgggtaccatccagtctgtagagggcccaaatagaacaaaaaagcaaggaagggtgaattttctctcttcttgagctggaacatccatcctctcctgcatttgggcaacagcactcttcttggacattccaacactgactgggacgtatactatatccaccctatacacccccagtccctaccccgacacacacacatactgaattacaccaccagctttcctgattctgcatcttgtacacaacttctcagcctcgaaaattatgtgagccaatacctacaataaatttcatatctatatttatctacctatctgttactctctctgtgtcaatctatctattaatat

SEQ ID NO: 763788 - DNA, 600 bp, Homo sapiens
caaaggggaagcaaggggcagatcttccatagtggccagagagagagagagagagagcaggagtaagtgccatacttttaaaccatcagatcttgtgagaactcactcattatcacaagaacaacatgggggaaccgtccccatgatccagtcatctcccaccaggtccctccctaacacatggggattacaattcgagatgagatttggatggagacacagaatcaaaccatatcacttgccartgtaggtgggtaccatccagtctgtagagggcccaaatagaacaaaaaagcaaggaagggtgaattttctctcttcttgagctggaacatccatcctctcctgcatttgggcaacagcactcttcttggacattccaacactgactgggacgtatactatatccaccctatacacccccagtccctaccccgacacacacacatactgaattacaccaccagctttcctgattctgcatcttgtacacaacttctcagcctcgaaaattatgtgagccaatacctacaataaatttcatatctatatttatctacctatctgttactctctctgtgtcaatctatctattaatat

SEQ ID NO: 763789 - DNA, 620 bp, Homo sapiens
ctgaggaaggaggatcgattgagcccaggtggtcaagcctgatcacaccattgcactagagcctggacaaccacaccactgcactagagcctggacaacagaacaagaccctgtctcaaaaaaaaaaaaaaaaaaaaaactcacaaagtaggtatggctatgagttctagccaatgtaatctgagtggaagcaatgtgccctacctccagcctggccttctgcacaatccatgttcactctctcccstctcctgccagccagagacagatgattcaatgagggttccaaggccttagaaaatgacaaggccactagatgaaagatatctgggtccctgaatgtctgcatgaagcaaagccctcctctttcttccagcaggaaataacctgtattagtctgtttcacactgctgatacagacatacccaagactgggaagtttacaaaagacatttaatggacttaccgttccatgtggtggggaggcttcacaatcatggcagaaggtgaaaggcacacctcacatggcagcagaccagatgagagcttgtgcagggaaactcccccttatataatcatcagatcccgtgagactcattcgtcaccaccagaacagcaca

SEQ ID NO: 763790 - DNA, 620 bp, Homo sapiens
ctgaggaaggaggatcgattgagcccaggtggtcaagcctgatcacaccattgcactagagcctggacaaccacaccactgcactagagcctggacaacagaacaagaccctgtctcaaaaaaaaaaaaaaaaaaaaaactcacaaagtaggtatggctatgagttctagccaatgtaatctgagtggaagcaatgtgccctacctccagcctggccttctgcacaatccatgttcactctctcccgtctcctgccagccagagacagatgattcaatgagggttccaaggccttagaaaatgacaaggccactagatgaaagatatctgggtccctgaatgtctgcatgaagcaaagccctcctctttcttccagcaggaaataacctgtattagtctgtttcacactgctgatacagacatacccaagactgggmagtttacaaaagacatttaatggacttaccgttccatgtggtggggaggcttcacaatcatggcagaaggtgaaaggcacacctcacatggcagcagaccagatgagagcttgtgcagggaaactcccccttatataatcatcagatcccgtgagactcattcgtcaccaccagaacagcaca

SEQ ID NO: 763791 - DNA, 558 bp, Homo sapiens
ctcacatatataataatcttaaaaagggggtctatgaagccaattaaggatccacttagtaaagaggaaaaatattcaaaattttaaagagctccttctggctaggggttgaggaatttatttaagacgtatttggtactatgaaactttgtcagaaataataatttctacttatctatctttattcgaaaagttctacgaatatgtaacatgattttttagtaattatacaaacatgcaaatgtacttaatgtgcacaaaatatttagggttatacagtaggtcagaawtatttttagtgatattaattcaaatataccaaaatacatattttagtaagtgaagactttattaaagtgtggttaaatatacttctatgttgatgatacttagtaatcctttttagtcaactatattcaaatattttagctttacaagaaaatacgtagtctgatacatacaattgcatgcttatattacaaactaccaaaaatatctcaaattctgaattactaacttcaacaaaagtgtattctgggaacattgatttttcactta

SEQ ID NO: 763792 - DNA, 558 bp, Homo sapiens
ctcacatatataataatcttaaaaagggggtctatgaagccaattaaggatccacttagtaaagaggaaaaatattcaaaattttaaagagctccttctggctaggggttgaggaatttatttaagacgtatttggtactatgaaactttgtcagaaataataatttctacttatctatctttattcgaaaagttctacgaatatgtaacatgattttttagtaattatacaaacatgcaaatgtacttaatgtgcacaaaatatttagggttatacagtaggtcagaaatatttttagtgatattaattcaaatataccaaaatacatattttagtragtgaagactttattaaagtgtggttaaatatacttctatgttgatgatacttagtaatcctttttagtcaactatattcaaatattttagctttacaagaaaatacgtagtctgatacatacaattgcatgcttatattacaaactaccaaaaatatctcaaattctgaattactaacttcaacaaaagtgtattctgggaacattgatttttcactta

SEQ ID NO: 763793 - DNA, 566 bp, Homo sapiens; identical to SEQ ID NO: 737084

SEQ ID NO: 763794 - DNA, 605 bp, Homo sapiens
tggctgtcgggagagtgagggtaggttttaaggatgttatctttacaagatgggtggccttcagctctctaccacgcaggtcaattcagttctgagagatgccacatgtgaacagggaaatcacacaagaacaggccaaggagcgacctggatgatgagaggctcaagccagtgatcgtctttggatggtragaatatcatgtctttcttttcttaatcttatttgtatatttaaattgtacataagtagctctctgctcctcccatttgacagacagccgcctcttctctctcattgacagctgcatccctgagacactacggtgaaggtgaagatcaaagtcaatggatttggttgtattgggtgcctagtcaccagggcggtttttaactctggtaaagtggatattgttgccatcaatgaccccttcattgacctcaactacatggtctgtgtgttccagtatgattttgtctgtggcaaattccatggcactgccaaggctgagaatgggaagcttgtcatcaacgaaaatcctatcaccatcttccaggagcgagatccctccaaaatcagatggggcaatgctggtgctgagtatatc

SEQ ID NO: 763795 - DNA, 599 bp, Homo sapiens
aattctcaagtgatttagacctcctatagacaaaaaacaggggagtggagggagagatgctgggttaaagagatttaaatagattcttttcttgcaggatttatcagagcctttactgttctaatattcacgggggctcttcatactggattgcccattcataataatgatgggtaacatttactgtgagtgtccaacactgttctgagtacccggcttagaatgactcatttggtcctcacaacaaccctgtgagttctgctgtgatcctcattttacagctgtgaatactgagggaagtagctttcccaagatcacatgactagcagggggtggagcaaagacccaaacctgggcccrtgtacttaaccactgtacacccagcctctccatgcctgtattttggacaccagcaaagcagaggcacaaaaatagtttttgaaagaacttgacactttataattcaaaataaaaagccattaaaggagttatgaaacaatgagaattttgtgggcttttgattatttactttatgttaatattgtttgattgtttgtttttgagacagggtcttgctctgtcacccaggctggagtgca

SEQ ID NO: 763796 - DNA, 557 bp, Homo sapiens
gtaccactgccttgatttatgctgagaaaccagccattgtacccacttttgcttttatacaatcatggcaagtgtcaataaaaaagcaggcaatgactttgtattactttcacaaatttttaaaatttttcatcagctttctcaggtttaattagtatgattcagaacagtgttggccaggcacagtggctcaggcctgtaatcccagcactttgggaggccgaggcaagcggatcacctgaggttaggagttcaagaccagcctggccaacatggtgaaaccacatctctactaaaaatacaaaamttagccaggagtggtggcaggtgcctgtaatccctgctacttgggaggctggggtaggagaatcacttgaacctgggaggtgaaggttgctgtgagccaagatcacaccattgcactccagtctgggcaacaagagtaaaacttgttttttttttttttaaaaaaagaacagttatgagctcttaggccttctggaaggggtcttcaggatcctgagaggtccacagagcacatttggagaaccactggt

SEQ ID NO: 763797 - DNA, 557 bp, Homo sapiens
gtaccactgccttgatttatgctgagaaaccagccattgtacccacttttgcttttatacaatcatggcaagtgtcaataaaaaagcaggcaatgactttgtattactttcacaaatttttaaaatttttcatcagctttctcaggtttaattagtatgattcagaacagtgttggccaggcacagtggctcaggcctgtaatcccagcactttgggaggccgaggcaagcggatcacctgaggttaggagttcaagaccagcctggccaacatggtgaaaccacatctctactaaaaatacaaaaattagccaggagtggtggcaggtgcctgtaatccctgctacttgggaggctggggtaggagaatcacttgaacctgggaggygaaggttgctgtgagccaagatcacaccattgcactccagtctgggcaacaagagtaaaacttgttttttttttttttaaaaaaagaacagttatgagctcttaggccttctggaaggggtcttcaggatcctgagaggtccacagagcacatttggagaaccactggt

SEQ ID NO: 763798 - DNA, 557 bp, Homo sapiens
gtaccactgccttgatttatgctgagaaaccagccattgtacccacttttgcttttatacaatcatggcaagtgtcaataaaaaagcaggcaatgactttgtattactttcacaaatttttaaaatttttcatcagctttctcaggtttaattagtatgattcagaacagtgttggccaggcacagtggctcaggcctgtaatcccagcactttgggaggccgaggcaagcggatcacctgaggttaggagttcaagaccagcctggccaacatggtgaaaccacatctctactaaaaatacaaaaattagccaggagtggtggcaggtgcctgtaatccctgctacttgggaggctggggtaggagaatcacttgaacctgggaggtgaaggttgctgtgagccragatcacaccattgcactccagtctgggcaacaagagtaaaacttgttttttttttttttaaaaaaagaacagttatgagctcttaggccttctggaaggggtcttcaggatcctgagaggtccacagagcacatttggagaaccactggt

SEQ ID NO: 763799 - DNA, 621 bp, Homo sapiens
attctgaggattaaataaggtgaagtgctcagaacagtgcccagtcaacgcctgtgaggacctcagcagctgttgctttttactatttttctgtcaaggtgcggcttcgtgcgtctctgctgttgtgtttttggtggcaactggcaggcttctgggtgcaggaggggtgcaaggggtacccagctccaggtccagcggggagcatgagactggctggggccaggtgggaggcgccgcagggtccacctyctgtctctcctgtgggatgcccttcatcctcactaggtttagacttctccatctttgaaagtcaccatctgccccagggaggatgttaggtggccctgttcctcttgcgacactggagcccagaactcacatggagggaagacccaggagcctatcttcacctcctgctgacagtgggttcctcagggactcagagcaggcaggcgggggctaccttgaggctgagctaagctatccccgtggatgggactgtgagtcctgtcgaatgtcttggggagccgaaggcagtgctgcctcctccatgttaaaggcaatgggtgggttgggggtgttcctgaaggctcacgcaggtcccatgaatgccctgtgtgt

SEQ ID NO: 763800 - DNA, 621 bp, Homo sapiens
attctgaggattaaataaggtgaagtgctcagaacagtgcccagtcaacgcctgtgaggacctcagcagctgttgctttttactatttttctgtcaaggtgcggcttcgtgcgtctctgctgttgtgtttttggtggcaactggcaggcttctgggtgcaggaggggtgcaaggggtacccagctccaggtccagcggggagcatgagactggctggggccaggtgggaggcgccgcagggtccaccttctgtctctcctgtgggatgcccttcatcctcactaggtttagacttctccatctttgaaagtcaccatctgccccagggaggatgttaggtggccctgttcctcttgcgacactggagcccagaactcacatggagggaagacccaggagcctatcttcacctcctgctgacagtgggttcctcagggactcagagcaggcaggcgggggctaccttgaggctgagmtaagctatccccgtggatgggactgtgagtcctgtcgaatgtcttggggagccgaaggcagtgctgcctcctccatgttaaaggcaatgggtgggttgggggtgttcctgaaggctcacgcaggtcccatgaatgccctgtgtgt

SEQ ID NO: 763801 - DNA, 641 bp, Homo sapiens
tggcggtgcatgtaatcccagctactctggaggctgagatgtgagaattacttgaacctgcgaggcagagggtgcagggagctgagattgtgccactgcactccagcctgggtgacagagtgagactccgtctcaaaaaacaaacaaacaaaaaactgaagagacattactaaacgtctctctaggatttgcctcctgaattccctttgtgtatgttttcccagtctctggaaagtttccctcaagagagtggttattctgggcctcttagtgtatctcatttgtctctgtacctgctgcaccaggcagtgtctggctgttttggggtygggacttaatagagtacatcagaagtttctcccagttacaggacgaggcactgccccttcctttccatactgctgtggtccatcggccacagaaccgtttctgtgctcagaggcctcacctccctctcctcaccatacttagatggatgcccctgctcggctgcagagcagtctgcctctgtgtggttctaataagtcctaaaagaagccagcaaggctctggaagcctcaggacagtggctttgctggaagtctcccttcttaggattgcttcttgtttagagcttttattttgttgcagtattgacgaga

SEQ ID NO: 763802 - DNA, 591 bp, Homo sapiens
cgagtaaagtgctggatgacatggatgacgacgatgacctcagcacggatgggggaagcctctatgaggcgcctgtgagctacacattctccaaggacagcaccgtcgccagccagatctgagtgctctcccgggctgtggaagtacctgtcattcctgcaggagctgcagccacccaaagtgggaggcagggaggggagcatctgtctgccactgagaccwatcacagcctctttgcacagcatgccagctcctcagtgttacgttcctcgccagggtctctcagtgggtcttcgacagagagcttttgcagtttaaaatgttgggatgcctgaggaccaggagccaccacccactggggtgttgtgagagatacactttggtaggctgaggcccctgttccacagccactatttgcattgctgtccctgccccctcatcactccccctgccaagacaaagggtccagaaggctaggacttacttaatagcactgtgcagggaggaaaccatgtatagcttgtacatattttaaaccagaccttctcacgaactgctgctgttgggtttggaatgtgatggaggcttggt

SEQ ID NO: 763803 - DNA, 591 bp, Homo sapiens
cgagtaaagtgctggatgacatggatgacgacgatgacctcagcacggatgggggaagcctctatgaggcgcctgtgagctacacattctccaaggacagcaccgtcgccagccagatctgagtgctctcccgggctgtggaagtacctgtcattcctgcaggagctgcagccacccaaagtgggaggcagggaggggagcatctgtctgccactgagacctatcacagcctctttgcacagcatgccagctcctcagtgttacrttcctcgccagggtctctcagtgggtcttcgacagagagcttttgcagtttaaaatgttgggatgcctgaggaccaggagccaccacccactggggtgttgtgagagatacactttggtaggctgaggcccctgttccacagccactatttgcattgctgtccctgccccctcatcactccccctgccaagacaaagggtccagaaggctaggacttacttaatagcactgtgcagggaggaaaccatgtatagcttgtacatattttaaaccagaccttctcacgaactgctgctgttgggtttggaatgtgatggaggcttggt

SEQ ID NO: 763804 - DNA, 683 bp, Homo sapiens
acccactggttctatcctttgaggatccttgattaatacactcattcatcccttgaaacgcccaactctgttgtggaattgaccattgttcttccctggctgctgtcgctatgggtcatggtgctcgcagtcctctttggatggttggatgggtgagaggggygctcgcacatccctgggctaactggggtagttgccttgttcattttgctatatcccatttggaccctttatgattggagtgtgaactacatttagcaaacttttaagttcaacccaggagctggaatccttacatcctgggagtagctcttcgaacactttggaactagaggcatgcatggtggtgggtgttcttaggtacgcgtttcctagatggatggtcctgaaatggtatgacacctcaacttgccaagaggcctcccgtgtgttcctgcttggcagggggtgagattgaaaagattcattacttcctttacatatttatttttctatatagaataaggtaactgtattaccacaaatttggaaaataaccccaccatactgatgcaaccattattagcattttggctcatttctttccagtctttttttcctacacagtttttaaagcataggtacaactgcagtgtttatatgatttgtatatgctttttttgtcacttaacattatagatatt

SEQ ID NO: 763805 - DNA, 683 bp, Homo sapiens
acccactggttctatcctttgaggatccttgattaatacactcattcatcccttgaaacgcccaactctgttgtggaattgaccattgttcttccctggctgctgtcgctatgggtcatggtgctcgcagtcctctttggatggttggatgggtgagaggggcgctcgcacatccctgggctaactggggtagttgccttgttcattttgctatatcccatttggaccctttatgattggagtrtgaactacatttagcaaacttttaagttcaacccaggagctggaatccttacatcctgggagtagctcttcgaacactttggaactagaggcatgcatggtggtgggtgttcttaggtacgcgtttcctagatggatggtcctgaaatggtatgacacctcaacttgccaagaggcctcccgtgtgttcctgcttggcagggggtgagattgaaaagattcattacttcctttacatatttatttttctatatagaataaggtaactgtattaccacaaatttggaaaataaccccaccatactgatgcaaccattattagcattttggctcatttctttccagtctttttttcctacacagtttttaaagcataggtacaactgcagtgtttatatgatttgtatatgctttttttgtcacttaacattatagatatt

SEQ ID NO: 763806 - DNA, 559 bp, Homo sapiens
  misc_feature 157: n = A,T,C or G
tgcaatggcgcgatctcggatcactgcaagctccgcctccggggttcatgccattctcctgcctcagcctcccgagtatctgggaatacaggtgcccgccaccacgcccagctaatttttttgtatttttcgtagagacggggtttcaccgtgttanccaggatggtctcgatctcttgacctcctgatccgcctgcctcggcctcccaaagtgctgggattacaggcgtgagccaccgcgcygggcactttacctaattcttataggcaatattttctatggtacttgggactttttttaaagaatagtatcctcaaattggaattagtgtgtcaaataatatgaatgcttttctgattcaattggatttttaatttttatacttactcaaataatttatactgactgttgaaaaatagataagcaattaataataaagaaagtcccccttgctttcactatttagaaataactactataaatatttttatgtatatttgtgtacacttttttctttacatggatgtttatttcacaaaatgtggaatcttactgttt

SEQ ID NO: 763807 - DNA, 559 bp, Homo sapiens
  misc_feature 157: n = A,T,C or G
tgcaatggcgcgatctcggatcactgcaagctccgcctccggggttcatgccattctcctgcctcagcctcccgagtatctgggaatacaggtgcccgccaccacgcccagctaatttttttgtatttttcgtagagacggggtttcaccgtgttanccaggatggtctcgatctcttgacctcctgatccgcctgcctcggcctcccaaagtgctgggattacaggcgtgagccaccgcgctkggcactttacctaattcttataggcaatattttctatggtacttgggactttttttaaagaatagtatcctcaaattggaattagtgtgtcaaataatatgaatgcttttctgattcaattggatttttaatttttatacttactcaaataatttatactgactgttgaaaaatagataagcaattaataataaagaaagtcccccttgctttcactatttagaaataactactataaatatttttatgtatatttgtgtacacttttttctttacatggatgtttatttcacaaaatgtggaatcttactgttt

SEQ ID NO: 763808 - DNA, 559 bp, Homo sapiens
  misc_feature 157: n = A,T,C or G
tgcaatggcgcgatctcggatcactgcaagctccgcctccggggttcatgccattctcctgcctcagcctcccgagtatctgggaatacaggtgcccgccaccacgcccagctaatttttttgtatttttcgtagagacggggtttcaccgtgttanccaggatggtctcgatctcttgacctcctgatccgcctgcctcggcctcccaaagtgctgggattacaggcgtgagccaccgcgctgggcactttacctaattcttataggcaatattttctwtggtacttgggactttttttaaagaatagtatcctcaaattggaattagtgtgtcaaataatatgaatgcttttctgattcaattggatttttaatttttatacttactcaaataatttatactgactgttgaaaaatagataagcaattaataataaagaaagtcccccttgctttcactatttagaaataactactataaatatttttatgtatatttgtgtacacttttttctttacatggatgtttatttcacaaaatgtggaatcttactgttt

SEQ ID NO: 763809 - DNA, 530 bp, Homo sapiens
aatattccattgtatgtataaataatattttgtttatccattcatctgtcaatggacatttgggttgcttccaccttttggctattgtggataatgctgctatgaacatgggtatatggacttttttgaaaaaaagttgtgattaaacatgtacatgtatattgtagaaaaattaaatatataggcaagtagaaagcaccctcccttcccaatagagatatccactgtgtatattttggcttctttccctstaactatatttttgcctatacttgtgaaatgagatcattctatacatattcttatggaaactgagccattggtaaagaaatgtttgaaatagatcaagtgatttggtagtttccttccttgagccccagggtggtgggtgcctgtgctgtaccaggctggcctggtactgtgaaggtaaggctggccttatctcctctatggctcctgtatgatcaggacagtgttccccaatggaagtaggggaaatgggctgtgagaagcccaaggtcatctggctc

SEQ ID NO: 763810 - DNA, 530 bp, Homo sapiens
aatattccattgtatgtataaataatattttgtttatccattcatctgtcaatggacatttgggttgcttccaccttttggctattgtggataatgctgctatgaacatgggtatatggacttttttgaaaaaaagttgtgattaaacatgtacatgtatattgtagaaaaattaaatatataggcaagtagaaagcaccctcccttcccaatagagatatccactgtgtatattttggcttctttccctgtaactatatttttgcctatacttgtgaaatgagmtcattctatacatattcttatggaaactgagccattggtaaagaaatgtttgaaatagatcaagtgatttggtagtttccttccttgagccccagggtggtgggtgcctgtgctgtaccaggctggcctggtactgtgaaggtaaggctggccttatctcctctatggctcctgtatgatcaggacagtgttccccaatggaagtaggggaaatgggctgtgagaagcccaaggtcatctggctc

SEQ ID NO: 763811 - DNA, 599 bp, Homo sapiens
tgcataaacaagactctgctcctcgctttccatcaccatctcctacacaccctcattttctcatgctagaattgtcccagaaaccctgtctctctgcctactggtctcctccttctccaagtcatcctacctactgcagccagattaagattgctaaattattgctattgaaacacactgctgaacacaaagctgccacatgctcctgggcctggcttgctgcttcaattctgtctccactccccagagtgcayctcctgctctgcctgtgccggggctgctttctgctgctcccagaggcccacatggggggcccttccaccctcagtcctaactgtatctagcctcttaccaatatctaggtcaagaatggcttctgactcagacatgttaaacacacacacccacaaaagacagcagcaacaacagcagcaacaaaacaactctttttttttttttttaaatgagacggagtttcgctgttgtcacccaggctggagtgcaatggcgccatctcagctcactgcaaccttggctcactgcaacctcagcctccggggttcaagcgattcgcctgcctcagccttccacgaagctgg

SEQ ID NO: 763812 - DNA, 611 bp, Homo sapiens
gtttggtgtttggaagcctctgggaacttcatcctcatggtctaacaacaggccttatgttccaggccacaccggatctcttaaagggccagcaagagctcactcagcaaaccaatgaggagacagctaagcagattctctacaattacctcaaagaagggttagtgattttccctctgaaagagcaaagtattgttgtttctggtgggactcttaatttccttttccgaggcyttaatggttaccttcctttcttgccctgtgccagccgttggagggttaaaactcaatggctggggttttcgtgacggcatttgtcttgtgtggtatggggtgggggctttgggaggggtgtgtaggaaaggacaccatactttaaaaattaaaatgaatacatttttaaagtgaccctttactatttcaaaagcaaattcaaagataggaggagtttctactcttcaggtttgaatggagtccgccatcaccttgagttcttccgtgcaatgtggtagtcctttagaagttacaaataaaaacacctcccctccccagagttaacattggccaagagcccctgcttccattatttttaaagcatgtgtgagtcattt

SEQ ID NO: 763813 - DNA, 617 bp, Homo sapiens
cttgcatatgtgtgatacaattgttatatttcttttttccttcttttaaaattggtaattggagcatatggctaaaagtcaactatttttaaagtaatggaaattttgcagttcagcatgttgaagcatgctgtttggctgttttagaagaatgtttttcttagatgccatcggtttaccacaccacccttgactgggaaatggggctaagattttaataaattagccaaccaagaaacctgacttacccttgaaataagatgggtgtcatcttctttgtgcagtgtagtcgccctggaaggactattagaagatctcaattctctgttttgagaagtctaggcttgatttttttagctggtaaaaaatgtgcaggtagtggcctgaagccaagtgtgacgatttggaaccacagccggtaagctgtgtgaagtccttcccttttgggaagcagatgtgagtttagtggacctarcagtaataacaagggctatgacgagagctgtaatcccatttaactagatatttacaataatgtactaggtgggcaacttcatcccccttcttcagataggaaactaaggctctgtgaggccaggtccagtggaaggcccagc

SEQ ID NO: 763814 - DNA, 599 bp, Homo sapiens
tttctgtaaactcaggtggctgttgtatgtaaatgcagctcttgtggatcctgagtgatgtctgactatagtgagactggtcttggaggcatcaggaaccactgaataaacaggaggcttcggtgcagggcccagctccaatccaagttggccytagagatgcttggctcctgggtgagggttttctaacttccctataggttttgatcactacctgggggccgttcacagacagtcactcactcacaagaatcctgggtgttttattgtgataaatagaataatatttagggatagaggtgcccattgcttgtcaatccactttggcaattgcagagacaatatttatatacaaatgctgcaggttcacatttaaaacttggaatgccaattgctttttagcatttgtggctctgagtttacttagacctatgacagattggctggtgacaggagaaacacgtgctcaaggctgacaacccccagttgtaagtggggtggtttgtgttagaagcctcttttcttcatacacaaagctgctttgaaatgtttttctctgaacactcaattaggttagattaggagccaacaaagaaacc

SEQ ID NO: 763815 - DNA, 622 bp, Homo sapiens
gaatgttcagcaggaataaaaacactgggttttttttattgtgcacctgaggtccagctcactcctcaatgatgaagggcagcctttcgttgccttataaactggaccttaattcagtctgtctcatgaggattatctttgaatttaktaaggagcaatctgactgctccaagaagaaagttccatgcaaatagctcagggcataatggtcattcctttcattacaggattttgtccacagctgggaagtatctatctgattcctgcagcccccggagcctggctggttttcaggagagcatcttgacagacaagaagaactctgccaagaacccatggcaagaatataattacctccagaaagataaccctgctgaatatgccagtttaatggaaatactttatacccttaaggtatgagaccaaatgaatggcattcttgcaaatgaaaggcttcttctcatcactcaccctctccctctctgggttacaggcgggccctgtgtgtggccctgggctgtgacgtaccctgctactacctctctgtctcatttatgttgggattttaaggagctaagatattaaacttgaaacccattgagatacagatgtagaggttaga

SEQ ID NO: 763816 - DNA, 507 bp, Homo sapiens
cacccccactcccattccctcattctctgtacaaataggagttcagttcacactggactctgttccctattgcaacagtatattacagattaagatctgtccttgtgactttaactgctgtctggctttgtttccctctytcgccctcttttttttggtttttggtgtttttcttttagagaatagggtcctcgcttctatctctaaatctctgggtccagtcgcccaggctggagtgcagtggtgcagtcatagctcacttcagcctcaatctcctgggctcaagcgatcctcccaccttagcctcccgagtagctgagactacaggtgcgtgacaccatacgtggataattttcttttttttttttttttttgtagaggcggagtttcaccatattatccaggctggtctcaaactcctggcctcaagcaatcctcccaccacaggctcccaaagtgctgggactacaagtgtgagccaccacgcctggctctgcttattttctt

SEQ ID NO: 763817 - DNA, 655 bp, Homo sapiens
ttgtcggatctgctttagcttgtgcagtacgaatccttgcatataattgtgtttggactgcataaaaaacctgttctgtggccaggcatggtggctcacgcctgtaatcccagcactctgggaggctgaggcgagtggatcacctgaggtcaggagttcgagatcagcctgtccaacatggtgaagccctgtctctactaaaagtacaaaaattagccgggtgtggtggtgagcacctataatcccagctactcgggaggctgaggcaggagaaccacttgaacccgggaggcagaggttgcagtgagctgagatcacgccattgcactccagcctgggcgacatagcgagacttcatctcaaaaaaaaaaaaaaaaagrcaacaacaaaaagtctgttctgtgaagcttcttaaaaaaatatgttcagaatctaattcagaacagaaataataacttatttaagatcacacacaactcaagtccaagtactttcatgggccagaatccagttagttggattcctggatatacaatgttggggggaaaattaaggttttgagacaccaaagtaagaggttccaaagaagaatggcgaatctaggactcttggagcaaactcagatacaccttgctctaaatatggttgcacagca

SEQ ID NO: 763818 - DNA, 655 bp, Homo sapiens
ttgtcggatctgctttagcttgtgcagtacgaatccttgcatataattgtgtttggactgcataaaaaacctgttctgtggccaggcatggtggctcacgcctgtaatcccagcactctgggaggctgaggcgagtggatcacctgaggtcaggagttcgagatcagcctgtccaacatggtgaagccctgtctctactaaaagtacaaaaattagccgggtgtggtggtgagcacctataatcccagctactcgggaggctgaggcaggagaaccacttgaacccgggaggcagaggttgcagtgagctgagatcacgccattgcactccagcctgggcgacatagcgagacttcatctcaaaaaaaaaaaaaaaaaggcaacaacaaaaagtctgttctgtgaagcttcttaaaaaaatatgttcagaatctaattcagaacagaaataataacttatttaagatcacacacaactcaagtccaagtactttcawgggccagaatccagttagttggattcctggatatacaatgttggggggaaaattaaggttttgagacaccaaagtaagaggttccaaagaagaatggcgaatctaggactcttggagcaaactcagatacaccttgctctaaatatggttgcacagca

SEQ ID NO: 763819 - DNA, 484 bp, Homo sapiens
tcggatacttatagtaaatcacacacatttcctggtaggccaagttaaaacacatcccataaaaaatggcaggaatggaaatatttgagttcctaataagatccaagagcttgtctttaccatatctccttctgttcaaatttgccaaatccagccatggaagaaatgaacaaagggctgacatctccaaggcactaatcctgcatgtgtccataataagtctattattaatttattgtctataatgtggtcactrggaggaggaccaggatagaggagacacatagtctctgacatcacagagtatatcaattaatggggaggggcatgtaaaaatatgtccatgaataacactaagtctgggtagaatgtgggaaattgataaagaactgtagtagttggaagagggggaagtcactgatggccgagaggccaggggagttttcctggagtagaaggcattcattctagaactttaaggatg

SEQ ID NO: 763820 - DNA, 634 bp, Homo sapiens
cacattttagaacccaacaatgcagcttgaattctgcatggatcttgagctactcatttggactttgtgaattcagtgtgaatgttgcttcccaggcaatgggggacgcatgcacttgccggtgctcgtgcacacgggattggcgtgcagatgtgtgcgggccgcacaggggatgttctgcagctgccctgggccctgggtgtgtgaggctgccccyctgccatgttgaactttaaagggtgtgatgccggaatgttgttggctgagtccggactggcatgagcccttctgatcctgttacctcacaccttgcctggcatcatcccaaaaggcgtttgtgcaaatggcttattgacacgggcttgggaccaaatccacccaaggggagggggtccctggggccttgctatctgtggacttggatgaaatcatagtgcctgggggtggagaggatgaccctcagatatgttttccaactcgtgtttttcttctagatgcaggaccccagatgcagagccccagggcatagaggattccagattcttgcaggggactggaggaggctcggctgaaaggagtcagggctgcgagggtaggggacagattcgagtagtttctccatttcacagcaata

SEQ ID NO: 763821 - DNA, 571 bp, Homo sapiens
ggaagcagaacctgccccagtcgagtctccagatgaaaccacagcctggataaaacctcaattgcaactgtgatagacccagaagcaaaagactcagctaagccatgcttagttccttaacccaaagaaactatgaaacaatacatatgtgttrttttaggccactaaatttggggataacttgttatgcagcaacacagaactgacacagtagatactattaatattactactcccatttaaagatgaggtatatagaaattaagtcattaactgaaaaccagatggtaagtggaagatttagcacttaaatcccatctctcttacccaaaaagtgaaataatactggaattaaacaaataaataaattgtggatagtgagagacaggtttctcattgttggagaaggaagctacaaataaggaaagagggaagtttccgacaagccttgatgttgaactggaaccagaggtatcagtgtgaattcgtcagatttagtagataggtagatagacataaaaattgaatttaaggtgagtgagagatgaataaatagagaaattcagaagaa

SEQ ID NO: 763822 - DNA, 643 bp, Homo sapiens
ctgcacgccaatcccgtgtgcacgagcaccggcaagtgcatgcgtcccccattgcctgggaagcaacattcacactgaattcacaaagtccaaatgagtagctcaagatccatgcagaattcaagctgcattgttgggttctaaaatgtgatctccttccttatttcttagctatttttactatgataatcccacggatcaatatatcctgacgattcatttcttcacctgcagtattgggttccttcattacttatggttttatgaaaacctggggctaggtggggaattcctctcttttctgccctaaagcggaggatagtaactgaaaaacacctacattccccaccaccyaaaacatcaatgacgaggctcacaccgccagacctctatctaaagccgtgaagtacaggggattttcagggcagtgaaaccattctgtatgacacagtaatgatgggtacaggttattacacatttgttaaaactcatagagtgtacaaaataaagagtgaactgaaatgtatctgctttttttcttgtacttttggtgtcatctctaaaatcactatgggtttttatgacctaagatatggatcataaaaaattaccctttgtttgcttctaaaagctttctagtttc

SEQ ID NO: 763823 - DNA, 639 bp, Homo sapiens
atatatatataaacaaatgatacagatgaacagccagatggaagacatgcacagggcaaggtatgggagaagaggtgcagagcttccaagccctctttagaggtgccaccccggggacccacacatgttcagcaatctagaatctcctagacagcttaacaaatcttttggatttgtatggagggttcgttagttaggcacgattgggtacattattggccattgataycaactcaacatttagcccccctcctcttcctgtatctgggatgggggtgaaactgaaagttccaaccctttaatctcaccattggtttccttggcaaccacccccatcctgaggctatccaggagctggctaagagtcactacattagaataaaagatatttctataaccaagaaagtacaaaggatttcagagttgagtcacacactcctgtcactcaggaaattacaacggtcttagggactatatgtcagcaacttgagtccaagaccaaatatcagaacaaaagattttcctagtgattctattgctcaggaaactctaagggttttaggaactctatgtcaggaactctggtttctttctgacctctgtatctgttaatcatttcaaagaaccaatttttggctt

SEQ ID NO: 763824 - DNA, 446 bp, Homo sapiens
ttaggacctggagatcacaagcagaggacccgaggcaggcagcaggaagggcagcagcatcctgagccaccggcctcccccaccatcacccacccacaccgggatgtgggtgatgcaggaccagtgcgaagatggtgtggggacgrtgggcaggggctctcagctgtagccaccaagctgctaaagatccctgcagcctctctcaggaaataacagtgctgaaacacacttagctgagctctctgtggtgagatagtatttttaaagtaaacactggataagagttcagagttgtttttcaaacatgagtcaaaatcatgtcaaagtgtcactgagaccctccaggagggatgacgtgggctctccatgcccacaccaagaacctccctgacttagggtgacagccagctcctgggggggctgccacccaccacctctgtcctccc

SEQ ID NO: 763825 - DNA, 474 bp, Homo sapiens
ttttgttctgtctgccttcaccgccccagggtggagttcagctccccttcagctccccccagccactgctgcgggaactcatttgcagccgccgtttctgcaggccgggggctgtggaggggcgtttttgctcaggcggggctggagggctgggctggatgcccttggctctccccgtttgccccgcaagcctcaaaggccctaaaactggacccctctttgaggaacagcctcacacccgccttctcagagcccctctcttcttttcataactaccatctcccctgcccccaccagtctttctgtcctcttcaaacctctttccctgtgatgcygaagcattctgtagcttgctttgaccaggaaacctgcggaggcccttgtctgtccaggagttcaaaacggtgccattgtttcttttaataacatacaacgtttatgtcccttttcaaactataacacgactccgagact

SEQ ID NO: 763826 - DNA, 588 bp, Homo sapiens
atcttggcgatgggggagatgagctcgggtgagcctggctgggtctccggccccacaggctcggagcagcatcctccctaccctctcaggagtcctgccctgcagagccctgtgggaccacaggcacatcgtgtgtgccaggcaccctgccaaggccagagttcactttctctctcaakgttcacaaaagcccttggaggtgggtactgtcactgtccgcattgtccatatgcggaaattgaacctcagagaggggaagcaaattgttcaaggtcacactgctactgtaaagcggtgggcctggggtctgagcccccagcggaagcctgcaaccatcaggcattgcccttgctcttagtatagcacggattggattgcagaatgttccagaatgtccctcagcatggggaagggtcttctcaccctcctggtttcgtgccgtgacatgtattcccgcatttctctcctagcccaagtcgtcagatgtgacaccaagatgaaggacaggtgcaaagggtccacgtgtaacaggtgagcctgtgctgggctgtcctgccactgtagcctctgagtctgtgctgggctgtc

SEQ ID NO: 763827 - DNA, 609 bp, Homo sapiens
tggatccagagaatctgcattccaacaagttcccaggtgaacctgctggtctggaactgcatgttgaggaccactgggctagcgatgacaatcccttgggaattttctattgtggtggtgactatgacaatcatggaggtggcatttgtcttgactgacgcctactgagcatgtgctgtgtgccatcctgcgttaagcctggggtcttatttaatttttttttttttttttttgagacggagtctyactctgtcacccaggctgaagtgcagtggcgtgacctcggctcactgcaacctccgcctcctgagttcaagcaattctcctgtcccagcctcccgagtagctgggattacaggtgcccgccacccacacccagctaatctttgtatttttagtagagacagggtttctccatgttggccaggttggtctcgaactcctgacctcaagtgatctgcctgcctctgcctcccaaagtgctgggattacaggcgtgagccaccacacacagcccttctttaatcttcacagtaaccctcttcttcctcactgtcatcaccctaggtgggacagtggacagattgctggctccgggtggcagtcccg

SEQ ID NO: 763828 - DNA, 596 bp, Homo sapiens
gggcttttagaggttgagtttgtgacaccgaagggatgggtccctcctggcgttccactgggaaacagcctgggccttgctcctggtactgcagcagttggcagtgcgagcaatgctgagagagacagaaagcctggaggtcttatttcatcttgttgttgttgttggaaatgcagattctctggctccaatcaaccattgatcctgaacgctgacagtgggacccaaaaatctgctccagccctcgggtaggggcgggggtggattctgaaacaagcacaagtgtgagaacgtatccaagcaccaaggcttccgcctgccggaaagaacaatgagcttaattgtgttcgcttaccaaastcgcccccgctcacggcgattttagaggaattctgaaatggtcgcttcatcttaaagtctcctcgcttctctttgagatggatgcaaagttattgctccttagtctttagcagggcacaaagctctttgagaattgagaagttgtggatctttcctccaaagggggaaaatgcgtcctggttcagacagggaggccggccatccccggtttgcctagggctgaggggattcctgtg

SEQ ID NO: 763829 - DNA, 638 bp, Homo sapiens
tgtactggattgggtgttggccacccaaaattcgcgtccgcttggatcctcagaaggtggttttggaaatagggtccttgcagatttatttagttaaggtgaagtcacactggaattgggtaggccctaatgatttatgtgtctataagagaagacacaggccaggcacagtggctcacgcctgtaatcccagcactttgggaggccgaggtgggcggatcacctgaggtcaggagttcgagaccagcctgactaacatggagaaacccygtctctactaaaaatacaaaattagctgggtgtggtggtgcatgcctgtaatcccagctactcgggaagctgaggcaggagaattgcttgaacccgggaggcggaggttgctgtgagctgagattgtaccattgcactccagcctgggcaacaagagcaagactccgtctcaaaaaaaaaaaaaaaaaaaaaaaaaaaaaaagaagacacacagacacacacggggagagaaatgcagtgaccatgggggcagagactggagtggtgcagccagaagccagggaactccagggacctccaggggtctccagggacctccagggacctccaggggtctccagggacctccagggacctccaggggtctc

SEQ ID NO: 763830 - DNA, 638 bp, Homo sapiens
tgtactggattgggtgttggccacccaaaattcgcgtccgcttggatcctcagaaggtggttttggaaatagggtccttgcagatttatttagttaaggtgaagtcacactggaattgggtaggccctaatgatttatgtgtctataagagaagacacaggccaggcacagtggctcacgcctgtaatcccagcactttgggaggccgaggtgggcggatcacctgaggtcaggagttcgagaccagcctgactaacatggagaaaccccgtctctactaaaaatacaaaattagctgggtgtggtggtgcatgcytgtaatcccagctactcgggaagctgaggcaggagaattgcttgaacccgggaggcggaggttgctgtgagctgagattgtaccattgcactccagcctgggcaacaagagcaagactccgtctcaaaaaaaaaaaaaaaaaaaaaaaaaaaaaaagaagacacacagacacacacggggagagaaatgcagtgaccatgggggcagagactggagtggtgcagccagaagccagggaactccagggacctccaggggtctccagggacctccagggacctccaggggtctccagggacctccagggacctccaggggtctc

SEQ ID NO: 763831 - DNA, 638 bp, Homo sapiens
tgtactggattgggtgttggccacccaaaattcgcgtccgcttggatcctcagaaggtggttttggaaatagggtccttgcagatttatttagttaaggtgaagtcacactggaattgggtaggccctaatgatttatgtgtctataagagaagacacaggccaggcacagtggctcacgcctgtaatcccagcactttgggaggccgaggtgggcggatcacctgaggtcaggagttcgagaccagcctgactaacatggagaaaccccgtctctactaaaaatacaaaattagctgggtgtggtggtgcatgcctgtaatcccagctactcgggargctgaggcaggagaattgcttgaacccgggaggcggaggttgctgtgagctgagattgtaccattgcactccagcctgggcaacaagagcaagactccgtctcaaaaaaaaaaaaaaaaaaaaaaaaaaaaaaagaagacacacagacacacacggggagagaaatgcagtgaccatgggggcagagactggagtggtgcagccagaagccagggaactccagggacctccaggggtctccagggacctccagggacctccaggggtctccagggacctccagggacctccaggggtctc

SEQ ID NO: 763832 - DNA, 625 bp, Homo sapiens
gaagcatcaactcaggtcatgtcattccagaatgtgttgctggccttctccatgggtgcagggaagccctggcatttggcatttgtgggcagtgttggcgtgccacctgggtcacagcagcagcaggcagggaatcctgagacatcgccctgggggagccctgccttctaccccaggctgtrcaatgacgagtactcttggacaaagacccctcttgcaaggctgcgaggacatcatggtccagcccgagggagatttatctttgattgtcttgagtgctgcatcagctaagacaaaaaccacagagtcagagggaaaaaaaacgtcctgatgaggattgtgcaatttccggaccatcattttttaaaaattataaattatgaaatcccacattttcaatcccaatttctggaacgtgttttattttgagcacagaatggcaacatcccaggaaaaaaagtcatgctcccattttgcttgtaatcaagtgagctggaactgaccctaccccaaatattttttgaatagggaaaagactcaactggacccctctaaggactgggagctggcatggagctggcatcttctgagactgacttgagaagagcctgataacgcctagagg

SEQ ID NO: 763833 - DNA, 625 bp, Homo sapiens
gaagcatcaactcaggtcatgtcattccagaatgtgttgctggccttctccatgggtgcagggaagccctggcatttggcatttgtgggcagtgttggcgtgccacctgggtcacagcagcagcaggcagggaatcctgagacatcgccctgggggagccctgccttctaccccaggctgtacaatgacgagtactcttggacaaagacccctcttgcaaggctgcgaggacatcatggtccagcccgagggagatttatctttgattgtcttgagtgctgcrtcagctaagacaaaaaccacagagtcagagggaaaaaaaacgtcctgatgaggattgtgcaatttccggaccatcattttttaaaaattataaattatgaaatcccacattttcaatcccaatttctggaacgtgttttattttgagcacagaatggcaacatcccaggaaaaaaagtcatgctcccattttgcttgtaatcaagtgagctggaactgaccctaccccaaatattttttgaatagggaaaagactcaactggacccctctaaggactgggagctggcatggagctggcatcttctgagactgacttgagaagagcctgataacgcctagagg

SEQ ID NO: 763834 - DNA, 625 bp, Homo sapiens
gaagcatcaactcaggtcatgtcattccagaatgtgttgctggccttctccatgggtgcagggaagccctggcatttggcatttgtgggcagtgttggcgtgccacctgggtcacagcagcagcaggcagggaatcctgagacatcgccctgggggagccctgccttctaccccaggctgtacaatgacgagtactcttggacaaagacccctcttgcaaggctgcgaggacatcatggtccagcccgagggagatttatctttgattgtcttgagtgctgcatcagctaagacaaaaaccacagagtcagagggraaaaaaacgtcctgatgaggattgtgcaatttccggaccatcattttttaaaaattataaattatgaaatcccacattttcaatcccaatttctggaacgtgttttattttgagcacagaatggcaacatcccaggaaaaaaagtcatgctcccattttgcttgtaatcaagtgagctggaactgaccctaccccaaatattttttgaatagggaaaagactcaactggacccctctaaggactgggagctggcatggagctggcatcttctgagactgacttgagaagagcctgataacgcctagagg

SEQ ID NO: 763835 - DNA, 465 bp, Homo sapiens
acccagagctgcccattcttctctatgcctttcctcattgccttctgggagtccgtaattcctttcccttcggagagggagggctcctgctgtttatcttttaaagctttgctgggaacattgtttccagggaaacaaccacacgtcttcaagaagggagaaaggtgccccaggagttatgtcctggggttttaaagaatgtattaatttattacctggtcccttaaaagtgacttttcttatatatcaccttggcttgcatcgaatgcacctgcttttcagttctttttttttcacatagtrcattaaataagagtttgttgaatgactattttctttttgtccagaattttgtatatgcttagcatagtatgtaaacaatgaaaagcattgtatagattttttgctcaattaagcatccagacatattgactcagaaatcccataagaatatatcttttgtta

SEQ ID NO: 763836 - DNA, 547 bp, Homo sapiens
agacacacccacagaaggacactagcctgtgcacgcgcgcgtgcacacacacacacacacaagagttcataatgtggtgatggccctaagttaagcaaaatgcttctgcacacaaaactctctggtttacttcaaattaactctatttaaataaagtctctctgactttttgtgtcttcaaaaccaggaattccattcctgattttcttctggtggccgaagggctggacacagacttctcccaaccatcagagggcacagagtgtggaggttaagtgctgggcagcagtggagcattaggggcagctggatccagtcctaatcagcccsgttacccatgctggaaaccctcagttgctccaccccaaccttgcttcatgctccacatcaccttcttcttcccccaccccagcacaggccaaagcttcgcccgctaaggaggagagcgaaagagataccccaagatggagtgccccagactctctcccaggacccctccctgcctgcctgtccatcagtttcacaaaagttgtaaaaggatcaatgc

SEQ ID NO: 763837 - DNA, 545 bp, Homo sapiens
atatacaaatattaactcaaaatggaccatagacctaaatgtaagagctgaaactggctgggtgcggtggctcatgcctgtaatcccagcactttgggagaccaaggcaggcagatcacttgaggccaggagttcaacaccagcctggccaacatggtgaaacccctgtctctactaaaaacacaaaaattagctgggcttggtagcatgcacctatagtcccagctactcaggaggctgaggcaggagaattgcttgaacccaggaggtggaggttgcagtgagccaagattgcacaactgcactccagcctgggcaacagagcaagmctctgcctccaaaataaataaataaataaaaataagtcaatcaaatttaaaactggacaaaggatttaaatagacatttctccaaagaagatacacaagtggccagtgagcatgaaagatactcaacatcattaatcataaggaaatgcaaatccaaaccacaatgagataccaccccacatccagtaggacagctaagataaaaaataaaacagc

SEQ ID NO: 763838 - DNA, 620 bp, Homo sapiens
tgagagttctgatttctctacacttattattttcctatttcatatattatcattatagccatttaatgattgtgaagtaggattttattgtggttttgacttgcatttccccaatgactaatgatctttagcatctttttatgtacttttgggccatgtctcttctttggggaaatttctatccaagtattttcccattttwaaaatgagttgtggctgggtgcagtagctcacgcctgtaatcccagcactttgggaggccaaagcgggcagatcacctgaggtcaggagttcgagaccaacctggccaatatggtgaaaccccatctctactaaaaatacaaaaattagccaggcatggtggcaggcacctgtaattccagctactcgggaggctgaggcgggagaattgcttgaacccaggaggtggaggttgcagtgagccaagatcacaccactgcactccagcctgtgcaaaagagcaaaactctgtctcaaaaaaaaagagagagaaagaaaaaaggaaagagttgtttgtctttttgttttgagttgtagtcttttatatattctagatattaaactctcatcctatatgtgattcacaagtattttctcta

SEQ ID NO: 763839 - DNA, 609 bp, Homo sapiens
gtgactcctcccactttgttttttttcaagattcttttggctaatcagggtcccttgcagtcccttatgaatctgaagatcagcttttccttcctgcaaaaaaaaaagaccactgaaaatttttttagggatgcattgaacttgtagatcactttggggagtattgtcatattaccaatattaaggctttccaactataaatacaagatgtctttccttttatttatgtttttctttcagcagtgttttgtaattttcagtgtacaagtctttcatctacttggttgaatttattcctaggtattttattattttggatgttattgtaaattaaattatttttataatttcctttttaatttgtttattgatgatatattgaaacacaactaatttttctatgttgctcttatatcctgcaactttgctgaattaatttattagytttagtagtttttatgtgggttctttgggattttctgtatatatgatcatgctatttatgaatagagatagttttacttctttctaatttggttgctttaatttctttttcttgcctaattaccctacataaaacttctagtataatgctaaggggtaaaagtg

SEQ ID NO: 763840 - DNA, 653 bp, Homo sapiens
ttgagtgacttgctaagttactctaatagctgaagtctagctgcaaaatactacaaatcacaggtgttagtaaggacttaaaaccatcaacataaaagtttcaatgccaagaacctactacgtgtgggggcagtgttgatacccgacccagatcctccggagtatctttgtgctgcatgtgtacagccctggcttctgtgtgattttacttaaaacagccagcaacaggagctcttaatagattctgatctcgsgcaaatgaagccagccttgctcacaagcatgagaggccacaagttccttggaatgtatgttcctatggccttcccctcctcctggctcttaacaaatgactgcaaggtgcagcaggaggaaatcctcatctcccctgccccagattctaaggtgtagcttgccctcctaagtcttccttatggaatcaggctgaagatccccctggaggactttgcccaaacttgctatctcccttggcatcttcccctgtcctgccctgcctccccacttcttgctcttccctgggagtctcttcttgtacctgtatcctcattccagggtctgttcctggggtcatctcagtttcattaactccaatatttcattcactgctacagcagcattttcaaatgtgaaag

SEQ ID NO: 763841 - DNA, 605 bp, Homo sapiens
tcttctcaaaatgggttcagattgacccagtgggtctatttataaatgtaaccaatgaaaggtcaattctataggtcataatttgagaagcactcaatttggcatcagcctgagctcagatttcttcatgggaagccttccaaaccattcctaacttctccagtatggatttataaaccttccttgtgctctttgaacatccatagggctcttcaaactctgtcacaggacatagaaaattaaagcaaaaattaaaataaagtagaatgacttctctgctggacttcaagactctgagatccaggagctatgtacacactatctttaatggtggttctttactggggacattctccacccagggaacatatggcaatgtctggagacattattgatcatcacaactaggctgggggttgttgttgggatatcgtgtgcagagatcaaggatgctgctcaascttctgcacttcacaggacagaacccccccaagaaaaatttatttggcccaaagtgtcaattatgccaagattgagaaactttaatacttaaggtttttcatttcacaaatattaagtactatgtatgtgtcacatcttgtgct

SEQ ID NO: 763842 - DNA, 642 bp, Homo sapiens
atccaaggccgctaacccaaggccagtagattagggaatgatgaaactgagattaacaaaaaggcttatatgactccagactaagctctcttaacatgaactggggggcaattttataagtctctccctctagccaacaaataactcttcctccttgttaaaaaaaaatagtaacagaagatcatataattagatatatacacattttgtgaatttgaaagaaaataggaatagcattgaatctatacattgctttgggcagtatggccattttcatgatattgattcttcctatccatgagcatggattctttttctgtctgtttgtgtcctctctgatttccttgagcagtggtttccagttctctttgaagaggtccttcacctcccttgttagctgtattcctaggtatttggttctctttgttgcaattgtgaatgggagttcattcatgatttggctctctgcttgtctgttgttgctgtatagkaatgcttgtgatttctgcacattgattttgaatcctgagactttgctgaagttgcttatcagcttaagaagctttcaattttaggtatcattactattgttgttgttaagaaataagaaaaacaatgggaattttcagaaaagaaaaaaac

SEQ ID NO: 763843 - DNA, 636 bp, Homo sapiens
tttacagagaagaggaacagagctcagagaggttcagcaacttgcccaaggcatcacagcaggtgactgaaagacctggatgctaacttgggtctttctggctccagacccaccctcctacatgggttgcttgctgaaagagggaaacaactcattgtgtcgaactttccagctcagccataagaaatttctagacccaaagaatacactgaaatagatcagaagttccatgcctgggtcctctgggagctatttttggcaaaaaccgctggaaaactgtgcatccattcttcctgccagtgttgtgtaggcagggaggaatgtgtaaactctccactgttgctgagaattctgttcattgaggatctcaactggccagatggtcttacagttaastaccctgctggttaacaaacaaatgaagctattactccctttagtaggaggagacctttcttttaaatttaaatttacttttgctttctgatccaactgaggaacaagttaggaggaaagctttctaaacatgaaattctgccagagcacttgccaccgaatgggtttctccctactggtgataagtggtattgcaactcagctctattagacaaaagggaggtgagagacacatgtaca

SEQ ID NO: 763844 - DNA, 653 bp, Homo sapiens
caccagtgtccttaggagggaaacctgtcagcagagggacctcagccctggctgatcacatgggctatgctaggccagtatctgcagaaaccaacagcctgcccttaaagctcctaagttggagagacctgctcggtcacgatcctggctttgctagccacactcagtccccgggttcatctctcggggccaatgcgatgttgtttgtgagatggagagaatggcattgcccctacccccaccagggtggcttcaggatgaaattcaacacgggaagcagcctccccccacccccatggaccgagaggtgayactattagagttatatgggtttgtggtttccccttactgtctccacttccttcctgaaaccctgaaagaggcttcgcaggaaaggaagggtctttcagatgcctgagtgcagctgggaatggctgtccccagttagccaggctggttggagcatagggtgagttggctgggttgtgggtttgaaccaccagaatcactgaggcacagctggcccactgccgagtgctgccagccatcctgcaaacgccaccattgctcatccctgggagatgctccagcattgaccaaaagggttgccgggtcttgtcctgctcaggacaggccactctagagtgatctat

SEQ ID NO: 763845 - DNA, 585 bp, Homo sapiens
tatgtatgtatatatgtatgtgtatattatatatatatatacacacacacatacatacttttcttatatctataaagttttcaatctcagagaaaatgtttggatgcgctggttttgcccagtttcaatgttttcccaaacactagcaggtctcctccatctctcttgactttgttgaaacacctttagtctcgttttctgtttggcagatggccagtgttcctgcagctgcttcaggtctgtacaagccccacttgtggacactttatctgcaaagggggcccctgatttttccagcctggggcctttcctcctgcctctcttggcccaagatgcctccaccctccgcctttcacctgttgaracgcattttgtaaaataagtttgccctctgtctgcccttgttacagtaggcagtcagacataagcagggcaggagagggtgccccccaaccaggactgtcaggccaccatcaggtgatggtcaggtgatttaactgtctctccaaaataataattggttgtagccagcactgaggaaaggcaggctcccaatagattaaaaaacaccagaaatatgatcag

SEQ ID NO: 763846 - DNA, 707 bp, Homo sapiens
tgcatttgcagtcactcctcattttctttcaaactccctagccctagctaatcactgatgtactttctgtctattgtatgaggggaaataggtattggggaattgggtgattgttgaggcgtgttttgcccaatagtcagcctcccagtaacctgaaagaaagctcctccacctctctgcgtgtctctttccaatgtagcaaccttgggcaccgggcaaagccttgtcctaaacctcggcccctcccaccaaaccatgaccaacttstggtctctggggacgctggacaatggactgccccctacggggacacctcccccgttcaggtgcagctcataatgaagccccctaactaagacaggaggaaatttcttcactgctggcgctgatcaaggaagactgagggtgcccgggattctttgccccacatctagtgagtccactgaacccagggtaattgggacagcatccggtaaaatttttttctttcttttgaataatggggcatgcctatcggtattaactgaatataaaggcccattagaatgattatcggtttctgttgttggcatgaagggcatacaagaaaccccatacaaaacaccacctgtatactgctcatttcagggagttacccacactcactctttcttggtcattcctcactgtcccactcctttattaggaaggacattctacacaaacta

SEQ ID NO: 763847 - DNA, 694 bp, Homo sapiens
atttttttctttcttttgaataatggggcatgcctatcggtattaactgaatataaaggcccattagaatgattatcggtttctgttgttggcatgaagggcatacaagaaaccccatacaaaacaccacctgtatactgctcatttcagggagttacccacactcactctttcttggtcattcctcactgtcccactcctttattaggaaggacattctacacaaactaggaggaatcattcatttatcagccctacatcaaagcatcccttacttattgttatgtcaagaacaaaacccttcctcagacactcaacatcaaacagacttaaatcccaaattcctcagccaagtaaaccccataatataaagcactgacttccccgtaatagctatctaccattctccaatacaaatttcactgaagggatcctaagcactatatagtggtcctamaatgtcccctcaatcctcatggattatggggactcaagcccatcatctcctgacttttggctgccaatattttaatcccctcccactctccccacaatactcctattctcccaatcaaaaaacctggtggctcctacggagcagttcaggatttgtgacaaatcaactccactcttgttactgtttgtccccttgtcccaaacccctacaccctcttatcgagaattcctcccaaca

SEQ ID NO: 763848 - DNA, 633 bp, Homo sapiens
cggcaatattagcaattcgtaaatcaccatccaaacccaccatgaacagatagagcaaactgactcagtgaaagagaaatgactggaagcaaaatggggtcaaagttcatgtctttagggcagatacattttacccagtaatatttctcttcccaagtcccctgagtcggtcccaacttactgccttttagagatctcacttttattgtaagatagcttcttacacgaaaacatttaccacttgtgcacgtatatatatatatatctatacatatgcacacacatcctttgtattcaactgcctgataaactgtagtcatttgttctgtgttgtggagactgataagtgaatcttttccttatctgccagggtaaactgccaactttcaaatactctttggttttcccaggtgagtcatgcaccttccrgtgtctgtagccccagggctgctcatgcatgtgactgggtcttagttttttgacctagagaaggcataccaaagtctgcttgagccaacatctttgccaggtgccctcattgtgtttatttttgtcatataaaccttaagtggatggcaggattatgtttccacatgtgcacacctgtttacagaccacccacatcaggtaggg

SEQ ID NO: 763849 - DNA, 641 bp, Homo sapiens
gcggtaggcagattaatggcccgcagagaggtccaagtcacagcccatgaaacctgggattgtgttaggctacatggcaaagggaaattcatgttgtagatggaatgaaggttgctaatcagctgaccttacaatagggagatgatccaggtggactcaatataattacacggtccttaaacgtggaaaaggatggtgcacctgcagtcccagctackcaggaggctgtggtgggatgagtgtttgagacaggagttcgaggctgcagtcaggcatgattgcagcactgcactccagcctgggagacagagcaagcccttgtctcttaaaaaaaagagggggcaggagagaagggcagagtgatgtgatgtgagaaagactcactcgccattcacaaagccattgtgggctttgaagattgaagaaaaggccgtgagccaaggcaggcagctggagagaagctggaaagacaaggagtggattctccgctgcagcctccaggaggagccggctctgacgacaccttcattttagcccagtgacaccgtgttgcacttctgacccgaagaactataagattataaacttgcggccgggcacggtggctcttgcctgtaatcccagcactttgggaggccgag

SEQ ID NO: 763850 - DNA, 641 bp, Homo sapiens
gcggtaggcagattaatggcccgcagagaggtccaagtcacagcccatgaaacctgggattgtgttaggctacatggcaaagggaaattcatgttgtagatggaatgaaggttgctaatcagctgaccttacaatagggagatgatccaggtggactcaatataattacacggtccttaaacgtggaaaaggatggtgcacctgcagtcccagctacgcaggaggctgtggtgggatgaktgtttgagacaggagttcgaggctgcagtcaggcatgattgcagcactgcactccagcctgggagacagagcaagcccttgtctcttaaaaaaaagagggggcaggagagaagggcagagtgatgtgatgtgagaaagactcactcgccattcacaaagccattgtgggctttgaagattgaagaaaaggccgtgagccaaggcaggcagctggagagaagctggaaagacaaggagtggattctccgctgcagcctccaggaggagccggctctgacgacaccttcattttagcccagtgacaccgtgttgcacttctgacccgaagaactataagattataaacttgcggccgggcacggtggctcttgcctgtaatcccagcactttgggaggccgag

SEQ ID NO: 763851 - DNA, 406 bp, Homo sapiens
ctcacagctcttgtatgacggagccagcattcagatgcaagatggcccaactgtgaacccttggtcctaactccagaatagctgatcaacagagatttcttgccattacacctagattcagacagaggaaccaggaattagggcagcccagctctgcagaccagctgggctatcgaatsccttgtgggtcatcagagtcctgtgtgggcatctctaaggctccagatgtccaggtttcacctctgggagattcggagcccaaggtcaaggtcaagctagacttccacgtttgccagtgtggacactacacgtagtctgagtcctagcccaggttataagccattgccatgtgtgcttattctcttgcatttgggggccagagatggggaggggagagtgagtgtgg

SEQ ID NO: 763852 - DNA, 531 bp, Homo sapiens
ttgtcactctttctttgaaaacagttgaagcatgctgggttaggcttaggtttattgttattgatgacccctggatggagcgagaaggtcacgtgtaacgtaagctcactgtgtgttttgtatttttctttttttttttggagacggagttttgctcttgtcacccargctggagtgcaatggcgcgatctcggctcactgcaacctccatctcccaggttcaagcgattctcctgcctcagcctcccaagtagctgggattacagacgcccaccaccacacccagctaattttagtatttttagtagagacggggtttcaccacattgctctggctggtctcaaactcctgacctcaggtgatccacccacctcggtctcccaaagtgctgggattacaggtgtgagccacatgcctggcctgttttgtatttttcaaatcttgccccaccactgtatttgtcctggaggcaaaatctacagcaaagagcacccagagtaacaatggcccaaccataaaaactttgggat

SEQ ID NO: 763853 - DNA, 568 bp, Homo sapiens
aaacacaggatgctgatggaattgcggggacacagggttggaaggcctctctgatcacgcacaaggccgttcagtgcaatcaaaggcttaaccttagacaaaggctgaatgggtgctggagaaatacagttctggcattgagatctttatttatttctttgtccatttattcatttaakaacaatttactaagctccttacacatatctggccctatatcagacataatccctgttctcatggactacatagtccaatgagggagaaagatattaagaaaataatcaaataaatgaatggaagccctgaggtcctcaccctcacccctctgggcacctacgctccctggtacctcccttcccctacctggggagggtgggttgtctctgtgggtagcagaaacctcaggttggaaccccctgcctcacttcagctccttttgtaagcagagtacctctgttcctgagtgtggggaaagaaaaccatcatgtacatcagagttgtcacaaaagagttgactacctgctaacaagggatggaaactcttctcttcctagtaggagccatc

SEQ ID NO: 763854 - DNA, 537 bp, Homo sapiens
ccaaagtgctgggattacaggcatgagccaccacgcctggcctaaatatttttttttttaaagctacaggtcggtatatatattaaaaatgtaaaaagaaaaaacaaagataaagacaaattcttgaaataagccagaggaggaaaatacaaccttatctataggggaacaagaataataaattcttgtcagaacaatgtaagcaagaagaggggaagtaaaatatttaaagattttaaagaaaaaatatctcaacatataattctatgtatagcaaaactatctttcaaaatcgaaggataaatgaagactgttttagatagaaaaacaaaaacaaaaactgagagaaatcattgccagctgactgtccctttaagaaatgttaaaaggaattcytcaacaaggaggaagatggcataggtcagaaacttggatctagttaaataaaggatgagcattggagaagagaacatgaaagtcaaatattttaattttttagttgatcaaaagataactgtttaaaataataacagtaat

SEQ ID NO: 763855 - DNA, 509 bp, Homo sapiens
taaaaagggtgttataatgctattccaggaattactttttctaagagttcaggttcttgggtagctgaaccatcattttgtccacctcttctatttactgcccacagattctttagtcctgtctacttcaacaagtcaatcaaaatgaattataaaggggaagaaggtattcctcaccttacttcagtgttgcaattttggagaattgagtttttgtttccctgcttagtcctctcactttctccttttatcctcttcctaattarctccctctccccagttatatactattaacatatatacagtataagcattttaggagaaaggaacaatgccatttagttttgttgcataaatagtaaatactttttgtaaaagaatcaaacaatacaaaaataggcaaagtagaacacaatttaaaaaatttttttctcccctaaactgtaactgtcatcctaagaggtaaccatcactaaaaataaagtttgctatggaaacttgctattctt

SEQ ID NO: 763856 - DNA, 509 bp, Homo sapiens
taaaaagggtgttataatgctattccaggaattactttttctaagagttcaggttcttgggtagctgaaccatcattttgtccacctcttctatttactgcccacagattctttagtcctgtctacttcaacaagtcaatcaaaatgaattataaaggggaagaaggtattcctcaccttacttcagtgttgcaattttggagaattgagtttttgtttccctgcttagtcctctcactttctccttttatcctcttcctaattagctccctctccccakttatatactattaacatatatacagtataagcattttaggagaaaggaacaatgccatttagttttgttgcataaatagtaaatactttttgtaaaagaatcaaacaatacaaaaataggcaaagtagaacacaatttaaaaaatttttttctcccctaaactgtaactgtcatcctaagaggtaaccatcactaaaaataaagtttgctatggaaacttgctattctt

SEQ ID NO: 763857 - DNA, 613 bp, Homo sapiens
cttgtttatatggtggtaagaagtcatggagaggaaatattctataatgttataattaaatatcattttttcttggtcctgagtccctggactataactttttaagtatttcttagatttttttttttcttccccactacttaggtgagacaggaattaggtgggtagcattgtttaattgtcctcctgcttcctaggtgagataaggctctggtaaagtcttttctccaggaaattaagcatttattatggataatttactgagaatatttcaaaataactacttttctcttttcccactagatacctgaagtgttttgtttgtttgtttttgtttgttttggctgttttcagtcataatctggtccctctttgtaaaattcatgaaactstcggtgccccgaagactctcgaccccaggagtttctcacttgcaagctaacccacctcagtttccagcagcatttaaaaattaccatttaagtattcctgtcagcttctggctccagtaacttgtgcttcacataagtagaccttgactatgttttcctgtgatgtcagtcctctcatggatccaagaaaattcattgatttttcgtttgttcagctttgt

SEQ ID NO: 763858 - DNA, 580 bp, Homo sapiens
gcagataactattctccttttgagaaatggcttcttgttttgtattgagccttggtaggaactgaacacccaacaataggacatcaagtggccacatgatccaagcattctgtcataaattgggttgtctgacccacacggccacagcaacctatcatgagatgaaaacmgtgtataaaagaccaagcttggtcaggtctggaaggttatgaggaagctgcatgagcaggtagcaccagctcctttaatatcagctaatgttgcattgtctcttctttcaagccatatgcagggcctcctgggatacttattatgaccagttatctgaagaagaaaaacactcaagcctggattccaaatgggtcttcacaatatgatagcactaatagaaagcaaatgaatgtaccactacagtcccactgggtgacctgaatgatgacagtgaaagaaagtcttctcagtgggcagagccttgagcagtacatctagttgtccattcagtccagagctagggccaaaagtatagatttacaggattcttgggaagttgctaataatgcggctgaattgtcagggacat

SEQ ID NO: 763859 - DNA, 580 bp, Homo sapiens
gcagataactattctccttttgagaaatggcttcttgttttgtattgagccttggtaggaactgaacacccaacaataggacatcaagtggccacatgatccaagcattctgtcataaattgggttgtctgacccacacggccacagcaacctatcatgagatgaaaacagtgtataaaagaccaagcttggtcaggtctggaaggttatgaggaagctgcatgagcaggtagcaccarctcctttaatatcagctaatgttgcattgtctcttctttcaagccatatgcagggcctcctgggatacttattatgaccagttatctgaagaagaaaaacactcaagcctggattccaaatgggtcttcacaatatgatagcactaatagaaagcaaatgaatgtaccactacagtcccactgggtgacctgaatgatgacagtgaaagaaagtcttctcagtgggcagagccttgagcagtacatctagttgtccattcagtccagagctagggccaaaagtatagatttacaggattcttgggaagttgctaataatgcggctgaattgtcagggacat

SEQ ID NO: 763860 - DNA, 521 bp, Homo sapiens
ttgttctttcactttttgcaataactcttaatgctgctcactctttgggtcctgcgcagcctttatgagctgtgacagtcaccgcaaaagtctgaagcttcactcctgaagttagcgagaccatgaacccaccagaaggaagaaattccggacacgtctgaacatctggaggaacaaactctggacacgccatctttaagaactgtaacattcacagtaagggtcagtggcttcattcttgaagtcagcgagaccaagaacccaccaattctggacacagtttcaccagattcctcagctgctgggtatgagagggaggtcatatgaggatgacactaagctgatgcttccctcactacacgacctcactgacaacacscaggggattctgaggatgtttcctatgtgctaatgaagtggagaggtccccgttgtccacttcaagtcacattatgctggctgccttcaaagtccatgagagaggtgctcattctcgttctcaccatgtccatgcttggtgc

SEQ ID NO: 763861 - DNA, 617 bp, Homo sapiens
tggtagtcaggatcagtcatcccaaccagcacactaactcccttctttggctgttgattcaaaggcatgaggattccaaagtggccaggtggcagtctcaacttccagctgaatggaatcactgttgtgtcttctggtgaaggcattcttgcctctggcatttagcccagcaggacataaagttctggaaacaggaagcaaaaatttaactagtgggtcactaggggtaatactgagtygtaccattgtcatttccaccccttaattcctggatccatgaagcctggctatctgagaaagctgatatattagaagctgattcagagcatctacagccttctgaagaaccttgcaccagccctgcagggtattgccaccaaactgacactgtaactcagtctttaaaaggtgattatagccctctatcaagttagctgcttcaggatggtggggaacacagtaagattggtgaatttcacgagcatgggttcattgccacacttcctttgctgtggagtgagttccttgatagaagcaatgctgtgtggaataacatgatggtggacaaggcattctgtaagtcctgtggatggtggtttgggcagaaacactatgca

SEQ ID NO: 763862 - DNA, 608 bp, Homo sapiens
tttctctgaagcaaaaagagcttcaagttcccctgcaggtacagcctggagatgcagagtttgtctctgggcgcaactcccagttcatgagagacaacagactgtagaaaaatgcttcactctcctgctgtcctcctgtggaacagttctgtggctcattctacacattttctccaataaatgagcgacagttgtccaaagggcttctctcttccctgtctcaccctatttaacccctggctttggctttaaaatgacctgtcctacagttcttgttccaggccctgtttcgggaggaaagagctgaggaggttcctaagacagacaccaaacstaaagagcttgggcttcatgctctacatgggagcagcccagtaaatgtaccataggccccaggttagtggcctccaggtccaagtttccccctcagtttactcatgcatatgtattacctttttcaatataagccatgatggtggaaagttgtgaagcaccactctaggtagtgggaaacgtatcaaatttttgaagccaaggaaaaaacctaaaaggtatgtgcttaaaaagatgactttggtagctgtgtaacagaagagagaaggaaaaat

SEQ ID NO: 763863 - DNA, 652 bp, Homo sapiens
aatagtattaaaaatgtctccaaaggatcatacggacgtcttgacaagttcacatatcttagtattctgtctatctttagggaaatggaaaaataaatagaatggggttaagcaagctagtgaatagtcaaggatttatttaaaaagttctaatttggacctcattcaagttatgaaggaatattaattataktttacattctcaatcttaagaactaaattaaaactgaacttgcaagtttttagtgagtttatttctgcattgtgtctgaaaacatgttctttattcaattagttaggcatttactacacgcttttggatataattataaaagtaaagaataaataatcactattctcctagtggtgtctagcataggagatggatatgactgttaaagtctggagggttaaaaagaagaaatatatgcaatttaaaatatttttattcctgaatagtaaatagtatgtgcctgttttgtttcagaaaaggaatatttgagtccatccatggttgttttgtttctgttaatgaaaatcattgtaaatgaaaggaagaaacacgcccttttgaattaggcactaataattttgttttattatgtaaaatctttgaccaattagtcagaatatgaagtagtatttttttaat

SEQ ID NO: 763864 - DNA, 652 bp, Homo sapiens
aatagtattaaaaatgtctccaaaggatcatacggacgtcttgacaagttcacatatcttagtattctgtctatctttagggaaatggaaaaataaatagaatggggttaagcaagctagtgaatagtcaaggatttatttaaaaagttctaatttggacctcattcaagttatgaaggaatattaattatagtttacattctcaatcttaagaactaaattaaaactgaacttgcaagtttttagtgagtttatttctgcattgtgtctgaaaacatgttctttattcaattagttaggcatttactacaygcttttggatataattataaaagtaaagaataaataatcactattctcctagtggtgtctagcataggagatggatatgactgttaaagtctggagggttaaaaagaagaaatatatgcaatttaaaatatttttattcctgaatagtaaatagtatgtgcctgttttgtttcagaaaaggaatatttgagtccatccatggttgttttgtttctgttaatgaaaatcattgtaaatgaaaggaagaaacacgcccttttgaattaggcactaataattttgttttattatgtaaaatctttgaccaattagtcagaatatgaagtagtatttttttaat

SEQ ID NO: 763865 - DNA, 652 bp, Homo sapiens
aatagtattaaaaatgtctccaaaggatcatacggacgtcttgacaagttcacatatcttagtattctgtctatctttagggaaatggaaaaataaatagaatggggttaagcaagctagtgaatagtcaaggatttatttaaaaagttctaatttggacctcattcaagttatgaaggaatattaattatagtttacattctcaatcttaagaactaaattaaaactgaacttgcaagtttttagtgagtttatttctgcattgtgtctgaaaacatgttctttattcaattagttaggcatttactacacgcttttggatataattataaaagtaaagaataaataatcactattctcctagtggtgtctagcataggagatggatatgactgttaaagtctggagggttaaaaagaagaaatatatgcaatttaaartatttttattcctgaatagtaaatagtatgtgcctgttttgtttcagaaaaggaatatttgagtccatccatggttgttttgtttctgttaatgaaaatcattgtaaatgaaaggaagaaacacgcccttttgaattaggcactaataattttgttttattatgtaaaatctttgaccaattagtcagaatatgaagtagtatttttttaat

SEQ ID NO: 763866 - DNA, 540 bp, Homo sapiens
acaccacaagctagttagactgtttttgaactttatttaaatggaattaatcagtctctaatctcttgtagtctgacattctttactcaacatatgattgtaagattcatccacactgccacacgcagtaaacgttcatttgttttcattgatgtagattagtcttyatcagccaatttcaattagctttatatatcaaaccttgcatagttctaagtgcttataaaagcaggggctgtgtattgactagaggcaagatcaacaatttgctgaacttttacatggctctatttattctttctcctacaggcttccactggcaatagcccagacccagccatgaaaacgggctttcaactgtgtatttctttcctcccttttccaggttctgtctcaccaattgatacagtttggatgtttgtcctctccaaatctcatgttgaaatgtgattcccagtgccggtggtggggcctggtgggagatgttggatcatgtgggtggatcccttatcaatggtttagcaccatccccttagtgtt

SEQ ID NO: 763867 - DNA, 614 bp, Homo sapiens
caactatcattaatcatcaagtaatgcaaatcaaaatcacaatggaatgtcacctcccatctgttagaatggctataaaaaaaaagagttaactaatgtttacaaggatatggagaaagggaacccttttaccttgcctgtggraaggtaaattgaaacagccattatggaaaacagtatggagtttcttcaaaaaattaaaataggattccgctatatacttctggatatcaaaaggaaacaaagccggtaaatcaaagtgatatctgcacccccatgttcattgtagcattatctacaacagccaagatatgaaaacactctaagtgtccatcaacagatgaatgaataaggaaaatgtgggatgcatgtgtgcgtttgtgtgtgtgtgtgtgtgtgtgtggagagagaggagagaaacagagagaaatagaatattatctggccatgaaaaaagaaaccctgctatttgtgacatggatgaagctgaaggacattatgctaaacaaaataaggcaaacacagaaagacaaatactgtatgatctcatatgtgaagtctaaaatagttgaaatcataaagagtagaatagcggttgccagcagctaaagaga

SEQ ID NO: 763868 - DNA, 639 bp, Homo sapiens
aaagttatatttaagttgtagaatttcaggtttcttttagaattacctccaatcaatatcctctagtaaaactggatttatcttaagcgtagtacaaacattaaagataaaattacatttcagtctttactttttattttatttactgaaaagagtggtattgcacattctgtaatataagcaaatagcgtttctacatatgataagtacatttcattaactagcagggtatttgaataccatttacaacattgtttctgaaaaaatgcattccaagttttgggcttgctatataatccatttttacttgtcaacttcctatatatgtctatcaaaaaaataatatagaaaaaaacattttaggctttgattaccttgacaggataactgtcagtcttgtcttaggtaaatgagtaaaaacaatctataaactgagaaagactactttcctagttcatatttaaacataagagggagtcattgtctcctgggatttttctaattagggtatagcacagttacagtagttcaatggagaatgtcaargcaagttctaaattagtttagcgaaagttaacaaatcactaaatttttaaactcaaattacaataaacatactaagacaatgggttgcctaat

SEQ ID NO: 763869 - DNA, 633 bp, Homo sapiens
tattgattgtggttgcagtacagaaccaagtgttcaagccagatcattttactcatcttttgagaaaacaagcatcttcatttaatcatcatttctaaaggaaaagaactatcatttactaagcaccttccacctgccagacatcgtgctcagacctgccacacgcatttgatcacctcatctttgcagcaatacaatggtgtacatgttgttaccctcatttttcagacaagcaaargagatttctgagaggctagaacatttgccagacccccagcagacgtaaatctgtgtttgtctgcttgacttctaactgcattcccaatctgtaaatcagctctgaatcctggactgagattgcactgaggaaaggagagagagtagcttcagccatgacctgcgcgcacctggaggggatactccagggccctgtgctggcccagccttggaaagcggcactcttgactcccctaagccttcttcaaacctctgccatgagaagtcctggaaacctagtggggagctttggctgctgggcgtgtggttctgtgagagaagttggggaagtgaggtgagaggaagttcgtaagtcccactagaaggtaagctgcctacgcagggtcctcgcttgtt

SEQ ID NO: 763870 - DNA, 594 bp, Homo sapiens
tcatcttttgagaaaacaagcatcttcatttaatcatcatttctaaaggaaaagaactatcatttactaagcaccttccacctgccagacatcgtgctcagacctgccacacgcatttgatcacctcatctttgcagcaatacaatggtgtacatgttgttaccctcatttttcagacaagcaaaggagatttctgagaggctagaacatttgccagacccccagcagacgtaaatctgtgtttgtctgcttgacttctaactgcattcccaatctgtaaatcagctctgaatcctggactgagattgcactgaggaaaggagagagagtakcttcagccatgacctgcgcgcacctggaggggatactccagggccctgtgctggcccagccttggaaagcggcactcttgactcccctaagccttcttcaaacctctgccatgagaagtcctggaaacctagtggggagctttggctgctgggcgtgtggttctgtgagagaagttggggaagtgaggtgagaggaagttcgtaagtcccactagaaggtaagctgcctacgcagggtcctcgcttgtttcgttcactgctc

SEQ ID NO: 763871 - DNA, 634 bp, Homo sapiens
taatatcccagtaatgtttatccatcaaaaatatgagacaacggggactagaccttagagtaaaacatacgaattttaatttcatactatgtaacggagaactgttgaatagttcatgagatgtatgttagttttgataagctactgcaatttacattgtattttatttgggacttctcagtattcaaaaatgactccttactgargctttctgtatgagtgacatcttttctggaacattcactccataacctttaattaatgtgtccttttgtcacttaaaatataatctaaatggttttttttgtttgtttgtttgtttgcttttttggtggggggatagtttaaaccaaagaggaacaaaaataaacactggactcatttttatcatcttgccaagagacacaactatagataagcatccatgggtatgataagcaagaactgaatctcaaatcccattcagggtgctgaaaattccacccttaatatatttgtaaacacattgtcataaaatcaaacggcttgcctgatgttgatgctacaccacttggaaattgtgcaggggacctgaatctaggaaatgtaatttccctgttgcttaccttgtgaaaaaccctatttttaatatcat

SEQ ID NO: 763872 - DNA, 634 bp, Homo sapiens
taatatcccagtaatgtttatccatcaaaaatatgagacaacggggactagaccttagagtaaaacatacgaattttaatttcatactatgtaacggagaactgttgaatagttcatgagatgtatgttagttttgataagctactgcaatttacattgtattttatttgggacttctcagtattcaaaaatgactccttactgaagctttctgtatgagtgacatcttttctggaacattcactccataacctttaattaatgtgtccttttgkcacttaaaatataatctaaatggttttttttgtttgtttgtttgtttgcttttttggtggggggatagtttaaaccaaagaggaacaaaaataaacactggactcatttttatcatcttgccaagagacacaactatagataagcatccatgggtatgataagcaagaactgaatctcaaatcccattcagggtgctgaaaattccacccttaatatatttgtaaacacattgtcataaaatcaaacggcttgcctgatgttgatgctacaccacttggaaattgtgcaggggacctgaatctaggaaatgtaatttccctgttgcttaccttgtgaaaaaccctatttttaatatcat

SEQ ID NO: 763873 - DNA, 633 bp, Homo sapiens
ttagttggaataagaataagaaggaagaaaactagttccaaagtatcagtatttctttgggagggaagagaggttgtggtatcaatagttcccagctatttaccagaatctacctaaagaggtagcatctcaccagccttttgattaagcattagtgtgatggttaatttttggtgtcattttgactggattaagaaataacctagatagatgaaaaaccattatttctgggtgtatttgtgagggtgtttccgaggagattggcatgtgcctcagtggactgattggaaagattcaccctcaaggtgatcagaaacatccagtaggctgggggtccctgtggaacaaaaaggcaaataaaatatgaattctgttgctcctggagtggggacacccttcttaccctgcccttggacattaaaactctaggctctttggtctttggactctgtgacttgtgccagcagcttctaagsctctcccaccttacttagccttggacagagagttatacctttggcttccctggctctgatgccttcagacttggaccgagccaggctacctgcaacccagggtctccagcttgcacagagcctatcatgagactgacttctcagactacgtaatact

SEQ ID NO: 763874 - DNA, 531 bp, Homo sapiens
ccagaaaaagtttgccaactcctgatacagactttacattactttatatttatagaaagtatccgaaatgagataccaagctgttaataatggtattgcacgggatgatggtatttgggggcatgctaagtctttaagagtatatcttatatgcttatatattgtttgaatttttccaacaaacatgcattcctttaaaaggaggcagaatataagatagttctaatttgcatttaagaagaatgacccataacagcagcaggtggtgggaataggggtggtagcaggtgtggccgtagcttccaggcccacagtgttactttcaagggcttgaaagagaaaatacatgctytttaggaccttccattaaaaatcgattcactttggtctttcctgtgttctttcagatactctaacacacactttaaactctttcctctgaaacgcccctggcccccactctggcacagagggcttctacttaacctttagggctctgtctaaatggatcctgctcagagaggccttcac

SEQ ID NO: 763875 - DNA, 625 bp, Homo sapiens
gagtggtacttgtggtctagacttcgagttgagggttcctggggtgaggctaaggttgggttcaaatcatagctgaacgatgtattgagcagatagtcttagataagtagtttagcctccctgagtctccatttcctcacctgtaaaatggractaagaatacctcccccataggattgtggtggtgatgaggtgaaacgatgcaggcaaaatgttcagcccaggccctggaagaggacgcatttgctatgtagataagatcctctctccttatcttcctgttccccaaaagcaatactcaattttagtctcactgatttaggcctcaggcaggaggatgaaaagactttgacatcttcatggtattcagaatcagtcaccatggaggaaaatagatggggatggtggacaaaaatccccaaacaccatggtccagaataatgagtgttgtagctgacatggggcatcaagcagacatctggttggggcagaccagactgaggagagagaatcccaacagattccaagcagaggccaggggtcctgtgaatgcacgtacatcctgaaagtggtgcacaggtacacgccatccctgctacataagctgaatatctcctgggtgcca

SEQ ID NO: 763876 - DNA, 601 bp, Homo sapiens
aatccctcatgcctagcgcaagcatggggccacatgaactctcaataaatagagaacgagtgaatgaagaagaggggaagggaggtctgggacatcctggtaaccccaagggacctacaggcgggtgctgttttatcaagggtgcaatatgtgtaatgcgtcactccagtttggtggaagaaagcactttcctctgcctgatgatgaaatgtgatcctgtgagtgtttcagcccaggcaaaaggggcaacccttggggtgggttgagtatgcacctttttataccgctctgctttgctcttttakactcaaaaccttataaaatcagaagcgggatccagctccttgaaacgcaattccttccttctcttttgccctctttcagctcaagttcagccagcactttcagcctcccgccctggagagcttccccgagcaggcacactcacccagcagatgggcggcttgcctgtccagctgccatccgccttgcaggtgcggtgctcggagccacccttgagggagaagccctcctggcaggagtagatgagcgtgtagcccatggagggcaaatccagggccccgacgttggcatgcgttgg

SEQ ID NO: 763877 - DNA, 596 bp, Homo sapiens
tgagacagagtcttgctctgttgcccaggctggagtgcagtggcgtgatcttggttcactgcaagctccgcctcccaggttggcaccattctcctgcctcagcctcccgagtagctgggactacaggcacccaccacctcgcccagctaattttttgtacattcagtagagacggggtttcaccgtgttagccaggatggtctcgatmtcctgaccttgtgatccgcccacctcggcctccaaaactgctgggattataggtgtgagccaccgcgcccggccgtcatgataatttttaaagtgattatccaattaggaaggttgcagaaagatgcccacttagtgataggtagtttgagaattgcagatccaaaaccttaacacaatatgattagctacacattccaatcactttgtggtgcctgtgccactcataatgttctctttaactgctcctcagggcacttggcagctgtttgtacattgtgacacccctccacgcacacatctgccccccagccacagaagcttggaccagaggtggacacctgagctgactgcagcaggggcaatcagatgttctctcttgggaagtt

SEQ ID NO: 763878 - DNA, 490 bp, Homo sapiens
gcccaggggtgaggagcagtttctggagccagtcagcctgggattggatttcgaccccaccccttctgagctgtgtgaccttgctcaagttagtttctatgcagctcagttttctcatctgtaatggggctcccacaagcttctacctcacagggcgtgcagggattcaatatattagatccacaaagggcctggttcagtgcctgttacacaatgatgctcaatgcacagctctcctcttactgggtgtgtctatktggtgtgtgcgactccgttgggtggagcccctggcacgcataggtccctgtctgtgcttgtcatggcctgtcttcctcccacacccctgctcaccggctgctggaggcggggctctcggtggcggtggtggcggccaggccgggtggctatactgctgtgcacactgtgctgactgtgaactccgcctcgctggccatgatgtctgtgggctggatgttgcggtcgtacattg

SEQ ID NO: 763879 - DNA, 618 bp, Homo sapiens
atatgaaaaatgacagaactaactcaagaatacaaagaaaaggaatctcaaagggacaactcaggagagaaatgtttgcagcaacatggccaggattattattttataaggagtagggtcgacattatgtttataggaggaataggaattacttaggcaagagtagactgtttggtctttgaaagaaagtaatacttataaatcatccttgcyctttgacagctcagggggtattacagatggaaagattaatccgtcaaagtacccactactgcctccatccactatcccctctggctactagtctagagctcagaactttttcgcttagagccagaataagcttgggcagagtcccattgagattgcctaacaagatgcttgatgctataagaatttccagaaccaataagaggcatcaggctggggctccattatgaatggaggagggtagactgttcagagggagagaagttggaataccaagatggaagaaggatctaagtgtgggactttccagaagaggaggatcaggaacacagaaggaatgagaaataagagagtgtttaaacatgagactcttaatgactaatcagaaaggctatgagctccttcagt

SEQ ID NO: 763880 - DNA, 388 bp, Homo sapiens
cctgaatgtacatattgaatgttgcccgtgggattagtcttttaagaagattcctttgggattctcaaggggctatatgactcatgaaagcttaaaaactgctgcttgaagggagcttccacacattggcagggccgtgtacacccccttgatgttgtcctgaccctctgtctcatctcaktgtcacagcacagtgtgggggaacagtggaggagatggagggggtgatcctgagccccggcttcccaggcaactaccccaagtaacatggactgctcctggaaaatagcactgcccgtgggctttggtaagtctctgcagcccccagaggagacaggcttcaagcccagacccttgagcttaaaactactgtccgccaaaatctctt

SEQ ID NO: 763881 - DNA, 631 bp, Homo sapiens
gtccttatgatgaacctactaggcaggcatttccattcctcttttacagataaaatgtaacagatacccatagacaataaagtgatagttagattttaatttttacaaataagctctgtattgatcctaaaaaagacttggtaacagaattattcccagctgtgtttgtagtaaaatttcctccttagaagtaatcccagggactactcccatttctgccagccacaaaccaagttactaggttctgcaccaaccagtcttttaagtttctctagtaaattctcttcttccccttcctctatgacatatctttactattaagtgtcattctgatatcaaaaaaaatatttttggctaggagccaaggctacattatcagtcactacaagtttaatctgatgacagatactttgctaacattacaaatacattaaaggttcttcaccggcttatatgttagtgacrtctatagtaacagtgtacatctgaacccacgcttttgtgaggggcaaagcacactgtgctgtataaatattttatgtacagcttgtactgaaattctagatgaagaggcattcacagagcctctgtaatatgctggttactcaagacagcatatttttattaaagt

SEQ ID NO: 763882 - DNA, 480 bp, Homo sapiens
agcctcaaactcttgggttcaagggatcctcctgcctcagtctcccaagcacctaggaccacaggcatgtgttaccatgccccatctaatttttaaacattttgtagagatgtgctcttgccatgttttccaggctggtcttgagctcttgggctcaagtaatcctcctamctcggcctcccaaagtgctggaattacacatgtaaaccaccgtgcccactcctggagtgcattttcttttttttttttagacagagtcttgctctgtcaccaggctggtgtgcagtggcatgatctcagctcactgcaacctccgcctcccgggttcaagcaattctcctgcctcagcctcctgagtagctgggactacaggtgtgcatcaccacgcccagctaatttttgtattttttagtagagatgggatttcaccatgttgcccaggatgctctcaatgtcttgacctcgtgatccaccctcctc

SEQ ID NO: 763883 - DNA, 480 bp, Homo sapiens
agcctcaaactcttgggttcaagggatcctcctgcctcagtctcccaagcacctaggaccacaggcatgtgttaccatgccccatctaatttttaaacattttgtagagatgtgctcttgccatgttttccaggctggtcttgagctcttgggctcaagtaatcctcctacctcggcctcccaaagtgctggaattacacatgtaaaccaccgtgcccactcctggagtgcattttyttttttttttttagacagagtcttgctctgtcaccaggctggtgtgcagtggcatgatctcagctcactgcaacctccgcctcccgggttcaagcaattctcctgcctcagcctcctgagtagctgggactacaggtgtgcatcaccacgcccagctaatttttgtattttttagtagagatgggatttcaccatgttgcccaggatgctctcaatgtcttgacctcgtgatccaccctcctc

SEQ ID NO: 763884 - DNA, 417 bp, Homo sapiens
acccactgccaaaatcctatgacaacatctctaatttggggtaatctgacttctttaacacatgcggttcctattactggtaagaagcagtttggcaataagtattcaaaagccataagtaaatagtaccaatgctgactcagctgtcctgctgctaagaatttgtcctaaggaaacaactcaacaaatgcacagtgatgagtgtatttgagatatcttcattgtagagttgttgtttatactaagaaattggaaatgaccaaagtaactgtcwgggatggttttaataaataagagtgcactcatacagagagatgctatgtagccattaaaaatcatatgaacatatcaaatagttacataagatatacatgctctatcaagtgaaaaaagtgattactaaatagtatatgatat

SEQ ID NO: 763885 - DNA, 503 bp, Homo sapiens
aagcaaaaccaaaacaatatatcttttcacttataagaacatcagtgtgcatttataactaatgaataaatttttttttttttttttttccttttgagacatggtcttgctctgtcacacaggctgaagtgcactggcgcaatttcatctcactgcagrctcaacctctcaggctcatgtgatcctcctgccttggcctctcaaagtactaggattgcaggcatgagccactacactcgcccagaaatttgtttttagagtaactaccatgccattaacaaacctaacaaaattaacaatttcttatcttcaagaactcaattcatattcaaatttttatcatctcaaagctggtttgttcaaacaggagtccaaagtccccatactgcatgtcattactgagaccatactgggactaaggcagggaggaatgagccctaagtgagtctgtaacaagcgagaaagaagctcattcaactaaaagaattaaattggaggtctgg

SEQ ID NO: 763886 - DNA, 577 bp, Homo sapiens
aattgggtcatctcatgacttcttgttggtcctgtagctggcagtgtgtgtttacttgtatgcttgaaggccccagggtttgtccagtgccagatcacaaagggtttgaatttgtagcctgaaatattgcccccaagcaagacttttatcctgttcttaaaaggcttgagacctgacattgacttggcctccttatggatgaatatctttttcagcatmcatttccagaatagggagcgttcatacacattgaagatttgctttggcaagtaaatttcctccacaattagcttatctagggtttctaaattctccagctgccttaacattagcactcacagactcagcactcactttcacattatgtaatgaataatggttctgaattgtttaaaccacccagagctagcagtaaatttaacatctgacatcatagtcagatccagccttttttttcaacatcacaaactttatactttggccatgatactcagcgtgctgacagggatacatttctgtgtctggtattcaatccaggtcattagaagtttccctatatctgatagaggcccttttc

SEQ ID NO: 763887 - DNA, 614 bp, Homo sapiens
gtgattactttctctcgttctgtaggttgtctctacactgttgattgtttcttgctgttcaggagcattttagtttcatataataccatttttctatttttgtttgctttgcctgtgcttttgagggtttaatccaaaaaatcaatatcaattgacttgtttattgctaccaygtaggaaagaaatagacttttgtatatttaccttttattcagaaaacctggtatgtttacttattagtttgaggtgttttttagtgttgattcttcaggattttcttcaaagatgattatgtcatctgtgaacaaagacacttttaatttttttctttccagtttgtataccttttacttctgtcttgtcttgctgtgctagctaggaattccagcataatattgaaaagcagtggtgagagggaacatccttccctttatctcatcttcttgggaaagcttcaagtttgtcaccattgagtatgatgttagctgtggaattttgtagaaatgctttgttaagttgaggaagttcacttctatttctataatactgagaatttttatcatggatagatattggactttgatctgaattatataaaaatataattcacttat

SEQ ID NO: 763888 - DNA, 614 bp, Homo sapiens
gtgattactttctctcgttctgtaggttgtctctacactgttgattgtttcttgctgttcaggagcattttagtttcatataataccatttttctatttttgtttgctttgcctgtgcttttgagggtttaatccaaaaaatcaatatcaattgacttgtttattgctaccacgtaggaaagaaatagacttttgtatatttaccttttattcagaaaacctggtatgtttacttattagtttgaggtgttttttagtgttgattcttcaggattttcttcaaagatgattatgtcatctgtgaacaaagacacttttaatttttttctttccagtttgtataccttttacttctgtcttgtcttgctgtgctagctaggaattccagcataatattgaaaagcagtggtgagagggaacatccttccctttatctcatcttcttgggaaagcttcaagtttstcaccattgagtatgatgttagctgtggaattttgtagaaatgctttgttaagttgaggaagttcacttctatttctataatactgagaatttttatcatggatagatattggactttgatctgaattatataaaaatataattcacttat

SEQ ID NO: 763889 - DNA, 622 bp, Homo sapiens
tgagtggggccttaaaattggatcttccatctttagctaaacaataccatatgagctcattaaaaggatccagtgagcttgtccaaagacattatggttttgattattctccttctcattatagaggagagcaggtggtgctttccagataaatcgaatgaggcagacttccatgaaacccttgaaggacttagtctgtgctccttcagttggaaaaaaatgaggaagagtccctgacttacacctagaaactgaggctggagctgcctatgatgacagagtgatgagacagatttggagraaaagaaacactcttggtcattctctcagtgtggtgcagtggttccaagtgtagtttctgtgtctctactggttaagtccatatttcacatccaccacttattaactaagtgttcatggttgcgtaactaatttttctgtggctttgtagaaataattcaaatgagggttgtgagaatgaaatgagttgaagtatggtgagtgcttgacactgggtttggcacatagtgagtgctagctttgattgttatttcttcctgacaagttaaagtagacatttgcatggctcccagaaggtagctggatttgagttatctggaag

SEQ ID NO: 763890 - DNA, 622 bp, Homo sapiens
tgagtggggccttaaaattggatcttccatctttagctaaacaataccatatgagctcattaaaaggatccagtgagcttgtccaaagacattatggttttgattattctccttctcattatagaggagagcaggtggtgctttccagataaatcgaatgaggcagacttccatgaaacccttgaaggacttagtctgtgctccttcagttggaaaaaaatgaggaagagtccctgacttacacctagaaactgaggctggagctgcctatgatgacagagtgatgagacagatttggagaaaaagaaacactcttggtcattctctcagtgtggtgcagtggttcmaagtgtagtttctgtgtctctactggttaagtccatatttcacatccaccacttattaactaagtgttcatggttgcgtaactaatttttctgtggctttgtagaaataattcaaatgagggttgtgagaatgaaatgagttgaagtatggtgagtgcttgacactgggtttggcacatagtgagtgctagctttgattgttatttcttcctgacaagttaaagtagacatttgcatggctcccagaaggtagctggatttgagttatctggaag

SEQ ID NO: 763891 - DNA, 607 bp, Homo sapiens
ttaagtcacttcaaacagattacgtatctgttttttccctctctgtctccccaatccattttctatgattagaaaataatgtttaaaagtgatttgtgattcagctcttgctgcaaagtgggtatttgtagttacaactacaaattggcttaaccaattaaagtctttgtgcaaaaaaccttgagatgagaaggtgcttacactgacaaaccagtcaagataaagcttttcaaagcatctgtcaggaggagacatatggagtgaacactgcaaatgaggacagctaacttgtccttgtccttctcctgtcttttcacttttcagaaaggttcagagaaagaaggtacacaactttcactataattcattccagtgattctcctaacattgmggctaggaagtttagttcttttaagcgcgcatctccttttttcctatagccatttagatccatttacctttctgctgaattcaatggcagctgttcagtcctccggtgtacctgtttcatagtctttgctagtgtttgatgtacttactatgtctagtttatatcaacttgttccttttgactcatttccttaggtacagtctcaaggttttcatc

SEQ ID NO: 763892 - DNA, 626 bp, Homo sapiens
aaagaagacactgctctgtagatacatttaggaagaaaagctgatcaaactaagctttctctttttccagagaaacggtattaatgacatagagaaatcatatgaattatccaattgagctaagttttaaattcggcttggtatttagtagtctcttcccaactcctggtgagtattggttgtcttcgcctctctgagttacagtaaagtttttgactcctgttatattaggattccctctcctcaattagactcaaaatcccatcctatcacctgcttcccgcattgcaatgtcctggaaaaataaattaaaaggacatttttacagtaaacctactttgcttcctaatttttgaaataatcagatctgcttccaaatcctcattagctgtattgatgagctgaaccaaacaatgaggaaacattcacagctatasctgaactttcagcatgggccccactaggagaaatctttttgcttctatgtccttacagcctcttgttcttttgctctattcgtaccttctaagtggtgggttatataatcttttaaaatacacatgtagaacaatccaacctctatgttagaggaaagtaaaatgatgtcctcacaaaggtctagttat

SEQ ID NO: 763893 - DNA, 621 bp, Homo sapiens
aggaaaatcagtatgaaggatgaaaagtggggagggagacactgagggacagaggaaaggcgaaaagaccaaactgctgaaagtttagggcaatggcttctgggtaactggaactgaactctcaacactggggctgattaacaattgtatcactgctctcctctccccaaagactaccccactgggcatctctattactggggctyttattattagggctcttcagactagtattctcagcattctcagcattatctcaaggtgattttcacatgagctactttcaaagtgcctgaagtatgttgcaacttctgttatttactacttataatgtaagaactcaaactctataggatcacaattaaggaagaaatgggggcagtgagattaggaaagacattaaacttagaaactaccaaagggaaaatttagctcagtggcctaaggatgttttgaattgctaaatactgtaggatgaggcaactgttttttagccagagtcaaagggcttaaagtgggcctgaaagcagggagactgccaaccaggagaagaaggcaaaaacaggactggcagatagaactgaggctagctggttgtattagtgaagaggcagtagttct

SEQ ID NO: 763894 - DNA, 639 bp, Homo sapiens
ttggcagttaccaaagggactttcccgccatccccctctgtgcccaagctgtcttatctatgttttactgtctcctctttctggatgctcatagttagaagagaagtgatttccttgaaatgcatgaggctagaaasagagctggaacttaaagtggcggtgtttgtccaagatgacggtgctcctgctctgtcagtttcctccccagagaaacaaagagccgccactgactgatgtgctcaggtggggtagggtggctgtgttggaagcccaggcagggaggccctgcccagtgaggagtagtagcggcagggacctgcataggaaagtctggccacttttctgtaaggtagctgcactatgctggagacccataatggtccttaaattcttcactccctcccaagcctgaggacagtaggagcagggactgcagcagcaaagatgataggcctgtctgttacctctggtagtgccatcccagagaaatgcagagccgctacctgtctgagtgctcaggcaggggtggggtggctgtgctgaggtcccaggccagcaggtgatgtgtagcagaggtgtagtggaggcaagtcggtccactcctcagcagtctggatccagccgctatcctcaggaatg

SEQ ID NO: 763895 - DNA, 639 bp, Homo sapiens
ttggcagttaccaaagggactttcccgccatccccctctgtgcccaagctgtcttatctatgttttactgtctcctctttctggatgctcatagttagaagagaagtgatttccttgaaatgcatgaggctagaaacagagctggaacttaaagtggcggtgtttgtccaagatgacggtgctcctgctctgtcagtttcctccccagagaaacaaagagccgccactgactgatgtgctcaggtggggtagggtggctgtgttggaagcccaggcagggaggccctgcccagtgaggagtagtagcggcagggacctgcataggaaagtctggccacttttctgtaaggtagctgcactatgctggagacccataatggtccttaaattcttcactccctcccaagcctgaggacagtaggagcagggactgcagcagcaaagatgataggcctgtctgttacctctggtagygccatcccagagaaatgcagagccgctacctgtctgagtgctcaggcaggggtggggtggctgtgctgaggtcccaggccagcaggtgatgtgtagcagaggtgtagtggaggcaagtcggtccactcctcagcagtctggatccagccgctatcctcaggaatg

SEQ ID NO: 763896 - DNA, 621 bp, Homo sapiens
taatattcacagacctcagggattaggttacagacatggctttttgggggacaccgttcagttcactatagtcattctatctaaagatttgtcaattttgttgttttattcaaagaactatttgtttcatagcttttttccctatataatttgttttctattttgttgatatctgctgtagtctttatatttactttcttttgcttgctttgggtttgttatttttattttagtgtcttaagagaaaagctaagtttacagatttaaggcctttttttcttttctgataaaggcttytaaatctataaaggtctctctaagcattgttttagtactgcagcccataaatttctgcagtttcacttgcttcaaattcttctctaattctttttgtaatttattttttgacccatagattatttaggagtatgttaatttccaaatatttgggaatttcatatttaattctattgtactcagaaaatattttatgattttattcatgttaaatttattaaaacttattttataatctagcatatggtagaccctgaagaatgtctcatacatgcttgaaaagaatgtatattatgcagtcattgggtagaacattctacatat

SEQ ID NO: 763897 - DNA, 602 bp, Homo sapiens
cccattttgaattatctcaagctgcaattaaagtatttcagattattgcttctgctagctgcctacaagaaataaattccctctggacaaaataatgtaaatctaagcctcaaattatcactaacatcttatatatatatatatatatagtaccttacaaaaccaatcccaaataactagctatgtgatgaaacaagacaacatgaccaaaatcaaagataaactacagtcaacagaaatgtaccyttaggaaagccagagaaaggcttaaaataactatacttgagagagttcaactctggaaatatagaatagatgtacttttctctatttttcctgctaagtacaactaaatccccgaacattatgtataaaatgaatacaaaaagacaaaaggtaaagagaatagagcagactggctaggggtttccggaccgaaggaacaacacagtacgagtcccccgggttttctttttgtttcatagagcccaggattggagttgaaaaaggtagtaatctagaaccaccaataggcacagaaaaaaaaagaaatttcaaatgaaaactgaaagaccaggaagcgggcaggcctagaaaaactt

SEQ ID NO: 763898 - DNA, 579 bp, Homo sapiens
catctatctggaggatggctggctgtcaactaaccgaggatgccttggctgaggcaactggctttgctttgtatgtctttcatccttctgtggactagacataagcatgttcttatgttgaaagtagagggcaagcttctgcttacatcttatctgctaatattcctttgatcaaagcaagtcacctggctgagaccagagtaaaaggctgggggaacactgctatatgcatagggagtggacactgagttacatggcaaagaatgtggatataargaatgattaaggttttggccactggtgcaatatactttaggaaatagtcactagattataaggtgtcacacccagacctgatggaggggataggtatcacccagattttctggacttttagttggatcaagttactaaatataactctgagttgacttctttgtagagataatacatgtgtaagaaaaaggatgtgcacaaatgttcagttgtcagagggaggacagtggtaaagaaagcaactgagtatcaatatttgtgctttcttttctctctcaatccatgcggggtcatctaactagc

SEQ ID NO: 763899 - DNA, 722 bp, Homo sapiens
tagatttaaaaaaaatcaatctgattataaagatctaattaaaattataccttaatcagaaatgagctaaaagttgccatttgtgctttaatggtccatcttttcagagtgggctctcccttcaatcggtgcttactctggagcaataattctcaacgtagaatatctaggaatgaagctcaggaaaatgtatttttggaaagcttttcaagtgattttcatgatcagctggttttctagaataaaaataacattatttaattacatttgaaaatatcacctgattgcaataaacagcaaaccaagaccctagagaagtaaagtatatggattcgtttcctattgctgctgtcacaaattaccacaaatttagtggcttaaaacaacaaaaatttattatcttacagttccagaggacggaagcagtaatatctgtctgcagcaccctgttcctttgaggctttaaggaggaatcracttctttgctttttccagctgctagaggactcctgcactccttggcttctgacctaccccacaacccctaaatttctctgacctctgcttccatcattatgcctccttctctgactctgatcctcctgccttcctcttataaggacacttgtgattatattgggcccactcagacaatccattataatcttcgtgtctcaatatccttaacttaatgacatgtacaaagttccttttgccatata

SEQ ID NO: 763900 - DNA, 612 bp, Homo sapiens
agtgctttccatgttttaactcatttctcaacaatcctgtgaaggatgtgttcttattcatcacatttccagttgtggaaaattaaggcaccaagttctcacctgggagcatttcagtgctgtgtgtgatggagctggcatttgaaccctggcagtctccagggatggtactgttaacatcacagttaggatttagagctgtttaaaacagtacaatcatttcctgattttaacttttctgatctaaaatcggaaatgtgatgttaagtgatacgatatttgatatttttgataaataacatatattttagtaaataagkcacccaggaactttgcataacagtgactttacgggttcagagagacagtgaatatcatctcctgcagtgctaataagtttttcattggagaaaagaataaaccatttgtcattgctttagtactgtaacatttgtagtcttttaagaggaacataattggagaagcagagtacaatatttcatctctctgtaatatgcatttgttcttgggtgaattactatattctcctaagatgaaagctcaggcatctggggaacatttttacaaaatgaccttgagctgataggcatc

SEQ ID NO: 763901 - DNA, 530 bp, Homo sapiens
catcttttttctgctgcaaagtgcagacaattgcagacagtgatgaagcagaatgctatactgatgatttcctcatatttagtaacaggcatcagtcacttcctgtggagcagttgggcaagcctcaggcaggcagatgagggagggcggccacccatctgtttggcaccacgtgtctcataagatatgcyggatgctttcagtaaacacagatgagctgtctggcctgccctccaagactcattattttattactggatttgatcctatgataaaatgtggcaggttgagactgtagttaccaggaagctctttttgaagagcacatttccttctcagattctcagtaaactacagaattaacttgtttatcattgaaaagtttacacacaatactagatgtgatttcaaacaaggagaggttttagtgtttgatatattggcttgcttggtgtcctctctcctcttttgctacagagaggcagaaggttaaagttatgggagttttccattcaattagcaagcttttt

SEQ ID NO: 763902 - DNA, 564 bp, Homo sapiens
ataattgtcattaagcacattagggtgatgcaattctaattaaaagcaaagaatcttcatcttttagttagcctgcactatattatctagtaagcatatggtttctgttaggctttttgaaatattacaaatagtttataaactcccattagtacctatggagactcctaaggggcatgaagctccactaaaggaaccactcaactagacggcatttgagtcctttctagcttaaagttatgtgaaatcgcttggataaattcacttaatttttaacttttcttagactataggcaataatggagaccagtcccacaagatgacaaccagtcgttgtgtgcggctgatgttaatcagcatggccaatgatttgaaagaagtttggatctcagaacaacctttcttgttagtaacatatttgtggcaatacatgccaacctgggcctggtggataaccaacaagatggggaagaaaaggattgagaactttaagagtggtgtggtaagaccaatttctaagtttcttaatartatgtaccaatcttgcaggaaggtacagaattt

SEQ ID NO: 763903 - DNA, 592 bp, Homo sapiens
gtgtgcggctgatgttaatcagcatggccaatgatttgaaagaagtttggatctcagaacaacctttcttgttagtaacatatttgtggcaatacatgccaacctgggcctggtggataaccaacaagatggggaagaaaaggattgagaactttaagagtggtgtggtaagaccaatttctaagtttcttaataatatgtaccaatcttgcaggaaggtacagaattttccagtgtttaaaaaactttctggctgggtgcagtggctcatgtctgtaatcccagcactttgggaggccaaggcagatcacttgaggccaggarttcaagaccaacctggccaacatagtgaaaccccatctctactaaaaatacaaaaagtagctgggcatggtggtgcatgcctgtaatcccagctactcgggaggctgaggcatgagaattgcttgaaccgaggaggcggaggttgcagtgagccaggatggtgccactgcactccagcccgggtgatagagtgagactctatttcaaaatcaaaaaacctttctaaccctccaccaatctcatgatataaagaaaaataaataaaaaa

SEQ ID NO: 763904 - DNA, 650 bp, Homo sapiens
tgttatatatgtctgagttacatacagttttggtaactaagaattcctctcagtacgttgccagattgatctctgtttcttactcttgtgagtaatgtgtaacaaatatgactcccaaataaagcagcatttctgtggctattttgttggcccactttcagagtagtatgtgaagaaagcctatggcttaaattagtgttgtgatgtcatctttatcccttaagttctcttttcacagttttgtttttttcctaagtcttcagccgttttttatttgaatattgtagaggtggcatccataccaatgcatcagttcttctgggaattaatartctttcagaactatgtgccaaattctcacttggggagtacattttagttattgtgaatttgttttctatgctagtaattcagtttggcatttagaagatttctttgtataaatgaaactgttgcctcctacaaataaagtattttcaaattcttaaatatttttaaatgttccaggatctgtaatttaaatgtcaaaggttaccagtgaatcgtaattgtctttatacttccttaatgagttgctaaatactctttaatccttaaaaagaaaatagaaacacccatactttaaatcagtttttaggtctgatatgctt

SEQ ID NO: 763905 - DNA, 620 bp, Homo sapiens
ggttcgtctcattgggactggttggacagtaggtgcagcccacggaaggtgagctgaagtagggtggggcatcgccttacctgggaagcacaaggggtcgggggatttccctttcctagccaagtagccaaggcaagccgtgacaaactgtacctggagaaacggtatgctcctgaccaaatactgcacttttcccacagtcttagcaaccggcagaccaggagataccctcccgtgcctggctcagtgggtcccaygcccacggagccttgctcactgctaacacagcagtctgagatcaacctgggatgctggagcttggcagtgggagggttgtccaccattgatgaggcttgagtagctcacagtgtaaacaaagaggccagaaagcatgaactgggcagagcccactgcagttcagcaaggcctactgcctctatagattccacctctgggggcagggcatagctgaaaaggcagcagacagcttctgcagaattaaacatccctgtctgacagctctgaagagagcagtggttctctcagcatggcgttcaagttccgagaacagacagactgcgtcctcaagcaggtctctgacccctgtgtagcctgactgg

SEQ ID NO: 763906 - DNA, 578 bp, Homo sapiens
gacatgaatatttggaagaaaatttcaggcagcagaaaaaaaacaagcgcagagttcctgcgcagacatggctggaggcggtgaaacaatgtagctggagtggagtaagggatgaggagtaggagatgaggtcaaggagacagcagaagccaagttctataggggcagacagattactgtaaggccattggcttttaagtaaaatgggaagtcttcagagatctgagcagaaagaataacatgacatttacttccctttagcacaattattgtgattactgtgttgagaataatatgtcggagggcaaccatgtccagttagaaggatgctaaaacatattagatgagaaatgccaaggactgccatggtggtracaatacaggtggtagttgttagattttggatgtagtttaaaaataaagacaatgagatgaactgacaaattctgtgtggaatgcaaaaaaaatccaatgttttttgactaaacaactagaagattagaattagcttttagcaagatgggaataactgaggggaagaacagatttgaagcaataatgggagttggggggcaggg

SEQ ID NO: 763907 - DNA, 578 bp, Homo sapiens
gacatgaatatttggaagaaaatttcaggcagcagaaaaaaaacaagcgcagagttcctgcgcagacatggctggaggcggtgaaacaatgtagctggagtggagtaagggatgaggagtaggagatgaggtcaaggagacagcagaagccaagttctataggggcagacagattactgtaaggccattggcttttaagtaaaatgggaagtcttcagagatctgagcagaaagaataacatgacatttacttccctttagcacaattattgtgattactgtgttgagaataatatgtcggagggcaaccatgtccagttagaaggatgctaaaacatattagatgagaaatgccaaggactgccatggtggtgacaatacaggtggtagttgttagattttggatgtagtttaaaaataaagacaatgagatraactgacaaattctgtgtggaatgcaaaaaaaatccaatgttttttgactaaacaactagaagattagaattagcttttagcaagatgggaataactgaggggaagaacagatttgaagcaataatgggagttggggggcaggg

SEQ ID NO: 763908 - DNA, 616 bp, Homo sapiens
ctcttgatatggtttgactctgtgtccccacccaaatatcatctcaaattgtaatcctgacacattgagggacctggtgggaggtgacaggatcatgggggcagtttctcccatgctgttctcatgtaagtaaaagagttctcacaagatctgatggtttaaaagtggtagttcctcccttgctctctcttcctgccatgtgaagaaggttcttgcttcccctttgccttctgccgtgattgtaagtttcctgctgcctccccagccgtgtggaactatgagtcaattaaactttttcttcataaattacccagtctcaggtagtcctttatagccatgtgaaaagggaccaatatagctcttatccygtgggatgtaatgctttgttatctccaagtagatagtgtcagaattaagttaaaattgtagggcacccgctgatgtctatgaaaaccagttgcttggtatttggaagaaatacacataaacacacacacacacacacacacacacacacacacacggtgtgagaattgtgttgagtaatcttgtgagggaggaaaataaaaaccaaaacctctttcctctgtctctgatacttccatagatttttatc

SEQ ID NO: 763909 - DNA, 630 bp, Homo sapiens
tattcatttcttctagattttctaatttatgtgcatagaggtgtttatagtattctctgatggttgtttgtgtttctgtggggtcagtggtaatatcccccttatcatttctgattgtgactatttgattcttctctcttctttagtattctaggtartcgtctatgtattttaataagttttttcaaaaaacaagctcccagattctttgagtttttgaagggtttttcatgtctctttctccttcagttcagctctgatcttggttatttcatgtcttctgctagctttgggttttgtttgctctttgttctctagttcttttagttgtgttcttaagttattaatttgagatctttctagctttttgatgtgggcatttatttctataaatttccaccttatcactgctatggatgcatcccagagattctggcatgttgtctctttgttcttattggtttcaaagaacttcttgatttctgccttaatttcattatttacccacaagtcatttgggagcaagttgtttaatttccaggtagttgtgtggttttgagtgactttcttaatcttgagtactaatttgattgcactgtggtctgagagactgcaggttatgatttcagt

SEQ ID NO: 763910 - DNA, 754 bp, Homo sapiens
atgctatttcttcactccttttttcacccccagagttttctctgttgcttgtcactggttgcctttacaccctttagagattccccaggcctctcttgaacctcggaggtggaggctgcagtgggctgaggtgagtttgcaccattgcactccagcctgggcaacagagtgagactgagtcacaaaaaaaaaaaaaaaaaaaaatcccttaatactgcccatgtctctctaagtagtaccttcattaaatctcatttgaaccatccggaataaattctgttgccttccagaacacaaacgatagatgcatcaattatgactgttttttttctgaaatgacccagattcagcatcagaattttgttaaatataaagcccctggcagcttctacaattgtatgaaatttggtatgcaggataaattrcctttagaatccatactctggagtatgggacggtggccgttacactaatcactaagcataaagccctttttaaaagttatatattttctttttcacactgactaattgaaagttaaaaagccaaatatttagctttgggctactggtgatcttcttaggccaggtacatgtaacattgtcttttttttttttttttcaaatcacaatgtttttcactttacttgaaaaactttgtagataatactctgcttaatgtactgctaaatagctcacctcctgacatttcattaagggcaggaaaaagggggggttattttatttttaaaaaa

SEQ ID NO: 763911 - DNA, 510 bp, Homo sapiens
taaaaaaaaaaagaaagaaagaaaaagaaaagtaacagagataaagtgaggggagaaggaacagatggatgagaccatcagatttcactttccgggaaggaaattcattagtacagtaattcagctctttaattatgaatgggtctatttaattctccaagtttactactgatttcytgaatagcatatgtttctgagttcaacatatttattagtcctttccagtaccttagcaaagagctgaacgaatgacccctcagcaggtgagcactggcgtggggtgacctacccgtgaccatctccccagaaagtctggaccgcagaaatgttcacagtttttaatgaatgtgcacagctcttgaatatgcacagtaggacatttttaagtgattaacactcaaatttttgaaattatcatgaattattgtccctaacattaagaattgagtaaaagaatgcttctgcattttcataataaacccagaagattaatatttctggcccaactct

SEQ ID NO: 763912 - DNA, 510 bp, Homo sapiens
taaaaaaaaaaagaaagaaagaaaaagaaaagtaacagagataaagtgaggggagaaggaacagatggatgagaccatcagatttcactttccgggaaggaaattcattagtacagtaattcagctctttaattatgaatgggtctatttaattctccaagtttactactgatttcctgaatagcatatgtttctgagttcaacatatttattagtcctttccagtaccttagcaaagagctgaacgaatgacccctcagcaggtgagcactggcgtggggtgacctacccgtgaccatctccccagaaagtmtggaccgcagaaatgttcacagtttttaatgaatgtgcacagctcttgaatatgcacagtaggacatttttaagtgattaacactcaaatttttgaaattatcatgaattattgtccctaacattaagaattgagtaaaagaatgcttctgcattttcataataaacccagaagattaatatttctggcccaactct

SEQ ID NO: 763913 - DNA, 625 bp, Homo sapiens
ctgggaaaactggctagccatatgcagaaaactgaaactgggccccttccttgcaccttatacaaaaattaactcaagatggattaaagacttaaatataaaacccaaaaccataaaaatgctagaagaaaaccttggcagtaccattcaggacataggcatgggcaaagacttcatgacaaaaatgccaaaagcatttgcaacaaaagccaaaattgaccaatggkatctacttaaactaaagagcttctgcacagcaaaagaaactatcatcagagtgaacaggcaacctatagaatgggagaaaatttttgcaatctacccatctgacaaaggtctaatatccagaatttacaaggaacttacatatatttacaagaaaaaaaaaaaacaaccccatcaaaaagtgggcaaaggatatgaacagacaattcacaaaagaagacatttacgtggctaacaaacatacgaaaaaaagctcaatatcactgatcatcagagaaatgcaaatcaaaaccacagtgagataccatctcacatcagttagaacggcgattattaaaaagtcaggaaacagtagatgctggcgaggctgtggagaaataggaacgcttttacaatgttg

SEQ ID NO: 763914 - DNA, 615 bp, Homo sapiens
aattaggagaaaagaactcatattaggagcttaaatcactgtttcaggttagttctattctgaagacaatttcaatcccatcttcccagctccctccctgtgcacctagagcctggccggtcttatttatggctgagggaggctttcctgaggcattgaataggagttcttaaccagggttctgccccgagctgggtagagacgcatatcgtgcttcatatgctcataagctgctatgggcatttgtaagtaaaggatgtacagctctcaaagatcagaaggaacaggaccccgaaaaggtgaatggtgactgcatttgaagacactgttcttcagcagacaatgaaactcacgatatgctgtgtgtaaggtggaacagtacagtcacacactccggggaggaaacaaactcactttattgtggtaacrctttcatccaaatataacttttcctatccacccagtcaacaaatatttattgaaaattgtctcgtggttttcttaggccgcagacactgagcagtgaggatacagtgggcttggttctaatggacctgtggccaaggcggggaggaagacaggatcacatgggggcacaggcagatgtctcattgc

SEQ ID NO: 763915 - DNA, 565 bp, Homo sapiens
cagagagattacctggggaactttatctgcatgataagacaacctttctttctgtgtggttctgcccctcaccttcccaaaaagaatcatttactaataattgtcctcattgggcctattcattcccccattatcttctcccctatgaagggggcatttatgtctcaaccatctggcctctctttgagttcagattttgtatgactctcatgcatacatgtgcatgtaataaatttgttatgcttttctcttgttgacctgttttttattatagggatgtaggccataacactttatgatggggaggaaagggatcaccccctttctgccctacatcagtttacaatctgtttggcagagatagaatcctcasaaagcaagatagaagcatagaagatgaagtaaccagacgccaccctgcctcctccagtgaatgcagctacaaaaactgaaaagggctgggctcaatggctcctgcctgtaatcccatcactttgggaggctgaggcacaaggattgcttgaggccaggagtttgacaccagcctgggcaacatagggagacc

SEQ ID NO: 763916 - DNA, 550 bp, Homo sapiens
aacacagagcaggtgaggagaacaaaacaaagaaatatgctcatctcttggaaaccgtaagccttagaattattcgattttctcattatcctggctgtcatcccataagctgtttctctgagaacaaatactcttagaagtggtgggtcttgggtgagctaaggtgagccgacgcatcagttttagcaatcctgaaactattgctagtatggacagcagaggcytaaagggcatggaggcttggaaacggaggcatttgaactctctaggaaggcaattagacaattgctaagaggcctgtagagaaatcagaatcccttgcatttttctggatggggaagaaagaacagcagtggctcccacttccatcaatcctgtagaggtgaggtgataccatcaaaggtaatttaagctagaacttcaaaatctgttgctggatgctgatgggtgacataaagaaagcagaactcctcagcatctatgtagtttctgaattctgtctcagaagatgatcttttgactgaaaatgatgaataaccattcacaggtg

SEQ ID NO: 763917 - DNA, 635 bp, Homo sapiens
atttgcataaagtgcagcaagaatagtgattgaccatacaggcttttctcaaattggctttgtggaaacattttcataagaaatctcagattagacttttaaaagccttgaggctataaaaccaaggcaaggatttgtcattaatcattgactgtctgcaatgcctgtatgaattgggtaaattcttctcttcttgaggtcccaaaataacttgaggttcctgggcacgtcagaaagtaacactcgtcacttaccacaggtcaggaaccttgtgaagaaactgtgtaccttgtaaaggtaccttttcagtcaaggtacacaggtcaggaaacttgcaaagaaactgggttttttattagctctataaagtcaacttcaattcctcaaagcaatctggtcatatctgaaaatattccattccagtcaaatcctccaaaagaatacagattcatattgaatgtacgcaaatagctgtcttgtcytaaattaagaataatcaaaaaagtttccaaattctggagatatcaggtagaaagaaagataaatgcttcaaattttgctcacgaagtatactttacccaatttcttgtaagctataaatagctcaaaagaaaagggttttttttgtttttttt

SEQ ID NO: 763918 - DNA, 584 bp, Homo sapiens
tgacataattaaaatagtaataaatattaaatagtactaaaattatttatttttcacaaaagagtaaagaacaaagaaactagaaaacatgagacatacagaaatgaaatagcaagatagaagaacaaaatctaacattaaatgtgaatggattaagttcagattatcagatgacaaaatacaatatccaactacatgctgtctagacgagttactctttaaagacacaaataggttgaaaataacgtgatgaaaaatatacatcaagsgacagttactgtataagctacaataatatctatatactagctatatctatattaaaagctaaatatgtattagaaacaaagaaggatgtttcataataataaaagaatcaatgaatcaagaagctgtaaaaatataaatatatatctaacaaaagacccccaaaatacatggagctaaaaactgataggtggtaagacgaaacaaacaatacaacaataagagttgatagacatttctccaaatatatacgaatagtaaataaacacataaaagatgttccatattactagtcattagggagatgcagatcaaaa

SEQ ID NO: 763919 - DNA, 584 bp, Homo sapiens
tgacataattaaaatagtaataaatattaaatagtactaaaattatttatttttcacaaaagagtaaagaacaaagaaactagaaaacatgagacatacagaaatgaaatagcaagatagaagaacaaaatctaacattaaatgtgaatggattaagttcagattatcagatgacaaaatacaatatccaactacatgctgtctagacgagttactctttaaagacacaaataggttgaaaataacgtgatgaaaaatatacatcaagcracagttactgtataagctacaataatatctatatactagctatatctatattaaaagctaaatatgtattagaaacaaagaaggatgtttcataataataaaagaatcaatgaatcaagaagctgtaaaaatataaatatatatctaacaaaagacccccaaaatacatggagctaaaaactgataggtggtaagacgaaacaaacaatacaacaataagagttgatagacatttctccaaatatatacgaatagtaaataaacacataaaagatgttccatattactagtcattagggagatgcagatcaaaa

SEQ ID NO: 763920 - DNA, 479 bp, Homo sapiens
gggccaaatccctcttcctctgccttttgctccactcaggccctcaatggataggatgaggccacccacattgggagggcacctgcttcactgagtctaaggactccaaggctgatctcatctgaaaacaccctcccagacacacctggaaataatatttattctgagcactctgtggtcagtcaaggtracacgttaaaattaaaggtcacagcattgaatcaaaagcaccataatcaaatgaaaaggcaaagagaaaaactggggacaacttgcagagctgtcctaggctggccaggggcttctactgtgcatgtggaataatgagaaactaaacaataatgggaaaatcagaataaaacatagaaatgacattaatagctttctgtagaagataaatgcgtaaacattaaaactatttggcttcattggaaataaaaagttcctaaaaatttagattaaaaagcttgagattattt

SEQ ID NO: 763921 - DNA, 500 bp, Homo sapiens
ttcactctacctggcctgatagctagctttccctgatgggaaagtaaacaagtgaaatttcatttggtggtaggtgtattttcatatttgcattaaaaataccctaaggggaaaaagtaaggacattctggaggtaagatttaagatgacagacagaaagagagctgaagagttcctaaaatctaaaatcaaacttggttcaraaatatgggaagcacccttacttatttgaaaaatattttgggattgaaaaataaatttaattatacaaatacttttacttaaaaaataaaatacttcatattgtgtgggtgctgttatccttctgaaacaaagacacaatcctgtttttcctctaatcagaaacatttcgtgatgacccattgcttatagggtaaaatctaaactccttaacaagagggtttccacacaatctatctctaatatttctatctttaatttcttcagttcattctgcccttccccacctcacgttcttg

SEQ ID NO: 763922 - DNA, 656 bp, Homo sapiens
ataatatgtcaagttgttacagtttgttaaagatgttaatttgttcatctgtccttaaatattcataagtggtttattgaagccatatagatcaagaaatgaaaaaactgaagctgtataaaattcagtggtgtggtcatgcctaaacaaaataaaaattttgcctttcaatgaaaacttgttcttcattaatagggctgtgctttgagaattggaaaaaggactagcagggcctagctttttcaggaagataaaaaacttagcttatgagatatatttaattatatattgtttcacgattcttcaaaaactgccacatctgttgtttcacatcaccctcataagaatgttgtgtagtaatcagagtaggcttaaaatctactttaacaayggaagaaattgacacttggggaggatgtgacttatttaatgttcaacgactggaatgaggtgtagctagatggtctttgtcctttcattgggttctctcccatcagtccatcttcactgagaagagatactcagtaaatgtatcctgcttgactgacataaatatatatatttaagaaattttaaaattacaggatatcaaacttagtaaaaaatctctaagctgttttagaacataaatgtactctacattactcctctggttt

SEQ ID NO: 763923 - DNA, 514 bp, Homo sapiens
tagaaaataactatattaacaaatataacatggctcctgtaagtattactttgttcccaagcacttactatttgcttgccatttggtccttgctattgttattgttcttactattttcttttactttttaacttttcttttaggtttaggggtacatgtgcaggtttgttatataagtaaattcatgtcacaggcatttgttgcacagattatttcatcacccaggttttaggcctagtacccaataggtattttttytgctcctccccctcttcctacccttcaccctcaagtaggcgtcactgcctgttgttcccctctttgtgttcttgagttctcatcatttagctcccacttattagtgagaatatgctgtatttggttttctattcttgcaaaagtttgctaaggataatagcctccagctccatccatgttcctgcaaaagtcatgatcttgttcgtttttatggctgcatggtatttcttactgtatatgtcacattttctttatc

SEQ ID NO: 763924 - DNA, 626 bp, Homo sapiens
cctatttacattggcaaaaatgtaaaagactgaccagacaattgctgacaaggatgtggaacaactggagatctcatacattgatggtgaaaacataaataggaaaatccactttgaataacattttggcagttttattttttgtttgtttgttttattttgaggcagggtctcactttttcacccaggctggagtgcagtggtgcaatcataactcactgcagcctcaacctctcaggctcaagtgatcctcctgcctcagcctctcaagttgttgggactacaggtgtgtgccaccatgtctggctaattttattttttaatttttaaaaatgttttatagagatgaagtctcacatktcacccaggctggtctcaaactcctggactcaagtcatcctcctgccctggcctcccaaagtgctgggattacaggtgtgagtcaccatgcctagcattttggcagttttttaaaagttaaacatacacccatatgacctagccattatacacctaggtatttaccaagaaataaaagcatgtttgtgtaaaatgttcacaagtattaatagtagccttatttgtgatagccaaaacttgtaaacaatctaaatgtttatcaacaa

SEQ ID NO: 763925 - DNA, 612 bp, Homo sapiens
gtatatatgagttgagcctgtaaagttatgagatgggatttttcttgtggtttgtggaatcagttttagaagctgaggaaacaacggaggtgatttaggctgcccagatggataagttgtaagagaatttatgtgatgctgagatatgtgatagagttgagatgatgtaaatgaagagattttggaaagtaraaagcactacataaagatattccaactcagagtggttaataatcactatgttattcagcacattgactaggaattaaattattttatataagccttgtatttcaggttaaatgttatccaagagagcattttaggaagtgatttctatttcatctggagtagtcttctggttttcattatgattttaatattattgacaatgcatatttgttttagctgaggaggatgtacacagtgtaacttgtacctttttccagagctgttgcaatgttctacaggcaagcattaattcaactttgctaatggatataaaggcacagaaaagttgagagtgcttcttgatgtcacacagcaaggcagcagcaggataaggttaggacacagaagccttgaccttcagttatgtgctcacaactcttg

SEQ ID NO: 763926 - DNA, 626 bp, Homo sapiens
caaaaatcaggaaattaaagcacacataagaaactagaaaatttttacagaatacactaatgagacattgtgcaatttcttgaaagaaacctgtgacagtaacctttaatgatatcctaatacctctcgtatccaggatccaaatgtacaaagaaagaaaaaatgctaacaaataattttccaagatttttgccacgagcataagcactcctatttgaccaacggattaaattacagtagcaatacctatgtgartcattttggattcattttgatccagaaaaaaaaatgctgggaaccattattatttataacttgagcatcacgctggaaaatgtcacttgaatcttacttgaattatatttcctatgtgaaaatgaaacagcccacaagttactttaaatctatagtgtatgtggatgtcagcactcacagagacaggaaaaatttgtttctttctctttccagatgtaaaaagcagcaaacttactgattttttttcttattttatcctagaagaaataatattcttttccccccactccccaattatgttgctggcctcaaaggtcaatgaacacattcatgcagaaagacatagatggctatagggaactggctctttc

SEQ ID NO: 763927 - DNA, 629 bp, Homo sapiens
ctcttcttttcctccactattctcttccctcctttcatttattctactaacaacaatctatcatattttgtcaggtgaatttttgagttagctgatctcgaagggccatttgagttctaacatcctacaattcttataatgaaattttttttgatttgttcccttcaagttaattgccactgttataaccttagttctagtccttctatttcaaagaaaattaaataaattgccacctgcatagccttcccttattcccaccttagcaacatccccataccccaactaaattaattctgtatcatctcctgattagtgtttaccagacaatgcatgtatcttatgttactctttgactgaagaacccgaaaaagatcccaagtttctgccacggaatttccagaaatacattcctggtttggtaatagttacttttactcatgcatcatacatgcaaacacacaaacaygcatatacacagttctatagtaaaaaacacctggaaaagtaggttataaaaatttaagtgcccccccccccaccttttaaatgaagaatgtcttgggtttctcaggctttttaatgtaataattatctagagggaaattacatagaaattcagcgtttct

SEQ ID NO: 763928 - DNA, 595 bp, Homo sapiens
tggaaagcagagtggcaattcctcaaagagctaaaaacagaactactgtttgacccagcaatcctgttatgggtatatacctaaaggaatataaatcattctaccataaagacacatgcacgcatatgttcactgcagcaccattcacaatagcaaagacatggaatcaacctaaatgcccatcaatgacaggttagataaagaaaatgtggtacatacacaccatggaatactatgtagccataggaaagaatgagatsatgtcctttgcaggaacatggatggagttggaggccattatccttagcaaactaatacaggaacagaaaaccaaataccacatgttctcacttataattgggagctaaatgatgagaactcctggatgcaaagagggaaacaacagacactggggtctacttgaagatggagggtgggagaagggagagggtcagaaaaaacaactactgggtacctggcttaaaacctaggtgatgaaatagtctgcacaacaaacctcatgacatgagttaacctatataacaaacctgcacatgtacccctgaacctaaaagttattttaaaacgtactagt

SEQ ID NO: 763929 - DNA, 622 bp, Homo sapiens
atcttaatagacattttaacaagaagataaacggtaataagtacatgaaaacacggtcacatcactaatcaatagataattcaaaatcaaaaccaaaatgagatactacctcacacctattaggattgttataatacaaaagataggtaataacgagtgtttgtgaaactgtagaaaaattaaaactttcatatattgctagaaggaatgtaaaatggtgcaaatgttatgggaaacagtttgacagggactcaaaaagttaaacatagagttagcatatgacccagaaatttcattcctaggcatatacccaagagaattgaaaatacatgtccacacaaaaacttgcacaaaaatattcatagtagcattattcataacatcaaaaagtggaaacaatccaaatgtctatcaactgatgaatggataaacaaaatatggtatactcatacartgaaatattattcagcaaaataatgaagaaataatggatggtacaacatggacgaaccttggaaacatcaggctaagtgaaaaaagccggtcacaaaggctgcatattacatacttccgcttataggaaatatctagaaagggcaaatccatagaaacagaaagtaga

SEQ ID NO: 763930 - DNA, 603 bp, Homo sapiens
gattccttagattctttggattgggtttcaactacctcctgaatctcagtgatcttcgttgccaaccagattctgaattctatgtctgtcatttcagccatttcagcctcattaagaatcattgcaggggagttagtatagtcacttggaggtaagaggacacactggtttttgaattgccagagtttttgcattggttctttctcatctgtgtgggctgatgttccttataatctttgaacttgctctcctttcgatgagactttttacttttattttttttgctgttgagggtttgattgtagcrtaagttggattcagtaatctggctttgtttctcgatgattttagggggccaagactcagctcagcattcctgcgctttgctctctatccctggagggctgagaccaggcccaaaactttgttctctggcacctcaaagttaagcacctgctgcacttgaggaacctaggtatacctggtgtgctggcaacaacactccaacaggcagtgccggcaaaagcactttgtcagagcagtgacagtggcatctgcagtgtgtactggcagggttgagatgactacagtgaagtccatgca

SEQ ID NO: 763931 - DNA, 655 bp, Homo sapiens
gcgggtgatttctgcatttccaattgaggtgcccagctcacctcattgggactggttagacagtgggtgcagcccacagatggagagcagaagctgggtggggtgttgcctcacctgggaagcacaaggcgtcagggaactcctttccctagccaagagaagccatgaggcactgtgccgtgaggaatggtgcattgtggscaacatactatgcttttcccatggtctttgcaatccacagaccaggagattccctcgggtgcctacaccaccaggatcctgggtttaaagcacaaaactgggtggctatttgagcagacaccaagctagctgcaagagtttttttttcataccccatgtgcgcctggaatgccagcaagacagaaccgttcactgccctggaaagggggctgacaccaggggccaaatggtctatcagcagatcccaccccaccccccctccaacggaaccgcagcaagcttagatccactggcttgaaattctcactgccagcacagcacctgggatgcttggtgcggggaggggtgttcatcattactgaggcttaagtaggtggttttcccctcacattgtaaataaagctgcagggaagttcaaactgggcagagcccaccacagctctgcaaagttccc

SEQ ID NO: 763932 - DNA, 655 bp, Homo sapiens
gcgggtgatttctgcatttccaattgaggtgcccagctcacctcattgggactggttagacagtgggtgcagcccacagatggagagcagaagctgggtggggtgttgcctcacctgggaagcacaaggcgtcagggaactcctttccctagccaagagaagccatgaggcactgtgccgtgaggaatggtgcattgtgggcmacatactatgcttttcccatggtctttgcaatccacagaccaggagattccctcgggtgcctacaccaccaggatcctgggtttaaagcacaaaactgggtggctatttgagcagacaccaagctagctgcaagagtttttttttcataccccatgtgcgcctggaatgccagcaagacagaaccgttcactgccctggaaagggggctgacaccaggggccaaatggtctatcagcagatcccaccccaccccccctccaacggaaccgcagcaagcttagatccactggcttgaaattctcactgccagcacagcacctgggatgcttggtgcggggaggggtgttcatcattactgaggcttaagtaggtggttttcccctcacattgtaaataaagctgcagggaagttcaaactgggcagagcccaccacagctctgcaaagttccc

SEQ ID NO: 763933 - DNA, 667 bp, Homo sapiens
taataacatgcaaactggatccgtggttcagtagcccaggcctctttgcacatatagattattgctctgccctttatagtggggataaatttgttgagtggtggcatttggtctgtgaataaccagaggtcggtaatttgccagttatttccaagctgggaaactccaggccaagctggttttaccaagtggaacccgaaaatatatatatggtgcccttgcttctctggaatctggctgagggtctcagcatcgtatcccggctaggaccctcagctctcctgtttttcagctctcctgttgcagttatttattgctgggcaacaaatcaccccaaaacttagtggcttaacacagcactgatatgtcacctgccacagctctgtgggtaggtaatcgggcaggtctgctggtctcacctgggatcattcacatcactgtggtccgtggatggctggcagttggtgctggtctgcagtgccccagtcttcatcctccaggagrctggacaggtctttccatagcatgactgtctcagggcagcgttccaacagcgtgaaggctaggaactgcagggcttcctaataggcttcagaacgtgttcatcgttgcttctacctcattctactcatcagagcaagtcacagccagcccccattcaaagaac

SEQ ID NO: 763934 - DNA, 561 bp, Homo sapiens
tgaagaacttgcctttatatgtcatatatattttttacatatatacatatatacattttttttgagacaaggtcttgctctgttgcccaggctggagtgcagtagcgtgatcttggctcactgcaacctctgcctccctcccaggctcagaaggtcctcttgcttcagcctcccaagtagctgggactacaggcgtgtaccaccatgcctgtaaaaatataatttttatattttttgtgcaggcagggtttggtcatattgcccaggctggtctcaaactcatgagcttgaacgatccacttgccttggcctcgcaaagtactgggattacagggatgagccmccgtgcccaactgacatattttctttttacatagatatgcaaagtaaattacattaaatatgtagtatatcctgggacatgtttttccccaagtagaattactttttaaattatattgatctaggctgtacttaaaatctactttagtgttcaacaatgagaacacatggacacagggagaacatcacacaccagggcctgtcaggtggggggcaagg

SEQ ID NO: 763935 - DNA, 602 bp, Homo sapiens
gaaccagttgatggttgtgcagttcaccaaggctgggtactggcggatccagttcctgggaaggggtttggagaggctgtaaattccgtgcacagacacagcctccaggtactggcttcccaacacgcatccactcactttctaagaacctaaaatgccccatccccttgctcctgtatctccttgtccaaattctgttcctgcagagctagttcagcagagcatttagaaacagcttctggcatcagaaaaacctggttctacactttcgaggtgtggatctccagcaagtatctaagctctttgaatgccagtttcctcgtctctaaaatgggaataataatacatgctgaataggatggttgggggattcagtgaggtgtcacacgtgaaaagctcagcgtagcgcctggctatggtaagtacmccgtgtatcccaaacattaaaaacaaaatggtaggccgggcactggagtttgtgcctgtaatcccagcactttgggaggccaaggcaggtggcttccttgagcccacgtgttcgaaaccatcctaggcaacatggcgaaaccccatctttacaaaaagtacgaaaattagctggc

SEQ ID NO: 763936 - DNA, 563 bp, Homo sapiens
gtatggtcaatgataaacatttcctatttctttgtaaatcccatcttcctgcagacatctcatttccatcattgccaaaaaagtccttccatccctcacccctgtagaactactctctcttaactatcaaacagttctgcctgaactctgactatcctcttctacatctccctaaaccaaggtacttgatcttcttgtatcattcccaaagattaattcactaattttctcagagcaaactgtaatgaaggcagggaatagggcctttacacttcaraagggcacaggctagctcctggagaggagtggagatctgggtccaggcacccctcggccccaccacttttcctcaaggcacagaaaaagccaaactcgaaatacgtcttgagtctacacgagtgtacatctccttgcctacaactccgtgagatcatcattgaagtacagaagtattgcaggtgtgtgaagtgtaccgtccatactgagatagtcaaattcttcctcctcatcccggatcccattctcttccagggtaaaatccatgttcaggttcttcccttcat

SEQ ID NO: 763937 - DNA, 641 bp, Homo sapiens
cttggttcctctgcttcagtttcaggggccccaatccctagcctagggcctggaggtcccctgagtttgctcagccaactcattaccctcacacccaccccacccccagtcacacggatcgtgcgggtcattggacagcctcggggcaacatgctcctggtgggtatcgggggcagcggacgccagagtctggcccgcctggcttcatccatctgcgactacaccaccttccagatcgaggtcaccaaacattatcggaagcaggagttccgagatggtacggctgggtttctgaaatgctaggaataaaagatcagatgcatacattcctgcagtgacaagagaggagagatggcagccagatgggcagacgtgtctggcccgtgttgggtgtaggatggtgtcgcgtgtatgctgcggggcggggagggttcctaaatytcagaaaaggaatcaagcccaggatggggaatctgcagtgagtttgtcctccttccctcccccggccagatatcaagcgtctgtatcgccaggctggggtggagctcaagaccacgtccttcatttttgtggacacccaaatagctgatgagtccttcctagaggacatcaacaacatcctcagctcaggcgaggtgccc

SEQ ID NO: 763938 - DNA, 545 bp, Homo sapiens
agaggaggatactcctactgaaaggaagggcagaaaagaggaccgtggtccagaagctagggaaaagagtgcgtttgaagaaagtggggtgtagtctaccatgttaaaacctacaggcttgctgggtgctgtggctcacgcctgtaaccccagccctttgggaggccaaggtgggcggatcacctgaggtcaggagttcgagaccagcctggccaacatgacgaaaccctgtctctactaaaaatacaaaaataagctrggcatggtggtgcgcacctatagtcccagctactcggaaggctgaggcaggagaatcacttaaaccggggaggcagaggttgcagtgagccgagatcgcaccactgcactccagcctgggcgacggagcaagactccatctcaaaaacaaacaagcagaaaaacctaccggcagatcaaggaggataaggcctgggaaacatccatggggtggagtgctaggggatgcttggtgagtgtgatgagggcatttgatgggtggagtgggagccaggtctcagggatga

SEQ ID NO: 763939 - DNA, 597 bp, Homo sapiens
  misc_feature 65: n = A,T,C or G
tctagaaatcagaagatgggtccctctccctctccccggtctccctctcatgccaccaaagttgngaaagccgaggctggactgtactgccgccatctcggctcactgcaacctccctgcctgattctcctgcctcagcctgcagagtgcctgggattgcaggcacgcgccgccacgcctgactggttcttgcattttttggtggagacggggtttcgccatgttggccgggctggtctccagctcctgaccmcgagtgatctgcctgcctcggcctcccgaggtgccgggattacagacggagttttgctcactcagtgctcaatcttgcccaggctggagtgcagtggcgtgatctcggctcgctacaacctccacctcccagccgcctgccttggcctcccaaagtgctgagattgcagcctctgcctggccgccaccccgtctgggaagtgaggagcgtctctgcctggccgcccatcgtctgggatgtgaggagcccctcagcccggccgcccagtctgggaagtgaggagcgtctcttcccagccgccatcccgtctaggaaatgaggagcgtctctgcccggccgcccat

SEQ ID NO: 763940 - DNA, 597 bp, Homo sapiens
  misc_feature 65: n = A,T,C or G
tctagaaatcagaagatgggtccctctccctctccccggtctccctctcatgccaccaaagttgngaaagccgaggctggactgtactgccgccatctcggctcactgcaacctccctgcctgattctcctgcctcagcctgcagagtgcctgggattgcaggcacgcgccgccacgcctgactggttcttgcattttttggtggagacggggtttcgccatgttggccgggctggtctccagctcctgaccccgagtgatctgcctgcctcggcctcccgaggtgccgggattacagacggagttttgctcactcagtgctcaatcttgcccaggctggagtgcagtggcgtgatctcggctcgctacaacctccacctcccagccgcctgccttggcctcccaaagtgctgagattgcagcctctgcctggcygccaccccgtctgggaagtgaggagcgtctctgcctggccgcccatcgtctgggatgtgaggagcccctcagcccggccgcccagtctgggaagtgaggagcgtctcttcccagccgccatcccgtctaggaaatgaggagcgtctctgcccggccgcccat

SEQ ID NO: 763941 - DNA, 575 bp, Homo sapiens
aaaagttatgcccacacaaaggggaatgttcacggcagctttatttgtaatagtcaaatattggaaacaacccaagtgtgttcaacaggagaacaaataaacaaatgctggcgtagccatacaatggactactactcagtaataaaaaagaatgaactactaaaaaccaacaaaacactatggatgaactacaggataagtatagaggrtaagagcagaccaaaatcaccaaaaacaacaaaaaaaatgcaaggtgtccattttcatgaaaaaaagaaaaaagggtacatactgtataacatcatttatacaaaaattccacaaaatgcatactaatctatggttatagaaagcagaacagcggttgcttagaaataggggaaggaatggagaaacaggagaggtggggaaggaaggatcacaaactttcaggatcgatgaatatgatcattcttgattgtggtgatggtttcacgggtgtacacagtcaaaatatacacattattcactttatacacgccaattttgaatgtcaactaaacttcagtaaaactgtataataaaatctatcttaa

SEQ ID NO: 763942 - DNA, 575 bp, Homo sapiens
aaaagttatgcccacacaaaggggaatgttcacggcagctttatttgtaatagtcaaatattggaaacaacccaagtgtgttcaacaggagaacaaataaacaaatgctggcgtagccatacaatggactactactcagtaataaaaaagaatgaactactaaaaaccaacaaaacactatggatgaactacaggataagtatagaggataagagcagaccaaaatcaccaaaaacaacaaaaaaaatrcaaggtgtccattttcatgaaaaaaagaaaaaagggtacatactgtataacatcatttatacaaaaattccacaaaatgcatactaatctatggttatagaaagcagaacagcggttgcttagaaataggggaaggaatggagaaacaggagaggtggggaaggaaggatcacaaactttcaggatcgatgaatatgatcattcttgattgtggtgatggtttcacgggtgtacacagtcaaaatatacacattattcactttatacacgccaattttgaatgtcaactaaacttcagtaaaactgtataataaaatctatcttaa

SEQ ID NO: 763943 - DNA, 537 bp, Homo sapiens
agtaaggaaaatagcaactgacctaaataactttaaaagtatcttgaccagttactgtaagctaaaacaacaaaaaggctgtacacaaatactgtagtctaattattaattatatttctcacataggtacaagttaactattctgaaactattttacatgtatactagagttgtacaaataaataaatttatttcagataatgggaaccaaatttttctctgtcagagaaaaaagttacaaatcagcacaggaggaggttagaatgagcccgrtggtacacttttagagaagatatctatcttgaactcatgcatattttaatacattgatatataaagtaataattatagatatgagtgtatacatgctagaatgaatgtatacatatgttactacaaacacatacattcaactcattgaaactgcaggataacgtatgattttattaaaatcatgatttttttatttcaatagttttgggggaactggtggttgttggttacataaataagttctttattggtgatttctgagat

SEQ ID NO: 763944 - DNA, 491 bp, Homo sapiens
ccagtgagaaaagatgtggagatggaaaagtggtattgatgacttgaccctatgtaggcatagactaatgtacgtgtttctatctgagtttttttttttttttttgagacggagtcttgctctttcgcccaggctggaatgcagtggtacgatcttggctcactgcaagctccacctcccgggttcatgccattctcgctgcctcagcctccmgagtagctgggactacaggcgcccgccaccacgcctggctgatttttttttgcatttttagtacagacagggtttcaccgtgtttgccaggatggtctcgatctcctgacctagtgatccgccctccttggcctcccaaagtgctgggattacaggcgtgagccaccgcgcccgacttctgtctgagttttaacaagaaagtttaaaatttttttaaaaagtaaaaattaataaaatcaaaaatagaaaaccacatatagattatggatatgaagaaa

SEQ ID NO: 763945 - DNA, 553 bp, Homo sapiens
aagaaagtttaaaatttttttaaaaagtaaaaattaataaaatcaaaaatagaaaaccacatatagattatggatatgaagaaaaatcttaggccaagtgcagtgactcacacctctaatcctagaacttcgggaggatgaggtgggtagatagcctgagcccagaagttcaagaccagcctgggcaacgtgacaaaatcccatctatacaaaaatacaaaaaaaatcagcctggtggggtggtgcacacctttagtcccagctactcaggaggctaagctgggagaatcacctgarcctccagcaagttgaggctgcagtgagccgtgattgtgctactgtgctctagcctgggtgaaggagtgagactctgtctcaaaaagaaaaaaaggaaaatgtatttgtgttttaagctaaatgttattactagagtccaaaagttgaaacagttttttactagtataatttaagttctgggatacatgtacagaacgtgcaggtttgttatattggtatacatgtgccagggtggtttgctgcatccatcaaccca

SEQ ID NO: 763946 - DNA, 626 bp, Homo sapiens
tcctctcaccaaaaaataatatacatgcaggatcaaataaatgtacacttcactacttcttccccttctatttgctatcggtctcccatggcttggatttcccctgtcccaactttaagcatagtgatggtatcgctactaaaggaggtaaatctattaccttatggcctacaatgtctgctatcttaagccctctggcaaaaaggcagaaagacatcagtcagaactratgaattcttcaggaatgctgtgtatagaggaaaatgatgcttcagtaaaggaagccaaggcatgtgatcagaatacatagtttggagcaccccaatccaaaaatctgacatctaaaattctccaaactctgaaactctgagcatcaacatgatgccacaagtaaattccacaactgacctcatgcatcgggttgcagccaaaactttatttcatgtacaaattacttaaaatattgtacaaaattacctttgggctatgtatataaggtgtatataaaacataaatgaattttatgtttagcacatgggttccatccccacaatctctcattatgtatatgcaaatattccaaaatccccccaaaatgcaaaatctgaaaacacttatggtcacaa

SEQ ID NO: 763947 - DNA, 597 bp, Homo sapiens
cacttaaaataagccatactatttcatcaggacttatgaaatgttgtttattgttatagaagaacgtgaccttttgtatttattgacattttttctgtctcattctccagcattttggagattgacttttatttccttaacatcatgaaattttgttttattaatactacaygcctgtgattgagtcttctaaattcgaggtatatttatgtttgacatttgtcaaggggcaacactggctgcctcatgggaggcaccagaaggatgtgtttaaaacttattcctatttaaatttccttagagaatttatggggctcagcactcctgaactctttaatttaaagatttactgctttgtcagagaaactaattaaatcttttttgaagtgtcagtatcatagcagcattagactcaattttctgttcctctattatgggaatagaatataaaatagaagtgtattttaaactcaattttttagcattatgtatcatttatgtcagactcctgcgaattggcatcatagtaactatggaattcgccaaaacaaaacactcaagaattttagtaagcctacttaacttttgattacagta

SEQ ID NO: 763948 - DNA, 634 bp, Homo sapiens
tcagttgggtagttctggcttggggttcatgaggttgcatttagatgttgtctggggttctggtcatctgacggtttgactgaagctggagaatacacttccagggtggttcacatggctggcaaatttgttctggatgttgttaagtggccttagtttctctgcacatgggccttttcatgtggctctttgtcctcaaatcttggtggctggttttcccaagagcgagcaatccagaagacccaggcagaacctgcagtgcctttttgatctttccctggaagacatgtagtgtcacttctcattttcttggttgcccaagtcagccctgatagtgagaggaccacacaagattaacatataccagggttattacgtgctgtcatagaagctggctacaacaggtggcattaatttgtagtgtcatatttaatctgtagtagtcaggctgctgctgaggttttttcttttcatgtkttttgaatgactaaaggtaagtttattgtgatttagaacagctaaaaataggaaatacatacagtggtagtctgtaccttggactctagtaattagcagtgggtttttgaaagaggtgtggataagaactattaatacatatttttgtgaatgtgct

SEQ ID NO: 763949 - DNA, 488 bp, Homo sapiens
actgcactccagctggggcaacaatagcgaaactccgtctcaaaaaaaaaaaaaaaactgaacaactacacagctgtagttggtaaacagtcatttttatgactgagagttaggcatgctgaagataaagaactagaaaactttctagtagagagtgttgtttgctctcatctggttctgaaggttatatgtcaaacaataattggatgccaagaatattaaggcatagatagagtagatctcatctcagaaaatggttggtgtagctcaatttcaagcctttgtgatatatgatatctctggaacctgaggagctcacgacagcatakaaaatcaactgaagcataaaacatgctcacatctgaattggtctcttttgacttcattttggaatttgtgacaccaaagggaaaagcaacatgtcgtcacaggttttacaggcagtagctgcaataagggaacaaaatcactaaggttgcacagaatag

SEQ ID NO: 763950 - DNA, 541 bp, Homo sapiens; identical to SEQ ID NO: 760673

SEQ ID NO: 763951 - DNA, 636 bp, Homo sapiens
cccgaatttctacaaactccaatttaagcaatgtaatacaagtgagaatattagcattcaaatatttagaagtcttatcctctcattttgaataaawcaacttctatttactaatattgtacaacattttagcacaattgatacccctgaagacttccatcattgaagaaggggttctgaatatcataggttcatattaaatctttctttagtagaatttactcatctggaagtcacatgtttagttgggttattttaaatggtaaatcttaaaaagcccacagatgaaacgagtgtatcttttaattatccaaagtaatgcagccttcaaccccacagattaactccaacatctggtatttgaaggcatgtgattcttaaggatggtagacttgcctttagaaatttgttttgtttaggatagcctttaaataatttttaactgattaaactcccaccagtgaatgatacaaaggcatcctgtgtagcaaggaagccagccagcctggggttcaaaagtggcctgggattatatacaaagtgaatgatgaatatatttatagtacaaagttaacaagaaaagccatcattgtgtgcatttttttcttccatatgctgtaacgtataatgtatttt

SEQ ID NO: 763952 - DNA, 636 bp, Homo sapiens
cccgaatttctacaaactccaatttaagcaatgtaatacaagtgagaatattagcattcaaatatttagaagtcttatcctctcattttgaataaaacaacttctatttactaatattgtacaacattttagcacaattgatacccctgaagacttccatcattgaagaaggggttctgaatrtcataggttcatattaaatctttctttagtagaatttactcatctggaagtcacatgtttagttgggttattttaaatggtaaatcttaaaaagcccacagatgaaacgagtgtatcttttaattatccaaagtaatgcagccttcaaccccacagattaactccaacatctggtatttgaaggcatgtgattcttaaggatggtagacttgcctttagaaatttgttttgtttaggatagcctttaaataatttttaactgattaaactcccaccagtgaatgatacaaaggcatcctgtgtagcaaggaagccagccagcctggggttcaaaagtggcctgggattatatacaaagtgaatgatgaatatatttatagtacaaagttaacaagaaaagccatcattgtgtgcatttttttcttccatatgctgtaacgtataatgtatttt

SEQ ID NO: 763953 - DNA, 456 bp, Homo sapiens
acgctgggtcactcctggtttgggatcccataatcccatctgctttagatagatgctaagtaggttatttattctagaagtctttaactcctatcctaagtagtggatgccatttctcgccaggctatttattccaggtgacccttataaatggttcattcaagaggaactcagagtaggcactctcccccccccagaattttcctcaagatacagacccyttagtttgctaccgatcccattagaactatatgacaactctctccttaacatgtttcaagtctgggtcttcaatattttgtcttaggactataaagaatctaggtgcattagtccatgaccacttcctgctctactttttcatttcaacaaggaaaaaactgagagtaccctataggttttgcagaatagcctttcaaatatccagtttcacaaagggaacgtgatgtagtatga

SEQ ID NO: 763954 - DNA, 456 bp, Homo sapiens
acgctgggtcactcctggtttgggatcccataatcccatctgctttagatagatgctaagtaggttatttattctagaagtctttaactcctatcctaagtagtggatgccatttctcgccaggctatttattccaggtgacccttataaatggttcattcaagaggaactcagagtaggcactctcccccccccagaattttcctcaagatacagaccctttagtttgctaccgatcccattagaactmtatgacaactctctccttaacatgtttcaagtctgggtcttcaatattttgtcttaggactataaagaatctaggtgcattagtccatgaccacttcctgctctactttttcatttcaacaaggaaaaaactgagagtaccctataggttttgcagaatagcctttcaaatatccagtttcacaaagggaacgtgatgtagtatga

SEQ ID NO: 763955 - DNA, 614 bp, Homo sapiens
aaaaaaaaaaagtgttgattacacaaggataataatgattccttcctaggactggctatagggataaatgagaaaacatatttcaagtgcctgactgtgtctagcatgttgtcagcagtcaataaacaactgataaatagagtaagaatgaatgtgcctagtccagtgtctgcctcatggwtgtcacttaccagaaggcagcaggcagctcttaggagaagagagaaacggaaaatccgagtttgaaggaggtgggtcaagaacagcaaagaactgtagagcagagggttcttgacaatatctgtaaaaataaatttttataaaataaattcatctggggaatctctttattttgataaagtgatttcttacttgataaaaaagtcattatagaattgctttaaaaagtaaatctttttcaagatatcattccacgtatcacaattttacttacacgccacttccctgagcaaatttatttcttgcagtgactcacatctatattaatattttaaatatcttaataatataaaaatggtgaatggacgctcactacttccctggggaagattagaagaaattagcttaattctagtaagaagggcttagcatag

SEQ ID NO: 763956 - DNA, 515 bp, Homo sapiens
ggaactaatacagggtgtattagtgcacaggtgtctgctatgggctatcccattggggactttggggtgactgtgtagactatgccttggagttgtcccaccctggggacagggaagccggatatttatccactaaatcccatccatcattggttaaatgctgctccttgtggtgttaatgatggaaactctctattgcctataactgacaccacaattctttacmctggcatttacaatttccccttgccctgcctcattttcctctgtgacccctgccatggtcaccctccactgcagccttagactagcgatggccctgaatttcctccctgttcactgagatcttcctgatcctcatccagccttccatggcctcagaccactgagctctctcccgttgcagaaatcctgcagaacatttttcctggaccccttactgggtgtaggggaccccagaataactcatgtccaggctcttttttttgaggatcctctgggatgggtggaggagt

SEQ ID NO: 763957 - DNA, 629 bp, Homo sapiens
ctggtggtccatggcatgatctggcaatagagagatgcagatatcaccactgtatactcctaattaactatctataagaagcaaagatcttgtcactgtgtatttgatacttttgagaagttttgaaaatcgaatgaatataatgagattggctggctcctcctaatgtcactggatagagtgctgagagaagaggatgaacttagggatttgaattcccagctcaagcactgcataagtaacctgacatcttctatgtgtgccctaaaggacatccttrtctcctgtagcctcagggctgagagtggtgaaaagcaaacacagaatcttattctgtgattggccggatttcagggcaagttggactcccagcttccaaggatgtctactgataaactgagggcattgattagtatcaatggtatcctgtaagaatagtatcctggaaactggaattgggatatgtgggaagacaaggatgaagttgaggacatggagcacctaaattctgagtcttgtttgccgctggaaaggcctctaccttcccctccttggttctgtttctctggagaaccctgactaacatgactggcttgaatctggatccaaatgtaatcccagcactttgg

SEQ ID NO: 763958 - DNA, 277 bp, Homo sapiens
cattgaatggggaggaagagttaggaagtgaccctcaagaatttgggaccttctttgttcattttacagtcatatatgttcaatgtaagttccactgtccttgttttaatgctttcatgagatgatatagataaattgraatatatggtttttaactaaattcaagataacacaagtctccattttatgtaatttaattttttagactccacctgtgatcttatggcgcagctcgatggcagttggaggtgcaagtgattcccaataatgaatcacc

SEQ ID NO: 763959 - DNA, 538 bp, Homo sapiens
caatattattttctctttaacttttcatcaagctttacagtaaatcattgcttatttgttttcctgctattcattgaggataaagtagcatcacatcagtagctttaagaggtttgccgtttaatctgtattgcttttagaggttagcacgttataaaagccccatttccataatggatgactggaaaaaccaggttgctgtatatatgtgaacacatatataactaacagtttgttttctctgtctctaagcttgtggggtggtataaacaaacttcagtgtactttaagtgcagttactgtgcttcaactcataagcatttctttagaaagaacatatactctgaaatatctagcatgcattgatgaagtaatcaraatcttgatctctaatatcttttcaaagggtttccttcactgtctctttcccctggaatatattatgcatctctaggtggtcaaacacattgagacccataccctgactaaattttcataatccctggggttcacaattgttatttaaagttcatagatg

SEQ ID NO: 763960 - DNA, 510 bp, Homo sapiens
atctttgtcaagaatgccattaaatgaaattaaccccaaataatcattgtaaatggagtttcctgcttccctacatagagtaattgtgtgttaggattaacagagacagaaacaaggaaaaattatgaattgtctcattcactaaaaggttaacagatccctgtcttttgaatatggaaatggtacctyatcaataagactttctaaatacttaaagggaaataaagatatagatgttcttcaattaactgatagctgcttcttttcactagcagttagtcttggttttggctagtcgtcttaatgttattttaatcaagtagtcatctagtgtctatggcaaaggtaatcagtgtatatttgcatagagttgagtacctaagtatctctgaagacgtacgtcatgaactagtaaacaatatgccacttataaagaaggaaaaatgatgtcagacagctatcatttcaatatggcagaaaaattgcagtgcaaccttaaaatatttacag

SEQ ID NO: 763961 - DNA, 571 bp, Homo sapiens
ctttaaagaagatgatattttctgtttaatgttaaaactgtcaatgaaagtcatggttcctctctctgtaactgacaatcttctataaattaactcatttaattactgcacaaagctgactcaggtatatttaccgcgcttgtgtggatttactttagcattagcattcaagggaggactctcttgaaaagagaactgaaattgcaatgagtaaattaacattctgttagaaaaatcattgttttgtctctccctccccsacgtccctgcccggccccgctctgataaatcttctcttcatcttaaatcctcttgctttgctctgtaggaacctgtatatgcttctacttactatcgtgctattcctgctgcccataaatacctgtcttttgtgtcgactaatcgggtgaggaaaagccgctcatcttaagcctcactgcaatttctgagccgcaggggaggagcttctgtttaatttggggcaataatttctttgctacatttcactgtgaaagaggactgtgtgtgtttcagtacgattgcgtgtgtccatgagattgtgtatctataa

SEQ ID NO: 763962 - DNA, 608 bp, Homo sapiens
gttttaatcaagatttattccatttgagcattttcaacttctctctgatgtcttttcttgtgactttttttttttttttgtatcttcaggttttatagttctttctttcttatcctcctcatttattttttattacttttatttctttctatagtttatcatctttaggaaaggaaatgatttcaactcaagaagagaaaggggtttactatgcaatagaactttctgaaatgatagaaaatttctatatctgcattgtccaatacaaaattaactaaccaagtgttgccattcatgacttaaaatgtgattaggatggcactaagcaatgacagcaaactakagactgaagggagaagtgaaaaaaaaaaaaggagcaagataaagaaaaggatcctttaattctattactaatgtcctggattggtcccctccaccctctaaaaaaaaaaatggtgcatttgaataaaaccaatcagaatcaacataactaaatttttgagaactgagctatggtgtgtaatatcaaccaggcttcagactggactctgggaagcacacagatgaagcagatcaaaataacactgcaaagactttgaaaactaaac

SEQ ID NO: 763963 - DNA, 618 bp, Homo sapiens
aatgaatgaagtcctctgtttccaaagcatgtatagagcatactggctgaccagtcttgttatcccatccccttgccagtgattcatttggggatgggcaaatctaagtcagtttgagccagtgaaacaccagatgaggcttactgaaactttatgggaaatagaaccaagtttctcttattcctgctgagtacaaatgggaacatattggccccagttgctactgatgggcaacttatgacctmgaggaaagccagcctcatgatgttgccaatgctgtggatatcagagtgaagatatgggaaaacccttggtctcaggtgatctttctgagtcacgttaaggactggtatagtcatagctattaaatatttccccaaaacatcaactggccctgaagccccatcgtcctctggactttatgttgcatgtgagaatatgtgtaatagaaatagagtgttttatgaaacactagtttccaagatgcaaaagcactgcatactataattcttttttttttttttgcatactctacttcttaattctgaagagaagtacattcaacacagctttacacaaattcagcaatttgggcaactcagttatacaactgccatg

SEQ ID NO: 763964 - DNA, 618 bp, Homo sapiens
aatgaatgaagtcctctgtttccaaagcatgtatagagcatactggctgaccagtcttgttatcccatccccttgccagtgattcatttggggatgggcaaatctaagtcagtttgagccagtgaaacaccagatgaggcttactgaaactttatgggaaatagaaccaagtttctcttattcctgctgagtacaaatgggaacatattggccccagttgctactgatgggcaacttatgacctcgaggaaagccagcctcatgatgttgccaatgctgtggatatcagagtgaagatatgggaaaacccttggtctcaggtgatcttkctgagtcacgttaaggactggtatagtcatagctattaaatatttccccaaaacatcaactggccctgaagccccatcgtcctctggactttatgttgcatgtgagaatatgtgtaatagaaatagagtgttttatgaaacactagtttccaagatgcaaaagcactgcatactataattcttttttttttttttgcatactctacttcttaattctgaagagaagtacattcaacacagctttacacaaattcagcaatttgggcaactcagttatacaactgccatg

SEQ ID NO: 763965 - DNA, 618 bp, Homo sapiens
aatgaatgaagtcctctgtttccaaagcatgtatagagcatactggctgaccagtcttgttatcccatccccttgccagtgattcatttggggatgggcaaatctaagtcagtttgagccagtgaaacaccagatgaggcttactgaaactttatgggaaatagaaccaagtttctcttattcctgctgagtacaaatgggaacatattggccccagttgctactgatgggcaacttatgacctcgaggaaagccagcctcatgatgttgccaatgctgtggatatcagagtgaagatatgggaaaacccttggtctcaggtgatctttytgagtcacgttaaggactggtatagtcatagctattaaatatttccccaaaacatcaactggccctgaagccccatcgtcctctggactttatgttgcatgtgagaatatgtgtaatagaaatagagtgttttatgaaacactagtttccaagatgcaaaagcactgcatactataattcttttttttttttttgcatactctacttcttaattctgaagagaagtacattcaacacagctttacacaaattcagcaatttgggcaactcagttatacaactgccatg

SEQ ID NO: 763966 - DNA, 618 bp, Homo sapiens
aatgaatgaagtcctctgtttccaaagcatgtatagagcatactggctgaccagtcttgttatcccatccccttgccagtgattcatttggggatgggcaaatctaagtcagtttgagccagtgaaacaccagatgaggcttactgaaactttatgggaaatagaaccaagtttctcttattcctgctgagtacaaatgggaacatattggccccagttgctactgatgggcaacttatgacctcgaggaaagccagcctcatgatgttgccaatgctgtggatatcagagtgaagatatgggaaaacccttggtctcaggtgatctttctgagtcacrttaaggactggtatagtcatagctattaaatatttccccaaaacatcaactggccctgaagccccatcgtcctctggactttatgttgcatgtgagaatatgtgtaatagaaatagagtgttttatgaaacactagtttccaagatgcaaaagcactgcatactataattcttttttttttttttgcatactctacttcttaattctgaagagaagtacattcaacacagctttacacaaattcagcaatttgggcaactcagttatacaactgccatg

SEQ ID NO: 763967 - DNA, 685 bp, Homo sapiens
cacagcccatggatccagaagtaatttttactttccagtcttactagttaagaaatacatttaatgaagttgtagctgacataatgattcctctgatgaatctcagcaaagtaaatggaaaaccttccagaaagcattcaccattctagttatcattatgagcatttatgattcatggaaggtggccaaaatatcaacattaacaggagtttgaaaaaaagttgattagaaccttcctggatgactttgaggggctcragacttcagtagaggaagtaactgcagatatggtggaaatagcaagataattagaattagaagtgaagcttgaagaagtgactgatgactgcagtctcatggtaaaacttgaatggatgaggagttgcttcttgtgaatgagtgatttcttgagattagatctactcctggtgaagatgctgtgaacactgttcaaatgacaaaaaagaatttagaatattccataaacttcttggatagagcagcagcaggtttgagaggattggctccaattttgaaagaagttctactgtgggtaaaatgctgttcaacagcatcacatgctacagataaatccttcacaaaagaaagtatcaactgatgagggaaacttccttgtcttattttaagaaattgccacaaccaccccattcttcatcaaccacaa

SEQ ID NO: 763968 - DNA, 572 bp, Homo sapiens
tactattaactaaactacagactttatttggattttaccagttttaatgtgtactttctttggtgtttagttctatgacattttatcacatatgcagatttctgtaacaataattgtaatcaagatacagaactgtttatcacccatttataattatgccttcccccaaactctaaacttggcaagcactgatctgttgtgcataagtataatttagtcctttcgagaatgttatataaatggaactatacattatataatatttaaagattttttttgtcatgcagcataatacccrtcaagttgttgcatatatcaacagcttatttcttttcatcactgagtagtattccattgtacagatgtaccataatttgtttatacatccacctgtggaaagatatttgtttatagtttcttactcttacaaataaagcttctatgaacatttgtgttcagattttgtgcagatcttctgtctagtaatttattaattactgagagaagcccccagatataagtgagggttttcctatttctcctttcagttatgtccctttttgcttcatgta

SEQ ID NO: 763969 - DNA, 591 bp, Homo sapiens
aagaatcaaaaagaagcactagagatgtgcacagatgctgtaacagaaatgaagaatgtctttgataggtttattaataaattagacatagctgagaaaagaatctctgaacttgaggataagtcaataggaacttcaaaactgaaaagcaaaaagaaaaaaaagactaaaaaaaggaaacagaatatttaagaactgtgggacaactacraaagttgtaatatatgtgtaatgtgaataacagaaagagaagaaagagataaaagaacagaagcaacatttgaagcaataatgacagaatctcccccaaattactgtcagacactgctttggtttgaatgtctgatccctccacaagttatgttgaaatttaattgccaatataatggtattgacaggtaggacctttatttggtgttaggccatgagggctccaccttcatgggagggtttaacatcttaataaaaggaattttgccagagggctttctctcttggctcttctgcccttctgctatgtgaggaacagtgttttttcttccagaagatgcagggtttaaggtaccatcttaggagtagagaccaggccct

SEQ ID NO: 763970 - DNA, 501 bp, Homo sapiens
gaactactgagctcaagcaatccacccaactcagcctcgcgaagggctgggattacaggcatgagccaccgcgctctgccaatgtgtctgttttcttataaagctactaacttcttgaaaggaaagatcataatttttcatttacatgcctaaaaccatccctgaaacatagcaggtgttcagcatatatttgaagcagagagggagaatcaggatggtggggaacaagggaaagagggagggaggcaraaaaaagtagctgtgactttttctcacttagatgaggacatcaagagtcccaaggtcctatctgatgacaggcagaaccaggactcaaagccagatcatttgacataaaaagcccttgtctatcataatgcttaatataacattctctggaatatttcaaatgtccctcaacaacataatcacaatattaaagtttagaatcttgaaactacatgccacaggtaggccaccctactcaacccatgctcacct

SEQ ID NO: 763971 - DNA, 620 bp, Homo sapiens
cctcttaaagatttctgaaggttcttgttaattagtgcataatagactccgtatttaagagtacatccctaattcagggggtaactatattcagaaaaaaattacttgcaggtactatatggattctttaattgattctgattttaacataattcttagaaaattcctcactttgcagctaagaaacagcttaaaatcaaccatggggagggaagaggaaggaagaaagaaaaaagaaatcaaccagtacagcggtatcttctaggcttaagctaccgttctcacaattagtatctgttccagatccttacatgcttttctttggttatctgggatmaaaacagtctgcctcttggacatcctcaaaattgggctgggactagtagtttgttttcagcctatgacctgaattggactaagccaagcacccagggtcatgcaacaaagaattgaattatgtgatttgttctactccctcctgcaaagtagcacttttgtacaaggtatgtgcaaacaggcacatgtatgtgcacgtgcacacacacacacacacacacagctttatatgacattagcaataagtatctatggtttagactagacagagaattatgaatggg

SEQ ID NO: 763972 - DNA, 519 bp, Homo sapiens
caaactgaacacatacacacatgtgcctctctgtgttcttggcagttaaggggacagcgtccatatagtccctaagcagagaaaccccaggcttatctttgactcctctttgtgagacctatgatgttacaattatctcttgaatataccctcccatttctgtccccactgctcatgatctatttcagacacaaataattacaacctactatggggtctccctggcttgagcctctcccttctccatagttctgccagcgatcttttcaaaacacagatygatgcctcctggctccccatgacctatagattgaaatccaaatcccctcatgatcctttcctgcttcatctcctgcccccaccttcctaccctgggctctggcagactgcttgtcccctgaaaagcccacattcctactcattttggtatacttgttccctttactccctcctccgagtctgaccctttcttctcttttctgctgctcttatttgactttcagctccttcctgggactg

SEQ ID NO: 763973 - DNA, 622 bp, Homo sapiens
tttaacaagaattatttgaaattacatttcctttctttccccagttctcataatcatactgtcttcaaggtaaggggagggctatctagctactttttaaagttagcctcttttacatctctatcatctgcctatactgcctttttcaaatttaggaactaattaaaagttttagcaatttggttatcaataaaagagagacacagatgcaatttgcatttcttaataatctgaatacactaaaagtaattctctttgtttaccttttctctttgggccatgtccctatgaagccatcaacataagacatagatgaagaccttctaattcctccttcaaatgcaaaaaagaaaaagccattgaaatcatgtaaaaaaattaacttatagcaacttaggagatttcatgtatttgaggattcattaatagcaatacaaattaartaggtacataaggagaattagagataattttatcaagaaaagcaaccacagtgaaactgaccatgcttttagtgtgttataatagccatttttcagaaaacaaacaaacaaacaaaaaaacacacacacacacacacaaaaaaaccctggatatttgtttatttatatttactgtcaat

SEQ ID NO: 763974 - DNA, 630 bp, Homo sapiens
tttttttttttgtagaggtcttttaccttcttggttaaattaattctaagtattgtaaatggtgttaccttcttgatttattttccacctagtttgttgtttgtgtatagaagtgctaccgacttttgtgtgttgattttgtaacctgaaactttgctgaattagtttatcagtactaagagttttctggtagagttgaagtggtgtcattcctctagggtaatacccgaggttctttgcctcacaccaaggaaatcaaggacacagacacacaaggagtgaaattaagagcagaggttgccaggcatggtggctcatgcctgtaattccagcactttgggaggctgaggcgaatggatcacctgagatcaggagcttgagaccagcctggccaacaaggtgaaacgccgtctctactaaaaatrtaaaaaattagctgggcctggtggcgggcgcctgtaatcccagccacttccgaggctgaggcgggagaattgcttgaatctgggaggcggaggttgcagtgagctgaggtcgtgccattgcaccccagcctgggtgacaagagtgaaactgcagccccccacccccgtccaaaaaagagcagaggtttaataggtgaaagaaaga

SEQ ID NO: 763975 - DNA, 533 bp, Homo sapiens
ttcacttggattcagatatccatatgtgtaatacaggccaggtactgctttatacacattatttaattaatcttgtcagtattatcactttacagatggggaagttagtgctcagaaggtttaaatactcacagtgtatgagatggagttgggaatttgaatacaaactgcctcatttcaagatttatttttaaaaaatgtcatcatcatatatgcaagtattttatttattttgtctgggaattttctatttgcttcattaatcttttttcttatgscttaatagaaaccaaatcatatttaattacagtaaaatttaatactggataatgtatcttattctttttttccaaaaattttgagtaatttcacctattttaaataaatgtcttggctgggcatggtggttcacacctgtaatcccagcactttgggaagctgaggcagttggatcacatgaggccagaagtttgagaccagcctgggcaacatggtgaaaccccatctctactaaaaatacaaaagttagccag

SEQ ID NO: 763976 - DNA, 563 bp, Homo sapiens
attcaccacaagctaattggagtcctagctatagtccggcagcattcctcatgggtctgtggtgggggccatggggagaggctcctctatgtttgaaaggggaggaaagagtgggaaagactgttatccagctaagtcgcagtgcaayagaacaccaggtagactaagttttttgactctagtccccaactcccagatggtatcactgtacccacttagggcccaggcaaccttgcttccctgaagggaaggacacaggcctggctggctttactactggctgattatagagccccaggaccttgagcaaacataggcagtaggcagggagtgtgttacagcaggccttgggcaagacccagtgctatccttgcttcaggtctgacctggcacagtcaaagtggtggtggccacaggggtgcttgtgtcattccaccttcagattaaggtggctcagaacagacagagactccggttgggaaaaagtaaaggaagagaaaaagagcctctgcctggtaatccagagaattctcctgaatcttgtccgagaccataaaggtgat

SEQ ID NO: 763977 - DNA, 570 bp, Homo sapiens
ctgaattctaagcttaggggcaggcatattatctaagacacaagcatggccatcaccatgccttattgactggtgcaggaccacaggtcattgtgatttttatttatttatgatttttttttttgagacagagtttcgctcttgttgcccaggctggagtgcaatggtgtgatctcagctcaccgcaacctccacctcccaggttcaagcsattctcctgcctcagcctccctagtagctgggattacaggcatgggccaccacgcccggctaattttgtatttttagtagagatgggatgtctccatgttggtcaggctggtctcgaactcccgacctcaggtgatccacccgcctcagcctcccaaagtgctgggattacaggtgtgagccactgcgcccagcccattgtgatttttaattaagttcagcagttggttgtaggttaccaagtcttatgttatttttttaagcatgaatttgtaagcaaagaaaatgtagctgtttcttatgtcttctctccaccagtatactttgatctttaaatattaagagtctagtccaatgcct

SEQ ID NO: 763978 - DNA, 570 bp, Homo sapiens
ctgaattctaagcttaggggcaggcatattatctaagacacaagcatggccatcaccatgccttattgactggtgcaggaccacaggtcattgtgatttttatttatttatgatttttttttttgagacagagtttcgctcttgttgcccaggctggagtgcaatggtgtgatctcagctcaccgcaacctccacctcccaggttcaagcgattctcctgcctcagcctccctagtagctgggattacaggcatgggccaccacgcccggctaattttgtatttttagtagagatgggatktctccatgttggtcaggctggtctcgaactcccgacctcaggtgatccacccgcctcagcctcccaaagtgctgggattacaggtgtgagccactgcgcccagcccattgtgatttttaattaagttcagcagttggttgtaggttaccaagtcttatgttatttttttaagcatgaatttgtaagcaaagaaaatgtagctgtttcttatgtcttctctccaccagtatactttgatctttaaatattaagagtctagtccaatgcct

SEQ ID NO: 763979 - DNA, 597 bp, Homo sapiens
atggagatagagaggagaaggatggttaccagaggctgggagggtggtgggggtctgaggggtaaggtagggatggttaataggtacaaaaacattgaaagaaagaataagacctactatttgatagcacaatggggtgactatagccaataataacttaattgtacgttttaagaaaacttaaaggtgtagttggattgcttgtaactcaaaagataaatgcttgagtggatagataccccattctccatgatayacttatttcacattgcatgcctatatcaaaatatgtaccccataaatatatctatgtgcccacaaaaataaaaataaaatagatttttaaaaatgaaaataattagcctagcttttataattcctttatttttcatcatgttagcaactgtgaaatgtattattttgcattgcttttttatgtaacatgatgattataagattaatccatattgtttgcattaagatattgtttactcattgtaacggctattcactcatctgtgaacattgcacagttaatcctttctaacagaaatatccgcttcaagttttatcctaaaactagaataaagctgtttt

SEQ ID NO: 763980 - DNA, 481 bp, Homo sapiens
tataaggtcactgcgaaaataaaacatgttttattgggatgatgtgctactgttgtggatatttactattttaaaagtcatctgggtaaaatcttattatttatttttcttactgttcagaggtaggcttattttgtgactgcctaaagagaaaatatggttctaatgatgaatgtgaagctctgaaccatacctgggagcaaaatacatgttatgaaaactgtaaaagaagtaaaaagtactttcaacttggtgaagatagacataaaacagtgccgtcactagtgcaagtatagcaatgcatcactagtrtagtccccagattgacttgtggatacagctgcaaccttgggcttattcatctagtattctagttctttgtttacataggtttagcattttcactttgatcttcatttccagtgtattttatgaagacaaatgggatagaatacagattgacttagatttctttttttag

SEQ ID NO: 763981 - DNA, 612 bp, Homo sapiens
tgtgtgtaaatatatatatagtactatatatataaatatataactatatatcttatatattgcaatcttattgcaagattatattatcttatatattgcaatcttattgcaagattatattatcttattatatattgcaatcttatttcaagatcttattgcaaggtgaatcttattaagaatactcatggtcttgcaaaggaacagaccaaagatayacctctttggtctgttcctttgcaagtctgtgattaatacagaccccaaacaagacgtgcccagctgagcccagtcaatcctcagagccatgaaaataaaataataaattattttaagccacctggttggggagagtttgttatgcagcgataaataactggtgcaccttccacagtcactttatttaaacatacactttatgtaaatgtgcctagcagagtgtatgctttggaaaaataatttttgttaaatcattgaaaatgttagttggtcaaaatagttctgaaacttatctgctctgaattctgacccatatctacaacgtattccgtctcagacacaaagggaccaccagctacatttattttttaaaccaagtgttttccacaatgt

SEQ ID NO: 763982 - DNA, 612 bp, Homo sapiens
tgtgtgtaaatatatatatagtactatatatataaatatataactatatatcttatatattgcaatcttattgcaagattatattatcttatatattgcaatcttattgcaagattatattatcttattatatattgcaatcttatttcaagatcttattgcaaggtgaatcttattaagaatactcatggtcttgcaaaggaacagaccaaagatacacctctttggtctrttcctttgcaagtctgtgattaatacagaccccaaacaagacgtgcccagctgagcccagtcaatcctcagagccatgaaaataaaataataaattattttaagccacctggttggggagagtttgttatgcagcgataaataactggtgcaccttccacagtcactttatttaaacatacactttatgtaaatgtgcctagcagagtgtatgctttggaaaaataatttttgttaaatcattgaaaatgttagttggtcaaaatagttctgaaacttatctgctctgaattctgacccatatctacaacgtattccgtctcagacacaaagggaccaccagctacatttattttttaaaccaagtgttttccacaatgt

SEQ ID NO: 763983 - DNA, 536 bp, Homo sapiens
atttaatattgtctatattctagcccatgcaataagagaagaaaaataaataaaagacaaatagaatgggaaagaagaaataaaacaatctctattaacagacaacatgtttttgtagaaaatcccaaacaatctacaaaaagaagcttctggaactgactaactaatgtacacaaaaagctcatagaactaatgagtaaaattagtagaaatacaaagccaatagaaaacagtcaatcatattccctatacaggcagtgaacaattggaatttagaatttttaaaaaaaaataccgtttamaatagcacaaaaaatgaagcacttaggtaggaattaaacaaaatatacataggatctgtatactgatgaaagacctctgatgaaatacatcaaagaagatctaaataaatggaaagatccaccatgttcatggatcggaagattgaatattgttaaaaagtcagttctctctaattgattcaaggcaatctcagtcaaaaagctcttgcttagatatcaacaagccaatcctaa

SEQ ID NO: 763984 - DNA, 652 bp, Homo sapiens
ccacatgtatccagtgtctctcacattcagtacacacacacacacacacacacacacacccctaccttagagattcggcatttatcattgtgaagaactgtcctacaaaatacagaggctttgaatacctgtggtccacactccctaaatgccagtagtagccccagttgctgtcaaaccttcttaggttctccaatgtccccctagagaggctgtgctaccccagaatgagaaccaccagctggatccgtgttgggaatttgccctcactcttcagggcagtggttttcaaacttgagtgcacaatggaatcacctatctcaaaaccccttatccccgggcaccatcaccagaaagtctcatgtgattggtctaagctatgtctttagattttaaccactgaaaggttaaaaactgccgcagatgattctaatgtgtggctgaygtcaaccttccccatgggtctgggactccgcgatggctgacgggccagcatctcttctgcctggtgtgcaggctggcacagctcgagccagcagctgccttggagtcaggaccaacgttccgctcagttccccagtgcccccacactggatctgacatccacttggctattccgcaccatgccccctgcctgccaagaaatttatgg

SEQ ID NO: 763985 - DNA, 632 bp, Homo sapiens
gaggtaggtgcttattattaagcccattttacagctgaggaaactgaggcccagaccacctcaataacttgcctaagctcacatgctagtaagcagcagagtgatactgaagcctggcagcatggctcagagtcacgagggctgcactgtgtatgagatctcccctctgcagcactttgcactggccactgtgccttctgggcagaggcacatttcctgattttcctttttgactgcaagctcctccagggcatagacccagagtgtctggctctcactgagtccccagagaagtcagttcttgacttgtagtasggtcttgcaaggcagaggtactgtctggttcgaacttctgggcactgattctgctttatcctctcagaggaggaaggatccttgccgacgctgagtttacacaagaatcagaaagagtaacatttgtaatagtcactgaaatgaaagcaaatagactgctagtgtgagttatttgcagtgaggctacaagggcagagacatggcaaggaaaaaggtctctagatcagttcagaccgtggcaaacagagtgttccattactgactctggggccagaggatgctctactgagacctgctgcttctgctccccactgcat

SEQ ID NO: 763986 - DNA, 622 bp, Homo sapiens
ctcccctctgtccatcccccagctcacacttcattgcacacattgaggtcatgcatagtggaagaagatatattttgaaaaggaaaagaaaagcaaaaatgttgaaataaaagaagaaaaagtaaaaccatctagaaatcctgggtaacatggacagagaaaagaagagtcatgcaggattttggaagtttgggcttaacagtcaagggaatggaaaggagagattcaggaattagctgcattctgcatagaatcaattgagaaggggttagagagagagaggattttaagatagtttgctgcattagggacayacttccctcagagactgtgtaaagatttgaattatggatcgtgactttatgatgtcttcactatgtgtctctgaatatgatccagtgtcaaaattcatcacagatggactcacttgtattttggggacagttactcactctaaggaggccttctccccaggctgggttcctacatgttcctttcctgtccttgacctctacaagtcctcatctactgatccatattctcctccccaaaaatacaaacttgaatcacttattcttgccccaggcacactagaattttgcaaaaatccttattatttgag

SEQ ID NO: 763987 - DNA, 598 bp, Homo sapiens
acatggacagagaaaagaagagtcatgcaggattttggaagtttgggcttaacagtcaagggaatggaaaggagagattcaggaattagctgcattctgcatagaatcaattgagaaggggttagagagagagaggattttaagatagtttgctgcattagggacatacttccctcagagactgtgtaaagatttgaattatggatcgtgactttatgatgtcttcactatgtgtctctgaatatgatccagtgtcawaattcatcacagatggactcacttgtattttggggacagttactcactctaaggaggccttctccccaggctgggttcctacatgttcctttcctgtccttgacctctacaagtcctcatctactgatccatattctcctccccaaaaatacaaacttgaatcacttattcttgccccaggcacactagaattttgcaaaaatccttattatttgagaggactggcttcccttcttcccactttcagaaactcttttcctccaaactgatcccaatttcccatactagtaaccagcttcaaggtggtagccaggagaaggggagatggtaaaaagtaggt

SEQ ID NO: 763988 - DNA, 603 bp, Homo sapiens
ggagatatgaacagatacttctctaaagaagatatccaaatggtcagtagagacgtgaaaaagtctcaaccccattagcaataaggtaaatcaaattagaccacacatgcctctacatatccatcgtaaagattaaaattagagcccccaaaaccaagtattggcaggaatatgaagcgacaatcctatactttaatagacagtaaattggtacacacaaccgcttttaaaaaccgytgacagaattctacaactgcacctatgccaactcttcgatccagcaattccactcttagatatataccacacaaaaatgcacgcaagtgtgtgttggagaaatgtactggaatcttcatagcaacattgtttatcatagcccccgaactgtaaacagcccaaatgcccatcaatagtataatgtagaaatagtttgtggtaaatttctacaatattataacacaataaaataaataaaattcaagtattatgcaataaatcatgagacctcacaaacatagtgttgagtgaaaaaggcagacaccaaaaaatacacatggtgtatgactctatttatgtaaagtcctcttggggaagggaccaggc

SEQ ID NO: 763989 - DNA, 530 bp, Homo sapiens
tgtagaatctttgtaaagtcctttcaagctctataatcattttggtgaaaagaaaaccgatgttccataacatgaaaaatggataaactggacttcaacaaagttaaaatctttgtctccacaaaagatcctgctaagagatacagactgggagatgatatttgcaaaccacgtatccaacaaaggattaatatctacyatatgtaaaaaactatcaaaattcagtaaagaaacaatccaattagaaaatgggcaaaaagtatgcagaaaaaattcatcaaagaggatatacatatggcaaataagcacatgaaaagatagtcaacatcattagccattagagaaatacaaattaaaactacaatgacatatcgctacacacctataggataactaaaataaaaagtagtgataacaccaaatactagcaagatgtggaaaaactgtattactcatacgttgctggtggaaacgtaaaatagtaaagccaggctgaaaaacagtttggcaatttcctttcaaaactaaaa

SEQ ID NO: 763990 - DNA, 530 bp, Homo sapiens
tgtagaatctttgtaaagtcctttcaagctctataatcattttggtgaaaagaaaaccgatgttccataacatgaaaaatggataaactggacttcaacaaagttaaaatctttgtctccacaaaagatcctgctaagagatacagactgggagatgatatttgcaaaccacgtatccaacaaaggattaatatctaccatatgtaaaaaactatcaaaattcagtaaagaaacaatccaattagaaaatgggcaaaargtatgcagaaaaaattcatcaaagaggatatacatatggcaaataagcacatgaaaagatagtcaacatcattagccattagagaaatacaaattaaaactacaatgacatatcgctacacacctataggataactaaaataaaaagtagtgataacaccaaatactagcaagatgtggaaaaactgtattactcatacgttgctggtggaaacgtaaaatagtaaagccaggctgaaaaacagtttggcaatttcctttcaaaactaaaa

SEQ ID NO: 763991 - DNA, 530 bp, Homo sapiens
tgtagaatctttgtaaagtcctttcaagctctataatcattttggtgaaaagaaaaccgatgttccataacatgaaaaatggataaactggacttcaacaaagttaaaatctttgtctccacaaaagatcctgctaagagatacagactgggagatgatatttgcaaaccacgtatccaacaaaggattaatatctaccatatgtaaaaaactatcaaaattcagtaaagaaacaatccaattagaaaatgggcaaaaagtatgcagaaaaaattcatcaaagaggatatacayatggcaaataagcacatgaaaagatagtcaacatcattagccattagagaaatacaaattaaaactacaatgacatatcgctacacacctataggataactaaaataaaaagtagtgataacaccaaatactagcaagatgtggaaaaactgtattactcatacgttgctggtggaaacgtaaaatagtaaagccaggctgaaaaacagtttggcaatttcctttcaaaactaaaa

SEQ ID NO: 763992 - DNA, 605 bp, Homo sapiens
cagaggaagctaaagactattttaagctggtttgaatgggacatgctggagcctggggcgagggcctacttcttatctgtgagaaggtgaaggagggaggagctgctcctgtcctgttctgtcctccaccatgctacaaaaatcacagcctcaaggcagaaggagtacagatgtctgctggggtgaaatcacggtatactcaaagccctactgaagagaggacaggcataaaatgtataagaaaaaataaagagccaagaatarttaaggcattttcaaagaggaaaaacaaaggaaatgtgctctaccagacagaatttgttaagaaggtgcaatagttcatcagcatagcattgatacagggatagacaaattgatcaataacatagaacagagcacccaaaaatgagattcttgcatatacagaaatttgatggataatagaggtggctttgcagatcagtgggaagtgtaggaaatgactttaataagtggatctgggaggagtggtcatccacatggaaaaacaaatgaaatagaaccctttcttcacaccataccaaaaaatcagttcatgtagattcagtgcttaacgttaaaagcaa

SEQ ID NO: 763993 - DNA, 569 bp, Homo sapiens
attatacaatatatatgtatcaaaacatcaaattgtgccccataaatatgtacaattacaatgtattgatttaaaaatattaaataggccagctgcggtggctcatgcctgtaatccaagcactttgggaggccaaggtgggcagatcacttgaggtcaggagtttgagaccagcctggccaacatggtgaaacactgtctctactaaaaatgcaaaatttagcagggcatggtggcacatgcctgtaatccctgctcctcgggaggctgaggcacgagaatcacttgaacccaagaggcggaggttgcagtgagttgagatcacaccactgcaccccagcttgggtgacagagcaagactccatctcaaaaaaaattttttttaataatagagaayataaaaataaaattaacaaataagtgaaaatgtatcttttctagttacatggaactacatgtgtagtaaaattgcacagatactcacacccacaaatgaatacttgtataactagtgaaatcagaataagctctatagattctgccaatgtcaatttcttgatattgatatt

SEQ ID NO: 763994 - DNA, 611 bp, Homo sapiens
aattgagacttggcttacaaggctgacagcagaggaagaacagtagtctggtttcagaaccaagattaacaggagagaaaaaagatctaattggaagctgcattaactttttgaagaggcagataaccgctgagaggcagggcaactctmttcatagggacaggctcatcatggaaaggaaatagaagattaatccactatggattctctacgcttggactgatttaatttccaaagacctccttcaagtctgccttctctttgctccctctcagggtcatttctagacatggaaaggtggcatttgtgtttcccttccatggaatgaaccttgtggggctgaaaaggggtgacaacctggtggtgccagagagatgactgcgagtgactgccagatgcaaaccgtggaggctcagggctgttccaggtctcttgggacctcgggacagacatgcacaggggctgtaaaagaatgattgcctcctagctgcaccccggcctgaaccagggtcagggtagctggtttacaaggaatttgtcaaagctttgcagggactacatgttgaaacgttggggttgtaaacatggtaggaaggcatggagacaaaagc

SEQ ID NO: 763995 - DNA, 516 bp, Homo sapiens
aactattttaggacttcttaaacttctctcagtaaccatttggtagtttcctgtttaagagatcctttgttagatttgtttctatgttttattttttatgctaatgtaaatgctattatatttccatttttattttataattgcttgctgctagtatatagaaatgcagttaatttttaaatatttacctttaaaccattttggctaaatakgtgtattaatcctaatagattatctgaacataatcaggttgtgtgcaaatactgacagacatttattattttcaatttttatatcctttattttttcgtgccttattatactgcataataccactaatacaatgttaaatagaaatgatgataatggacatccttgttctgttctgatctcatagtgaaaatcttcagtatttcaacatttagtatattggctgtaggatttttgtattatactaaggaagtttccatttcatcttagtttgaagtttttattttgagtgaatgttgagtatta

SEQ ID NO: 763996 - DNA, 617 bp, Homo sapiens
caagaaagcttctttttggcctcggtgaacttgaaattatttttccatatatctgtaaacttttgctctctactctttacatggctgactcttcattctacacatccagtataaatatttcctctgggagaatcagcctctcataaacttgtgcagaaataggctccttattattctttctaggcaatgacatgcttatttcttagcacatcaaagctgtacttctttttcttttcttttcttttttttcttttttttttttttttgagatagagtctcgccgtgatgcccaractggagtgcaatggtgcgatcttggctcactgcaacctctgcctagtgagttcaagcaattcttctgccccagactcccaagtagctgggactataggagtgcagcatcaggccagtctgatttttgtatttttagtagagacagggtttcaccatgttggccaggctggtctcaaactcctgacctcaagtgatctgccttccaaagtgctgggattacaggtgtgagcctctgcgcccagcccaaaagtgtacatttttaattgcttttcttattgcttgcagctaattataatgccaagtccattttggacagaccatgc

SEQ ID NO: 763997 - DNA, 605 bp, Homo sapiens
caacagcctgggatttatctggggcccttgtagctatagctgaagctggagtgtctgggatgcatggtgctgtgtcctgaggctgcacagaatagcaggacactgggcctggctcatgaaaccatttttccctcctgggcctccaggcctgtaataggaaggcctgctgcaaagatctctaaaatgccttggagatattttccccatggtcttggctagtaagatttgactcttccttacttatgcaaatttctgcagctggcttgaattcctccccacaaaatgggttttcttttctaccacatrgccaggctgcaaattttccaaatttttatgctcacgaatgtaagcatatactattagtaccaggcaggctacctcttgaatgctctgctgcttaggaatttctttcaccagatattctaaatcatctctctcaagctcaaagtcacacagatctctagggcaggggcaaaaatgccatgaatgtctttgctaaagcatagcaagagagacctttactccagttcccaataagctcctcatctccatctgagatcttttcagcctggactttggtgcccatatcactatcagcattttag

SEQ ID NO: 763998 - DNA, 461 bp, Homo sapiens
tattagcttagccaaactgctctgcgtccaaattagcttggtatcaacattatgcatcagtgacacatctgataaaatgcctgcccatctttcttcaagctaaggcttggacgtgtaattgtcaagctggtgctcatccgggcagacgccacagttccccaatggccaggactcaagttcagcctgaaccctgtgaggtcaaaataytcccgggatgcttaaaaatactgatgcctggatcctacccccagagtcactgatttcagtgggcatcaggagtttcagatgctcccctggtaatgtaatgaacaggcaagacgatgaatcacagatctggattagagagagctgctctcagggcttccatgaaacatctacagctgttctcaccaatctcggcccagcgaaataccctgatccttacttccatttgatacaatccatctgaagcatctgctgtg

SEQ ID NO: 763999 - DNA, 461 bp, Homo sapiens
tattagcttagccaaactgctctgcgtccaaattagcttggtatcaacattatgcatcagtgacacatctgataaaatgcctgcccatctttcttcaagctaaggcttggacgtgtaattgtcaagctggtgctcatccgggcagacgccacagttccccaatggccaggactcaagttcagcctgaaccctgtgaggtcaaaatattcccgggatgcttaaaaatactgatgyctggatcctacccccagagtcactgatttcagtgggcatcaggagtttcagatgctcccctggtaatgtaatgaacaggcaagacgatgaatcacagatctggattagagagagctgctctcagggcttccatgaaacatctacagctgttctcaccaatctcggcccagcgaaataccctgatccttacttccatttgatacaatccatctgaagcatctgctgtg

SEQ ID NO: 764000 - DNA, 633 bp, Homo sapiens
cagtttctttcctacttccactcttggccagcctggaaatccattgttgatcacttttaataatccagcagataagctctactcaccctgaacccaggatctgcatagcagtccctgttcctccacccagccttctgagcacagctgtagaaaacactgcgatcattagtggagataccatgatacgtggtatctccatggtgtggccagctaggcccctgccactaggagatcctggctggcttctgttctcacccctgtagctgatatttcaaactactccttgcctcaaggtccctgtctctccacaaatgactctgccttctgtgtcataggggatattaagggagactgagtgagcttgctgaaacttcctaccctttgtcttctacmtttgcccagctccacccttcccttcacatctctataaagggacaatgcttttgtcttcacactcatagatttttcacactcacatctagatcctgtctccaaggatcttcaactcctcctttgcctataaacacaaaaacctcttggctctgcctgctcttctgcacactctccttttcctccaaagtgcaaccattttaagtttacagttcaatcaatcttgaaaaacacacacccatg

SEQ ID NO: 764001 - DNA, 587 bp, Homo sapiens
tttgtataaggtataaggaagggatccagtttcagctttctccatatggctagccagttttcccagcaccatttattaaatagggaatcctttccccattgcttgtttttctcaggtttgtcaaagatcagatggttgtagatatgcagcattatttctgagggctctgttctgttccattggtctacatctctgttttagtaccagtaccatgctgttttggttactatagccttgtagtatagtttgaagtcaggtagcgtgatgcctccagctttgttcttttggcttaggattgacttggcgatgtgggctcttttttggttccatatgaactttaaagtagttttttccagttctgtgaagaaagtcactggtagcttaacggggatggcattgaatctataaattaccttsggcagtatggccttttcatgatattgattcttcctatccatgagcagggaatgttcttccatttgtttgtagcctcttttatttccttgagcagtggtttctagttctccttgaagaggtccttcacatcccttgtaagttggattcctaggtattttattctctttgat

SEQ ID NO: 764002 - DNA, 552 bp, Homo sapiens
aaattggacattttgttttagaattattggaagtcatactatggccacaatcattagctactatcaagtatccaagccaaagccagacattccagaaagcaagagaaataaattccaagagagtataacaaaagggctgctgtaaatatatttgaagaagaaaatcaacccatcttagctttcaaggaagcactcaattttaatataaaattagcccaatctacagccccagaaacaataagaaaactgagaaacaaaactaggtacttaatcttctgagactgggctatgatatggagcaaatgctctactyatacttccaaccaaatcacagtcatctttctcagtatgtgttttaactcaatgaaaccccgataagatgattgcttgagaaaagtagtgttattagaaaccttctcctatccttgctaataaggtaaatgattgctaccacatctaccttaaacataacccctggaaactttgcataattcttaaggttgttttctttcaccagatacactttgaaggtatggcaattacattttatgc

SEQ ID NO: 764003 - DNA, 603 bp, Homo sapiens
tacaactggattaaatgtgtggtataagataaatagcagacttgggtatgtcttcaaggtttttagttttggcattagaagaatggaactgtcatttgccaaaatggtattgttgctagaagtacaaatttgaggggaatatcctaagctcagtttagaacaattaaacttgagataaattctacacatttaagcagagtggtcaattaggctgttggatacaagtctggacttcaggagaaagttctggtcttcagatgtattaaaactrcaattacttttgctccaacctaatacaatttagagacctgcatatgtccttagtttattagtcaagggtctccaaagaaacagaatcagtaggagaaatacatatatatatatatatatttatattattacaaacatataatacatacataatatatatgtatacatatatatgtataatttatgtataatttatgtataattatacataatacatatatatgtatacatagtatacataatatatgtataattttctattctatatctgtgtatctctctctttgtctctctctgtctctatcatctctgcctcagtccaccccccccatt

SEQ ID NO: 764004 - DNA, 642 bp, Homo sapiens
attttcttagtctaaatttatggcttctcacagtagaaaagctataaaccatgcccagaaaattttattctagcattctcttggtttcaaaaattataattgcatctttttctcaatttcaacttcaatgagccctttccataaaattgttgtgcttaatagcatagaaagaacaagcttgatcatggatatcttttgatgtttctcactgaaaagctaccctgtgtcttattgctacttaaatttgttgaggaatgaaatgtattgcaagatgatgatctgtagagatgatggaactagacatagttctttcccattacagaatagcaggatatgaatttatttggcatttaatcaggacaaactgtatgtaattttacttccaaaagacaaacatgttttagcaattttaactatattctcctccactgaacaatattgtcaaatattctactgaatcataatttktaattctttgaataagtctaaatgttctgaaaaaaggcttttgttcactgcaaagtatacatatgattattaaataacttagagatccaaaactcattttatgatgaattcaattaaattctcctaaattctcacacatacacacacataaacacacacacacactccacattt

SEQ ID NO: 764005 - DNA, 641 bp, Homo sapiens
aggatcatttttccttcttttcttaaattccttaaaaggcaattcactggttaaagaaaatttatagcaatgtgtatggggtttataacacatgtaaaagaaaaataaataataacaacagcacaaatgataggaagaggcttaaatggaattatatttttgtaaatttattacattatatgtgaagtagtatcatgttaatttgaagtaraatgtgttatattaaagatttatattgaaacccctaaagaaatttacttaaacacaataaagtaatattgaaaataataatgtgggagatagaatataatactaaaatattaagttatttgaaaagagaaaaacaagtagcaaaaagataaataggcaaacaagtgtaatcaaaaggcagagatagggttgattgctatttacaggaggctctttatacattaagatacaaacaggtggatgatatatcaccacaagatatactgggcaaacataaaacataataaagcttatgtaagctatgtccttattagacacaatagacttcaaacaaggagatttacctgaaataaggagggtcatttcataatgataacaactccaattaatcaagaagacataaaaattctaaatacatccacctaagaata

SEQ ID NO: 764006 - DNA, 694 bp, Homo sapiens
aggtaacaggcatgtcaaatcctatattgatatccacgtaaaaaaccattgatacttacctcctgaatatggaacaggttattctgcataagaaacctacaggaagatgacagctttggaaaaccgaggcactttgagtctagtgtttctcctattcaactcaaaattttctccacagtatttcaagcgggatgctggccaagtaaaagaaagttaggatcctttttctatgtagttttcatatcacttagcaatttaaatacaaaacactaaatatactctatcaaaacacaagggttagaaatatctgaaattcatgaaatagggctaagaaattcaaatgctgacaagagccaagtcagtctctcttcayaggaaatttcaacaaaataccaaaacaaactaagaagaaaggaaatttcaactttagacatatcaggatcagaattcttggtttgttccctgccttagttatacttttcttctctttccaattctaatttagtttaattaatattccaaaaaaagttatgaaattataatttaattccataatgtcggttggtttgcaaaaattagtggcataaaaagggtttattagatttcatgatgtttttcagattgtctagggtcagctggacccctcagttccagagagcattacttgaggaaatttaggcaaacatatttagct

SEQ ID NO: 764007 - DNA, 525 bp, Homo sapiens
aaatcatatgaacacattgaaaacatttgtttcttgatagtttaccacaaaataaagacattgataaagaaatatgcaagttataatataatgatgtcataaaaaattggatactattgtccactaaaagaatacaggtrtttaaaagttgtcactcacaagagtaagattttataactcatatgtgaaaaaaactaatattgccccaatttgacaacagtctttaaaaatacacatgacattaccaatattgaagttgaaataaaattctctaaaattttaacaataaattcaaaatcaataatactaaaagaatgactggattaccattctattccactctaatctatttaaattattctaaaatttattcttggcatatgcaaaggcaaccaacaagtatgcaacaaaatatagaagaaaaaaagcattatagaaacatactaggctattaataaaaatatatttttgttaatttaaagattcttatagaattttccaattttttttatatttcaagcatgt

SEQ ID NO: 764008 - DNA, 585 bp, Homo sapiens
tgtagccctgctatgtttattttagcctaatgaaactgatttcagacttcttatatttaaaatgtcaagataataaatttgagttgttttaacctactaaactaagaaaccgtggtaattccttataccagcaacaggaaacaaatatacttgcttaaaaactcttaaagttaaascaaatatacaccaaatcagctgaaagataacataagtggtgcactctgaggtcataggaaagtttccaaagtaagaaaacttttctacactcagaaaaaaaaaattagaaaatgagaagaaaagtaccaggaaaaatgcccagtctgaaccacattaagaaaagaaaataaattttcaccaaatatttaatttagaggaaattttccagaaaaacagaaaatctccaaagcagtttattagccacacatctgaagagttgaatacttataaaatataagtcaatacttttctaaaaaattgaaaataatcactggcaattatcaatgtcggcttgtttcctatgaaagaaaagctcacagtaaaaggttgagagtgctgcaagaatctttgataatttttttaaaaaaa

SEQ ID NO: 764009 - DNA, 585 bp, Homo sapiens
tgtagccctgctatgtttattttagcctaatgaaactgatttcagacttcttatatttaaaatgtcaagataataaatttgagttgttttaacctactaaactaagaaaccgtggtaattccttataccagcaacaggaaacaaatatacttgcttaaaaactcttaaagttaaaccaaatatacaccaaatcagctgaaagataacataagtggtgcrctctgaggtcataggaaagtttccaaagtaagaaaacttttctacactcagaaaaaaaaaattagaaaatgagaagaaaagtaccaggaaaaatgcccagtctgaaccacattaagaaaagaaaataaattttcaccaaatatttaatttagaggaaattttccagaaaaacagaaaatctccaaagcagtttattagccacacatctgaagagttgaatacttataaaatataagtcaatacttttctaaaaaattgaaaataatcactggcaattatcaatgtcggcttgtttcctatgaaagaaaagctcacagtaaaaggttgagagtgctgcaagaatctttgataatttttttaaaaaaa

SEQ ID NO: 764010 - DNA, 585 bp, Homo sapiens
tgtagccctgctatgtttattttagcctaatgaaactgatttcagacttcttatatttaaaatgtcaagataataaatttgagttgttttaacctactaaactaagaaaccgtggtaattccttataccagcaacaggaaacaaatatacttgcttaaaaactcttaaagttaaaccaaatatacaccaaatcagctgaaagataacataagtggtgcactctgaggtcatagkaaagtttccaaagtaagaaaacttttctacactcagaaaaaaaaaattagaaaatgagaagaaaagtaccaggaaaaatgcccagtctgaaccacattaagaaaagaaaataaattttcaccaaatatttaatttagaggaaattttccagaaaaacagaaaatctccaaagcagtttattagccacacatctgaagagttgaatacttataaaatataagtcaatacttttctaaaaaattgaaaataatcactggcaattatcaatgtcggcttgtttcctatgaaagaaaagctcacagtaaaaggttgagagtgctgcaagaatctttgataatttttttaaaaaaa

SEQ ID NO: 764011 - DNA, 556 bp, Homo sapiens
aaaatatatatatatatatatatttccaaaattccagctaattatacaccatcccatcccccccaccactagaggtagctactattcttattttaatcaccattttgctgtttacgttttactgttctagaacttcataaacacagaattctacaatatgtgtctgccttctctcactcactgtaatgtgttttgagattcatcctgctgttgtgtgttaatggtaatttactccattttattgctgaraagtagtccatcacataagtgtactacattttgcttatccattctcttactaatgttcatttgggctttccaatttagggctattgagaattatgttgctaggaacattttgtacaagttatatttggacatagtattttatttgtctaagataccctaaatatcctagatatacctggaaagaaatggctgtatcatagtaaaaatgttttaacttcataagaaaccactaaacagattgtaacatggctaccgttttatgtttctaaaccaacatacaaggatttgagctgctcaacatcctaac

SEQ ID NO: 764012 - DNA, 556 bp, Homo sapiens
aaaatatatatatatatatatatttccaaaattccagctaattatacaccatcccatcccccccaccactagaggtagctactattcttattttaatcaccattttgctgtttacgttttactgttctagaacttcataaacacagaattctacaatatgtgtctgccttctctcactcactgtaatgtgttttgagattcatcctgctgttgtgtgttaatggtaatttactccattttattgctgagaagtagtccatcacataagtgtactacattttgcttatccattctcttactaatgttcatttgggctttccaatttagggctattgaraattatgttgctaggaacattttgtacaagttatatttggacatagtattttatttgtctaagataccctaaatatcctagatatacctggaaagaaatggctgtatcatagtaaaaatgttttaacttcataagaaaccactaaacagattgtaacatggctaccgttttatgtttctaaaccaacatacaaggatttgagctgctcaacatcctaac

SEQ ID NO: 764013 - DNA, 524 bp, Homo sapiens
gtattatttcattctccttaaatttattgaggtttgttttgtgacctaccatatagtctattatgttccatgttcacttgagcaaaatgtgtattctgttgtaaatgtgtattcttgagcaaaatgttgatggagtgtgtcctatatatctctgttaggtcaggttggtttatggccccattcaactctttcatctccttattgatcttctgcctcatttttctatccattattgaaactggagtattgaaatctccaactattattgggaattcggggggaggttttattgtcattattgttgttttgagacaggatctcactgtgttgcccagactgtrgtgtagtgaccattatagtccactacagccttgaactcctgggcccaagtgatcctcctgcctcagcctcccaagtagctggaactataaatgcacaccaccaagcccagtttattgttttttgtagagatggggtcttgctatgttgtcctattgccttctggccttcactgttgtggtgaa

SEQ ID NO: 764014 - DNA, 504 bp, Homo sapiens
ccaaacatttagagagtagactactgacatttttggcactgtaaggaatacaaaatttaaactttcaagtatccctgtttaggaagcaactagaagatgtaatattcctgaaacaaattgaaggaatatatgaataaacaaggaaggaaaataatatgggacccaggaattagctgattcaacactgaagaatgacaagagaaattctccatgtgacaactacaaatctagtccagaagtaatcagaacacatttgacagaagrgcagatggctgaagaagaaaggtctccaagggaaaggagcggggattgagattgacagagtatatgttattttgagcactaggaaaattgctgctaggtgtatgacaagtctgttaggatatctaaaaatagtcagacattgttacataaaaaacaaatgaaaatacaactactgtgttaattgttgggagggtattaaaaaaataaatgtaatcaaagtatactacctgactcagcagt

SEQ ID NO: 764015 - DNA, 539 bp, Homo sapiens
caaacatttagagagtagactactgacatttttggcactgtaaggaatacaaaatttaaactttcaagtatccctgtttaggaagcaactagaagatgtaatattcctgaaacaaattgaaggaatatatgaataaacaaggaaggaaaataatatgggacccaggaattagctgattcaacactgaagaatgacaagagaaattctccatgtgacaactacaaatctagtccagaagtaatcagaacacatttgacagaagggcagatggctgaagaagaaaggtctccaagggaaaggagyggggattgagattgacagagtatatgttattttgagcactaggaaaattgctgctaggtgtatgacaagtctgttaggatatctaaaaatagtcagacattgttacataaaaaacaaatgaaaatacaactactgtgttaattgttgggagggtattaaaaaaataaatgtaatcaaagtatactacctgactcagcagtgtacaatatttaatatttctagtaatattatcactg

SEQ ID NO: 764016 - DNA, 632 bp, Homo sapiens
aaggaaaataatatgggacccaggaattagctgattcaacactgaagaatgacaagagaaattctccatgtgacaactacaaatctagtccagaagtaatcagaacacatttgacagaagggcagatggctgaagaagaaaggtctccaagggaaaggagcggggattgagattgacagagtatatgttattttgagcactaggaaaattgctgctaggtgtatgacaagtctgttaggatatctaaaaatagtcagacattgttacataaaaaacaaatgaaaatacaactactgtgttaattgttgggagggtattaaaaaaataaatgtaatcaaagtatactacctgactcagcagtgtacaatatttaatatttctagtaatattatcactgactaytcatttaatcaaaaactgtatcaggaggagaagtaaaagtggcagggtaagagaaatgaattatcaattaccctaataggaaagaataaacagaaacggcctaaagtgctaaactgattaatctataaccaacagagtaaacctgttagttagaatgtggcctgcataccagaggaacacctaaaacagttcaaagaggctgcctctcaagggcaggactgggatatggg

SEQ ID NO: 764017 - DNA, 606 bp, Homo sapiens
gttcaagtgatctgaaaggggagaagccccttctagctgaaggtctgatgcccacaacacaaatataatccaataagagtggagattttggcttatagggatagaggaaagcttttgttcttgctcggcttgaaccaagagtaatataagtttggagctattgcagctatctgggatctaagaatgaaatcacacatggaagagaacaaagcttagcaacaaggagggccatctattcctgataacaatgttgaccttccaaaagcaacccaacactgggcctttcagtcatgagtcaatgaattctttttcatcccttgcaaccaagagtcttactgaactgaaacatttagttatttctggtagtcctttgaggtatctcttgtttgctcacaaacaatcttttcctctgctccaggtcccctaagtgatgtctgctcttctgccgctattgctrttcattctggaattgacacaataatgccagtgtttatgccaaaggtgatattgctcagtgttcccaagccagcaaacacccatcctaacaacattgccttctctagagtcttggtgtgttgtaactatagtagaataagaagaaaacta

SEQ ID NO: 764018 - DNA, 612 bp, Homo sapiens
catccctggagtatatctaggattaacttcattgactgcaataagtggaaaggactttttctgttcagccatgtcttattgatgctaaccatgtgacaggcattgggctaagctacacagaggggtgctctgctttttaaaggaacttacagtctaataggaaacattttattcaatcttagaagcaatacactaatcacttattttgtgaaacacatttattcagaaaatttatatcttatgtcaaataaaatagaaatttaatccagctatttaaagaaatcatttgacctaagattttattttcataatgtcattggttagaataatctcctayggaagtgtcatgtgctgtagtcttcagcttgacttcagtctttgaaatggttcgttctttatccctgactctcctaatcccatggagaaaaagtcaatatgttggtcaaatatctgatgattgaaaggcaactaaagctccataaaacatcaatatgtttcagagaggttcaaatgtaaacagttctatatcactacaaatcttattttcagccgaagataaaaggagacattgctacctgtcacacacaaaaaaataagatgttttcattactt

SEQ ID NO: 764019 - DNA, 604 bp, Homo sapiens
tctggtcctaacaaacatatttcagttcttattcttgttgcttcagaaggggctagaggagagtcttttcaaattggcttcaattagtgtgggcaacagaaaaatgtagaggacacattttaatctgatttcatgcacttggagtaaacatcggtttttctcagtttatggtggaagtttccaccaaagaaccaaaaccttctttggggccatttgaactacttggcagaacaaagatgagtgcttttgggttcgggcttctgtttccctcatgccttattaaatcccaatacatatatttagcaacagagagctgcatattttgtaagaatattttcactaactattattgcctcttaggtgatatgrcatgtgagagcctacatttttacgtagtaaaacttctacaaattgaggagtaatgtattatcagccacctggtacattcatattaaataccaaaataggtccacaatgtctttatgtgtccaataaagggctatttttcttattcaaaatgatgttttaaggaatgctttatgctgggtgattaacatgttcccaaatagcagttctcactaatgcaaagcagaacagaatttca

SEQ ID NO: 764020 - DNA, 519 bp, Homo sapiens
cgctggctgtgggaagcacaaattccccaaggcgaccactgggagtgatgataagcagggtcacttgcacctgttagttcttgggcccaagtattataagtatataaggcaaagcgtcattttatggctgtggattcaaaaaatatgctgcatcctgagggatttagctccattttcccagggtgccttttccaagctgatgcctctcaagcatcttcaaaaggctatcgaattgttgtatcaggccggcagcatctggctggtaggctatgtgstaatcccagtaaatgtcatgatcatatattcactgccacaccattttttgctataaggtgaatccctgggttagagaccatgttaggcagaatcctgccccatgttagtaggtcagatactgagacttcagatgttggtgatggatgacagcatgagaaaattctgccacataatggtgacaggagaaatacatatgtccctcaagtgatatactaggacatctctttccctcgcactagtgtg

SEQ ID NO: 764021 - DNA, 599 bp, Homo sapiens
ggctggagagcagtgacactatctctgctcacctctgccttccaggttcaagcaattcttctgcctcagcctccctcccgagtagctgggattacagacacatggcaccatgccaggctaattgtttgtatatttagtagagatggggtttcaccatgttggccaggctggtctcgaactcctgatctcaggtgatccacctgcctcagcctcccaaagtgctgggattacaggcrtgagcccccaggcccgggtaaagtctttctcttctaatttgccattcagcccctctcaaaagcagtttctatcacccggtttccacttcctcactactctctctgtatgggtcacactttcctatttctttgtttgtctcatattttttgttactgagttgaaagctgaatattttacacaatatattatggtaaatctggatactgacacatccttcctcttcgggattttttgttactattgtttgcttatttacttgtttaattgcttggctggactattttagtaaagtttattttccctatagtatgtagtctctgacgtcacttttcataaggcacagctttggccatattcacaat

SEQ ID NO: 764022 - DNA, 631 bp, Homo sapiens
ctcttatcatgcaagcggctgacctacaatgaaaggttcatgcacagcctcaccaggtgtctactgttaaaatgaggacactggttggaaaagaatgggaccctgcaacttagaatggggacttgtgggaggaccctgatgaagctggggacaatgcatttgtaaactcagatgtaccttttttgccagaagaagcagcttccccattcccagtagtggcaacatccccttcctgatcgatgctgcctaaagcctttccacttttgtctaaggagaaaaaccctgtgctgcctgaagaaacagtcatggcctcacctgaggcagttgccaggcaaagcaatgttggttctcctcaggacccacccccaacacctctgtttgcttctagacctataactcggctaaggccccagcaggcccctagaggtgaggttcagagtgtgacccatgaggaggtgcactacactggaaaataactacttgagcttatakatatatatatatatatatatatatatatatattattgactttgagtttgaaggttcttaaagtataataaaatatatatatataaatttatataagcagaaatctggaaaacaggtggatgttaggggtgtgggataat

SEQ ID NO: 764023 - DNA, 563 bp, Homo sapiens
tggacgcagtggctaaggcctgtaatcccagcactttgggaggccaaggtgggcgaatcacgaggtcaggagtttgagaccagcctggccaacatggtgaaaccccgtctctactaaaaatacaaaacttagctgggtgtagtggtgggcacctgtaatcccagctactcgggaagctgaggcaggacaattgcttgaatcccagaggcggaggttgcagtgagccgagattgcrccactgcactccaacctgggtgacagaatgagactccgtctcaaaataaacaaacaaacaaacaaacaaacaaacaaatgctggccaggatgtgcagaaacaggatctctcatgtattgctggttgggatgtaaaatgacacagtcactctggagaaacaaagcacacatttaccagcaatagtatttctgggtatttattacagagacatgaaagcttaggtctatacaaaaatgtacacaagtgttcatggcaacttcatttgcaacagttcaaaactggaatcaaaatctccttcaatgggtgaataattatatagtgttgcatg

SEQ ID NO: 764024 - DNA, 581 bp, Homo sapiens
aacatgaaccaactatacactgtttaaaaaaaactcaccctactggtaaaaatatttatagactgaaggtaaaggggtgtaaaaagatattccacacttcatgtctgtagcaacattgggaaccaaaaatgagcagggtaactctgcttatatcaraaaaaacaaacttttttattttaatgtttgtgggtacagagtaggtgtatatatttatgggttacacgaaatattttgatacaggcatgcaaagtgcaaaaatcacatcaaagaaaatggggtatccatccactcaagcattttcttttctcttacaagcaatcaaattatactctttcagttacttcaacatgtaaaattaaattattttgactataatcattttgttgtggtatcaaatgctacatattatttattctttcaaactattgcttttgtacccattaaccatcccaattcccatgacttcttactacccttcccagcatctggtaaccatccttctattctctatctccatgtgttcatgtgttttgatttttacatgtcacaaataagaagatgcaatgtttgtctttctgtgc

SEQ ID NO: 764025 - DNA, 675 bp, Homo sapiens
tggggcctggctgggaggtgtttgagtcatgggggcagatctctcatgtatggcttggtgccctcctcatggtaatgagtgagttcttgctctatttgtttgcaagagaagtgattgtttaaaagagcctggctcctcctccacctgtttcccttgcttcctctcttgccatgtgacacatctgtgctccctttgtcatctgccatggtagaagctacaagaagcctcaccaaaagctgaccagatactagtgtcatgcttgtgtgacctgcagaattgtgagccaaataaacatcttttccttataaattttccagtctcaggtattcctttagagcagtgcaaaatggactaacaacyttaataaagcattaaaaaagtgccaaaatgtattacaattgctctgttacttaaaagcttatgttatactctcaattatatgattaaacacattttaagaaaaacaatttagtatttaattgataggaactatcaatcatacattttgtggtaatattcaaatattaaacatttacagtctcatggtggctaacagaaaatcttttgaaattatgtaacttaagatctgtacagaattatattagagagacaccctagatcttctagttgtatagtctaatgtcctttagaaaggaaacagttatagatgtgtgg

SEQ ID NO: 764026 - DNA, 580 bp, Homo sapiens
aaaccagacaaatatattataataaaataaaactgcagaccaatgttcctcatgaacataacagaatattagcaaatccaatccagcaattcataaaaaaggataatacaatataatggttcgttttatctctgaattgtaaaatggcttaacaaaaaatcaatataatctgctaccattttaagaaaaatcatatgatgatgtaaatagacatagaaaacaccatttgacaaaatgcaacaccaattcatgacaaaagctataagcaaactaaaaaaaataaatagaacttccttatctacaagagggcagctacaaaaatctacaaggctcatcatagctaatggtgaagtattaaacactcctcccacctcaacattgagaagaaaaaaggaatgtctcctttcaaygttactactgaacattgtactataccagtggaagtggggtcacatctgtccaaaaacatctgaagggagtggtgttagccagagaactactagagtgggatacagtattccactgtagtatactatagaaactgtatcccactgtggtagctctctggctacagattact

SEQ ID NO: 764027 - DNA, 530 bp, Homo sapiens
agtgcagtggcatgttctcacctcactgcaacctctgcctcctgggttcaagcaattctcttgtctcagcctcccaagtagctgggattaccggcacatgccaccacacccatctaatttttgtatttttaggagagagggggtttcaccatgttggccaggctggtctygaactcctgacctcaagtgatccacccgcctcggccttccaaagtgctgggattgcagccatgagccactgtgcctggtgagaaagttgtctttaaaaaaaaaaaaaattgagtctgactttgaagaaaagtgttagcagagaggtactcaaaagttgttctcagtgaagaagacatgtccatttcttgcccaattgtgtggttttcatattcatagataaatattttatcttgtccacttgtatcccatcactttactctctgagacccaaagttcccttctcccacttaacaagccaaaaatgccaggtatttcagcccatctgacaaattttccttccccctttggatcctgtctgg

SEQ ID NO: 764028 - DNA, 619 bp, Homo sapiens
agtgcctggcccttggcagactgtcaaatggagctatggagcagcagcgggagtaatattattatctagaccttatcggtccttttaaactcagttcagattccttctcctttttaaattactgcaacctgattttacctgcccctgcctccaagttgctgtatcagttagcctctgaacaattcatttagcaattttaattatatattgcttcttgacactgctttgtgatcttaaaaactctgcttcaaatacgtacttggttgcttttcctgagtgctgttaattcctgctctaacggactaaagtaatttgaaggcaggactaggttttatgcatggcacacagtctggtgccttacatgtaactactcacaaacttttttgatccaaaatttagaaacttcacaygcattcataagaaatcaataaaaataagctaagttggtttcagatacagagggttcccaggaaggtgtgtacattggcaattagcccaaatgtctttgttcataatttttttttttttttttaagtagagacagggtttcaccatattggccaggccggtcttgaactcctggcctcaagtgatctgcctgcctcagcctcccaaagtg

SEQ ID NO: 764029 - DNA, 541 bp, Homo sapiens
gattgtttctgtagttctgctgggtttgaggcttccactcactgcatgtagcaatgctgattttgtgagatcatgacttcatacatttagaatctgataaacccagccagctgaaggctttaaggcattgttggtatctttctcttgctccttcttcagatgtagcttccagtaagtacttcggaaagttaaacaaggatcatttccagtttcaccgcattatcctgggacactctgcacagaatatcttctttaatcaggacatattyaatcagcagatctaccactaaccactggctattgttctctctgataggagtatactgaagcatggaaaaacagaaatacagactttatttacctacttttgaaactccacagctcctgagttaactgtagcaatagaaaccacataggtgatgtaaaccattggatttttaacagcttccttggattttaattgaggatcatgagttatattcttgttcttcaactaagaccatgtgtgtggtgatacctgacatctctggcccttgatttt

SEQ ID NO: 764030 - DNA, 580 bp, Homo sapiens
gcttcatggagaattttaccaaacatttaaggaagaattaatgccaatcctcaaacttttccaaataattgaagaggagggaacatttctgaactttttttatgaggtcagtattaccctcataccaagccagataaagacacacaagaaaagaaaattataggccaatatccctgattgaacatagatgtaaaaatcctcaacaaaataccagcaaaccgaattcaacagtatgttaaaaagatcattcaccatgacctagtgggatttattcctaggacggttcaacataygaaaatcaattaatgtgacatatcacatttacagaatgaaggataaaaatcacacgatcgtctaagataaaaaaagtgtttgataaaattcaaaatcctttcatgataaaaaaaaaatctcaacaaagtagggatagagggaaattaccttaacctaataaaggctatctatgaaaagaccatagctaacatcatactcaaaggtgaaaaactgaaaacttttccattaagatcaggaacgaggcaaggatgcccattcttgccacttctattcaacacaggactgg

SEQ ID NO: 764031 - DNA, 620 bp, Homo sapiens
gtgcaccatcctctaagagcctccataggttcagctatttgaaagcttttcgaaccatgcccttttgggtttttatggaggccccactacataggattgattgattacgtcattggccattggtgatcaacttaaccttcagtccctttctctttcccagtggttgagagtggactgaaagtccaaaccctctaatcaarcctcagtctttccagtgaccagacctcatcctgaagctacctagggactgcttgccatcagtcaattattagcatacaaaaagacatcgttttagagattctaaggatttgaggagttgtatgccaggaagttgggtgaagaccaaatatatgttttacatatatctgccaagacccaatgggaaatttacaacataaactcccagggttctggagtaaggctgtgctatcggtagcagggaatcattcaccatttgaaaaatagctcctggtgtgttactgggttttagtaaacactaaagtctgaccatggaacttcaacagattttgtggccagagctgctcatcataagctggtttctatcaaacccaccaagtattagggtctggcaggcccagcagcaatccatagcaatatgg

SEQ ID NO: 764032 - DNA, 620 bp, Homo sapiens
gtgcaccatcctctaagagcctccataggttcagctatttgaaagcttttcgaaccatgcccttttgggtttttatggaggccccactacataggattgattgattacgtcattggccattggtgatcaacttaaccttcagtccctttctctttcccagtggttgagagtggactgaaagtccaaaccctctaatcaaacctcrgtctttccagtgaccagacctcatcctgaagctacctagggactgcttgccatcagtcaattattagcatacaaaaagacatcgttttagagattctaaggatttgaggagttgtatgccaggaagttgggtgaagaccaaatatatgttttacatatatctgccaagacccaatgggaaatttacaacataaactcccagggttctggagtaaggctgtgctatcggtagcagggaatcattcaccatttgaaaaatagctcctggtgtgttactgggttttagtaaacactaaagtctgaccatggaacttcaacagattttgtggccagagctgctcatcataagctggtttctatcaaacccaccaagtattagggtctggcaggcccagcagcaatccatagcaatatgg

SEQ ID NO: 764033 - DNA, 607 bp, Homo sapiens
ccagaggtggtgtggccctacatgatggtaggaacacagtttccgcctatgttttttttccaccatgcatgacatccattcccagaatcatttcataaatagatgctgcttctttgccatcatcatttgaattccaaccagtggggagaagaaaggggaaaggaacagaccttcctttaaggatacttccaagaagttgttcatactacttcctttcatatcttgtggactggaagtcaatcacattacttgaaatatttcatgtttttattggaaaccatgagcccartcaaaactcaaagttccattattctgtagataaaggaaagtggatattgagggacaacttgctgttaccgatgtcagctgaccactaaacactcatagcaaatgacactaaaagggtttctttggtggtatttttcttgagatttgaactcgcgttcaactaagtcaactaaacctcagatttggactgctctaggagtacttgggggtgaggggaattgaaaagcaaacagaaaagtataaaatcatccctcagtctctgataagagctttcaggcaaaattagcaatttaaagataatctgcctctcctacagtca

SEQ ID NO: 764034 - DNA, 631 bp, Homo sapiens
tgcttttgggtgtcccatgccaggcttgttccacctgctccaggatcagatgattggttcccttcatacagactcattgccagtaaacttgattactcaaactttgctcaagggccaactctgcttagtccagtcagggtcctgcaaaggagcgcygacctgtcccgcacatgtcttgcatgatctccagtctgggatggctgtgctgcactggaaggctgtcttattagccatatgaacactttgtgctgccttaccgactctatactcaattctgcccttcctcggctttttgttctttggtcagctgtgcctgtgatctccaggctgtggtgatcattgggcataaattccttgccccactttccccggaaaaggacttcctaattggggtctgagctgaagtggctcttcctgtattgaaatcctttgtgtgttttcattaactatgctgtgtcatcacacaagcagtggaggtggtggtggcaccatccattcattcatgacacatttattaagcacctacttatgttccaggcattgtgctgagtgctgaggttgccatggtgaccaagatcaaacttgttcctgctttcatagtttactgtttttgaatgaatcagacacataa

SEQ ID NO: 764035 - DNA, 631 bp, Homo sapiens
tgcttttgggtgtcccatgccaggcttgttccacctgctccaggatcagatgattggttcccttcatacagactcattgccagtaaacttgattactcaaactttgctcaagggccaactctgcttagtccagtcagggtcctgcaaaggagcgccgacctgtcccgcacatgtcttgcatgatctccagtctgggatggctgtgctgcactggaaggctgtcttattagccakatgaacactttgtgctgccttaccgactctatactcaattctgcccttcctcggctttttgttctttggtcagctgtgcctgtgatctccaggctgtggtgatcattgggcataaattccttgccccactttccccggaaaaggacttcctaattggggtctgagctgaagtggctcttcctgtattgaaatcctttgtgtgttttcattaactatgctgtgtcatcacacaagcagtggaggtggtggtggcaccatccattcattcatgacacatttattaagcacctacttatgttccaggcattgtgctgagtgctgaggttgccatggtgaccaagatcaaacttgttcctgctttcatagtttactgtttttgaatgaatcagacacataa

SEQ ID NO: 764036 - DNA, 631 bp, Homo sapiens
tgcttttgggtgtcccatgccaggcttgttccacctgctccaggatcagatgattggttcccttcatacagactcattgccagtaaacttgattactcaaactttgctcaagggccaactctgcttagtccagtcagggtcctgcaaaggagcgccgacctgtcccgcacatgtcttgcatgatctccagtctgggatggctgtgctgcactggaaggctgtcttattagccatrtgaacactttgtgctgccttaccgactctatactcaattctgcccttcctcggctttttgttctttggtcagctgtgcctgtgatctccaggctgtggtgatcattgggcataaattccttgccccactttccccggaaaaggacttcctaattggggtctgagctgaagtggctcttcctgtattgaaatcctttgtgtgttttcattaactatgctgtgtcatcacacaagcagtggaggtggtggtggcaccatccattcattcatgacacatttattaagcacctacttatgttccaggcattgtgctgagtgctgaggttgccatggtgaccaagatcaaacttgttcctgctttcatagtttactgtttttgaatgaatcagacacataa

SEQ ID NO: 764037 - DNA, 607 bp, Homo sapiens
attagtgagatatggataggatataatgctagtaggaatattaactgatagggcagctttgcagaagggtttggtattttttctagtgttaaacaatcaaatattttataaattaacaattcaatttctggatatatgtatcagtcagtgctgtccaacagaaataaaatctgagccgcatatgtaattttcagttttctagtggtcatatttaaataggtaaaataaattttaataatatattttatttaactcattatatcacttaaacatgtaatcaacatgacatcatcaatgaaatattttacatttttgtgctaaatttcctaaatctgttgtgtactttacacttatagtaggggggttcaaactttcagcttctctgggccacattggaagaagaattgtctttggccacagatgaaatacactacyactaacaatagctgatgagaaaaaaaaaaatctcataatgttttaagaaacttcaggaatttgtgttgggccacagtcaaagccatcctgggctgcatggaacccgtgagccacaggttggacaagcttgacttacaggatctctcattttggacataaaattttcattggg

SEQ ID NO: 764038 - DNA, 638 bp, Homo sapiens
agtgtattagctatttttaaatattttccactatgtgaattaaagtctatacataactagggccttctcaacgtttgataaacagttataaagttaatgttatataaaagagactaaatagctgttgtatttggttaaaaagatgatctttatcacccagatgtgtagtcatatgctatattagctttctgagctatttgttaagttaaattggaactaacttctttctttccttccctcctttccttagcccttccttccttcctttctgtctctctggttccttccttctttccctctcctttctcttcctccctccctcccttcttccttcttttctttcttccttccttcttgtcttagatatgtggctttggaggagaaagaaaagtttcctgactcaatgttatcctacccaagcctcattaactaccctcataaaactagaaactcgaaatcagctctgcccaactgaaatatratgcaagccatatatataatttaaaatttttttcataaccacattagaaaagcaaaaagaaattagggaaattaattttaataatatattttatttaaataacatcaaaaatatttcagtatgtaataagtataaaaattactaatgaagtatttta

SEQ ID NO: 764039 - DNA, 612 bp, Homo sapiens
taaggttataagtgggtgggtaatattagctgttgattctggtacacaaaccccaaaatttgatttttacaactgtatcagcagtagcaaaaatggaacaagcatggactttaagatagcatctccctagaaccatatcttggctctatcatctactggttgtgtaaaattgagctagtgacttagcctctctgatccccactctcctcatttgtaaaatggagattaaaaatgctaatacaattaaaatacatttagaaaggaaaaccrtctagaacatgtcttggttcatagtaggtatccagtggacattcattcttttctctttccctcaaggaagacaggtagataatatgctcagggacacagggaagataaaacttcaaaatcaaaaatgtggcgtttagtaactatgtacgtccaggatctggtttttcttttctgcacctggcatctgccctacagttggacagactgagtgcctgggggagcacccttgaggctgatcttcggcccagctcttctagtcggtctacaggctttgctggctgggctccctgtgaagacaagtgcccctttgtgcctgttccttccatttttagacggatgact

SEQ ID NO: 764040 - DNA, 637 bp, Homo sapiens
ctgctcctttcaaaaccatggatggattccaccatttactttgtagcctgaatttaacaatcaaaaaaccccaaaactctctgtcccaggctctgaatctcttatacagccagtttcctttcctctgtgtcacctagaagaatatcttaaccattcrcagagaaagcagcaatgaatggacataccaaggcaataataaaaatggacttgtaaccaacacaattttattcctggagaatcatcctcaccgtgtgtcacagctggataacttgtgcttaggaaggggttcttccctggaaaaaggaggaagatgcaaatcctatgagcaactgggatcccatctttgtgttggtcaccagtctttcactctcaggtttttacctgtgatgatcaaaagggaaaagctcctgcacttccccgtatacaccacatgagggcgacagagtcaaaccagaccaagcagcagcaggaaaagggcagtgatgaaggtgaaccctgcttgaggctggcagttctgtagtctcattcacattgctctgttctttccttatcttccaggacttgggcaacgtgtcctccacactgagtctgggctagaaatacctctctctaggttgggattttcccataaaataat

SEQ ID NO: 764041 - DNA, 604 bp, Homo sapiens
tacatcctcaccaacacttggtgtggtcaggttttgaaaacattttagccattctaggagatgtggagtggtatcttaccatggttttaatttgcatttccttaatgagtaatgaagtagagaatttttttcatgtccttatttgccatccatatagtatcttctttggtgaattgtctgttctgatcttttgcccattttaaaaattggattgtttattttcttaccattgagcttcaagagttgtttttatactctggatacatgccttttatctcctgtgtgatttggaaatattttgtcccttctgtgccttgtcttttcattctcttaacagtgtcttttgaagagcagaagtttttaattttgaagaagtccaatttatcaacttattgtgcttttggtgtcttatctgagaactctttgcataacsaaggttgcaaatatttccttctggagaattatagttttggattttacctttagatctatgattcatcactagttacgatttcgtatggagagaggtataaatgcaagttcatttttgcatattaatagacaattgttccagcaccatttgttgaaaaaagtattcttcatt

SEQ ID NO: 764042 - DNA, 353 bp, Homo sapiens
gctgtcaggttcctgcccattgcgtgctcaactctgggctgggttatgctgtggagtacccagcaggaggtgaaatacagctcctcgtggtttgtcagggaagagaaaattcttctgcctccagctataggacagccaggcaatgaattgtgcagggaccgatgacaagagttagggagctcctaagctctgggagagggtgagwattatgccaggaaggtgctctggccctctctgacttagccctgtccaagagcctggcatagctcaggggggcagtgatgtctgcagagaaaaggctctggctagagctttgcagtcgatgcagtaaatggacgcatcattggtgtccc

SEQ ID NO: 764043 - DNA, 581 bp, Homo sapiens
tagggcatctaccatcagtggagcttgtaggactggaagttgctccgggtgcgtcagtgggtgagtgtgaaggcctgggacgttactttgcactgctgtaagctttttctattcaggcacctgtaggctatgctaaatttatagaaataaatgttctttcttcaaaaataaattaacctgagcttactgcagctcttttccttagaaacttttaaattttaaaaacctttttgactcttgtaataacactcagcttaaaacacaaatatattgtacagctgtacaaaaatttctttctttctttctgtctgtctrtctgtcttttacttggcaggggtctcactatattgccgaggttggtctcaaactcctgggctcaggcgaccctcctgcctcagcctcccaaagtgccaggattacaggcatgagcctccacacccagccaaaagtaaatactttttctttttatccttattctgtaagcttttttccattttgtaagtttttaattttttaaaacttttttgttaaaaacaagccaaacacatacatcagcctaggcctgcacagggtcaggatcc

SEQ ID NO: 764044 - DNA, 634 bp, Homo sapiens
acttactggccaaatgactttgcgaaacatacttaaacctcttaaagcctctgtttcctcatctgtgaaatggggagacacccagcatatgggctataaaacgagaacctccccttccatggcatatttgagatctgggactcacatgttgctatgcaggcagaaagggtgtgtctgataaagcctgcctgccagttctgacctgcaagggtttatgacccctctcttcctcctgtttgagaatcactggccttcaggacctacttaagggtactcagtaagtagctgagaatacaatgatgtcatgtacacatgacataatactaagcacagagcagctccatcagagccctctccctttctccgtgtccgatacaagccataactttccttggtgctgtgaagccaaagcaggcagtatttacagagcayggagaggttaaatgtagagtgcgcagcagcaccacctctgaagccagaaggaatttgtcctggcctagaaagggagtgtgctgtgcaggaaggaatcaccttctgccttggatgaagctgccactagcccctttctcttcacggtctttgaggttacaggcaggtgcacacccttaccccaccctttacccatgtgggaaaa

SEQ ID NO: 764045 - DNA, 618 bp, Homo sapiens
cttgtgtatgcccctggggcataggtgcctgtggcaagtctgtgaaggctgcattctcccccagcttggaatgcccagtgcccctgctgcagcccacagcccttcagaaggtgattgcaaggaagccaagcctaacctcatcttccgttccttctgccatgtccacacctggcgtcacctgtgcagcctttcctgcatgagtcatggccaggcaagctcggtgacatgcactgggagcccggtgtggaagctgggaggcagtcatygtgtagtcacgctagtggtggccacgggccatggggctcctaaggaaattagaaggacctttggaactgccttcctccccaccctgctctgtatctccttcagagtttttctgataggggtagtgctgacttgttccttgggaaggcttggagatttggggtcttcgcctgcatcttatcaaaatccctgtgtctcactggaggagtaagaacctgacctgccatcaggaaatgccttagatgagtgctcagcaccggtggcaggactggggatgtttagttaagataagagaaagcccaggggggcattatctctgtcttcatatgggacaggaaatgtacttgttccttg

SEQ ID NO: 764046 - DNA, 618 bp, Homo sapiens
cttgtgtatgcccctggggcataggtgcctgtggcaagtctgtgaaggctgcattctcccccagcttggaatgcccagtgcccctgctgcagcccacagcccttcagaaggtgattgcaaggaagccaagcctaacctcatcttccgttccttctgccatgtccacacctggcgtcacctgtgcagcctttcctgcatgagtcatggccaggcaagctcggtgacatgcactgggagcccggtgtggaagctgggaggcagtcattgtgtagtcacgctagtggtggccacgggccatggggctcctaaggaaattagaaggacctttggaactgccttcctccccaccctgctctgtatctccttcagagtttttctgataggggtagtgctgacttgttccttgggaaggcttggagatttggggtcttcgcctgcatcttatcaaaatccctgtgtctcactggaggagtaagaacytgacctgccatcaggaaatgccttagatgagtgctcagcaccggtggcaggactggggatgtttagttaagataagagaaagcccaggggggcattatctctgtcttcatatgggacaggaaatgtacttgttccttg

SEQ ID NO: 764047 - DNA, 567 bp, Homo sapiens
tgcctgaatggtgaataaaacaggttcttcccacactctcccattcacaataaagccttggtttgtcccatctgtggccatgaaagtaaagcagtcagtctgggagtcccctcctgagtgccgataggccacattcttgctgtccacatcctgctgggtgaaattgtgttgaagtagccctgtcccccacaggtagagctggccatgctgggggagctgaaccaagaggaaggtgaggttctcygcaggtgtatcagggtcggtcagctgaaggaggtcaggggaaagcaggcccacggccccttgggccagtctcaaccccttgttcctggttaccacaggcagggctctgtccacagtctccagtgtgatctcaaacaccccgtgctcggtccgcagtccattgctgatgatgaatctggtaaagagaggcaaggcagccttcagcatggattcttgtgtcaccatctactggaatgaaatgataacaatacacacctttactaaagggtattgtcgtgttgtgactcaaatgaaaaatcaagggcagatcttgcagaaaaatcc

SEQ ID NO: 764048 - DNA, 358 bp, Homo sapiens
agctcacgcctatagcttggacactctgggaggctggggtgggtggagcgctcgagctcaggagtttgagaccagcctgggcaacatggcaaaagcccatcttaaaaaaagaaaaataattttaaaaaagaaaataaaggaacctasaaaaatatgtctgttcttcaaactttttacttagtcaccttcacagtttcaaaagtaaactgatatacatttttaggtataaaattatgctttatttctcaggcagagcctgagaacagagttatgcctttattctattgtttttctgttactttttcatattccccccagatcctatcatctgacccacaataaaataggaaggaggcta

SEQ ID NO: 764049 - DNA, 612 bp, Homo sapiens
tatttgtccatcaactatgtacgagatacagctctaggtgccatgaatacaaaaagggaacaagtcagacaagatcactgctcctatagagcttacattctattgggggagatatgtaatttgaaaatcaatcaattcatcaatcaatcaattcaaaaagaaaaatatcagatggctataagtggtatgcaaataattaaaatatgctagagattgattagattaagtggtctctgagacggtgwcattaaagctatgtgttttgaattatgtacatgatattctctattaattgttctataatggcatttttcaccacacataattcttgtttgtttttacaaagttttgagaggtttttttcccatctatattttatctccattctagaaattaagtattccttacagagagtagctaacctagctttgattttctcaatctgcgcaatttctttgacctgtcagtttaattcctaaataagacttttatttatcctctgaatttttacagataatttaatttattctatgcaagacactgtgctaagaaccttgggatattccaagataaataagacacatttcctgccacgctggagcttacaatgta

SEQ ID NO: 764050 - DNA, 612 bp, Homo sapiens
tatttgtccatcaactatgtacgagatacagctctaggtgccatgaatacaaaaagggaacaagtcagacaagatcactgctcctatagagcttacattctattgggggagatatgtaatttgaaaatcaatcaattcatcaatcaatcaattcaaaaagaaaaatatcagatggctataagtggtatgcaaataattaaaatatgctagagattgattagattaagtggtctctgagacggtgacattaaagctatgtgttttgaattatgtacatgatattctctattaattgttctataatggcatttttcaccacacataattcttgtttgtttttacaaagttttgagaggtttytttcccatctatattttatctccattctagaaattaagtattccttacagagagtagctaacctagctttgattttctcaatctgcgcaatttctttgacctgtcagtttaattcctaaataagacttttatttatcctctgaatttttacagataatttaatttattctatgcaagacactgtgctaagaaccttgggatattccaagataaataagacacatttcctgccacgctggagcttacaatgta

SEQ ID NO: 764051 - DNA, 596 bp, Homo sapiens
aattttcatttattacccaggaaacactctgcctatgtctaactaattcaagtatcattttcattagttttgatttgcagcttacctaaatggactttccatagggaatatcaattgtactgcaggaggtttttttttttttttttcttgccttttggtaactggtctaacaaattttacattttatcaaaataactcctatgccattgttattaagttttaatttgcttaraaaaaaactgaggttaaatttttcttttaaatcaaggttactatatccacgtaactttcttgcttttaaagtccttgtgcctttaagttacagggcgttgactcctggatataaaaagaacaccaagtcttgctaaatcttaaacaatgacagcagttaaagccttatcttcagacccagtagaagataccaatcaaaatacactgtgttcataaggcacaaggccagaaattaaaactattaaattcctcaaggcccagggactatcatggaagaggtgggtgtgtgagattgtaacggccaattttgagagataaaattagttcagtttctctataaattaactattaatattgaaggcaca

SEQ ID NO: 764052 - DNA, 529 bp, Homo sapiens
tttatcactcactgaatctcattgtcttattcaaaatttccacttcctacagttaacttcttttggcccatgacctgtcacatttcttttatggctagtatattgaatttcaactatcagcagtcatttattaaaaacaaaacacatccacagaaaaccaggcagacacagcttgattaataacaagtcggtgctttcctctcatacttctttcaggttagagaagttggaaaacygctaatgagtcttctgtaccttttaaagaaatgtcttagagtaatcttacaattaggagtttcctatgtcaggtagaaattaaatgctttgaaagcttccagtttcaaaaaaggtggtgagctagcacaggatattggcttcctcccaaagcccaatcttgaagtgagaggaagttgccagatcctgaaaatgaagagaaaagctgtagagattttcatggtgagggtgggagacatggtaagggtgagactgggggagggcaaaatgtcacagacactttgggtgtgatgag

SEQ ID NO: 764053 - DNA, 539 bp, Homo sapiens
gagattttcatggtgagggtgggagacatggtaagggtgagactgggggagggcaaaatgtcacagacactttgggtgtgatgagtaattttatgtcagcttgactggaccaaggatgccctgacatttgatcaaacattatcctgggtttgtctgtgaggttgtttctggataaggytggcatttgaattggtagactgagtaatgcagattgcctttcctaatatgggtgggcctcatctaatcagttgaaggcttggctagaactgaagactgagaaagaggaaaattcttctgccggactatttgagcaggaacatcggtctttttctacctttggatttgaactaaaacatcagctcttcctgggctttgagcctgccacctttcggactggaatttacgccatcagctctcctggttcttaggtgtttggactcagattggaatgacacttcggctctcctgggtcttcaagttgctgactactgaccttgagacttcttggccagcccccataatcctgtgagccaattagt

SEQ ID NO: 764054 - DNA, 539 bp, Homo sapiens
gagattttcatggtgagggtgggagacatggtaagggtgagactgggggagggcaaaatgtcacagacactttgggtgtgatgagtaattttatgtcagcttgactggaccaaggatgccctgacatttgatcaaacattatcctgggtttgtctgtgaggttgtttctggataaggctggcatttgaattggtagactgagtaatgcagattgcctttcctaatatgggtgggcctcatctaatcagttgaaggcttggctagaactgaagactgagaaagaggaaaattcttctgccggactatttgagcaggaacatcggtctttttctacctttggatttgaactaaaacatcagctcttcctgggctttgagcctgccacctttyggactggaatttacgccatcagctctcctggttcttaggtgtttggactcagattggaatgacacttcggctctcctgggtcttcaagttgctgactactgaccttgagacttcttggccagcccccataatcctgtgagccaattagt

SEQ ID NO: 764055 - DNA, 610 bp, Homo sapiens
aattattatgtgccacaaaggtaacaaactttcttgccaattgtgtctttgactatggtggccctaaaacattttgtcatccacagacaattgttctcttgctttggtactgtttagacagttgttttataatcagctataactggtgcccttgaatgcaggtttctaataactttggagattgtgacatcagaacagtggaaaaaggggcacagcttggttttatacattttagggagatacgaggcatcaatcaatatatgtaaaaagtgtattggttccatcyggaaagacggggacaactcgaagcaaggaagggggcttccaggtcacagggaggtgggagacaaagggttacatccttctgaatttctgataagcgtttccaaaggaggcaatcacatacgcatctatctcagtgagcagagggatgactttgaatagaatgggaagcaagtttgccctgaccagttcccagcttgacttttacctttagttcagtaatttgggggccccaagattttcctttcacacttcccccctattcttttttaaaatcttttagagaaagtattttagaagaaaatgagtctctgatttcaggtttcat

SEQ ID NO: 764056 - DNA, 610 bp, Homo sapiens
aattattatgtgccacaaaggtaacaaactttcttgccaattgtgtctttgactatggtggccctaaaacattttgtcatccacagacaattgttctcttgctttggtactgtttagacagttgttttataatcagctataactggtgcccttgaatgcaggtttctaataactttggagattgtgacatcagaacagtggaaaaaggggcacagcttggttttatacattttagggagatacgaggcatcaatcaatatatgtaaaaagtgtattggttccatccggaaagacggggacaactcgaagcaagraagggggcttccaggtcacagggaggtgggagacaaagggttacatccttctgaatttctgataagcgtttccaaaggaggcaatcacatacgcatctatctcagtgagcagagggatgactttgaatagaatgggaagcaagtttgccctgaccagttcccagcttgacttttacctttagttcagtaatttgggggccccaagattttcctttcacacttcccccctattcttttttaaaatcttttagagaaagtattttagaagaaaatgagtctctgatttcaggtttcat

SEQ ID NO: 764057 - DNA, 610 bp, Homo sapiens
aattattatgtgccacaaaggtaacaaactttcttgccaattgtgtctttgactatggtggccctaaaacattttgtcatccacagacaattgttctcttgctttggtactgtttagacagttgttttataatcagctataactggtgcccttgaatgcaggtttctaataactttggagattgtgacatcagaacagtggaaaaaggggcacagcttggttttatacattttagggagatacgaggcatcaatcaatatatgtaaaaagtgtattggttccatccggaaagacggggacaactcgaagcaaggaagggggcttccaggtcacagggaggtgggagacaaagggttacatccttctgaatttctgataagcgtttccaaaggaggcaatcasatacgcatctatctcagtgagcagagggatgactttgaatagaatgggaagcaagtttgccctgaccagttcccagcttgacttttacctttagttcagtaatttgggggccccaagattttcctttcacacttcccccctattcttttttaaaatcttttagagaaagtattttagaagaaaatgagtctctgatttcaggtttcat

SEQ ID NO: 764058 - DNA, 643 bp, Homo sapiens
ctttatcttcagtgtaagaactctaacccttcagatgaaataaaaatgtgctgtgcttggccgggcacggtggctcacgcctctaatcccagcactttgggaggccacggcgggcggatcacccgagatcgggagttcaagaccaacctgaccgacatggagmaaccccgtttctactaaaaatacaaaattagccaggtgtggtggtgcatgcctgtaatcccagctactagggaggctgaagcaggagaatcacttgaacctgggaggcagagaggcagaggttgcggtgagccgagattgtgccattacactccagcctgggcaacaagagcgaaaatctgtctcaaaaaaaaaaaaagaaagaaaaaaagtgctgtgcctgagatttctaactgtgcattttatggggcctgcatgattaccacagatatgtatttgaggagaaaaacacttaaatgtaaatgttaaatttctttttctactacatcatctacttttatcactttttgaactaaaaggtatttaatgtggaaggccccaataaaaaatgatctttaaaaaaataaattttttaacctaaggaaagataattttttaccatcctttttttttttttaggctgcaccaaaaactgaggctt

SEQ ID NO: 764059 - DNA, 598 bp, Homo sapiens
atatcagtgttactgacataaaattgagattgaaatgcttaaataataaaaccaccaagtagttgcggacagggaagaaagtcccaattatcgattgctgcataacaaaccattcaaattttaaatggcttaaacaatggccactttttaatatctcatgattttgtaggtcagaaatttgtattggtctaggtgattattctgtttcaygtggcatgaacataagtcactctgaggaactgagctaatgagtagaccagtctggagggtccaaggtggctttgcttgcatgtctgttgcttgtcagaggatagctggaaggctgagttcagctaggactgctgaccatagcctctatacatggcatctctaggatgatgatctcagggtagttggaggtatatgactggccagggcttctagaggaaatgttccaagagatctgggctgaaaattcaaggctctgaccttaggcacagaagatccagaatatctcttttgttatattgtattggccaaggaagtcattaaggccagccagattcaaggggaggggaattagactcattgcttcttaatgaaaagattagcaaaaaat

SEQ ID NO: 764060 - DNA, 678 bp, Homo sapiens
taaacaaatatttatgatcattttgcataaatgctaacatgctttatacacttttttatcttgctttttggttgatgaaatagtcaatttcccttttacctttctgtctattttttcttctatatttaaaatttgttttttcaaatttttttgttcatttttctattcctttcacaggtatggatacttttctgtttattatctttttgtattggttagaaattccagtataatattgaatagcaatgggaacattttcacttttcctgatttatagtggctgctttattaagtatgatgtttaccataccttaaaaataatatcctctattagattgaggaagtctattcttaggttgctgtgaatttttattgtgaataaaatgtgtaaaaagtgtaaaattttatcatgatattttaaatcaatagagatagttatgtgataattttctcatttcaaggcatccctcagakatattgtgggctctgttccagactcaataaagtgagtcatataaattttttggtttcccagtgcatatgcaagctatgtttatactataccatagtccattaattttacaatagaactatgtctaagtaaacaatgaacataccttaattaaaaatatttaattgctaaaaatgttaacaattgtctgaaccttcagtgagtcg

SEQ ID NO: 764061 - DNA, 530 bp, Homo sapiens
agagagtcagcctgttctttgaagctttgaagccgggcattgacttctcctctgtagctacgaaagtccttgatggcttctaatttcaacataaagctgtttcatctatattaaaaatctattgtttagtgcagctacattcattaatgatcttggctaggtcttctggataacttgctgaagcctytacattagtacttgctgcttcaccttgcacttttatgtaatacaaatggcttctttccttaaacctcatgcaccaacctctgctagcttccaagggatctgcctgcctttttttcctgcagcttccttacctctttcagccttcatagaattgaggagagttagggtcttgctctgaattaggcttttggcttaacagaatgttatggctgttgtgatcctctatccagaacactgaaactctttccatatcagctataagactactttgttttcttatcacttatatgttcactggagtagcacatttttttttgagatggagttttgctcttgttgcccag

SEQ ID NO: 764062 - DNA, 632 bp, Homo sapiens
caaccctgtggagggccacacatcacagtggtagaccaactttgtcttcagttatttagttcctgtgctctgcattcattttaaggtgaatgtctggtgaatgaactttaaattcatagttgcggatagacaaggtgtagctttatgtatacaggctgtcgctactacttgccttctttaagaggcgtgtttttacatcattcactggaatgccccagagtttttgctttgattatatgtcttattttgcaaactttgaaaamttgagaaataacatacattaaagggaaaaagtgtgcccaaggatttttttaacaaattaaatatacatgtaaccctcaccgaaatcaagatatggaaaatgatcagcactcataatttgtttcacctttcagtcagtcctaatcctcccctttaggaatcactattttgactttatctcggagataagtattactatttgaattttatgtaaatacagtctgagcatatatgctttgtgcctgacttctttgtcttgtctttgtgtctgtgagattcatttgtattgtatgtgtagtagtagttctttttcattttctgtttgaatattctagaatatacttgtccactcttctgttgattgcagcttt

SEQ ID NO: 764063 - DNA, 567 bp, Homo sapiens
ttgttaaaaaaacctcatagaaaaagatgagagcctagatgaaggtaatggcaagaaaaaaaagaaaagatacagactcattcattagaggcaatcaaaaggactcagtgaccagttggtaactgttagggccaggaggggtgaatgagtgagasaaacagaggtcaactctcccagtgattttaatctgggaaactagaactatcaggacatcatttagccaaaagaacagcagaaagataaatatatggttttagaggaaagagaaatatggttatattccttttggacatactgagtttgaaatgcctctagaaaacaggaaataattgaattttaatttcatgaaggtaggaagttttgtgttgctgttgtttcctttttctctcagggctatatccccagcaccagaagtaatggctgtgagataaattaaaaatcctagtggaatcaataacattcctgcaagctccaagatgaaatagtgtacatatagagaggagcatattatctaaaaaaataaaatttgccatgatcctttcttattcagctccatactaaaccaaa

SEQ ID NO: 764064 - DNA, 529 bp, Homo sapiens
gtagaagactgatttgatattgatagtccaggtcaatcacaccagccaacattgtaactcccttcttagcctgttgacttacaggtaggaggacccaaaagtgtccaagtggcaatcttccagtttaattgaatcattctcatgtctcctgctcctggtggcatcgttcttccctctggaactagcagacctagacctctaggccagcasaatgtaatgttgcgggaacaggaagcaaaaattttgctagtggatcactagggttgatggtgagtgctgccacttccacttccacccgttgatttctggacccgtgaatcctggctatgggagaaaacagtaccgtatattggatgccaattcagagcatacacggccttctggagaactttgccccagccctgcaaagtattgtcacctagttggtgttgtaattgtgatttcaaaaggccattccaccattctatcagtccagctgcttcaggatgatgggagtcttggtaagactggtgaattccatgagtatgag

SEQ ID NO: 764065 - DNA, 529 bp, Homo sapiens
gtagaagactgatttgatattgatagtccaggtcaatcacaccagccaacattgtaactcccttcttagcctgttgacttacaggtaggaggacccaaaagtgtccaagtggcaatcttccagtttaattgaatcattctcatgtctcctgctcctggtggcatcgttcttccctctggaactagcagacctagacctctaggccagcacaatgtaatgttgcgggaacaggaagcaaaaattttgctagtggatcactagggttgatggtgagtgstgccacttccacttccacccgttgatttctggacccgtgaatcctggctatgggagaaaacagtaccgtatattggatgccaattcagagcatacacggccttctggagaactttgccccagccctgcaaagtattgtcacctagttggtgttgtaattgtgatttcaaaaggccattccaccattctatcagtccagctgcttcaggatgatgggagtcttggtaagactggtgaattccatgagtatgag

SEQ ID NO: 764066 - DNA, 529 bp, Homo sapiens
gtagaagactgatttgatattgatagtccaggtcaatcacaccagccaacattgtaactcccttcttagcctgttgacttacaggtaggaggacccaaaagtgtccaagtggcaatcttccagtttaattgaatcattctcatgtctcctgctcctggtggcatcgttcttccctctggaactagcagacctagacctctaggccagcacaatgtaatgttgcgggaacaggaagcaaaaattttgctagtggatcactagggttgatggtgagtgctgccacttccacttccacccgttgatttctggacccgtgaatcctggctatgggagaaaacagtaccgtatattggatgccaattcagagcatacayggccttctggagaactttgccccagccctgcaaagtattgtcacctagttggtgttgtaattgtgatttcaaaaggccattccaccattctatcagtccagctgcttcaggatgatgggagtcttggtaagactggtgaattccatgagtatgag

SEQ ID NO: 764067 - DNA, 608 bp, Homo sapiens
cctctcttggccatcccagagcatcatgtgatgctgtggtataacaacagcagygacaacaacaagaaatcaatgttgtctcttgtatgtgtaggttatatggataccatgaaaggccagttcaaatccatcttcttgtacttcatgtgacaatggcagacagtcaggttcatgactcgccaaatgtcacgcccagggttgggttccagcacatgctgaggtctgagggagtgggtggatgagcacaaagaacacttggagggccacaggcaggtgaaggatgattttattcagcagcagctctcatcaacagctttctcacactgtctgccctgtctcggcttcttgagccagcgggtcccacatacagctgtgcggccagctctcccctgacttcagggttagcagcttaactctttctctctctgggcacaagtgagccgagctgtatcctggctcccctctgtccatctgcaaagatagacagctttggctctctctctttctctgggcaccagcactcctgcacagtgtcaacaggacaattataccttttacagacaatagtggcatagagccaagtgatgagccttcattattttatggct

SEQ ID NO: 764068 - DNA, 661 bp, Homo sapiens
cgactccagtccccatgatctgagtcaaggtcccagtggggatccatactggggatggcttgctgaccgttagggaatttgtccctttcttcggctgtcattctatcatttacttgactaagataccaggtatctccaaactctcgggctgcagctaaagccgcattcttttcattaaaggccagagtttgatctaacagtagcatgacatctctccaagcgaggtcaaaggtttgccctagaccctgtaggacatctatgtacctatcaggatcatctgaaaacttccccaggtctgccttggtctgttttaaatcagagagggagaaggggacaggtacgcgggttgggcyaaattcccctccccctacagcttgaaggggacataaccgatagcctgggggtttttgtagtcctttggagatttctttgcttatttccttctgggcaggggagattagaggaggattatcattaataggaaggggagctatagggaggctaggatatgcgggtaagctgagaggtcctcctgtaggatgtaaattacaagctttgcatagttgtgtattctccctcaatgaaaagaaagcttggacataaggtatttcactccatttgccttccctcttacaggaaaggtcaagctgcaggatagtat

SEQ ID NO: 764069 - DNA, 683 bp, Homo sapiens
tttttccaccctgagttcaggcagtcctgatcacaggatggatcctgtgctggtgcgattgccactgtgtactaggtgttttccccttggctcagctgaaacatgtttaagatatttaaaaggagttttactaagttctgtgccccctctattgtgggagtgtcagagcccatctgggcccgttgcagcatgtctggccctgtctgagagggcccgcaggggctgtgttaccaggcggctcccaggcgccttttgggaaaacaaaatgaccaggtgtgttagggccagcaggcttccagggccactactcaaaggcagccaggggactttggctgcccttaaactctctgtgcagtggggggcaagcaggcatccagaccgaatggaacgaggtgkggtactcaaggaatatggcatgtctcacccatattccctctcagctcagcctctgggggactggggccaagtctcagggaacagaggagtctgtattaaatggaaggagaacatcgttttgtttttgtttttgtttttgtttttgtttttgagatggagtcttgctctgttgcccaggctggagtgcaatggtgtgatctcggctcactgcatcctccacctcctgagttcaagcgattctcttgcctcggcctcgtgagtagctgggattacaggcgctcaccacc

SEQ ID NO: 764070 - DNA, 587 bp, Homo sapiens
ggtggtgggaataaagtccccccatccccatcctttcttgtgtgatggactaaccagtgttttcttagttttgttttcttcttgtctctcattttctctagactgcagagtcccagacccccaccccttcagccacatccttcttttstgggaagagccccgtcaccacactgcttgagtgtatgcacaaattggggaactcctgcgaattccgtctcctgtccaaagaaggccctgcccatgaacccaagtatgtcctacgtgtcctctgtccagctgaggttttctcagaaagaaaaagagacacattttcttccttgcctcctcagggatggcagattgaccaatttctcctgtttcaaaatggggaaaggagggctctgaggtcctggttgctgcttgtgaggcagacaattagggattaggaattcaaagggaattcctggcccaccctctatctcctctataagcactagggaggttcacggcttggaggtcactcactgttggtgggacagaaaggtacaggacctgagaagctctctgcctgtgggtctatagactcacatgttcaagagaagtgttcc

SEQ ID NO: 764071 - DNA, 597 bp, Homo sapiens
aatattattttggccataaaaagaagtgaagtgttgatacatgcttacaatatggatgcacttgaaaacttgatgccaaatgaaaaaagccagtcacaaaagatcacatattgtatgattccatttatatgaaatgtccagaatagacaaatccatagagacagaaagtagatgagtggttgccagggccaggagtgggagagttggagagatgaggagtgactgcgccartgggtagaaggtttctttttggagcgatgaaatgttctaaaattgactgtggtgacagttgcagaactctgtgaatatactaaaaatgactgaattgtatgctttaaatgggtgaactgtatggcatatgaactatatctcagtaaagcatttttttttgtttttttttaaacccgatagtggtttcccactgcactgcatatacaagcaaaacctgctgtgatcacccggcctcctctcatgccactttccccatccctcgcatatgctctgtccacactggctctctgtcaggcgcctgaacagccaatccgctggctgccttggggcctttgcttttgtcctgtgtgcctgaaacacttactc

SEQ ID NO: 764072 - DNA, 567 bp, Homo sapiens
taagaaataacaaaaagtccaagcatgtttaaaaaagaaacatgagaacttctaaaacagaaaaataaagtcactgaaaatagaaaaagaaaaaacagcttatacagcagatgagacacagtgtaagagagacctaaagaactgaaaactaaatctgaagaaaaatttctagaatgaaacaccagcagaagaaacaaaaaagtttaagaaattaagagacattatgacagaataagatgttctaacaaaaccaagactacagaagtggcaatatttgaagaatttatgaaagatgtaaatcctcagattcaggaaacataaatgaattccaaagaaagaaataaaaataaatcctcagatacacatagcacagagaatatacagaaccgaggacaaaaaacaaccagagaaaaaaggttaattattyacaaaggtacaagactgacagaaaacacaaccccctccaccttcccaagagctaaagtagaaccctggaaacagcagaatattttctacaagtgttgactgaacataactcagctcttagaaattcatagctggctaaga

SEQ ID NO: 764073 - DNA, 575 bp, Homo sapiens
taaaccagcagcaacatataaggcaggaatggggagaaaagaaaaatactacaaaaactccagaaacaactactgaataggaagcattttcttgtcatctcacaacaccaacgacattgctttgcacataagagaggcccaacaaactttaatttcttcyctgggaagaagacaggaattatgacgaggccaaagaatcctacaatagtgagaaaaccggactgtaatacatttcttctccacagtaaagattctattcatatttatgtaagaaactcagaaaagtcttactcttcacttatgttttgtataaagatgattaagaagatattgaaaatataatgtgatttataagatgatttataaaataatgaagcaagatagttccaacagaaagattgaaatatttctgcgaagctacaacaaaacacagcacctaaaggcatctttaaagtagaacttgtccctacaaatggaatccagagacacagcagagatttaaacagacacacagaagcaatacagcatgtgctttgggatcaggccatgatttgaatctcggcacagtgacttat

SEQ ID NO: 764074 - DNA, 658 bp, Homo sapiens
agctgggattacaggtgcgtgccaccacatctggctaattttttgtatctttagtagagacggggtttcaccatgttggccaggctcgaactcctgacctcgtgatccgcctgcctcggcctcccaaagtgctgggattacaggcrtgagtcactgcgcccagcccattttcagtcttcacagagaaaacacattttatccttgagtagtgtttctaactgggggccctattggcgttttggacgagagcattcttctttgcacaggactttacttccactgtggcccctgagtactaaatgccagctgcactccgcctccatttttaaaagcccctgggtggtcctgccatcctattgagaacccacggctctagttcaggctgcaggagtgtcactgccatcaacttcaggaccatgctttatcccttcatccagcaacatccaaactcctcttttggtggatcttcttccctgtagacatcctaatggttctcatgtataccaccatgacacactgggagaatttccagttccatgaaataaatgttgagaccctgccatccctgccatatgccctggttgggagtacagataggctagtgacaggacagatatgaaaaaattaattacaagatagtggggaaagtgtaactgag

SEQ ID NO: 764075 - DNA, 658 bp, Homo sapiens
agctgggattacaggtgcgtgccaccacatctggctaattttttgtatctttagtagagacggggtttcaccatgttggccaggctcgaactcctgacctcgtgatccgcctgcctcggcctcccaaagtgctgggattacaggcgtgagtcactgcgcccagcccattttcagtcttcacagagaaaacacattttatccttgagtagtgtttctaactgggggccctattggcgttttggacgagagcattcttctttgcacaggactttacttccactgtggcccctgagtactaaatgccagctgcactccgcctccatttttaaaagcccctgggtggtcctgccatcctattgagaacccacrgctctagttcaggctgcaggagtgtcactgccatcaacttcaggaccatgctttatcccttcatccagcaacatccaaactcctcttttggtggatcttcttccctgtagacatcctaatggttctcatgtataccaccatgacacactgggagaatttccagttccatgaaataaatgttgagaccctgccatccctgccatatgccctggttgggagtacagataggctagtgacaggacagatatgaaaaaattaattacaagatagtggggaaagtgtaactgag

SEQ ID NO: 764076 - DNA, 673 bp, Homo sapiens
aaaaatactgtatttcgtagcccttatctctggagacatttttgtattcctttgttccaatcattgccttggagaagttcactgtctcataagaggaatcacaaaacaagaatcatctcagaattgtagggatctctgtgcaaatttgtctaacatcttaccaaggcagatgtcttagtccgttttgtgctgtcatggtagaatacctgagactgggcaatttataaagaacagagatttgtgtcttacagttctggaggctgagaagtctgaggttgaggggyccacattctgtccagtgatgagtagcttgtctactcataggctgcccattccactttgatcaggctcatttactaaacattcactgaacagtttgtcttgacattgtgtgaggttactggagataccaaagggagcaagatggacgtggtctgactctcataaagcttacattagaatgttcttctatttttttttattgaaactttgtctatttaccttaggctcattcattctagttatgacctcagagtcataaagaatgcacagcactgtgcactgtgccaaaagccctattgccttcatttcttttactcctcaccagaatcctatgaggcagggaacatcactgtctcaatttcaccactgaagaaactaagacttaaaaggg

SEQ ID NO: 764077 - DNA, 575 bp, Homo sapiens
cttcatgattctctgggaccgttacattttgaaatatgcaaagaaagactttttttttaaggaaaggaaaaccttataatgacgattcatgagtgttagctttttggcgtgttctgaatgccaactgcctatatttgctgcatttttttcattgtttattttccttttctcatggtggacatacarttttactgtttcattgcataacatggtagcatctgtgacttgaatgagcagcactttgcaacttcaaaacagatgcagtgaactgtggctgtatatgcatgctcattgtgtgaaggctagcctaacagaacaggaggtatcaaactagctgctatgtgcaaacagcgtccattttttcatattagaggtggaacctcaagaatgactttattcttgtatctcatctcaaaatattaataatttttttcccaaaagatggtatataccaagttaaagacagggtattataaatttagagtgattggtggtatattacggaaatacggaacctttagggatagttccgtgtaagggctttgatgccagcatccttggatcagtactgaact

SEQ ID NO: 764078 - DNA, 654 bp, Homo sapiens
ctgtgattgtgtgtatgtgtgttgaaactgtaaagcttttatgactctaatattaatctcttaaatgaaattaaaaggcaaaagaacatgattgagcttaaatgatcatttcttcctgcagtgattcttggattgttttctcatgtatttgaaaaaaaaaaaatgaagaaaaataatggaaaatggaagtaattactccagctaaaaaaagcttggacttaagatttctttttatgataccaaatgagaaataaaccaggcaaatcagaaggaagttaaagaagyaaatataaattcaacaagtgtcctaattatcctggatattggaatatttgattttccttacaatcccgttctagaatgcctgccacctttcaacactttcaagagaatttcaacacttacagagtatttatattgttaacagtaattttgctaccaaaaccttcagaataactttaataataaaatgacactgaaataatagactatacaaactctatattttttcagttggtgttaaaataagtcacattttgataccagtacaagatgtcttttaaataaggatgtcatcagtctgatttatatagcattaatgttttatgaagaaaaagttcaaaatgaaagcattaattgctgtgattattagaa

SEQ ID NO: 764079 - DNA, 654 bp, Homo sapiens
ctgtgattgtgtgtatgtgtgttgaaactgtaaagcttttatgactctaatattaatctcttaaatgaaattaaaaggcaaaagaacatgattgagcttaaatgatcatttcttcctgcagtgattcttggattgttttctcatgtatttgaaaaaaaaaaaatgaagaaaaataatggaaaatggaagtaattactccagctaaaaaaagcttggacttaagatttctttttatgataccaaatgagaaataaaccaggcaaatcagaaggaagttaaagaagtaaatataaattcaacaagtgtcctaattatcctggatattggaatatttgattttccttacaatcccgttctagaatgcctgccrcctttcaacactttcaagagaatttcaacacttacagagtatttatattgttaacagtaattttgctaccaaaaccttcagaataactttaataataaaatgacactgaaataatagactatacaaactctatattttttcagttggtgttaaaataagtcacattttgataccagtacaagatgtcttttaaataaggatgtcatcagtctgatttatatagcattaatgttttatgaagaaaaagttcaaaatgaaagcattaattgctgtgattattagaa

SEQ ID NO: 764080 - DNA, 634 bp, Homo sapiens
taagccactgtgcctggccaacaattcaaaatttatatgctgtacatataaacagataaagtaaaaaagctcaaggaggtatcgtcaaactcctgggctcaagtgatcctccttgagtagcctcctgagtagctgggactacagttacatgatattgcactyggctaatttttaaactttttgtagagatgggatcttgttatgttgcccaggctgacctaatggcttcaagaaatcctcccaccttggcctcccaaagtgctgggattacaggtgtgagcaactgtgcccagccccacagtaatatattttaatattcttctgtaaattatataaaaggagaccaaaaaaacaaaacaaaacacacacagtaaaacttgaactccataaaaaacaagcttaatctaaacataagtgactttacgcctagcaaatgaagaatacacattctttttaagcattcatgggacactaatgaaaactgattatgtactaagctataaagcaaatctcaaagttaaaaaaaatttcagtatcataacttaattactttttatactgatttcaaaacctttaaaaatcttttgttttgaaaaacacttctaaataactcattggtcaaagaagaaaacaa

SEQ ID NO: 764081 - DNA, 605 bp, Homo sapiens
ctaaggccacaatattagaagttaggataataaatgttacactgttaacttttagcaaattttacttttgttgaaaaccttgtaagtttgggatttcaattatcctttgctattaataagaacttatttagtctaaattaacttaraattggtatagacggttccttccttggttctgtaagtgctttaaggcttggctgagtgcaaacagctcccaggtttgagcagaccaactattaggcaattttcccaactctgcttctacaagagtttccctatcaattactgaatacccattgtggtttttttccctcaatcacctgggaggaaccatctatcatcctgtcctgacgggagttcctcctaggtctggtagggcctttgtatggtaattaattaagatttagatacccggttaggaaacctgctgggttaagggaattatcagtggttaatgttaaatcatctttttctaacagaatagccccatactttaagatttttgagttagtaagctacctttttgctattttttttttttttgacttaggttagttctgaactggtgaggtgtgctcacaatgagatttcctctaaaagttatt

SEQ ID NO: 764082 - DNA, 383 bp, Homo sapiens
caaacccatatactctcctatcctcaatacctccctctactacccattattctgttctggatctcaaacatgctttctttactattcctttgcaccttcatcccagcctcaattcgctttcagttagactaaccctgacacccattaggctcagcaaattacctgggctrtactgccgcaaggcttcacagacagcccccattacttcagtcaagcccaaatttcatcctcatctgttacctatctcggcataattctcataaaaacacacgtgctctccctgctgattgtgtctgattcatctcccaaatctcaatcccttacaaaacaacaactcctttccttcctaggcatggttagtggggtcagaattcttacacaag

SEQ ID NO: 764083 - DNA, 383 bp, Homo sapiens
caaacccatatactctcctatcctcaatacctccctctactacccattattctgttctggatctcaaacatgctttctttactattcctttgcaccttcatcccagcctcaattcgctttcagttagactaaccctgacacccattaggctcagcaaattacctgggctgtactgcygcaaggcttcacagacagcccccattacttcagtcaagcccaaatttcatcctcatctgttacctatctcggcataattctcataaaaacacacgtgctctccctgctgattgtgtctgattcatctcccaaatctcaatcccttacaaaacaacaactcctttccttcctaggcatggttagtggggtcagaattcttacacaag

SEQ ID NO: 764084 - DNA, 623 bp, Homo sapiens
agaactgtccaaataagtgtctgacactgaggaaggttgtttgaggatggtgattgctgaaaagtttccataaaatgattctctagagggaactatgccaataccatatctgttaacatcttagacccacagggtcatattggarcctttgctagagtctgagatggtaaaacattaactcgaatagtaaacgtcaagaccgcaaaattaatctgttaatcagaattttgtcttttttgttgattcttacacttactccctgtggatcttggttttaaatgatcaattgacactcagagactagttagataagaaattaaatttccagaaaaagtcacttaagtatgtaaagtagaatttcctaattatgtggtctggaaattgctgatgtctacagaatctttctcaagtttgaagtaaaaatacttgtaactgatgttgggtggtaaggtgaaagatggttctagctcagtgagtttttcttatttttttttcacaaaggagttgaacattgaaataaagaggtgtgagactggaaaataatgcggagagatcatggattatttagattagtgcctttttagagaagaggaaagtgaagtaagtgacagcataaaggatcc

SEQ ID NO: 764085 - DNA, 678 bp, Homo sapiens
ttcactcttctgaaaccaaggtagtagagagattccagaaggtgagagtcatcccaaggtgtcaaatgtagcagaaagaaccagagagataaggcctgaggaatgcctgcaaggtttggcaaaatgaaagtcatgagttgctcttgcctgagcaaggtgaagggttagagttggggaggagaagccagaatgccaagtgttgagaaatgaggaagcagaggcagccagggaagaccattgtttgaggtccgcatgaaacacttggaagctarttggagggagcacttcaggaggaggttggcttgataattttgtttttaggacttggagaggccaacctgtttaaaggctgagaggaagcagcaaggcaaggaagcctgggaggtgggggaggaagattttagggccagaccccacccagaccgttttcttgtggtttgcccaacactaccacacaccccttaatctcatttaatcatttcaacaccacgaggtttgaaacaaacggtgaggtatgaaacaaaacggtgaggccagggattgggaagagaaagctgtggttccatctcggtccagcgtgctgtccacgccaagaggcgggcagaaatgctagcctcacacaatctaggggaccaggggtggctgtggcgccctcctgcccgcaggaggtgttatcag

SEQ ID NO: 764086 - DNA, 625 bp, Homo sapiens
ccctctctaatcatattgggaaaaaaccctttgcgattttgccaataccaggcctgtatctgctcctagcactgttctatctccctcctatgctcaagccaattcttggaggtgcagatcccctctcagccctggcatcttactctccccgtgcccaagcttccaaaattaccccattcactctcttctcttcccaaccccagcccatattttcctaagcagaaagaaatgagatctaatttattccacagtattgatagtggcacaatgatttcatttggggagagggagagatttctggtwgttcaggggacaggagtgctgcctgatgcccctttatggacccctgaaacttctcctttttcctccgtacccaacctcctggctgtgaccaggaggaaagccaggagaaagaaacagaatgctagtgcccagagcctccagcctgccctagccttggaacaaagacgtggtcgcctgcaggaagcagcacacattctccacaggcccgtcaacctgccctcagcctccgtcctggaaaacgcccgccgcgctccacctctcacaacagctggcccgcgtgtcacagccaattaggctttggagggagtgagagggaaagcag

SEQ ID NO: 764087 - DNA, 681 bp, Homo sapiens
actgtgcctggctaatttttgtatttgtagtagagacaggtttcaccttattggtcaggctggtctcaaacttatgacctcaggtgatccaccctccttggcctcccaaagtgttgggattataggtgttagccactgcgcctggcctatcctgcactttttaaagaggatgaaacatgtgtctttgtattttaactctggtctctccacagaattgctcagttaacatttcctctgggttattttattttattttatttttgagatggagtcttgctctgtcgcccaggctggagtgcggtggcaccatctcggctcactgcaactcccgcctcctgagttcaagcgattctcctgcctcaaactcccaagtgctgggattacagggacccaccaccacgcctggctaaatttttgtattttcagagagaggggrtttcaccatgttggccaggctggttttgaacacctgacctcaggtgatccacccgcgtcagcctcccaaagtgctaggattacaggtatgtaccactatgcccgccctcagggttattatacttgctttgcagagtaagttcttttgtaagaaagggtgtggaactgagtgctggtcatgggctccagaacaactattaagcctcagtgctgtgtaacagttccagaacagtacatgcgtggtga

SEQ ID NO: 764088 - DNA, 633 bp, Homo sapiens
gtttgctggctgtctttggcattcctttggcttgcagctgggtaactgaagttggagcctttgttgtcacatggtgttcttcaacagcttatttccaaataagttcatattctgaggtactggaggttaggacttaactgtctttaatggggaacaaaattcaatcaataacagtattaagggacagcaaataagacctgaacaaatactgtgttctttgttttaaagatttcatattataaaacttkcagttttctgaaaaatcgcatttaaatgtaatatagtgccaagtacagattctactggagttttatctgaatgtatgtgttggggtggggggtggtgtcattgtgaactggataaataatttggaactggataaataaaaaataaatgcctgactcaaaaacatggatggtagaaatgttctgtatcttgtctgggtgtgcattatatgagtagtatatacatttgtcaaaagtatcaaactgtacacatgctatttttcaatttttctgtatgtaaattacatattcattagaaagaaagacataactactagagaataacaagataatgataattataactaagaaggattcctggctaggattgagcatagagggctttgct

SEQ ID NO: 764089 - DNA, 624 bp, Homo sapiens
tttggaactggataaataaaaaataaatgcctgactcaaaaacatggatggtagaaatgttctgtatcttgtctgggtgtgcattatatgagtagtatatacatttgtcaaaagtatcaaactgtacacatgctatttttcaatttttctgtatgtaaattacatattcattagaaagaaagacataactactagagaataacaagataatgataattataactaagaaggattcctggctaggattgagcatagagggctttgctttgccatctacttcactgttcgtgtgctgatactgtactgttttaataaccaaatatttaaaaattgctgacaagtcagtgtagccaccataatatagaattggcatatgaatagacaaatcagaaaaatagacaaatgggtccagaaatgtatctgaatacattggaaytttatcacttgaataccataagcaggttatttcattaaaggtagtatttcttttgtatgggagaatttagtattggacgatttaaatgtatactggaagctaagtaatgttgtactccttatctgagaccatgttcagaaatcaaaattgaattcagtatttaaatggtaaaataaattgtagtggaa

SEQ ID NO: 764090 - DNA, 498 bp, Homo sapiens
ataaatgtggttcagcatttgaacctaccagatgccaaagccagtgtcctttgctgtacatcatactgtcttccattcgtgctcaactgatgtttttcaggagtttataaactgaaatatttaaaaccctaccaatgtgacatgtttttctttattgctgattgcttgctgaagcaagcaaattgttctattgtacataggcaaaagacgtatttttctaactacatttataaatatttataacagaatgccttcttgcaagttgtttycttaatgtaatttacaaattgcatattacaatgagtgaagccagaaatatttttcaatcaaactgtatttcctaatgtgaaaatgtttatcatcttgatccatttaaactatttgaataaaagaatatgcatgttaaagaattttcagttaaaagcctttctttgaaagattagtatcatatacatcatcaagtcccaatttctggctcacaagtggaatctgaggtaa

SEQ ID NO: 764091 - DNA, 590 bp, Homo sapiens
tccaacatatttctcccatttgtgtctgtctccatccactaccatgcacactccttgaggatggaggtttggtctgttttgctctctgctgagcctctggtaagttggtgctcaataggcgtttcttgaattattattgaatgcataagtacaggaatgtttaaatctcgaattaattaactaaacaaaaaatagacctctcttggccaattatgaccttctcatctttttatatactgggaaagaaacaatggatgtggagaaatccagagtctcctgggaatcttgaaggagcctaaggttcagccctcttcaagaagactaaatacttatatttctagagatgaacagagagatcttgtgcagggaaatcattcctgcatcattcctagtattcagggtgcttgagcttccaaatagcagagcaataacattgcagtctattttaaratgcatggtaacaccagcaaatagctatttatatttgtcatgctatgcatatacatacacatgaaataaagctaaatctcaaaatattttctgtagctttgattttcctatttactccaaactattaccaacacaaaaca

SEQ ID NO: 764092 - DNA, 636 bp, Homo sapiens
tttcaaagaaattgaagaggtttattttggagacttaccttctccatattccataaaatcttcatgtctctagttcagaaatttttcaccttgtctattcttaaataattataaaaatcatattacccagcaaataaactcactggttttaattaactaaagwaatattgacaataattttaaagggcttgtaagatttaatgtaaagctattaaggcatggttataatgtcacaatccattaccatgaaatagaaggaaacgctttattatataagccacaatctatttgttcatcatttataaagcaaaactgagtgagcacctcagggggcatgaaaataggaatttgggatggattcaattcatagaacctctcccacaattagatgtaccacaaggtacttcagacatttgtgtttctaaggaagcaagccaagatgagatgctgggagtaagacagcttgagggttttccgtatacttcaccacacttactaacatttttattcatgatgtgtcttcaaactttggatttctaaactctattactttactatatatctgataccaagctctcactcaggtaagtctgaagacaaccctaggtcaaaactctgcctacttcttttttgccc

SEQ ID NO: 764093 - DNA, 614 bp, Homo sapiens
ccaaaaggggaaagataaaaaaatgaaagtggagacagggtgctagccgtttacatcctctggaagttaccacagtagtcacctacctctttgtctgtatctctgtgatcagaaatagcaatcagagcacaaatctttgatatttgaaggatagtgctggccccccaaaaattgtctgcagtttactccaggaactggtgcacagctgcctgccctggggctgggtagctactactttgttaagagctgaaattgcccagaattaaccacaatttactgacctagttttcctgtagaacaagcttgtctaacccatggcctgtgggctgcatgcagcccaggatgactttgaatgaggcccaacacaaaattygtaaacgtttttaaaacaataagatttttttttttttttttttttttcttttttagctcatcagctatcatagtgttagtgtattttatgtgtggcccaagacagttcttcttccaatgtgactcagggaagccaaaacactggacacccctactgtagaagctgcaagagttgaatagactccagagttccaaaatagttacatcagatagattctgccaatgcaattgttgttgaggta

SEQ ID NO: 764094 - DNA, 614 bp, Homo sapiens
ccaaaaggggaaagataaaaaaatgaaagtggagacagggtgctagccgtttacatcctctggaagttaccacagtagtcacctacctctttgtctgtatctctgtgatcagaaatagcaatcagagcacaaatctttgatatttgaaggatagtgctggccccccaaaaattgtctgcagtttactccaggaactggtgcacagctgcctgccctggggctgggtagctactactttgttaagagctgaaattgcccagaattaaccacaatttactgacctagttttcctgtagaacaagcttgtctaacccatggcctgtgggctgcatgcagcccaggatgactttgaatgaggcccaacacaaaatttgtaaacgtttttaaaacawtaagatttttttttttttttttttttttcttttttagctcatcagctatcatagtgttagtgtattttatgtgtggcccaagacagttcttcttccaatgtgactcagggaagccaaaacactggacacccctactgtagaagctgcaagagttgaatagactccagagttccaaaatagttacatcagatagattctgccaatgcaattgttgttgaggta

SEQ ID NO: 764095 - DNA, 481 bp, Homo sapiens
cggtgaaaccccgcctctactaaaaatacaaaaaaattagccagtgtgatggcggccgcctgtagtcccagctactcgggaggctgaggcaggagaatggcatgaacccgggaggcggaacttgcagtgagccgagattgcgccactgcactccagcctgggcgactgagcaagactctgtctcaaaataaataaataaataaataagacctgcagggaaaaaaaaatccaaaccatacttgttggaagatatgcccttgtgtgtcaaycctaactcaagaaaagacatactgacttcccaaaacggcattccagataccacagtattaacaaaggcttgcagattgcccatcttaatccaggaaaatcacgggaaataaaatagatgatatgttctttgtaacaaatcctggagaatctgtctgcgatgtttcatttatggtcactgttctctaggataagataaatgtgacagagctag

SEQ ID NO: 764096 - DNA, 608 bp, Homo sapiens
atatcttctgtacttttatgcataccaccctttagtacatataaaaacttttttttaaacaagtttgagatcacattatgaatacttctttttcagcctttttgttttccattattatagcttagccatctttccacttaactaaaaaaattgacctcatctttctttagcagttatgagtacattattattacaatgtttttaagttgatttctcttcctttcttttcccaatcatgttgtaagtgtggcctaaattgcctattttcaggataattgtatattatttctgttaaatacatggaaataattaacgaagaagcatttagctgtattgagacaatatatgaaatactggccacagaacattatatggtgatattttctgttattcttttgaaagttttatttagtggtaacrtgtctataatatactttttccttccaaatttggaaaaatgtaaaccatttaatacgtttttaaaaatgcctaattgaaatctttagcagaatttttagtcttttaaatctttaaaaagtcagtggtttaacctatataaaatcaattcagtggctttaattctatttgtggttgaaaatttttggttg

SEQ ID NO: 764097 - DNA, 621 bp, Homo sapiens
tgaggaatataataggatccagagttcctacaatgaattatttacaatatctaggatacaatgcatgagtagcatgtagtcccagctactcaagaggctgagatgggcggatagcttgagcccaggagtttaaggctgcagtgaaccacgactgtgccactgcactccagctcaggtaaaagagcgagaccctgtcaaacaacaacaaaaaaaccraaacccaaaccaaaaaaccccccaaaatactagacataaaacagaaaaatgttacccatattttagaggaaagataataatcaataaagacagacgctgagatgactcagaataagcgtacacagattttaaagctgctgttataactatggtcaaagctgtagagaaaaatattctcaaacaatgaacacataggaaattttagagaaatagaaacagtaaaaaagaactaaatggaaactgaagcactaaaaagtataatatttaaaataaatctaaaataaaaaattcattggataggcttaacttcagatttgagatgacagaagagtcactaaacttgaatacagatgaacagaagttatctacattagaaaagagaaaaaacactgaaaaaaatgaaca

SEQ ID NO: 764098 - DNA, 632 bp, Homo sapiens
aaaaaaaagacgtaactatcatgaacagtttttactgtttaccctactgatttacttggatttaaagaactacatgcttcatagggttagagttctttgctttattttttcccatttaaaatacaaatagcctgggcaacatggcaaaaccctgtctctacaaaaaaaataaataaataaatgcaaaaattagctgggtgtagtggtgcgtgcctatagtcccaactatttgggaagctgaggtgggaagatcacctgaacccagaaggtcaaggctgcagtgagacatgattgcaccactgcactccagcctaggtgacatagtgagaccttgtctcaaatgacacacaaaccaaaaaaaaaaaaccccaaatatttacatatctcttacccaaaggaagcattttttwaattggttaatctctttctgagaatattaacaaattgcaaatggattttcgtcccctagtttatgaacagctatgtaactcatgaatttttctgtaaatgaccctactacttgagtatcattgcatttaatcattagctagtgtctttcttgattgaaaaggtaaaattttagagattctggagtaatctcatatgttggctggagattagtcaattcagaa

SEQ ID NO: 764099 - DNA, 654 bp, Homo sapiens
cacgtctctgtctactgatgaggatcctactcttttagtataaacaataccattgatttccaatcagtttcaataatatccaagagagtaatcaacctgacactagccctagtaaccaacaccttactggccctattactaataacaattgcattgctcccacagcgtaatacttatatagaaaaatccagcccctgtgaatgcagatttgacccaatagcctccgcctgcctcctcttttccataaaattcttcctagtagccatcacattcctccttttcgactcagagatcactctactactacccctgccatgagcccttcaaayaaccaacctgacactaataatcagcgcagcccttatacaattaccactttaatcctaggcttgacatgaatgagcccaaaaaggattagaccgggatgaattggtaaatagtttaagccaaaataaatgatttttactcattagattatgatagaccatgtttaccaaatgcccttattagcacacaccatatcactgctagggatattagtctatcgatcccacctagtatcatccctgttatgcctagaaggcataatactatcaatagttatcataaatactcttacagctttaagcatacatttcactctagcacccataa

SEQ ID NO: 764100 - DNA, 654 bp, Homo sapiens
cacgtctctgtctactgatgaggatcctactcttttagtataaacaataccattgatttccaatcagtttcaataatatccaagagagtaatcaacctgacactagccctagtaaccaacaccttactggccctattactaataacaattgcattgctcccacagcgtaatacttatatagaaaaatccagcccctgtgaatgcagatttgacccaatagcctccgcctgcctcctcttttccataaaattcttcctagtagccatcacattcctccttttcgactcagagatcactctactactacccctgccatgagcccttcaaataaccaacctgacactaataatcagcgcagcccttatacaattaccactttaatcctaggcttgacatgaatgagcccaaaaaggattagaccgggatgaattggtaaatagtttaagccaaaataaatgatttttactcattagattatgatagamcatgtttaccaaatgcccttattagcacacaccatatcactgctagggatattagtctatcgatcccacctagtatcatccctgttatgcctagaaggcataatactatcaatagttatcataaatactcttacagctttaagcatacatttcactctagcacccataa

SEQ ID NO: 764101 - DNA, 635 bp, Homo sapiens
agttgcctgtttcatgagattcctgtagttcttttcaatgatgtcataagcctacaaagctggcttttgggcaattgccgcgataaaacacaagtatttatgtacatctatcatgcatcaatagaaatatttgttttataaaaaagcaagtatctcttaaatcagtgtggaactggaaatggarttggtggcgtccagtctgattccagggtttgggaagttgggcagtgcccagcagacactgagttgacaggacataagtaatgattaagttgtttggccctaactacgtacttaattggaactgtgaggtatttattttggcctaagtaccatgaaaaaaattactgaaaccctaaggaccgtgtggcctgagaaagtttgggaccctctaaccttgaattctgctgctgccttttgtaccctggtttttctttcttttttttgttgttgtttcttgttttttgttttgagacagagtttcactcttgttacccaggctggagcgcaatggtgtgatctcggctcactgcaacctccaccctcccgggttcaagcgattcccctgtctcagcctcctgagtagtcgggattacaggtgccccccactatgccaggctaatttttgttatttt

SEQ ID NO: 764102 - DNA, 635 bp, Homo sapiens
agttgcctgtttcatgagattcctgtagttcttttcaatgatgtcataagcctacaaagctggcttttgggcaattgccgcgataaaacacaagtatttatgtacatctatcatgcatcaatagaaatatttgttttataaaaaagcaagtatctcttaaatcagtgtggaactggaaatggaattggtggcgtccagtctgattccagggtttgggaagttgggcagtgcccagcagacactgagttgacaggacataagtaatgattaagttgtttggccctaactacrtacttaattggaactgtgaggtatttattttggcctaagtaccatgaaaaaaattactgaaaccctaaggaccgtgtggcctgagaaagtttgggaccctctaaccttgaattctgctgctgccttttgtaccctggtttttctttcttttttttgttgttgtttcttgttttttgttttgagacagagtttcactcttgttacccaggctggagcgcaatggtgtgatctcggctcactgcaacctccaccctcccgggttcaagcgattcccctgtctcagcctcctgagtagtcgggattacaggtgccccccactatgccaggctaatttttgttatttt

SEQ ID NO: 764103 - DNA, 645 bp, Homo sapiens
aaccctgggaattgagtctgtactgaacttctgtggcagacaacatttcacatatgttgtttcaacttgccccatgtgattccactgggagaggatttttggaagcttatttcttgtttcctctggacttcaccccatgagccttttccctttgtgaattctgctttccattctttcactaaaataaatcatagctctgagtatgactatatgctgagtcccgtaagtcctcctagcaaatcactgaacctgagatggctttgggaagtccctccacaccaccctttctgtgtataggttagtgaakccctgaatttcattttaaatacttgcttcttctccctgtacatattctccatggaaaatcacatttaccaatatagtttcagctatcgcatttattctgttacctccaaacccaaacttcaaactaattacaaccacctacaggacatctccatctgaagtacgtaggcacttcaaactcaacaggttcaaaaataaactcacaggcaccataactgcttccccttagcatggccccaaaagtatttctctcatgttctctatttagggtagaaattaccatccacctggactctatggcattcaaggtccttcacaatctattaccagccttctatc

SEQ ID NO: 764104 - DNA, 645 bp, Homo sapiens
aaccctgggaattgagtctgtactgaacttctgtggcagacaacatttcacatatgttgtttcaacttgccccatgtgattccactgggagaggatttttggaagcttatttcttgtttcctctggacttcaccccatgagccttttccctttgtgaattctgctttccattctttcactaaaataaatcatagctctgagtatgactatatgctgagtcccgtaagtcctcctagcaaatcactgaacctgagatggctttgggaagtccctccacaccaccctttctgtgtataggttagtgaagccctgaatttcattttaaatacttgcttcttctccctgtacatattctccatggaaaatcacatttacyaatatagtttcagctatcgcatttattctgttacctccaaacccaaacttcaaactaattacaaccacctacaggacatctccatctgaagtacgtaggcacttcaaactcaacaggttcaaaaataaactcacaggcaccataactgcttccccttagcatggccccaaaagtatttctctcatgttctctatttagggtagaaattaccatccacctggactctatggcattcaaggtccttcacaatctattaccagccttctatc

SEQ ID NO: 764105 - DNA, 603 bp, Homo sapiens
tatgccattttatatatgggacttgagcatcctcggattttgatatccataacggtcctggaaccaatcccccatggataccaagggatgactgtacacagaaacagtgcctgtgaaactttggaaggaaatatgcctggcatttacccacacaagactgacaaatataggattgagaatgctgtgaacctattaaatcccattgtttccaaagggattagctgtcattaagagtggggtaactggggagcacacagaaactrggaaaaaagtttcggggcttaaaaactcatctaggcaagaactgtggctagaatttctcccacaaacaactgactgaaagcaaaagaatgagaagcatattaaatttttacattaatcatattgccagagacacaccaaacttctgctattgctgttgacaagcacagttgtggaggtgtttgatttttctgaagcagcattagcagaaacctcagtgtctagccacttgtcctgtgggccttgacagacgggacgtaggatatgcatggcactggtgcagatcatagtgggtatagtgtggttctagggtcagcggtgcacgcagctttctgatggtgg

SEQ ID NO: 764106 - DNA, 483 bp, Homo sapiens
caaactttaatagtccttgctgccaacacacagaagagaaataattcaagaaaagacaccaaatagctaaaaaaaaaaaaaaaaaaaaaaaggattcaagagttactttacctgaaaactagcgtttagagccaatgaacaaracgtttagtataataaaaccttgctaatcaactgctggggcaatgaaaacaggtctaaattttctgaagagtggtagggcaatatagaaattttaaatgaacataacactttgatccaacaaacacacctctaacctaaggagaaaactgtacacatgtgcaaatgattgtgttcaaagtaattcattacatttttgataagagaatgattacacaaaattataaagaaacacaacgtttatcagtactgagttggttaattaagataccttaataagaaggaatatcatgtatccccaaacaatgtacagccatatttattgatgtggaaagagatacc

SEQ ID NO: 764107 - DNA, 483 bp, Homo sapiens
caaactttaatagtccttgctgccaacacacagaagagaaataattcaagaaaagacaccaaatagctaaaaaaaaaaaaaaaaaaaaaaaggattcaagagttactttacctgaaaactagcgtttagagccaatgaacaaaacgtttagtataataraaccttgctaatcaactgctggggcaatgaaaacaggtctaaattttctgaagagtggtagggcaatatagaaattttaaatgaacataacactttgatccaacaaacacacctctaacctaaggagaaaactgtacacatgtgcaaatgattgtgttcaaagtaattcattacatttttgataagagaatgattacacaaaattataaagaaacacaacgtttatcagtactgagttggttaattaagataccttaataagaaggaatatcatgtatccccaaacaatgtacagccatatttattgatgtggaaagagatacc

SEQ ID NO: 764108 - DNA, 616 bp, Homo sapiens
tttttacattattttctgttctttatttttcttaccttgtctttttgattggcttcatcctttagagcttctttcttccttgaaataatattaaataagtgctttactccagatttaaaaccgggacaaaaatataatacctataaaaagtgagattgtcttaagtgtttactgaacaaacaatacacgtaaaatcattaaaacaacatcatgctttctatagagcacttttaacatgtattaccctaaaattctgagattaagttttgtgtcaaaatttgttctccacttcatcagtagtagcccagtgtcttccctcattagcacaaagcactgcacctgggcagatattgctaagactttaaggttacaaggacacacaacacagcgccaacggacacacaacacaaygccaacgttacttccaagggataagacatatatcacactgtagcaccaggaatcagagaaagaaattaaaggtttgaccttccacttaaggtctactcaattttgctatcccacctttatttagtctatcattttctcttaccccaaaggaagtttaataacatgtaacttattattttagcctattctggtttattaacaatca

SEQ ID NO: 764109 - DNA, 561 bp, Homo sapiens
agctttaatattctatgataaaatgatgtccagtgctttctctattgcaaaaatctggccagacgtggtggctcacactgtaatcccagcactttgggagggtgaggcaggtgggtcacacggtcaggagatcaagaccatcctagctaacatggtgaaaccccatctctactaaaaatacaaaaaattacccaggcatggtggcacgcacctgtagtcccagctgctcaggaggctgagacagaagaattgcttgamcccgggagacagaggttgcagtgagccgagatcacgccactgcactccagcctgggcgacagagctagactctgttgcaaaaaaaaaatgtgtgtgtgtgtgtgtgtgtgtgtgtgtgtgtgtacatatgtctgcgtgtgtgtgtgtgtgtgtgtgtgtgtatataaatctcggttctagttgtttgatgtcatgaattttcacatcctattatactcactagtaatagtttgtaattactgaacatacactatgtactaggctctgtgctaaaagcttaaatatattaattaatttgttttt

SEQ ID NO: 764110 - DNA, 639 bp, Homo sapiens
ccagagaactatccactgagaatattgaacaaagtttatgtgctttcctctaacagttaacgtttaatgaacacttatcattacaacaccctatgagataagtaatattactacctttatttaaagatgacaaaattgagacacaagtgcatatttttactgccccactacaatctgtagcaggagtcagcaaayttttttccgtaaagtcaaataataactatatttcgtattggaggacacataccatctctgtctcaactattcaactctgctgttataatgtgaaagcagatctagacaatatatatatatatgaacagacatggccatgttccaataaactttctttacaaagtaaagaaaagctgaattgcagatttggccctagaaccatagttcgcagacctctcattgacatttctgggaccgcagacaacttggtcagagtacagaaatgcatcttgtagataatattattcactttctgtccggcattttggtcttttaatttgcatcactgaggcaatttgctttagttttgcaatgtctccaatgaacataactgcaactcacaaggagccaataagactctgcctttaaaaagagtcaagaagagtggatcccaaacaaacccac

SEQ ID NO: 764111 - DNA, 617 bp, Homo sapiens
tcaggaggatacatgtgtcttctcagctatacacagaaatctgtgaactttccaaagctactacttgaatttgctttttgctcatgagtctatggcatggagttggtttgctttgctttgcggtgtagctctttctttaagagctgagaatggatgttctttttttgccaaaaccatcctcggaagtgcctgctccactttttttttttttcttcaattatttatttatttatttattttagatggcatcttgctctgtcgcccaggctggaatgcagtggcgtggtctcggctcactgcaacctccacctcctgggttcaagtgattctcctgcctcagcctcccaagtagctgggattacaggcgcacrctaccacactcagctaatttttgtatttttggtagagatgaggtttcaccatgttggccaggctggtctcgaactcctgacctcgtgatccacccacctcagcctcccatagtgctgggattacaggcatgagccaccacacccagcctcgacatttattataggttcgagggatacatgtttaagtttgtcacaaaggtatatcgtgtgatgctgaggtttggagcacaaatgaatccgtctccc

SEQ ID NO: 764112 - DNA, 622 bp, Homo sapiens
acagtgaggaatgagttttcaccagacaccaaatctgctggtgccttaatgttggattttgcagctcccagaactgtaagcaacaaatttataattatttataaattacccagtctaatatattttgttacagcagtccaagcaaactaagagagtgacttctggaatcctttcgaaacaaccaattatggggcaatagctacagagccttttcaaaaagtgagctgatctaaaaattctggaaatggctaagttgacattctgatacctaygaagtttaatacaatttatcagttgacaaccacaaaaactgctcaaaaatatagtccagagaatgaaggaatgcgttaaaataaacaacaagaatacatggttaactaccttttctgtactttatagcacaaaattctgaggtttcaatatttaagcagctttataataaatataaatatttacatatttaggtaaataaatatttacatacctattttcttattgttttcctgcatattttggaatgatatcttgagattcgtgctttatgccaaagcctcacttgattagggaatattgagtataaaccattgagaaagcaacagtctcttgagttttactaattggt

SEQ ID NO: 764113 - DNA, 624 bp, Homo sapiens
atttctcataaaaactctgaacaaattaggcataaaggggaacaacttctacttgataatagatatctacaaaaacgtagtttttgtagttaatatcatagcaaacagtgtgaaactggatgctttccccctaagagagagaacaagacaagggtgtctggtctcaccactcctattcaacattgtcatgaaagtactagcttatgcaattagaaaaggaaatcaatttatacaggctggggagaaagaattaaaactaccttagtatgcaaatrtcatgattacctatgtagaaaattccaaagaatcaacaaagaagttccgggaacaattaactaattatagtaatgttgtaggattcaaggttaatgtgcaaaagttgttttcctatataccagcaatgaacactcagaatttaaaattaaaaatataaaatcattcacattagcacaaaaattatcaaacacttagatataaggccgacaaaatatgtataagatctacatgagaaaagttgcaaaatgttaactacattaaatcaaagatgatttgaataaatgtaaagatatgatcatgaatagaaagactcaatattgttaaaacctgaattcttcccaaattaat

SEQ ID NO: 764114 - DNA, 611 bp, Homo sapiens
catacaatgggtttattgagttgtgactccattgtaaatcgaggagcatctttacatgtttttctcattgaacatattgcttagagaaaagaaacagatccaaattagtggctttatatttatcattatgactcagcattttcytaaagaaggtgattacccaacggaaatattaagaaaatggcggaaattgtttggttaaagtagttatcatttgcacataaacagctataggtacacatatggatatgcatcatataacatgcaggtattaatttggagaagattccaagacatatttcaatgagaaatgcacaccttgtttattttccagaatcacagcataatcagagaatagtaaaggtgtgactgcacattcactttaggaactgttccagatgacagtttttcatgttctttcaaatcattctatatatttttagcccagaggactgacaaaatgaaacagttgcttcacaaattaagttccctttcctccttttcactcaaaataaactgtattagaaattagaaaaagagaaacagaaaaattttaaaggcttttttctttcaaaaattatcatgatgtattttcccctttcctaaataat

SEQ ID NO: 764115 - DNA, 611 bp, Homo sapiens
catacaatgggtttattgagttgtgactccattgtaaatcgaggagcatctttacatgtttttctcattgaacatattgcttagagaaaagaaacagatccaaattagtggctttatatttatcattatgactcagcattttcctaaakaaggtgattacccaacggaaatattaagaaaatggcggaaattgtttggttaaagtagttatcatttgcacataaacagctataggtacacatatggatatgcatcatataacatgcaggtattaatttggagaagattccaagacatatttcaatgagaaatgcacaccttgtttattttccagaatcacagcataatcagagaatagtaaaggtgtgactgcacattcactttaggaactgttccagatgacagtttttcatgttctttcaaatcattctatatatttttagcccagaggactgacaaaatgaaacagttgcttcacaaattaagttccctttcctccttttcactcaaaataaactgtattagaaattagaaaaagagaaacagaaaaattttaaaggcttttttctttcaaaaattatcatgatgtattttcccctttcctaaataat

SEQ ID NO: 764116 - DNA, 611 bp, Homo sapiens
catacaatgggtttattgagttgtgactccattgtaaatcgaggagcatctttacatgtttttctcattgaacatattgcttagagaaaagaaacagatccaaattagtggctttatatttatcattatgactcagcattttcctaaagaaggtgattacccaayggaaatattaagaaaatggcggaaattgtttggttaaagtagttatcatttgcacataaacagctataggtacacatatggatatgcatcatataacatgcaggtattaatttggagaagattccaagacatatttcaatgagaaatgcacaccttgtttattttccagaatcacagcataatcagagaatagtaaaggtgtgactgcacattcactttaggaactgttccagatgacagtttttcatgttctttcaaatcattctatatatttttagcccagaggactgacaaaatgaaacagttgcttcacaaattaagttccctttcctccttttcactcaaaataaactgtattagaaattagaaaaagagaaacagaaaaattttaaaggcttttttctttcaaaaattatcatgatgtattttcccctttcctaaataat

SEQ ID NO: 764117 - DNA, 471 bp, Homo sapiens
tgctgtaatcagctaacaagaatggtagctaactgatgaagagttttgatttacttcctagtataattaggatagtcattaatagtctttgtttttatgtcatttcatggcaacattctccaattggtatgtgtcaggcctctgagcccaagctaagccatcatatcccgtgacctgcacgtatacatccagatggcctgaagcaactgaagaacgacaaaagtgaaaaatagycagttcctgtcttaactgatgacattccaccattgtgatttgctcgtgtcccacctcaactgatcaatttaccttgtgacactccttctcctggacaatgaatctcaggagcaccttgtgacccctgcccctgcccacaagagaacaaccccctttaactgtaataattttctactacctacccaaattctataaaactgccccacccctatctccctttgctgactcctttttcag

SEQ ID NO: 764118 - DNA, 579 bp, Homo sapiens
atcccaatcaaactctcagcaagctatcttactgatattaacaaaccatgtctaaaacttatatggcaaggaaagagacatgaaatagctacaatactgaaaaaagaacaaactgaaggactcatgctactgtattccaagacaaataaagctacagtcatcaaaactatgagggattggcagaggaatagaaaatggaagagagtagaaaaccagtaaaataaacccacacaaacaaaattaatatttaacaaaggcatttgaaatgaagagaggataatctttctgctttgttgaaatgttgataaaaaaagtaataatgctgagcattcacatattaaaataaaaataacagacaccaactatatgycttgtgcaagaattaactcaaaatggatcatagttctaaatgtaaaatttaaaaaactatacttagaataaaatggattttctcttggatttagagaaaagtttttaggtacacacaagcctttatccataaaaaattgatcttggacgttattaaagtttaaaatatttgctcttcaaaagacacttaaaagaattaacagacaaagc

SEQ ID NO: 764119 - DNA, 617 bp, Homo sapiens
ttaggggttttgtttgctttttggtgtctggagtttttgttttgttttttaaatttccctccacacataaaatgtggttacataatccaaaagtctaggtttgaatcttgattctattgctcacaaacgaactgcccttgacaaaatcacctaattcattgagccttaggtcctcatgtataaagtggtcataataataatacctaactgaaatgaataaggtatgcttatttaataatttaatgatgacaattaaatccgctacattttagaagtgcttctaaggatggtttctgacacataacatgttytacatatgtatttttaaatgaaaatataaatgtaaattgatacatttgttttatatgactaaaataggacacatttcttagatattattcttactgacatttcaaggcaaaaagtagtttagaatgtcttaaaaaaaagaatgtcttataattaatttggaatataaataagtataaagatttaaactgtaaaagtcccatcaattgaagtcaagtaatgttaccgctataattgggaatacaggcaaaagagaaaagaaagaagaaacgaagggaaagagattaacagagaaaagagggaaagat

SEQ ID NO: 764120 - DNA, 626 bp, Homo sapiens
atggaaaatatattcattatggatgatttttgaaagaatatatttgtagacaaagcaaaacaaggcatgatttcaggcactgacagtaatattgaaaataaagatatatttttctttcttttttttttttttttttttttgagacagagtctcactctgtctccaaggctggagtgcagtggtgccatcgcgactcactgcaacctctgtctcccgagttcaagtgattgtcttgcctcagccttctgagtagctgggactacaggtgtgcaccaccatacctggctaattttttgtatttttagtagagacagggttttgccatgttggytgggctggtcttgaactcctgacctcaggtgatccacctgcctcagcctcccaaagtgctgggattacagatatctttaaaaaatgtgacatattcagagaattatgttcatttcacgtattgtgacttataacttgaatatacttagtataaactaggcttataaatttataattatataatctataagttaacatgctatgttgagagatatcattacagatttctcatgaacttgcctattaggtaaaagggatttattttttctaagagattatagcagagtatttaattt

SEQ ID NO: 764121 - DNA, 538 bp, Homo sapiens
tacagaaaacggaagtgaggcacagaaacagccagattggttacagctggtgtctggcttattcaaacacagtttgaacaggtggaccctgtgtgtgattgaagtatggttgtcgtaatgggatgagacttggctacttgttacaagagtaggctatastctgtttacacatccagttaggttacagttcactatgtatggaaaaacctttaggccaaacttaaaacacataagacagcatctttaggctaaacttaattcaacatttctgtttcatttctggcataactattatatatagaatgtaaatagttctaatatattttaagtgtttctttatgtatgacatattatgagtgaactttagttaaaactgaaatgaacatggtaatgagaaaaatttacacacaagtgattttgaaaacagaatggattgcttacaaattacaggaaatgttataacacaaaccagaagaattcaatggaaggcaataagggattctgaaatgaaaattataaaagtatcaagaccaatgaa

SEQ ID NO: 764122 - DNA, 538 bp, Homo sapiens
tacagaaaacggaagtgaggcacagaaacagccagattggttacagctggtgtctggcttattcaaacacagtttgaacaggtggaccctgtgtgtgattgaagtatggttgtcgtaatgggatgagacttggctacttgttacaagagtaggctatagtctgtttacacatccagttaggttacagttcactatgtatggaaaaacctttaggccaaacttaaaacacataagacagcatctttaggctaaacttaattcaacatttctgtttcrtttctggcataactattatatatagaatgtaaatagttctaatatattttaagtgtttctttatgtatgacatattatgagtgaactttagttaaaactgaaatgaacatggtaatgagaaaaatttacacacaagtgattttgaaaacagaatggattgcttacaaattacaggaaatgttataacacaaaccagaagaattcaatggaaggcaataagggattctgaaatgaaaattataaaagtatcaagaccaatgaa

SEQ ID NO: 764123 - DNA, 499 bp, Homo sapiens
agagaattctgaagtttcacacaagaattctaaaagaaaatacctggttattatttcatagagaaccaactttcataatgtcttctcttatttatctttgtatccttgtttttgctacagttcctgggaaatagtaaatataagaaaactactgattgaactgcattgaccatttagctaatttctctaaatataaagtgtgttctttaaattaccttaatagttcttcccaggtgagtcattagtaacaataattctcatttgtagtttattaattgaatgtaaccgttggctatatatatcatcattctgatcaacttctttgaaccaatttgtgaatattttgtgataggtataatttyagtaagtctaaataagtatgaaaaggtttctaactcctttagttccctagggctgctatagtaatgtaccacaaatcgggtgagttagaacagtagaagtttactggttcagaattgtggagtttagaagtctaaaa

SEQ ID NO: 764124 - DNA, 492 bp, Homo sapiens
gtgtctgctgagaagtctgctcttagtgtaatggggtttcctttattggtgactagatgcttttctcttgctgatattagatttttcttcttcatattgactttacacactcagatgactacatgttgtataaagtcaattttgcaatgtattttccgggtgatcttggacctcttgtatctagatatctaaatctcttgctagactagggaaatttttgtcaattcttttcctaaataagctttctaaactttttttcttctttgggagtactgaagatttgtaagtgatatggtttggctgtgtccccacccaaatctcatcttgaattgtaatctccaygatcatcatgtatctagggagagatctggtaggaggtgattagatcatggggacaatttcccccatgctgttcttgtcatagtgagtgagttcccacaagatctgatggtttcataaggggcttttctcacttcgctcctcattcttctc

SEQ ID NO: 764125 - DNA, 603 bp, Homo sapiens
aatacccttcccgttgccagggatccatttccccagcttgctaaactcacaaattgcaactccttcttcaagactcaactcaaaggccaatttctcagataagttttccctaacaacctgtgaaaaattggctgtgcaccttcctctttctttccctggcatcctgtgcataccatgaatcaaggtgtattataaatagattccttttagactgtaagccacagatatatgatttattcaatgtstacatctaacaaaagtatttgcctttggtagcactttactaaacacagaaaagacgtaagaaaggaagaacattttttaaaaagagtaaggaaggaaagaactaatacaagtcatttatgaaaggttgccaacatagtctagaaaaactacctgcacgtggtcctgtttaaagaaacaactgggagcaagcagggtaagaaccacgcaggttctcggcatatttatcagcaaatgttcagctccagaaatagcctgaaattagggtaggatgacatggtcagtgggaatcagtcatctgtaaaattcttctgatcagaaaaaaacatttgtattccttgattgaattcaaaaaaagac

SEQ ID NO: 764126 - DNA, 598 bp, Homo sapiens
ttttattattttagcaaaatcttttttctattctagaaccttttcctcttcacctctctctctctggttgtaaacatagccgcctggtcgtacagagcctgtttcctctcctgcgcttttcggtttacccttcctacccacctctccttctgggatgctgctgacaaatctctgctattatttatcgtggccaagtcctacaagccacccatggaggaagactttaacagcctccagagagctgagatatgcttgtttatccacgagcagaggaggaaccccgtgcttttcccttcttctcagagggccatgttttgagcaatagcgcttcagctccaggaaatgcaggaaagaattgtccttcccgatccttacagaaagctctgggcctcgtgcggcatgaacacctctcctccctgtaccaaagcctkcggaaaggacttgccaccgcagctgccggcctggagggcagggaaggcggtggcagccaacaggaaggtcaggcgaatttcctggggctggagccccgaggacagcctggaaactaagcggcagggtggcaggcaggggccccgcactgatgcctacgtgaacccac

SEQ ID NO: 764127 - DNA, 632 bp, Homo sapiens
tagaaaatcccggaatgagaagaggagaggctaggaatgccttgtgtgtagatgagggaagtaaatgcgcgttgctaggaaacattcaaaagttgtaaaagtgagtgaaaggacttaaggtgattaaaaatatctaactagtaaaccttaaaaaacatagttatttataaagtagctggggccaggtgcggtggctcacgcctgtaatcccagcactttgggaggcagaggctggcagatcacaaggtcagacattggagaccagcctggccaatatggtgaaaccccatctctactaaaaatacaaaagttagctgggcatggtggcaggcacctatagtcccagctactctggaggctgaggcaggagaatcgcttgaacccrggaggcagaggttgtagagagccaagatctcgccactgcactccagcctgggtgacagagtgagactccgtctcaaaaataaataaataaataaataaataaagtagctggatatttgaaatacccaacaataaccacgttggagcaattacagcatgccgttctggctcgcaagtgtgctgattatgtcaataaccatattgagcctgttttatgaattcctattcccattagggactaatatttc

SEQ ID NO: 764128 - DNA, 632 bp, Homo sapiens
tagaaaatcccggaatgagaagaggagaggctaggaatgccttgtgtgtagatgagggaagtaaatgcgcgttgctaggaaacattcaaaagttgtaaaagtgagtgaaaggacttaaggtgattaaaaatatctaactagtaaaccttaaaaaacatagttatttataaagtagctggggccaggtgcggtggctcacgcctgtaatcccagcactttgggaggcagaggctggcagatcacaaggtcagacattggagaccagcctggccaatatggtgaaaccccatctctactaaaaatacaaaagttagctgggcatggtggcaggcacctatagtcccagctactctggaggctgaggcaggagaatcgcttgaacccgggaggcagaggttgtagagagccaagatctcgccactgcactccagcctgggtgacagagtgagactccrtctcaaaaataaataaataaataaataaataaagtagctggatatttgaaatacccaacaataaccacgttggagcaattacagcatgccgttctggctcgcaagtgtgctgattatgtcaataaccatattgagcctgttttatgaattcctattcccattagggactaatatttc

SEQ ID NO: 764129 - DNA, 610 bp, Homo sapiens
ccatctcttaggaagaactccattaactactcacaaatcatatttggcattttaccggttactcagggccagtgctttgtcacaggcaccaggctgcagagttgaggggacaagctcaggtcagaagacttgagaaaaatgtcatttatccgtggggagccttgcttttcctcctttgtaaaatgaaaacaatgaaagttacccacctatggggcttgtggtgagattgaaaagatataataggtatgaggaagctttgcaaacgcttgaaaagggttgagcagataatattcttactaaatgcattggcagtatctgttaagtcttcacttaygctattggtttgataaaaatactgactttgcaaatcaatttgcttctctgtgctttggggattttcagggagagcctggagttggtctaccgggactcaaaggtttgccaggtcttcccggcattcctggcacacccggggagaaggggagcattggggtaccaggcgttcctggagaacatggagcgatcggaccccctgggcttcaggggatcagaggtaacttcatgcagatcagtctggagggtttcgaggacaggatgtgcttatttttgc

SEQ ID NO: 764130 - DNA, 592 bp, Homo sapiens
aggctggtttctgaatcagtcccaacaagagcagcatcgcccaggatctcaggagtgatattggtgaagctattccttatatctgcaagctctttatattaatagatggaattggactagggtgaagggacataactttaagaccaaccagaagacacaatgttcatgtactctgactagattcacagaattatcaatgctatayattattaatagtcacgtgtacacaggatgagtgtgctttaggcaccagaggaccttacattttatacctgcttttaagcagatgatttgggggtactcatcaaactctatacctcagtttccctggcaggtctgtcccttcctcacacggacccgtttgtgccttccttcattccacacacacatcgggaacacctccttcctgccatgaccttgccaggtgctggccatgcggcagggactcacccccactctctgtcctcaggaaggtcaggtgagaaatattggaaaagaaacagacgaatccaagtcaggctggtaaatgtcacaatcaggggaatcgaagggctataggaacactgaatccagctttggggaactcagagga

SEQ ID NO: 764131 - DNA, 640 bp, Homo sapiens
aggatacaaagagttcccaagtgggtatggaaaatgacacccaacaggaaaatgggcacaaggctggaagtggcagatcacagagagaataaccaaatggccagtagatctatacaaaagtgcttgaactcattaggaatcagagaaaggcaaacattgtgagagtaaatactagatagcacattcttttgttggtkgttttgagtcggtgtttggaatattgcctccattcctcctactgcccttggtcttagaaacttggctttgtggttgtgaatgatttgaatcaagagctgccggcggtctgtgaacacatcaccctccccacctcccatgggctgtgggtgcacctcctttcccacctctcagcaccgtggaagtcagcggcccagtaacgagggtcaggcgtgagtctgcatgggccaaggcagccacggccggctgctctcctggctccaggacttcatcactgttgacgttaataagccagaaaaattaggattcgtcccctctttccaacagcctggacatctgagatgagtaaaaggaaaactactgcagaaaaattattatggagatttggggtaggttttctatctctcaaataaccctgttcttacctcctcttttaggatgattc

SEQ ID NO: 764132 - DNA, 618 bp, Homo sapiens
tatttcctttttttttttttttttttttttttgagacagactctctctgttacccaagctggagtgcaatggcgcaatctcagctcactgcaacctccgattcctgagttcaagcaattctcctgccacagcagcctcctgagtagcaggaattacaggcgtgtgccaccacgcacagctaatttttgtagtttcagtagagatggggtttcaccatgttggccaggctggtcttgaactcctgacctcaggtgatccacccacytcagcctcccaaagtgctgggattacaggcatgagccaccgcacccggcctaatttctattatatctaataaagcaacaataactatgtattgtttatctaggttcattgtgccttgatatttttagaccattgtgattgactcacacaatctttgagatgctctgagaaatgtcagagcagattaagaaagtaagtctagcagagttatggcctaactgaatttgatatcagaagtgcaagtaaatgtgatggtcagcaaagccacccaccagaaagatccacttgacagataccttaatattttccagaaatgtataataaaagcagaaagtacaagaaataggtgaccac

SEQ ID NO: 764133 - DNA, 611 bp, Homo sapiens
aggaacggggctatcttttctttgtggctcctggatacacttaatcctcctaaggcattggaagggaacttgtactttagtatctgtagttaccgacttattatttttaaattctactcagatgacagcatcatctggggacatccctaacttaggctcttttctagaaaactgcactatgtagaatatgccggacaaagagatctatcatttctgtgccctcatatggagatttaactgaaagggcagactggggagggcatgcacatgacaatcccatcttagaaaaaacatggatgggaaatcctacagccagaggtctattcttatttatgggtgtccctctccttgaaagatctgtactttatatctctattaggatgcactgaagatggaaagcaattctagatgccatagagccacaatagcaatctatagactctttagcctcagtagtagmataaaatagacaggccttagatgtccttaaatttgaagtaggaggtacctatgcacttttaaatgaaacatgctgcttccagattaacacctctagtaaagtagaggaaaatccacagatactcaaagatcaaatcaaaattattgacagg

SEQ ID NO: 764134 - DNA, 682 bp, Homo sapiens
aagacacattatttagaggtaagtcacactggatcctggaataacaaaagatgcaaatatgggggttcctatagtggcttcaacatgacttcttttctcagggctcataggactggagggtaaactgaggctttttttttcttttttgtttggcaggggatgtgttagaaatagagactcttcttcagcccagctggtcaggggaaagcaaagtttagaacccacacagtacctatgctgctacttttttttttttttttttttttttttttggaggcaragtctcgctgtgtcacccaaactggagtacagtggtgcgaactcggctcactgcaacctcctcctcctgagttcaagtaattccctgcctcagcctcccaagtagctgggattacagtgcccaccaccatgcctggctaatttttgtatttttagtagagacagggtttcaccatcttggccaggctggtcttgaactcctgacctcgtgatccacccgccttggcctcccaaagtgctaggactacaggcatgagccaccacgcccggcctatgctgctactttctatcatgctggtaaggccaagaacagaattaagacctcactgctctccctcaacatgcttagggttcttttgttgtccagctatgttccctccttccctccatttcctgtcccaaa

SEQ ID NO: 764135 - DNA, 592 bp, Homo sapiens
ccattttagaggaagaagacacattatttagaggtaagtcacactggatcctggaataacaaaagatgcaaatatgggggttcctatagtggcttcaacatgacttcttttctcagggctcataggactggagggtaaactgaggctttttttttcttttttgtttggcaggggatgtgttagaaatagagactcttcttcagcccagctggtcaggggaaagcaaagtttagaacccacacagtacctatgctgctacttttttttttttttttttttttttttttggaggcaaagtctcgctgtgtcacccaractggagtacagtggtgcgaactcggctcactgcaacctcctcctcctgagttcaagtaattccctgcctcagcctcccaagtagctgggattacagtgcccaccaccatgcctggctaatttttgtatttttagtagagacagggtttcaccatcttggccaggctggtcttgaactcctgacctcgtgatccacccgccttggcctcccaaagtgctaggactacaggcatgagccaccacgcccggcctatgctgctactttctatcatgctgg

SEQ ID NO: 764136 - DNA, 634 bp, Homo sapiens
atctccaacacaatagtattaagaggtagggcctttttaggaggtgacctactggggaggccctccctcatgaatgggattaaggcctttataagagagtcttcacactaggctcagcccctgttggcattccaccttccaccatgtgaggacaaagtgttcctcccctctgaaggatgcaatcagacaccatcttggaagcaaagggaccaggccctcaccaaacatcaaacctgcaagtaccttgatcttggacttcccagcctccagaactgttaagaaataaagttcgttctttttaagttacycagaatctgtggtactgttatagcagcacaaacagactaagaaagatatctagggaaatctcttagaacaaggtattatctgaaaaacaaagagaagaccacgtacctgttttttgaacttgaagttgaattcccacattggttcctgtctgttcccaacaatctttctgcaccagaaaagtaagcactataagaaagtaaaaataaaataaaccaagaaaaagaaaaagaaaaaaatcaaaatacactacaaccaaaataatcaccaaaaacctttctgtttgacagctctaaagccagccacggtcccaatgctgagattttac

SEQ ID NO: 764137 - DNA, 634 bp, Homo sapiens
atctccaacacaatagtattaagaggtagggcctttttaggaggtgacctactggggaggccctccctcatgaatgggattaaggcctttataagagagtcttcacactaggctcagcccctgttggcattccaccttccaccatgtgaggacaaagtgttcctcccctctgaaggatgcaatcagacaccatcttggaagcaaagggaccaggccctcaccaaacatcaaacctgcaagtaccttgatcttggacttcccagcctccagaactgttaagaaataaagttcgttctttttaagttactcagaatctgtggtactgttatagcarcacaaacagactaagaaagatatctagggaaatctcttagaacaaggtattatctgaaaaacaaagagaagaccacgtacctgttttttgaacttgaagttgaattcccacattggttcctgtctgttcccaacaatctttctgcaccagaaaagtaagcactataagaaagtaaaaataaaataaaccaagaaaaagaaaaagaaaaaaatcaaaatacactacaaccaaaataatcaccaaaaacctttctgtttgacagctctaaagccagccacggtcccaatgctgagattttac

SEQ ID NO: 764138 - DNA, 473 bp, Homo sapiens
ttttttattttaaaattgtgtattgctagcatatagggatacaattactttttaatattagccatatatccagtgaccttggtaaatgcacttctaagttttaatagtttacatatataagttcttttggactttttatattcacagtcatgttattctctaataatgacagatttttggttttacatttcttattyattttaattttgtattgccttattgtactggctatatctccagtgtagtgttgaattgaaatcatattagcagacatccttatcttgttcctgatttcaaaggggaaatctttatatattttactacttagcataatatttggtgttattttaaaaacattttaacaaaatcagattaatggagttcctttctacttctagttttgaaagtattttactataaataagcatcgaatgcattttctgcatctattgagatcattcattcttttcctt

SEQ ID NO: 764139 - DNA, 602 bp, Homo sapiens
  misc_feature 1, 2, 3, 4, 5, 6, 7, 8, 9, 10, 11, 12, 13, 14, 15, 16, 17,18: n = A,T,C or G
nnnnnnnnnnnnnnnnnntttgacattcaaatggagatatagaggtctggagatcagcaaaattacctagagctgcattgaccagcagccacacatggctattaaacacttgaaatctggttaatctgaattgagatgttctgtaggtgtaaaacacataccagatttcagagacttagtatgaaaaacacatatcattaacattttatttgattacatgttgaaatattttttatatactgtgttaaataaagcattaaaaataatttcacctctttctgccttttttaaaaataataaaggggctggaatattatcatgaaggtttgccatttttgatttattcttcagtcaaaaaggtttttttattttgttttgtttaaagagaaggggtttgctcttctacccaggctggagtgcagtggcacaatcacagctcactgcagccccraactcctgggttaaagtgatcctcccacttcagcctcctgagtagctgggattacaggcatgagccactgtatgtggctactagaaaatttaaaatcacatatattgcttgtattgtggtgctactgaatagcactgacctagttagtgat

SEQ ID NO: 764140 - DNA, 633 bp, Homo sapiens
tctgtcccatcggagtctgccttggtactcatcttatcggagtctgccttggtgcctccaagtacacagttaggctgatgtggcatgcacatccgaaaaaataactctagatgtgcatttcgacacatcagcaaatgcagatggtatgggctgcagatggtatgggccacagctggagagagccgtcttcactgcggtatagctgggctgcacccaacgtgagaatggacatcagggcagagagccgtaagcagctgggattgtggaaagcgcccgtgaacacatggtcttggacagggcctcaggtgggtccttagcagctgtggctaagtgggcagagggaccaccccaccaccaccctgcccaaagggcttatttagcaaagaggggagagaggccagcctgcccctgactgcatcccactggcctgagggatgtggcctctctgcccccatttccactcctgstcttgggacacaggagactggttagatgagagtagaaagtttatttttgaacacccaggtgtggggtggctgggcgagaccatctgatggctttgggagccaggccgcagggtttagcttggatctgttgagtaggagacccttaaacatggccaccctgagctaa

SEQ ID NO: 764141 - DNA, 633 bp, Homo sapiens
tctgtcccatcggagtctgccttggtactcatcttatcggagtctgccttggtgcctccaagtacacagttaggctgatgtggcatgcacatccgaaaaaataactctagatgtgcatttcgacacatcagcaaatgcagatggtatgggctgcagatggtatgggccacagctggagagagccgtcttcactgcggtatagctgggctgcacccaacgtgagaatggacatcagggcagagagccgtaagcagctgggattgtggaaagcgcccgtgaacacatggtcttggacagggcctcaggtgggtccttagcagctgtggctaagtgggcagagggaccaccccaccaccaccctgcccaaagggcttatttagcaaagaggggagagaggccagcctgcccctgactgcatcccactggcctgagggatgtggcctctctgcccccatttccactcctgctyttgggacacaggagactggttagatgagagtagaaagtttatttttgaacacccaggtgtggggtggctgggcgagaccatctgatggctttgggagccaggccgcagggtttagcttggatctgttgagtaggagacccttaaacatggccaccctgagctaa

SEQ ID NO: 764142 - DNA, 588 bp, Homo sapiens
ctatgtggtccctaaggattaataaagcgagtggctgctttgagatttatttattactagcggtgagatgtaatttcaatcctgcagtaaaagaaactgacatgctcaggttaattcactgatttaaagcactgagcaaaacatagtttttctattttacttccccccaaactcacacttttttcaagtataattattaaggtttctggaatgtttaaggaaaagtccawatttgtgttgattaaccattaagcctatcagtggtaaagagatctaattataactgatacaaggaaaagcggctgaaggcagaccttacggatccagtcctggtccaggttttcagcaggcagtctatagtggctatgccaaaacattgctcaataataattaacttacagctactttaatagaggttccgattttaccaggagcatgggtgtcagtggatacagacttactaaagggcagacgcgcctttgcattcctgtggaacaccaatgtgctgagacaactgtgctaatcaaggcttgggagctttgtgatgtggataagtattgaaaaaaagatgacttcatctcgggagaa

SEQ ID NO: 764143 - DNA, 598 bp, Homo sapiens
aagggtgttccctctctggagtccagttgtttcagaggaggaagggcatcatgagggaccaggggccaagttatcattttatttttcagtaggattggaatttcggtaacacagaaccctgttatgtttggaggaaacaagttccttaaagctcactgcctttcctccgttcccagctccgctctgcattggataaaacagaagagctcgaggtgagcaacggccacttagtgaagcgtctggaaaaaatgaaagcaaatcggagtgcactcttgtcccagcagtaaattccagctctgatcaggcaactggttggtgactggagagcattgtttcataggcttttctctgtcctrtctgggagcgctgcttcttcccctgccttccgagagacgaagaccgtggcgagcttggcgcttaggggctcccgtgccatggctcaccccagggagccccagcagccaccaggtgcctctgtctgcagacccctggcccgggctggcgccgacgctcagaacctgcaggtacttcataagcacacaggggcctcgagggagctctgtgtctgaccgcacagcagcctctgaatgccgctgga

SEQ ID NO: 764144 - DNA, 579 bp, Homo sapiens
aatcataccctttttgccctatcatatttctccatgactctactcttcataaaatctagcataaaaacatacatgtttagccatttgatatgattaggctttttgtcctcacccaaaactcatcttgaattgtaatctccaggtgttgagggagagacctggtgggaggtgattggatcacggcgtggaggagggaggggcaattcccccattatgttttcatgatagtgagagttctcacgagatctgatggttttatcagtgtttggtagttmctctcttgcttggttcttctctctcctgctgcactgtgaagaggtgccttccaccatgattgtaagtttcctgagccctccccagccatgctgaactgtgagtcaattaaacctcttttctttataaattacccagtcttgggcagttctttatagcagtgtgagaatgtgctagcacaccatttatctgggtcttcattttcttataaaggttcccatgtcaaataaaatttatactatttaataaataagtttgtatgcttttctcttgttaatgtcttctattataggggcctgagccatg

SEQ ID NO: 764145 - DNA, 579 bp, Homo sapiens
aatcataccctttttgccctatcatatttctccatgactctactcttcataaaatctagcataaaaacatacatgtttagccatttgatatgattaggctttttgtcctcacccaaaactcatcttgaattgtaatctccaggtgttgagggagagacctggtgggaggtgattggatcacggcgtggaggagggaggggcaattcccccattatgttttcatgatagtgagagttctcacgagatctgatggttttatcagtgtttggtagttcctctcttgctyggttcttctctctcctgctgcactgtgaagaggtgccttccaccatgattgtaagtttcctgagccctccccagccatgctgaactgtgagtcaattaaacctcttttctttataaattacccagtcttgggcagttctttatagcagtgtgagaatgtgctagcacaccatttatctgggtcttcattttcttataaaggttcccatgtcaaataaaatttatactatttaataaataagtttgtatgcttttctcttgttaatgtcttctattataggggcctgagccatg

SEQ ID NO: 764146 - DNA, 384 bp, Homo sapiens
acctagtgagaaagtgctttttcctcccctactatgccaaggtgccatattttggagtagtgtgtacgggaccctgttgctattgcattagtcaagtctcagcaggaaatagatgacacattcaaatcaggcacatgtcaacttatttcaaaaatgtttyttttggtgccccagccttgctgatgctttaagaatatattgagaattagtcttggtaatctagtgcttcaagtgagggccagtttgcagtacagaaggacaggtcttgaacttccaaaacaagagcatctgccctctattattaaaacactgtagatgtactcaagggcagatggccattgacaacaagcgtaggagcccaggatgggaatatttaaaaccaaa

SEQ ID NO: 764147 - DNA, 553 bp, Homo sapiens
atgtggccacctcctttgatgggacattacccacatccctggcacccaagatctgcttctcctggtcaggatgcaggtgacaagaatcactagtcagagggtgcttgacccaactgtagggttagacattttcaaggcctgcctctatagagagcattttagaccagatggatgaatttggaatttcacatacataatagttgatatgaacctctacctagtaagtttcattgaaataaatattccaagtaattatctttaagaacattcagataaatacataattatgacagagcaataaatgcttctacttcatcaagcrttcagattgaatacaataaatcattttcaacaattatttcaaaactcatcgcctcaggagtgagtctataagaggctgataagaggcatgtggaaaaatactgatttgagttgatattatagctaagctttctgcaattaattccctatactaaattcttggtaattaaatgtatttttatgaaatgacctatttcattttccctatagttcagttgttttagtaaatgat

SEQ ID NO: 764148 - DNA, 619 bp, Homo sapiens
attttttttttaaccattctaatgtagaaatataagcttgctattttcttctcctcttccatgattcaaagagaattatattcaggcatatgtggactgactccctggctcacctcagaaatttcttaagtaatttttggattaagtattcttggttattggggttttaaaaaatcataaagcaattgttaagtctgagcatttaggtttttttctacgattattttgtattattagaaatatagaaatagaaatagcaggaagcagcagttcagacaatacaaaatctatctcatacctccaaatcagtctcaggaagaagtaagtctataacagatacatctctttagtttctgatggcacatccttgagaaaagaaggccctttaaagcaatcttcatctgtcttaaaaaaaaaaactattagaagaagagggaagaaccttaaaatgtaraacccacctcatggaaaattagggctgctctggtttgtcttccatctgtctaggataatatcttaaaccctgcactattcctgtaactctccctagaatggcaaaggtcatagtctgggtaagtaagcatcctttacacatcacatctttgttagggatgtcagt

SEQ ID NO: 764149 - DNA, 561 bp, Homo sapiens
agcatcaagctatcagggatccaccccataagtcaaacacctcccaccatacctcaccttcagcattggggattaaaattcaacatgagactcgggcaggaacaaataaccaagttgtatttagatatttatccacccctgccccctcccaaatatcatgtccttctcacattgtaaaatataatcatgccttcccaacwgtcccctaaagtcttaactcatttcagaattaactcaaaagtccaaagtctcatctgagataaggcaagtcccttccacctatgtgtctgtaaaatcagaaacaagttatttacttctaagatacaatgaaagtatcagaactgggtaaacactacaattccaaaagggagaaatcagccaaatgaaaggggctacaatccccatgcaaattcaaaacccagcaaggaagtcattaaatcttaaagctccaaaataatctcctttgactccagggtacaatgctgtaagggttggacttccaaggtctgggaaaactccactgctgtagctttaccgggtttatccccagaggttgctctc

SEQ ID NO: 764150 - DNA, 632 bp, Homo sapiens
atccctgaggtgtgagggctgggttcttttcaataaacattcctgcacttggccttctactccagccccctgtccctgccctcccagcgcctggagctttccaccttggctctggctcctctgagcctggactcagccttccaattccaggttgaccttggctgagcgccccatatgctcattcttcttgtaaaagcagaaaatctcaggcacagatttctgcacttggcctctctgcagaactttttagtactcaaggcacacgcagcccccagctgacactgagtgaaagcaagagcacttgcttcgcagaagtctgtgtttactgaatctgatttggcctttggcaaccctgctgctgagtccacactgagaaaagctagagctgggccaggtcctcaggtctacccygggcttgtttagtacctgcgggcatggaggattctctctgaccttctcagtacatacctcacctcccaccttggtggacaaaaccgggtattctccaccatcattgtgctcttaggcattctgtctaggatggttgtgaagattcaatgagatcactgtttatttcagtggctattaaaaacttattaattgatcattaattgatttagccaaatcagata

SEQ ID NO: 764151 - DNA, 621 bp, Homo sapiens
tggtgctttaggaaaatgccttaggctcagtagctccccaacgttactgtgcattgaagtcacctgaggatcttttaaaattactgatgcctgatccccacccccccaaacattgattttattggtctggggtaccatctgagcatctgaattaattagaatcaacccccccaccccgcttcaggtgattctaatgtgcagaatggcctgcaggaggctaggagggaagccaggagatttgataggtggtacagtaagaatccaggtgcaagaacaggcctgattttgggagacagagggggctgtgcagaggagcagagacaggatatctcagcaagaagataaaagcgctgggcttgatgactgttttgaaatggaaccatggccactgaatgccccgtccaagcctgaggcttttggaggatgggcagggatgctaccacaagtgttaggagktcggctctgggtgcttttcttcaatctggcctctctcctggcttctgaccctctgcctcccctgcttctcatcaccaccttctgctcagcaccttacttgtcctgcctcactctggtctcattcatccctctccatcttaatctttttgtcacttcctttttcac

SEQ ID NO: 764152 - DNA, 580 bp, Homo sapiens
gtgtaaaagcacaaagagagctgttaaggacccacttgaagctcatgtggccagcatccaaaaggtgcttagtttctgttcttaatccctgaacgtgtgtatctgacggtaacactgtggttacagcagtatctacatttgagatgtgataactgccattagtcctgattcctcctttcagtttgtgtgtttagaacacccctttctctaagaatgcaaagtaagaaagtaagatgtaaaaaaaaaaacaaaagaaaaccttaaagtgaaattactcaaaacacacacacacacacacacacacacacacacacacacacacacacacacacacwctatatcaaataccaacatgcatttgggttaagggaaggagactaagtcaaatttagtcaaatcttcctgtttggagctaggcttggtcctgtagtcccagctacttgggaggtttacacaggagaatcacttgaacccaggagtttgaggctgtactgcactatgatcgcacctgtgaacagccactgcactccagcctgggcaacacagcaagagtctgtctctttaaaacaaacaaacaaca

SEQ ID NO: 764153 - DNA, 600 bp, Homo sapiens
ttctgataattttacagttagttttgcattgcaacagagattctctctctctctctctttttttttttttttttttgagacaagagtctcgctctgtcacccaggctggagtgcaatggtgcgatcccagctcactgcaacctccgcttcctgagttcaagcgattctcctgcctcagcccccgagtagctgggattacaggggtgtgccacyatgcccagctaatttttgtatttatagtagagatggggtttcaccatgttgtccaggttggtctcgaactcctgaccttgtgatctgcctgcctcagcctcccaaagtgctgggattacaggcatgcaccaccgtgcccagcccagagattctctttaagaaatttggtgcaacagtcatttctgggacaaaaagtagtgagaaaatacaaacacaccagggtaaataaaccagagcgccacaaaatgtaatattaagtgtgtaaaaataataatccctgagagctatcagtgtgaaaagtttttatttgaatgccgtaattgaatggaattgttcatttaaaccttcaagtgaatttatttttatgtctaaaacttattagaaatg

SEQ ID NO: 764154 - DNA, 600 bp, Homo sapiens
ttctgataattttacagttagttttgcattgcaacagagattctctctctctctctctttttttttttttttttttgagacaagagtctcgctctgtcacccaggctggagtgcaatggtgcgatcccagctcactgcaacctccgcttcctgagttcaagcgattctcctgcctcagcccccgagtagctgggattacaggggtgtgccaccatgcccagctaatttttgtatttatagtagagatggggtttcaccatgttgtccaggttggtctcgaactcctgaccttgtgatctgcctgcctcagcctcccaaagtgctgggattacaggcatgcaccaccgtgcccagcccagagattctctttaagaaatttggtgcaacagtcatttctgggacaaaaagtagtgagaaaatacaaacacaccagggtaaataaaccagagcrccacaaaatgtaatattaagtgtgtaaaaataataatccctgagagctatcagtgtgaaaagtttttatttgaatgccgtaattgaatggaattgttcatttaaaccttcaagtgaatttatttttatgtctaaaacttattagaaatg

SEQ ID NO: 764155 - DNA, 626 bp, Homo sapiens
cataacatggtttaataatgaaaccatatttcaaaataccaatacagtgtggttattactacttaatagaaaggttctctccctactagtgcccaataagaaactaatgaatattttgtttgtgaagaatggcagcaaacacccctttattggtattgctctggtttaaagacattattgatattcgtcaaactgcattgcatttactggttccattttaccaattgctaggatgcttctgagtttctgaggttttgacccatctggaagtctctgagccaccttgtctgggaaggaaaggccttctgctttagtggaagggccttgccaagagggtagaggcttaggtagagcccaagctgttttgtcatctggckatgtttgcaatcttgagcaagcacttgtctgaatctcagtgtagtcaacagaaagttgagagtaatagcatcagccttgcctcccaccagcctgttctaaggcttcagtggtgttattccttcaattagaactcactgcagacctcaactgaaactcgggccccttggtgctgtgttgtcctgcttagaggatgatttactaggttcaagttgagatgagggtgtcggcagacattaaaaccaaagtag

SEQ ID NO: 764156 - DNA, 634 bp, Homo sapiens
ttcctggcctcggtgtactcggcttcccactgtgccagggacttgactggaagggcgggcctgctagcggacttggggctgctgaccacaccgttgctggtgggcctcttgaggatgcggacctgtggagggggtcccgggggaaaattatcatcctgaatcacaatgggcactttgggagatttgaatttcctgctttctgtgtgatcttcagttttttttccagacgtctatttcyccgctgtctgccgtctcctcccagctctcagcaacctcctcatattccatcttactcgccactttccagatcgcttgctttcttatttccacattttctctgacttttgcagtattcaatattattacctgattctgatttttcagacatcactatatggtccttggctttttggtcgttcctctcattcctttgctgtttcaagctctgttcccagcctaagctttttaccaccgaattctgttctgtgacccataacttaaaactaacccaacttttcattccctccagactttttttggtaagcagtatcatcatgctttaggtggacactgagtcatactgctgtggtagtgctggtacacgtagttttgaataccaggttcttgagtgaat

SEQ ID NO: 764157 - DNA, 575 bp, Homo sapiens
atgtgttttcatttctcttgggtatacacataggagtggaactgctgggtcacatggtaattctgtgtttaacttctagagaaaccaccaaactgttttccaaagcagctgcactgttttgcattcctaccggcagtgcataagtgttccagtttctctacgtctttgccaaagcttattttttattttttaaattatagccatatgartgggtgtgaaatgatgtctcattgtgattttgatttgcatttttctattgaaaacttttgatgttagcatcttttcatatgcttattggatatttgtatatctttgggaaaatgttgaagctctttgcccattttttaattgggtcgttgtctttttgttaagttgtaaaagttctttttatattctggatactagaccctatcagctagcatatgatttgcaaacattttctcccattctggggatttactttaattttttgatagtatcctttgatgcacaaaagttttaaattttgatgatgtccattttatttttcttttgttgcttatgcttttgctgtcatatgtaagaatctattgtta

SEQ ID NO: 764158 - DNA, 636 bp, Homo sapiens
acagatgcccgccctgctcagactcacaggaccagcacagatcatgagtgatgcaatgtgtcaaggctgcacatggccggatgcatatggagcagcccccaactgggggtgcttatcagtaccttactagaccacttggtagcttcccgatgcaaggactgagccgcggccagaatgggctggttgaccggctgattggatggcattaacagcagctcaggttcgtaatcgtcttccatgtcaggggggacagggaasccagcagcatcggccgcatctgcctcagctacaacacctatacccacctcagcggctgggatgcccggctttgtcgatggcgggaaggatgagaaatagggatagtgttagtaagagcaatacgacttgggaaactgggcttcagctggtttagtaaccaaagcctgcctaggatgagaaagaaacatgttctctaggagccttgtgtaccaagcttcacagaagggggaattctcagcctccagcgccactcagcccaagccactgtgtggtgagagaagaaaagggactcactccaatggcaaagggcttctagagaaatctttacaccaagaaagcaagtggcatccatttctttaatatacttgatactaaagt

SEQ ID NO: 764159 - DNA, 566 bp, Homo sapiens
actccactggatttaggaatgaaaatcgagatctgcctcccactaagcttcaaatgaaagctaaacgaagccacctagtgatggaggctctaaaacacaatctacctctctcttgctgaagtctcaacaccttcctgctcaattctctgcatatctgaatttacttactcggagttgttcaaggtctggtggaggcggcgggaagtcaggctcctgaggttggaaggcttctctgaccttggccacagctcccaggatccgatatcctgagtccaggaagctcttttgcagtcctaaacacaagacatcctcactttcagctgggtgggtcagtgccccaaagcactgtctktgcagcagcagaactggttccatgaacaaaagctggatgtgaagctgccagtaaatatcacgggcagtgattgaagaaggggggaggcaggacaaggcagatgccctgaggcctgcagagcattggaagcatcacaaaccagctgttcttttagtgttcagggtgccttcttggctgtacaactaaaaagtacccaggagatccctgggcatga

SEQ ID NO: 764160 - DNA, 623 bp, Homo sapiens
tcacctctcttatgatgaggcagtcaagagataagcctgcccaactcagaacatgggagatgtcagtttcagattggacatacattccctgaagtacttctcacctttctctctactcctttgctgtccttggcattcagtatgttaacccttatgctgagctgcgctactctgttcagttgcctggaattcaggaatctactctactattagaaactccaattaggaaaccaagcatgtccttagtgataatgggttttggatattagaaagattctgcctgaaccagagatgaataggggagcccctccttcctactctcttgcattgactgcattctactcatagacaagactgaaaacatcagatgttcaaaacaggaaggaattcagatgatttcaaccaaaggagcggctccaattatgatctgccatggtagtaccaaaaawatgatcaaaattcacctaaagaaaacccagattttctttaggtgtagggcctaggagacccacagatcaacttaagccctccagatttgatagaaactgagaatgctttacaaagaaaaaaaagcattttaagaaaagcccaagagaagttaacaccagttacataaactaaat

SEQ ID NO: 764161 - DNA, 614 bp, Homo sapiens
agaacagaaactccaaaacactgttatccactcaaacttctcatgagaaagtataacatccagaattctcttcttcagctcaaactcttcctacataatcaaaagcttccaggtaaacaccacagttaaaaaaaacagtgaggacatagcccaaaagcccatctggatttgcagcatttataccaaccgtggttgccagccttcttgtatccaccccagacaaccagaaatgcaacatcgggaggaaacaaggaatatgtctgaaaccatcactgcatcaccaccacgttatctgtgaataatattttctccctgtccctctcactccccagccatctgttgcttgttggcagcttgtagtgctcaagatgagccatgcggaggattccaataaccstaacagcctatttcttattcctgttacctctcttcagacacctcaggagttccactttcatctcgggctgccatggaccccagtcacagcaggttctgcagggacagcaaaaagcctacattcctcattccttctttcctatctctccctttacagagaatgaagacgattcagaggtgccacttcaattgcacagacacaggtttgctggtggttg

SEQ ID NO: 764162 - DNA, 516 bp, Homo sapiens
tctgctctgttgatggagatgatgctgtgctttgaggtgatgtcattatctctggtatctgaatctgctttctatatattgccttgtcaaatgaattaaaccaaacattgcaaatactgctattggagaatgtaggaaatacttttctgttactgtaatgctgaaggccatcctgcatcctgacctctccattccacattacacagcattccttcactgtctgccagctggcctgtagttctttatgacctcttagcttgctaattagcctgcctactattatggattcatgccctmacccaaggctgcataatataatcagacctaggagagaagagctattgtggttaaatcttattttgaaatgattattcaggcatctgagcattaaatattcaaaatatataaacggataccagcttttgatgttacagacatataacatgaacttgagggtctttaaagtatgaatgagaccaatgacaagatatgttagatgtttaacctgcttaactt

SEQ ID NO: 764163 - DNA, 580 bp, Homo sapiens
ctaggacattgcctagaattttagaggttaactttgtgctttgatggcttaactctgtaagagtcagtttcctacagcaaaaaggaggatagatggtctttgaagatgctaaatagagacttaagagatggctggtgttatattgttctctgtgtttttatgtgtttaaaaaaatttacggaaatacttaaatacatttaaagtgattagtctgttgtttcagcttctcctgrtgtatcctgggagattttatgctagtttcctgatagtcctcgtgaatcctggttgtaaaaaataagctgagacccatttattctatcctgcatcttcttccaggtgagggatagtaagggaactaagaaggaggaatagcagggaaggtcagaaaacacttctaaattatattactttgaggggtttatttgtagaattaaaattaaactgctagattaacattttcaattgtttcttccaaccagtaattccaagtttttcaggttaattgaatatagtgaaatatcatccagtgtgtgcatttcaaaacaagatgtaaaagaactgtgatttgtggcaccacata

SEQ ID NO: 764164 - DNA, 501 bp, Homo sapiens
tattgacagtaaggttaatattagagatgcaaaatcaaacaaataagtttttttcacaacccatttaattagcaagaggttaagtagatccattgtcttgtaaacatttaaaaatttatttactttcatcatctaaaatttaaatgtatagtttataatatttaggatattgatgattaaaagtccttgtggattttaattctcaaaatctctgtaatccttcttatagtaagaactttattggacataattagtattctgcttacaatacagaggacctgctaacctctttaagccagktatgatagaacactgtacagttatatttgaagttatctctgagtaaagactctaaataattttcaaccaaatagatggtgaataatatgaatcagtagctcataacaaacggtcaactttcaaggcaaatatatatttcttgagtgcctgctttgtgcaaagttgcattttagattgtaaagctgtttctactaaaatgaa

SEQ ID NO: 764165 - DNA, 660 bp, Homo sapiens
agtaaaatgacataatttaacttcttttcctatttaagtgccttttatttatttctcttgcctatgctctccgactaggacttccagtataatgttgaataggagtggtaagagtaggcatcattgtcttgctccagttcttaaggggaaagattccagttgacgcccattttgtataatgttgactgtgggtttgaaatagatggctttgttattttgaggtatgttcctttgctgcctactttgctaaggctttttatctggaaggaatgctggattttatcaagagscttttcttcatctatcgagatgattatatggattttgtttttagtactgtttatgtggtgaaatctttgccagattttggtatcagagtgatgcttgctttgtataatgagttagagagggcttcttccacctctgttttttggaatagtttcagtaggcttggtaccagatcttctttatatatctggtaaaattcagctgtgaatccttctggtcccagactctttttttggtaggtgtttttttttttttttttttttggattcaatttcagaactcaatattggtcagttcagggtttttatttcttcctgactcagtctttgcaggtggtgtgtttccaggaatttaccaattttctctagattt

SEQ ID NO: 764166 - DNA, 660 bp, Homo sapiens
agtaaaatgacataatttaacttcttttcctatttaagtgccttttatttatttctcttgcctatgctctccgactaggacttccagtataatgttgaataggagtggtaagagtaggcatcattgtcttgctccagttcttaaggggaaagattccagttgacgcccattttgtataatgttgactgtgggtttgaaatagatggctttgttattttgaggtatgttcctttgctgcctactttgctaaggctttttatctggaaggaatgctggattttatcaagagccttttcttcatctatcgagatgattatatggattttgtttttagtactgtttatgtggtgaaayctttgccagattttggtatcagagtgatgcttgctttgtataatgagttagagagggcttcttccacctctgttttttggaatagtttcagtaggcttggtaccagatcttctttatatatctggtaaaattcagctgtgaatccttctggtcccagactctttttttggtaggtgtttttttttttttttttttttggattcaatttcagaactcaatattggtcagttcagggtttttatttcttcctgactcagtctttgcaggtggtgtgtttccaggaatttaccaattttctctagattt

SEQ ID NO: 764167 - DNA, 585 bp, Homo sapiens
agacagaaaaccaaatactgcatgttctcacttataagtggaagctaaatattgagtacacatggtcataaaaatgggaacagtagacactagggaatacaagaagtgggagaggggagtaagagttgaaaaaactacctactgattattatgcttactatctgggtgatggattcatttgtactccaaacttcagcatcatgcaatatrcctttgtagcaaacctgcacatgtatgcactgattctaaaagttgaaaaaaaacagtgaataatgaatttagaaagaaaatggtattaagaaaatcatgaggaagagaaagtgtatttactattattaagtggaaatgggccatgataatggtctttatcctcatcatcttcacattgagtctgaggaggatggggaagaggagggtttggtcttagtgtctcaggactggaagaggcaaaagaaaatctgtgtatgaggaataagtggacccactcccttcaaatctgctttaagggtcacctgtaagttcaggaggtctagaactttgttcatcgttgtatcccctaaaaacctcgttgtggcataagagaca

SEQ ID NO: 764168 - DNA, 585 bp, Homo sapiens
agacagaaaaccaaatactgcatgttctcacttataagtggaagctaaatattgagtacacatggtcataaaaatgggaacagtagacactagggaatacaagaagtgggagaggggagtaagagttgaaaaaactacctactgattattatgcttactatctgggtgatggattcatttgtactccaaacttcagcatcatgcaatatgyctttgtagcaaacctgcacatgtatgcactgattctaaaagttgaaaaaaaacagtgaataatgaatttagaaagaaaatggtattaagaaaatcatgaggaagagaaagtgtatttactattattaagtggaaatgggccatgataatggtctttatcctcatcatcttcacattgagtctgaggaggatggggaagaggagggtttggtcttagtgtctcaggactggaagaggcaaaagaaaatctgtgtatgaggaataagtggacccactcccttcaaatctgctttaagggtcacctgtaagttcaggaggtctagaactttgttcatcgttgtatcccctaaaaacctcgttgtggcataagagaca

SEQ ID NO: 764169 - DNA, 608 bp, Homo sapiens
taaatcagctctcataagatgggattgtacagttacatgacaaaggatgtgagtagaaaggcattagttgaagatattaatcaagtctacatcagatgacaaaggggaatgctgatgacagtggacaatggtttcccaccagacagtagtttacagatagtacaagggcaaaggaggtatttaaattcctttagcccaagaatttagatattatatccagacagaagttagagaagaccasgctgaattgaaagagttaaacttgaaaactaaaaataatatgttttcctgaaaattactaaaattttccctacaagtataatgaagttacaagatagagacaatgataatttatagtgaaaaaaataatgattttcaatactagggtaaatgatctgaaaagtctgagtagtacatcgtttccacatgtgtctgatttcattgtaaaaccaaagatttaaatttttctgttaattttaattgacctgtgtgtactttacacagtactttcacaaaaccaatggagttctgtgtaaataagttgaagaaaagctggtttttaatgctctgaattattttatagttatctgattttacttttcagcatt

SEQ ID NO: 764170 - DNA, 608 bp, Homo sapiens
taaatcagctctcataagatgggattgtacagttacatgacaaaggatgtgagtagaaaggcattagttgaagatattaatcaagtctacatcagatgacaaaggggaatgctgatgacagtggacaatggtttcccaccagacagtagtttacagatagtacaagggcaaaggaggtatttaaattcctttagcccaagaatttagatattatatccagacagaagttagagaagaccaggctgaattgaaagagttaaacttgaaaactaaaaataatatgttttcctgaaaattactaaaattttccctacaagtataatgaagttacaagatagagacaatgataatttatagtgaaaaaaataatgattttcaatactagggtaaatgatctgaaaagtctgagtagtacatcgtttycacatgtgtctgatttcattgtaaaaccaaagatttaaatttttctgttaattttaattgacctgtgtgtactttacacagtactttcacaaaaccaatggagttctgtgtaaataagttgaagaaaagctggtttttaatgctctgaattattttatagttatctgattttacttttcagcatt

SEQ ID NO: 764171 - DNA, 619 bp, Homo sapiens
taagaaaacaatactttatatataactgtacttatctctaagaactgactaaatatagaaggacaaaggtttaaaaataaaagtttagaaaggtgtgctggaacaggcctgtagtctcagctaattgggaggctgaagtggcaggattgcttgatcctaggagtttgaggtcggactgggcaacatagttagatcccatctctgaaagtaaataaattacaagatgggaaaattgtatgctgtgcaaactaaccaaagttatttcagaacaagaaatattattagaaatgtaaagaggtggccaggcgtggtggctcacacctgtaatcccagcactttgagaggcygaggtgggaagatcacgaggtcaggagatcaagaccatcctggctaacacggtgaaaccctgtctctaccaaaaatataaaaaaattagctgggcacggtggcaggcgcctgtagtcccagctactcaggaggccgaggcaggagaatggcgtgaacctgggcagcggagcttgcagtgagccaagatcgtgccactgcactccagcctgggcgacagagcaagaccccgtctcaaaaatactactactactactaataaaataaagaaatt

SEQ ID NO: 764172 - DNA, 619 bp, Homo sapiens
taagaaaacaatactttatatataactgtacttatctctaagaactgactaaatatagaaggacaaaggtttaaaaataaaagtttagaaaggtgtgctggaacaggcctgtagtctcagctaattgggaggctgaagtggcaggattgcttgatcctaggagtttgaggtcggactgggcaacatagttagatcccatctctgaaagtaaataaattacaagatgggaaaattgtatgctgtgcaaactaaccaaagttatttcagaacaagaaatattattagaaatgtaaagaggtggccaggcgtggtggctcacacctgtaatcccagcactttgagaggccgaggtgggaagatcacgaggtcaggagatcaagaccatcctggctaacacrgtgaaaccctgtctctaccaaaaatataaaaaaattagctgggcacggtggcaggcgcctgtagtcccagctactcaggaggccgaggcaggagaatggcgtgaacctgggcagcggagcttgcagtgagccaagatcgtgccactgcactccagcctgggcgacagagcaagaccccgtctcaaaaatactactactactactaataaaataaagaaatt

SEQ ID NO: 764173 - DNA, 607 bp, Homo sapiens
ggaaaaaatagactaaatacagattgctttcttaggtagcattaaggaacgcttatgaaatgcttttgagcagggaaatagtaaagtcactgatgctctactaagtaaagtacttactagcaaaatgacatgaagtagagacatatcttgagactaaaaatgatcattattaggaaaaataaatgttatgtttgattcagtatttatcttgcccttaattatttattaaaggaaaattatsatgaaatacaaatataaagcttctatgaactttttttaaatttgaagttgagacacgcacatgaatgaaataaaaagcccttaagtttgtctcccagtggttattacccagattttcttatttataggtgtacgtattgatataattttcttccttgctgaaaatagatggctactaccttccaaaaatgtgccctttattattttgagttaagaagttataatacattgtacctttttatttgtaatcattgtattacacatcagatgtataaattctctttcaaaatctaatatctaaagatggtaaaaaataaccaaaaatgggttatttgcttgttatatattttcaaccactgaaaacatg

SEQ ID NO: 764174 - DNA, 600 bp, Homo sapiens
accagaaagccactgataggcaatttctgtttcaatacccgagcaattctgattcaattgcatattttcttataaatttcctgagtaaatgagatacaattccattaaactttgttgtaattttggtacttaggacttttaaaatatgttgaaaaaaatcatcacagtgatttactatagggcatagggatacttyatttctttcccaacatactctaatgaattgccaatttctctttatttatatattaatttatattgaggtagatattttatcattttcactggatgtgcaactaatgatagagatgatatatgtttgtggatatcagtaaaattttcctggtgaattctcaggttctatgacaacatttaacagtaaacatttagattagacatttaggtacattacgattcttaggttttataagatttatttatttaataaataacttgaatcttaatccaaatatgtggcacttaaaggtgtaacagtcctcatagaatttagctagtaataaaataaaacaacacaacagaagactgcaaaattgaactataatattaaaagttggaccaaggggaaggaaacaatactaa

SEQ ID NO: 764175 - DNA, 769 bp, Homo sapiens
taggcagtggtccaaaggtctgtgactcaccgttaggatccttctcttttcttgaaggactgtacacattcacagccttccagtattttatcccatttttgctgtttcctcagttccagctggcaatatttctgctgatataattccatctctattcttggcttctgttgaaatagctaatttattctatggttcacacccacactaatctttcagtaggttagttttccacacccttagtgttctgttccaaacatactatctcattttttgtaatatgaacatgccgaaaattttmtgaatccttaagttcatttttacttcatatatatataatatatatatacatatatatatatatctccaattcaattctctctttttgcatgctattataagcaatcggaagaaatcaaactgttctttcaccactttgcttagaaatatcttcacctaaattatccaattccatcactagcaaattctaccttccacaaaacacgagaacgtgaacacaattcagccaagttctttgcaactttataacgaggatctcctttactccattgtcaaataaagtgttcctcacttccatctgagacctcatcagagttgcccttaatttcaccaatattgtgtacacaattatttacatattttctaagaagacagaagctttctttatagcttttctcttttcttctgagtgctcactggaataatctttaaaaatccctttacagtaatgtcagctttttctaacatgtat

SEQ ID NO: 764176 - DNA, 769 bp, Homo sapiens
taggcagtggtccaaaggtctgtgactcaccgttaggatccttctcttttcttgaaggactgtacacattcacagccttccagtattttatcccatttttgctgtttcctcagttccagctggcaatatttctgctgatataattccatctctattcttggcttctgttgaaatagctaatttattctatggttcacacccacactaatctttcagtaggttagttttccacacccttagtgttctgttccaaacatactatctcattttttgtaatatgaacatgccgaaaattttatgaatccttaagttcatttttacttcatatatatataatatatatatacatatatatatatatctccaattcaattctctctttttgcatgctattataagcaatcggaagaaatcaaactgttctttcaccactttgcttagaaatatcttcacctaaattatccaattccatcactagcaaattctaccttccacaaaacacgagaacgtgaacacaattcagccaagttctttgcaactttataacgaggatcwcctttactccattgtcaaataaagtgttcctcacttccatctgagacctcatcagagttgcccttaatttcaccaatattgtgtacacaattatttacatattttctaagaagacagaagctttctttatagcttttctcttttcttctgagtgctcactggaataatctttaaaaatccctttacagtaatgtcagctttttctaacatgtat

SEQ ID NO: 764177 - DNA, 625 bp, Homo sapiens
gtgtaatggggaacatggaaggcatacagtaggcactcaacaagggcatgctggaccgactacagaggagtcagccctgaaagataacccacttgtctgaggccaggaacaactgatgtctggccaggtctaaagatgtactttatgtgatagtatcagcctcacacctggggagaggcccaactagtaaaaggcctccttttttttttttttttttttttttctctaaaragctggctgtggtgtctgacaaggttggattacataaatcaaactctgtttcatcccacacagcctctgccctaagcacaaagcgtgttccctacgctccctggataagaatctccctctgcctctccccttttcagatccaattcataccctctgggggctctgtgtgtcaccagtgttccagatgctccagctagagctaattcaccccaaagtatcagaggaagaagcaaagcgaagccgtgtgcagctctaaaagaacctaactcacaaaatgcaaatttaccaaacagagagcaacttataatatctcagatacagaacagagcactttcctttcttctcatgtgatcctcacgataggaagagcaggtattaatcaacccattttaga

SEQ ID NO: 764178 - DNA, 625 bp, Homo sapiens
gtgtaatggggaacatggaaggcatacagtaggcactcaacaagggcatgctggaccgactacagaggagtcagccctgaaagataacccacttgtctgaggccaggaacaactgatgtctggccaggtctaaagatgtactttatgtgatagtatcagcctcacacctggggagaggcccaactagtaaaaggcctccttttttttttttttttttttttttctctaaagagctggctgtggtgtctgacaaggttggattacataaatcaaactctgtttcatcccacacagcctctgccctaagcacaaagcgtgttccctacgctccctggataaraatctccctctgcctctccccttttcagatccaattcataccctctgggggctctgtgtgtcaccagtgttccagatgctccagctagagctaattcaccccaaagtatcagaggaagaagcaaagcgaagccgtgtgcagctctaaaagaacctaactcacaaaatgcaaatttaccaaacagagagcaacttataatatctcagatacagaacagagcactttcctttcttctcatgtgatcctcacgataggaagagcaggtattaatcaacccattttaga

SEQ ID NO: 764179 - DNA, 480 bp, Homo sapiens
aagataggaaatgtgtacccagctttgacggttccccactctaatcgttatctgttactctaaaagtcacttagctggcaaagccactgtcctggcttcttctgtatcccactaggtatgaaaaaggactggggataagggggaagaggtatgttgtttccaaggaaaccaaggggtctggggtcccctacggctgactctcatggtagggtggccaccatattttccggccccactgcaaacttgcccccgatgtccctcagtgccgatgttgggggtggaatgcggtctgtcggtggggtcttttgaaaraagagctgacaaaggcacaggctgccagcagcaacatgctgactggctattcggctcatccgtggctgacacccagctggtcccaggccgccagtggtggcagtggctctgtacctcaggaccaatcctggggcctccaagtgggaccaagtcagttttgaggcctag

SEQ ID NO: 764180 - DNA, 638 bp, Homo sapiens
aattgtaaaattaaatgtctttagtgtaagtacacagctattcaaccatcatcacaatcaattttagaacattttcatcaccccataaaaaactgcatatgccttaggtgtcaaccctcagtccttcttctccaagccgtaagcaaccactaatctgttttttgtctttatagatttgcctattctggaatttcttataaatgagatgatataatatgtggccttttgtatctggcctctttcacttcttgtgttttcaaggttcatccatgttgttgcatgcatcagcacttcacttcttttttattgtagtaaaatataaataacctaatgtttatcatttttaaccatttgtaagtgtacaattcagtagcattaaatacattcacaatgttttatgactgttactgctatctatactcaaaacttttttmttgtcctccccaaaaactctgtagccattttataagtctctcttcccctaccctccagccatataagttgattcatatagtatttgtttttctgtgtttggtttatttaactaagcatagtgttttcaaggtccctccatgttgtagcatatgtcaacatttcattcctctttatagctgaataatagtccattgtatgtatgt

SEQ ID NO: 764181 - DNA, 607 bp, Homo sapiens
gccaccatgccgggctaattttttaatttctttgtagagacagggtctccttatggttgccccgattagcataataattcttaaaacatgtttgatcataagaattaacttggggagcttattaaaaatggacattctgtccttgacttaagaattctgagtagaacaacaaagaaaaaaaatctttttttgacagggtttcactctctcacccaggtggagtgcagtgacatgatctcggctcgctgcaagctccacctcstgggttcaagtgaatctcgtgcctcagcctcctgagtagctgggattacaggcgactgccatgatgcccggctcttttttcttttttttttttgtatttttagtagagatagggtttcaccatcttggccaggctggtctcgaactcctgacctcaaatgatctacccacctcagcctcccaaagtgctgggattacaggtgtgagccaccatgcctggcccaaaaaaaagaattctgagtagatctaatgtatatgcaagtacacatctagattttgaagacataatataaaaatgtaatgtatgtcagtttttaaacaactgattacatattgaaagattcta

SEQ ID NO: 764182 - DNA, 607 bp, Homo sapiens
gccaccatgccgggctaattttttaatttctttgtagagacagggtctccttatggttgccccgattagcataataattcttaaaacatgtttgatcataagaattaacttggggagcttattaaaaatggacattctgtccttgacttaagaattctgagtagaacaacaaagaaaaaaaatctttttttgacagggtttcactctctcacccaggtggagtgcagtgacatgatctcggctcgctgcaagctccacctcgtgggttcaagtgaatctcgtgcctcagcctcctgagtagctgggattacaggcgactgccatgatgcccrgctcttttttcttttttttttttgtatttttagtagagatagggtttcaccatcttggccaggctggtctcgaactcctgacctcaaatgatctacccacctcagcctcccaaagtgctgggattacaggtgtgagccaccatgcctggcccaaaaaaaagaattctgagtagatctaatgtatatgcaagtacacatctagattttgaagacataatataaaaatgtaatgtatgtcagtttttaaacaactgattacatattgaaagattcta

SEQ ID NO: 764183 - DNA, 586 bp, Homo sapiens
aaaatgacagtttaagcacttggttcctcagttggataacattagatccaaagttcattggttcagtggtgtgaagaaaggaagcacaattggcaggttatcactttccagtcgttccaatagatgatggttaacatgaattttacatgtgcaatgttcctgactgcaatgaagaaaaggccttctggagatttctgttttttaagcacattctccttccatccacatatttacatccttgtaatggccagttaagctagggcttgctgtaagttggaaraacactgggttgacagagatctactgtgagctgtattgggactgctttgagaaccatctttcaatgcactgaaaagtcatctgaaaaaatagcttcttccatatcagcttatattaaatactgtgacactctgagaaagtttatcatcatgatagctgtaagtcaggcattaaaatcaaatggaaatacacctaaaatgtccgcattactcatttccaaaggatttttcataaagatgttcagcaacatctgaaaagctgcatttatggagatacatctattaatatgttcacaacatgatacatt

SEQ ID NO: 764184 - DNA, 600 bp, Homo sapiens
aattgtttaatcatcagggaaaatgctaactaaaattacaatatcatatcaccatacactaaccagagtggtttaaaatggaaaagatagcatcaaatgttgacaagaatgtggagcaactggaactctcatactttgctggtattagtacgactacttgagaaaactttctcattatctgctaaagcaaaatatatgtgcacatcttaatgcatagcaatccaactcctttgaatatattcaacataaacacatatatgtggtcaccaaaagactagtacaaggatgtttataccagtactaccccaaagagcttaaacctggaaaacaatgttcatcaactggagaatgaataaataaatcatagtatattcatacaacagaatratataaagcaatgagaataaaacaaataagaacaagatgccacagatcaatttgctgaacataatattgaggagaagaagccagacacacgagagtaacaatctataactccatttgtataaagttaaaaaaaaaaaaagcaaaaaaaacctatgacaacagaagtcaggacagtgcttatcttttggggagagggtggtaaccagacaatag

SEQ ID NO: 764185 - DNA, 631 bp, Homo sapiens
tggatgtacaaatttttccacatttctgccaacaaactggtattgtctgtttttcattttatcccattggcaagcactttatacagtttttaaagctcttatatttacttgcttatcactaaggaatatgtttgtaaccattatgagctgaactgtgttcctatatccccctcaaattcatatgttgaaaccctaactcccactacctcagaatgtgactatgtttaaagataggcccctaaaaacaggtaatcacattaaaaygggtccttagggcagaacttaatccaatataactgctgtacttataagatgaggagattagaacatagagaaagagatgtcagacatgtaaacacacagagggatgattatgtgaagacactagaagaagatagccatctacaagccaaagagagaggcctccaaatgaaaccaaccctgccaacactttgatcttggacttctagatttcagaactgggaggaaagaaatgtctgttgtttaagccacccagtctgtggtatttgttacagcagccgtcacaaactaatgtagtaactttcacaaactttagacaattaatttcctatcatgattgctgagtaactagcacacttaaaacaacttc

SEQ ID NO: 764186 - DNA, 569 bp, Homo sapiens
ttatagttttcctaatctttactttaaaattcatatttgtagatatagtatctcctctaagtccccagatccaaatattcatttgcccacttgatatgacttagatgtttaacaagcattttaaatttagcatgtccaaaataaaattgttgatttttccattccaaaactaaccctaactttcctcatgttagtaatgacaccaccaatcactaagatattcaaaacagagagcattctttttttattatttcattttccattaaatccatcatgaaatcatgccaattaaaaaaaaaagttccagacccaaccaattttttaaacttcttcagcacccctacccttgtacaaactaccattatctttggcctgcattattgccatgagcttctaatgaatttcccttcttctacccatacaacagccrgacttatctttttataatgtaaatcaaatctccattaaaaacccttaattggtttctcatcatcccccttctcctttataacatttgccactatttcatataatattgtgtatctatttttgggctccctaaaggcagg

SEQ ID NO: 764187 - DNA, 581 bp, Homo sapiens
agtacatggaaatcatatccaataaatactactgccattataatcataagtgacaagccagctgctccctttgtgcacgtgtatacagatatttggaggggggcggagcgaatacgtagaagtagcatgatagcgtagtgcaaatcaagaggtcagttggcttagtcccctgtcagtgtacttactggacctcaagtttctgaaggagaatgtctgttcccattccttttcctactgaccacttcctccacattctctagctccctgcctcatatatttggcttgggcttcggaagactctgcaggatccttgtgcttctttcttggtctctggatggaccgcagagtgtgcagatgtagcttaaacttsttgctgttcgcccacagcttcagtggctccagacagctagcagatagaatgacttcagcttgaacgactaatctcattggcttctcaattcccaaggactttttttcctgaaagggaattaacaggtgagtctgttgttgctttggcaacaaactttcaacctctacctaactctccggaatgagaacatatctattaatacattcgctag

SEQ ID NO: 764188 - DNA, 547 bp, Homo sapiens
gcattaggagatatacctcatgtaaatgacgagttaatgggtgcagcataccaacatggcacatgtatacatatgtaacaaacctgcacattgtgcacatgtaccctaaaacttaaagtataattttaaaaaaaagttctaaaatacaaccacaacaacaaaaaaagacatggaaaaataaataaataaataaataaataaataaataaagagctccggttccgatggatctaccactgactggctgtgtgacaccacagaaatctcctaacctctctggggccttggwttcctcatttgcaaaggaggaaaagagcagcatcaactgcagggttgctcagcctcaccactactgacattcaggccagacaattcaccgctgtaagggcctgcctgtgtgctgcagggtgttaagcagcatccccagcctctacccactggatgctggtagcacctccccaatcaggatgtaacaaccaaaaccatgtccagacactgccaaatgtctcccagcacacttccagttgaaaaccactgatctactgca

SEQ ID NO: 764189 - DNA, 550 bp, Homo sapiens
ccagcccccttataagccaaaagctgtaagtagcccattctctctgactgccgggtattcacacacaaggtattcttgcctgtgcctcgtgttttccaaatgctccctgaggggtagacgtcaatgtgtctactggaacatgggtgtatgtattcacacatatgcacaaaatcactggttactaagatggacattttccattggcccagcttagtctctataaagatggaaacgacgatgcctattgaatttttgtttcwtcgattcaattattgtaactgtcttagctgacaactttctgagaatggttcttgggtgagcagagttcagatccatttttggactgtgataaaggatctaattttgccctcattctttctcttggttcaactgtgtcattttttcttcatactgacattgaaaaggtcatgttgtttatctcaacagtatttaaatttaattctgaaacatacactatgtctgagtcagtaaataagatggcagttcagcagccagctcccacccaaggcaaaacagagtgaagcagaga

SEQ ID NO: 764190 - DNA, 561 bp, Homo sapiens
agagaaatattttgtgaaggggtcaatcagtgtcatgaacttcattgtcttattttaagaaattgcacagccacttaatacctttggcaactaccaccctgatcagtcagcagccatcaatattgaggcaagaccctgcaccagcaaaaaaggttacaacttgctaaaggcccagatgattattagcattttttagcaataaacattttgaaattaagttatgtacttcttttttttttttttttttttttgagacagagtctcgctctgtcacccaggctgtaatgcagtggcatgatctcagctcactgcaacctctgcctcccakgttcaagcaattcttctgcctcagcctcccaagtagctggaactaaggtgcccgccaacatgcctggctaatttttgtagttttagtagagatggggtttcaccacattggccaggctggtctggaactcctgaccctgtgatctgcccgcctcggcctcccaaagtgctgggattacaggcattagcaagttatgtacatttctttagacataatgctgttgcacacttaat

SEQ ID NO: 764191 - DNA, 525 bp, Homo sapiens
tacagcaagattgacagtgtacacttgtggggaaagtgggcagatgaggaggtccacttggggaagggaaagcgaagtgacagtaattggtcatgatctgcatgaccactggaggccccagaagggagtgctttgttttcctacctttgtatggccttcatttctgcttcctataccctagtgttttcatatttgggattaagtttacagtgctctaaaagcccctgcatttatataccagtagcttccaggagacagaagatcaaaaattctttctctgccaacccaccacttagttcttaattwaaaaaaaaaaaattactttttaagaggtaccaaagtcgtcaatgtctttgtttgcttctgactgcttctagtactttttccatttctgtacatgcccatttatgggtctggttggtctctacagaggcagcaaagggaaaggaggaagactttttcccagatctctctaccttaaagcatggagccaagtagcttgtattagtcctaggattccttttc

SEQ ID NO: 764192 - DNA, 596 bp, Homo sapiens
aaaaagatcagtatggctgggtgtggtggcttacgcctgcaatctcagcactttggaaggccaaggcaggcggaccacttgaggtcaggagttcgagaccagcctggccaacatggtgaaaccccatctctactaaaaatacaaaaatcagcctggtatggtggtgcatgcctgtaatcccagctacccggaggttaaggcacgagaatcgcttgaacccgggaggcagaggttgcagtgggccaacatcacgccattgcatttcagcctgggtgacaaagtgagactccatctcaaaaaaataaaaataaaaataaataagaagatcagtgcagggastacgcttttaaagaacaaattattctttatatctcagcttttgtttcattttgggtctggaagattaagccatatattcgctttgtaaagcacaggtgattcatgatttaattatatccgtgataatataggattattcattaaaatgctaaattgaagtaatatagaaatagcattgcatgctggagaagcaattaataacccaaacttaacttttctggtttatcttgtaagagaaaggacaggtgggttaccac

SEQ ID NO: 764193 - DNA, 644 bp, Homo sapiens
agtgtaaaaagtgcatttaaacaatattttaaaatagtgtatactaagatgatgtttttccttatgctataacttgattacttgtttcagacatcttaggccattaacaaactaaagtcatgatattttaatttgaggattaaaatgattcaagctagtttttggttaagtgccagaatattacacctgamtcagggtgacaaaataaaatttggtgagggtaggttagcagggctgccttgcaggccaagtctggtctccaaattttgtctacataaccccactgggctctcaaaactcatctcaggctttctgctacatctttcattagagacaaatacatactgaggaaaagtagttccagatactagcttcagatctcagaatgtgttttaccttcttccctgaaaaggtggcccagaaattcttggcaattttatgagccctttgatacctaggagcagattttaaaagctccattattaccttcaataggagagttggcctctgttacttgatccaccatttctagacataaatgtcttacgtattcttcataagatttcttaaaatgttatttgactacatttaatcattgatagggcaaagaaaataaaataattttgataaaaataacttgacag

SEQ ID NO: 764194 - DNA, 591 bp, Homo sapiens
agttgctctggctggcacttccagtactattttgaataacagtggtaaaattgaacatctttgttttgttgcagctcttgaagaaaaggctttcagtttttccccattcagtatgatgttagcttaagttggttatatgtagcctttattatgttgaggtatattccttctataccaaatatattgagagtttttatcatgaagtggtattgaatttaatcaaatgattttttgcatctattgaratgatcatatgctttgtgtcctttattgtattgtgatgaattacatctgatatttatatgttaaaccattcttccattcttgaaataaatcctacttgatcatggtgtattatctttttgatgtgttattggacttagtttgttaatattttgttgaggattttgcagttatgttcttcagggatattaaccttcagtttttgttgttgttctgtctttgtctgatcttagcaatggcagcctcataaaatgagatatggataatttttttaaaatagtttcagaagaattggtgcaagttctactttaaaagttgggtttaatttagcagtaaacccctgtggtc

SEQ ID NO: 764195 - DNA, 492 bp, Homo sapiens
tgccacgtccagtggccaactattacataccctactgggttatccattactttccttgagtgatctcatacattcataaattcaataaccacttacatgatattgactcatgatcccttctgtatgggccatattagattggacatttctctcttcatttcccacagatatttcaaactcagcttctcaaaaataatctcatcattcatcaccctctcaccccaaagaaaaaaaacctgctcctttccctgtgtgtgtrtgtgtgtgtgtgtgtgtgtgtgtgtgtgtgtgtgtgtgtgtgttttaaccactgttctttctacgctgggagcttagagtattggacattggacctattaaaagctttgcagatgattctaatgtacagccaaggataagaactactggttaggaactcaggagaagaacaataaagtttatgtaactgctttcagaaccttttgttctcctggaagttctgactttttcaga

SEQ ID NO: 764196 - DNA, 420 bp, Homo sapiens
tgtaagggatccagtgatgtgacctgtcctcaagtttcctagaagtgggtgccagtgccagctctaatgggggtggcaggggagtgacacagaccctgtgaaattccctggttactgataaccttggtgtgttggctttcttgaataccagttataaaagtaatgaactaatcacctggacagactcaggatctcctggttagccagamtgcttcaggcagtaatgatatctgagatcacacagccattttctccttcctcggcacagtgttattctccaggatatactgtaatgaactaagttggttggcctccagtcaggatgtggtgcttgcaaaagagcaccagctatggtagtagcagtgagatttttacttaccttatgttgcccaggggtgggtacctagtttctcaggcaat

SEQ ID NO: 764197 - DNA, 683 bp, Homo sapiens
tcataaaagaggcccacagaagcttgtttgctccttttaccatgtgaggacatggtgagaatgcgccacctatgaaccagagagcagccctcaccagataccacgtctccaggtaccttgatcttagacttgcagcctgtagaactatgagaaataaatatctattgtttaaaagccacccagtttactgtcgtttgttatagcaacctgagtggacaaagacagcatgtcatcaccaatmaatacaaattgctgatttttttacagggttttggggaaactggggttcaggaattgatggactttcagaagagggagtgatttggagttggttgatctttatccatggaagtgtctctaaaagtagaagtatctctttagacgcacaagtgtctctaaaagtcactcactattgctgattggctgaccttcagaaatgtggcactgtcaccaactgggtagttttcagaagcatggttataaaagcaagttatcagggattgattagaatagattaaagccaaaaaaacccagcaaatcttttccttttttgagtttagaatatagaaagttttcattctcagagcagagaatctagaaatgattttactccttcccaagttgcctaagctagaatttttaagacgctcataagtaatcaaattaaggtttagtcctcattg

SEQ ID NO: 764198 - DNA, 585 bp, Homo sapiens
atttcgcctgtggttccacaggctgagaaatacaatgatatggccctggcttctagtgagggctttcttgctgcatcacaacatagttcagtaagtcaaaggggaagtgaacacatgaaagagggggaaacctgaggggcatcctagctttatgacaactcactctcatgaggactactccagacttggaagagtgagaactcattcaccaccaagaacagcaccaagacactcatgagggaatctgtccccataacccaagcacctcccatgaggccacatctcccaatactaccacaccaaggataaaatttcaacatgagcttkggtagggacaaaccatatccaaaccatagcatgcatacacataccccttaaaaagggggacacaaaactaagagcaaactaacgtagtttaaaatatacataaaaacaaaaggcattccatatactttctttttttcttgacttgggctttttaggccccttcttcccatctgtactaactcaaaaataagacaaaagtcaacataacgaggtcaaaatctctcctttgttacttgcaaaatttaggctggagtacat

SEQ ID NO: 764199 - DNA, 649 bp, Homo sapiens
taaatttggatgtaaacctcctccacgtatctaactcccagagataaaatcaagtctaaaaattaaatcttcttttaaattaaaggtaaagtgtgttaaagtccaagggaagtatgaagtccaagggaagtatgatccgaaagcaaattaactttctcttgtaatttaaaattcaaaaaagctgaagttcaaaattattccatcccaacttgttttgcccagtcacatttcagaggggttctcagtgttctttcagcaacagtagcctgggctgattctcatcattaagtgtgtagttactttaaggtcagctctcaagaattgtattagttttgtggcaaattgtcatgactgcatgatttcaagtacataaacgcaagattatgagagcactgatcccccactgaccctccaccctccccgtccccactcaaggcagttatcccaggattatgtcctaagtactgccagtactaagtgttgacagactacagcagagactcagtaggtttgwcagtggtgcagatcaacaaagaaaatctggtttcagtttccccaggatgccaataaatctccgtccctttttcagaatccattatctgtgatcctaaaatctactgggagaaatctcttagcaagaagttaattt

SEQ ID NO: 764200 - DNA, 619 bp, Homo sapiens
ttgctaaataatgccaaactgtttgctaataatattctagctgacagagaacaaagaaagtgacagaaattaacttgtgataaagacaatactgaagtactaactttgatatttttcatatttccaatagatatttattgagcatctttttatattcaaggaactatgcaagggatgcaggggcaataagacacagagcctcaaggagctcaaaacctgaaaagatagacacatagttaacattaagataagacacaagttaaaaatgccattggagaagaataagaaaagagctataaaggaattatttaggcagtaaaactgttgattgctacatgacatttagattaaatgtacttcagccaccccatgaatgcttgtgtaaatagctaatccaaaaagcatatgatgaaattctgaaatttgtctgctrcttatagctgtaaagaagatgtgtctagtgagaattttattccagaaattcacttcaaaatcctagtggagaaggtggaacttacagaacagtgtaagaaacaaataatacataagcgtgggataccttatctgagtatttccctccttccatttctagagacttgttggcagggaaaaaaggaag

SEQ ID NO: 764201 - DNA, 541 bp, Homo sapiens
caaataaaaactttaaagtagctattataaatatattcaatgaaattttttcaaccatgtataaagaactttttaacagccttattgagatatagtgcaaataatgtataagtcacctatttaaatgtacaattcagtgttttttttctgtatagtcacaaacatgtgcaaccatcacctcaatggtcaattttagagtcgtttcatcacctcaaaaagaaatgttgtaccctttaggtatcacctcctatcccgcagactacccatccctcagtcctaagcattttaatctactttctatctctatacatttgactattctagacatttcatataaatgaaattatataatatctaggtttkttttttttttttactggtttatttcacttaatattttcaggttcatccatgtttatcttggaagaaagtatagatgttgtaccatgtacttcttcattccttttatggtcaatcttcacttgtatggacattctgcattacatttaaccattcatcagttgatctgcatttgaattgt

SEQ ID NO: 764202 - DNA, 646 bp, Homo sapiens
tgatttacaatgtaaattctccaatcacaacagaattaaattataattaaacaataggacaaaatgaggaaagttccaaatatttgcaaattaaataatacaattctaaataacacataggctgaagaagaaattacaagtaacacaattgttaattaaataaaaatgaaaacaacagataaaaatttgcaggacaccacaaagcaatgctcagtgagaagtctatggctttaaaaccctatcttagaaaagtagaacaatcagaagtcaataacytacgattccaccattagaaactacaaaaagaataaaacaaaacaaaaagcaaacagaaaagggaaagcaataaaggttagagaccaagtagattaaatagatataagaaaacattagatttcttttccaaagaatattggttttattgattgtgaagtcaataaaaaaagagcaaaattaacaaaaactgaccaagaaaaagagtgaaggcacaaattgttagtattatggatgaatttagacccttagttttccccatacacaaacataactcaaaatgacttataaacctaaatgtaagagctaaaactatcaaactattataagaaagcatcagggaaaatcatggagaacttgttattaggcaaag

SEQ ID NO: 764203 - DNA, 586 bp, Homo sapiens
ttaaaaatggtgctgcagccaggcctccaagggtcaatcatgccttcaggaaaaatcagtgtggagctccattaggccttggctgtgtgaaaagatcaagctagaatatatgcaagcccaggctgtgctgcaatggctgcaatgagagtcagccagagcccacagagagcactaacatgacctagactcccctcccttgccacagtgaggctgctttccacaagccttctccacagttggagaaaaaagaggcataaaggagaagagagatggaagaaatccagagaggccgagggtttacaccacaatgttaagtcagagggaaatagatggctaaaggctagaagaaagttacctcaaattggcaagttttcctttttcttctaccaacattagmtaagggcttcataaagaattatatgggaagttacatttttgctcactgtaccatataaataatgcccacctctctaaaattgtagatttcattcatatcagtttatatttatgaatttcctattaggtgtaataacaattatatctccctctgtggtgcctgtcatgtcagtctgcagggaaacctctc

SEQ ID NO: 764204 - DNA, 645 bp, Homo sapiens
tcagaattaagacccaaccccccagtgaggtacagaagcttatctaccatcacatcttgatgttacagaaagaatggggacttggagctgggtgtggtagctcacgcctgtaatcccagcactttgggaggccaaggcaggcggatcacttgaggtcgggagttggagaccagcctggctaacatggtgaaacccccatctctacacaaaatacaaaaattagccaggcatgatggcaggtgcctgtaatcccagctactcaggaggctgaggcaggagaatcacttgaacccaggaggcaaaggttgcagtgagccgagattgcgccactgtactctggactgggtgatagagcgagwacctttctcaaaaaagaaaaagaaaagaaagaggaaagaaagaaagaagacttggatcctggcaaaagagattatgggaggggggtggaaaggaattctgttaaggggcaatgaaccaatagggaacagagattaacttgtaaataggtctctttgacagtgaaaggttctggtctgctcagttgtggttacattcttactcttgtagtggggaagaaaaaacagttgttttccttgggtctgcatcttaggcagataggaacttcagctttcccaaagaagttgt

SEQ ID NO: 764205 - DNA, 530 bp, Homo sapiens
attaggttttaaagaatattttattatacaaacttttcccatagttttctcccctacttaatgattccttactacatcgttccataaataacctttccacatctgtaatttgaactaactttttgttttttgtttttkgtttttgagacggagtctggatctgttgcccaggctggagagcggtggcgcgatttcggctcactgcaagctccgcctgccgggttcacgccattctcctgcctcagcctcccgactagcagggactacaggcgcccaccaccaggcctggctacttttttaaaattttttttgtagagacggggtttcaccgtgttagccaggatggtctccatctcctgatctcgcgatccgcccgcctcggcctcccaaagtgctgggattacaggcatgagccaccccgcccggcctgaactaatttttggataacttctgaattagacaaaattattctttttctcactaataacataaccctttctggcacattttgtaaacagaattatatgtta

SEQ ID NO: 764206 - DNA, 548 bp, Homo sapiens
tatgtctgatatttgttgtttgtctttaatttaatgctaatgtctaattatgtaaaatattttactgtccagggtttcaagtgccaaacttaataatttttctcgcttggagccaacacttaaccttctgggtgtgcagtttgatcagaatgtggcccatggcatcatcacagaaaagcctggggtggcaacaaagctgttatatcaattgtacattgctcttcagaaaaagaagaaaagtggactgactggagtggagatgcaaaccatgcaacgtctgacaaatttaagacttcaaaacatgaaaagtgatacttttcaagaggtaggtacataaaaaagcataataagcatgtcayagtgtaaaatttgataaagagaaatgacaatgatattgaattctcaaagaagcctcattaggcatatatatcctttatgtatgttactggccatacttgggttttattttatattaataatttgaatttatttagccatttttgatgtctctctctatcctatccatattgccaatagcttatcaaact

SEQ ID NO: 764207 - DNA, 639 bp, Homo sapiens
actatttttatttaagatgcatatatgcctttttcctcaccttttatgaaaattaaagtggatcatagacttaaatgtaactcatagcactataaaactttgaggaaaaaaatgggagaaaatctttgggttctatgactaggcaacaagttcttagacttgacaccaaaagcatgatccataaaaggaaaacttgacaaattggacttcattaaaattaaaaatttttgctctgcaaaagacaaaactttataagttggacttcctcaaaattaaaactttttgctttgaaaaagatgraaggatgtatagaataggagaagatatttcaaactgcctatcccacaaaagactaatatctagaatatatgaagtattctcaaaattcaacaataaaaaataagccagttcaaaaataggcaaaagatatgaaaagacatttcactgaagaggatatttagatgacaaatacacaagtaaaaaaattcacccttgttagtcattagaaaatttcaaattgaaatcacaatgatatatcattacacacctataagaatggttaaaatttttaaaaaaatgaaaacaccaaatactggcaaggatctggagaaaaccactattcattactgctgagaaagg

SEQ ID NO: 764208 - DNA, 526 bp, Homo sapiens
tcccccagcagtgccggcccaccggcggtgcgctccatttctcgcccggccttaactgcctgcccacggggcagggctcaggacctgcagcccgccatgcctgagccccccctccccctgcgtgggctcctgtgcggcctgagcctccccgaggagcaccgccccctgctccatggcacccagtcscatcgaccacccaagggctgaggagtgcgggcacacggcgcaggactggcaggcagctccacctgcagccccagtgcaggatccactgggtgaagccagctgggctcctgagtctagtagaaccttacagaacctttatgtctagctcagggattgtaaatacaccaattggcactctgtatgtagctcaaggtttgtaaacacaccaatcagcaccctgtgtctagctcaaggtttgtgagtgcaccaatgggacactctgttatctagctactctagtagggccttggagaacctttatgtctagctcagggattgtaaatacaccagtcggcagtct

SEQ ID NO: 764209 - DNA, 617 bp, Homo sapiens
tctatgcccttcccaaagagcaatcttctcagcaacctagatatcatgaacttcaatcccccaggtcctactgactaatagtagagctgggaacctcttattaaattagctctggtcatcaatttaaacatactactaggatgacaataagcagaactgcctcagaggccaccgcatggtatgtatccaccccttagaagcatgctcagggattcagtgcttccagtagacacagctgcaggacatatattctccaagctataggggctttgtagaatcttataatcttcctaatttgaataactctagagtgaaacacattgaatatatcaggctccaattttgttggcaataaagctctctcagaattccaactgtagccttgcctgctgtattgggttgattaggccgttttgcctcaaccaaaataatccatgtttttccataagttgttaagawaatcactctgaataagatcatatcctgcttggacttcccacttcctgagatattgttaccaaatacaattagttagttctgtaaaatggatataggaaggcagacagctctctggagaagaaacttgagtttactaaaagaacatatttgaaacagaa

SEQ ID NO: 764210 - DNA, 632 bp, Homo sapiens
ggattgtgtctcttcaaactttgttgcactatcagaagggaggatgttaatgctccttttctctgtatgcagttagatagctgcaagttcagggaagagaggaggtaagtgttgagagctgtatatagaaaattagtatttgaaaaatacaacgggaataatctttacttcatacttggaaagagaccattaaaaagcattcaaaagtcttgaacaattcaagtttgatttgtccatttagtgaatcatgcttgaatactacgtgcaggattctgctaatcttggaagttattccagtgagaaagacagwtatgacccctggactctagggtgttacacttatctgctacactttctcagtaaagtccagtttttgcttttggcatcatttaaaactgaaaacctcagaatgtactgaagtttaactgttaagctcttctctgattatgttgtgaattatttgttaggtaagatccctctcctctgaaggtgaaaggtgctgttctcctgaagggagtggccattcctattgtcaattgtaaagaaattaatcccagggcaggaaatgaagtcagggagacagatgctggaccgtagtgaaggagaaatgcttctctgggggccttaggaga

SEQ ID NO: 764211 - DNA, 569 bp, Homo sapiens
ggtggtccatgcctgtaattctagcacttgaaaggctgagatgggcacatcacttgagttcaggagttcgagaccagcctgggcaacatggcaaaaccccatctctacaaaaattagtcaagcgtagtgacacttgcctgtagtacaagatccttgggaggctgaagtggaaggatcacctgagcctgggagttggaggctgcagtgagtcaggattgcaccactgcactctagcctgggtgacagagtgagatgctgtctcaaaaaaaaaaaaaaaaaaaaaaaaaaacaccaaaagatatcagtttccaatgactggaacataaaaatattaccttcctacaaaaagtttttaaagatatcatttagttaagaacactgacataaggagattatcctgaattatttayttggacttaaatccaataacaaatgttctttaggagagataagatggagacattatacacatagaagacgaggagacagaggcagagataggagttgtgtagccacaagcaaaggaatgctgcagccaccagaagatgaaagaggcaaaaaacagatta

SEQ ID NO: 764212 - DNA, 407 bp, Homo sapiens
atacgtgtacatttgttacataggtaaattgcatgtaacggaggtttggtgtacagactattttatcacccaggcaataagcatagtacccaataggtagtttcttgatcctcaccctctaacaccctccactcaagtcgacccagtgtctgttgatctcttctttgggtccgtgtgtactcaaggttaaaatcccacttataagtgagagcatgcagtatttgatttactgtttctgcattaattcacttacgataatggcctytagcaccatttgtatggcttccaagaacatgatttcattattttcctggccgtatagtattccatgatgtatatgctatgacattttctttaaccattccactgttgatgggaatctaggttgattccatgtcttcactatt

SEQ ID NO: 764213 - DNA, 602 bp, Homo sapiens
aataaccacatcaagttaaatgacatatttgtctctgcatgtatttatcctttgtgttacaaacaattcaattatactcctttagttattttaaaatgtgcaattaagtttattattaactatggtcaccccgttgtgctagcaaatgctaagtcttrttcattccttctattttattgtgccattaaccatgcttactggtccccacctcctccaacacacacacctccattattcttcccagccttggtaaatatccctatactctctatctccatgaattcaattattttaatgtttagcttccacaaataatatctaaagggcatatagtatgtaagtgtgagaacatgtgaagtttttcttctgatgcttggcttatttcacttaacataatgacctctagttctatctatattgttgcacatgacaggatctcatttttttatgagcgaatagtagaattccattgtgtatatgtatcacagtttctttatccatttgtctgttgatgaacactagggttgctccaaatcttggctactgtgaaaagtgctgaaataaacatgggggtgcacatacgtcttctatattatgatttt

SEQ ID NO: 764214 - DNA, 591 bp, Homo sapiens
ttgttatagatgattgttactatgttgaggtatgttccttcaatgcttagttcattgagggtttttaatatgaagggatgctaaattttatcaaaaggctttttttagtctattgaagttatcaggtagtttttgtttttagttctatttgtgtgatgtatcacgtctatagacttatgtgagttaaaacaatgttgaatctcaggataaagactacttaattttagtggattagctttttgatgtgctgctggattctggttgcaagtattttgttgaggatttttgcatcagtgttcctcagagttattggcctggagttttttttcyttttcttatgtctttgccaagttttggtatcaaggtgatgttggcgtcaatgaatgaattacagaggagtatcttctcaattttttggaatagtttcagtgtgaatgatactagctctttatgttttgaagaattaagctataaacccatgtggtcctgagctttttctggtccgtaggcttgttattactgattcaatttcagaacttgttgttggtctattcagggattcaatttcctgctggttcgaccatggaaggt

SEQ ID NO: 764215 - DNA, 557 bp, Homo sapiens
tcatgtgaattcctactcagtgccagaccatgttgcaggaagtgtaaatatagattgatcaagacaatcagaaaaactgctcttgacatgtgaattagggaaccatatgattacatacagacatatgtgtaatatcagacagtgattagtgctttgaagtaaatgaatccagaaagaatacctggggatccgtgtgaggtgagagtagagtgttgcagsggattgtcagggaagatttctcttaggagacagcatttgagaagtgcaagtgcctgtgggccaagggttccaggcacagggcgcagctagtgcaatggtcctacggccagaaagaattcagctttggttcatttttggaaaacagtctccagtgggtcatcccctcagagctgctccagtttccagatgagagagaatggtgggcaggatgaaggtggggagcacggaggtaagtctgagtagggatatattttgacacaagacttcctattgtatttgaaatgggctcagactgaatgaaatatctcaaaaatgaatacttgatgggcagcctgaga

SEQ ID NO: 764216 - DNA, 619 bp, Homo sapiens
attccataaatatgtacaattattaaatgtaaactaaaaataaaagggaagaaaagaaatctataaacttggaacatccatagggtagatctcatctatatccttcatccataatcaagttttttatagaggagaactccagagaacttccttcatttatctctacattttcggattatgcttttctcctttcgttaaaaatcacgtctacgatactttataagttgtcctaaaataaattctttctctatgttcaatcaaaaagaaaagatttgacttaatagtaggtataagaggtagagaaagttaatagaaaacaaaggaagatttttattaacctactcaacaaatccatatatttaaattagacatcctatctgtaaaggggcagaatatttaatgaccatcacttaaattcattatckgtgaaatattacttaactagcacattttcatcaaaaaattctctgagtgagcattgtgcttccgccttagatatatgacatgataatttccctttttttgtaagacattttatactacttttatattatccaaccaccttctacagaaaaaaagatacgtgactaaagtctatactttgtctgatagcattatt

SEQ ID NO: 764217 - DNA, 679 bp, Homo sapiens
actaaaaatcatcaagtagtagaacagcctgaaggagaaaaaactatacagtggaaaaatcaccaaaggataagcatttggtcaaaagaatattacagtcacttaaagaatattttaacattttgattattccaatacccgggccagatctgggacctgcctccatcttttttgcagttcagatagcataaagtgtgagtcaatgcctgataacataataatggtaccatctggtcaggttctacctgactcttgggcacattcttgaaattataatacttcaatttccagttataagttaccatgtgtcatttggttacacaacacaccatactctttttttatggacccacacgtgcattgtcactcatcattcactgaagatgtttacatattttacaattttatttatgttaattattttttccaactcaaatgttattcaatcwtcaaataatcttcatccatttcttgttttttcttcccctcttatacctcttgtgaatcttattcactttaaaatcccctaaatcacagctcctagattggtaaaggcatccattgctgggaaggtggtgcaccccacctccatgagaaggaagttcttatgctgaggaatcttcacctggctgttcatttgtgtgcgttaagtgtgttgcagtctccgaattctgagcca

SEQ ID NO: 764218 - DNA, 550 bp, Homo sapiens
tgaggaggaggttgtggaaaccctcaacttatagctggtcagtcagaagtaccataggcacagtcttgcaactggcttctaaatgtgggaaagtggagagggggtagtcctgtgagatttaattmtttagctgtgaggtctgtgctaactctgggtagctagtattagaaatgatttaagtgttgaataccagttgacgtctggagaatcagtcaactggtggttggtgctaataatcccacagaacaaagtccacatacattatcaaaatgattacaaagatggaattattcttatgactaaaataagtttaaaacaaaaaaagtactatgggtttaattttatttcatattctctatcctaattttatttttaagcctccaagagttttctatttcttaccttcctaaaaattctgccatcttgacatatccaaaactaaaacagaaaaagacaaaatcttcagtcatgggctgtgcaggattcaggtggtgaatgactgattattgtcaagtatggtaagtagtttcaaaatccaatatatataaac

SEQ ID NO: 764219 - DNA, 550 bp, Homo sapiens
tgaggaggaggttgtggaaaccctcaacttatagctggtcagtcagaagtaccataggcacagtcttgcaactggcttctaaatgtgggaaagtggagagggggtagtcctgtgagatttaattctttagctgtgaggtctgtgctaactctgggtagctagtattagaaatgatttaagtgttgaataccagttgacgtctggagaatcagtcaactggtggttggtgctaataatcccacagaacaaagtccacatacattatcaaaatgattacmaagatggaattattcttatgactaaaataagtttaaaacaaaaaaagtactatgggtttaattttatttcatattctctatcctaattttatttttaagcctccaagagttttctatttcttaccttcctaaaaattctgccatcttgacatatccaaaactaaaacagaaaaagacaaaatcttcagtcatgggctgtgcaggattcaggtggtgaatgactgattattgtcaagtatggtaagtagtttcaaaatccaatatatataaac

SEQ ID NO: 764220 - DNA, 582 bp, Homo sapiens
aaattcaagctggctgcaggaatttgcataagtatcaaggtgcctaatgttaatccccaagatcatggagaaaatgtctccaggccatgttagagaccttcagggtagccccttccatcacaggcctggagtcccagaaggaaaagtggttttgtgggccaggccgaggtccctgtgctgtgtgcagccaagagacttggtgccctgcattccggctgctccagtcgtggctgaaaggggccaacataaagcttaggctatggctttaatacagaagttattaagaaattattttcggacagctagaaagggtaagagttytcggtggaattttcccctaataaaaagcagcctcaaaccattacttctctaacagaaagcagccggaagagtaaggcatagaaatgcaaactagatgcttatatatgtaaatgctggcagctgtacctgtaaaccaggtatattcaatatggtagttcttgctctctttactttgtcaccacgtgtactggtatcatggcagccgccaggtaaaaccacgtgtgcaggcatcatggtgactgccagaaagaggccacattt

SEQ ID NO: 764221 - DNA, 612 bp, Homo sapiens
ggccaggccgaggtccctgtgctgtgtgcagccaagagacttggtgccctgcattccggctgctccagtcgtggctgaaaggggccaacataaagcttaggctatggctttaatacagaagttattaagaaattattttcggacagctagaaagggtaagagttctcggtggaattttcccctaataaaaagcagcctcaaaccattacttctctaacagaaagcagccggaagagtaaggcatagaaatgcaaaytagatgcttatatatgtaaatgctggcagctgtacctgtaaaccaggtatattcaatatggtagttcttgctctctttactttgtcaccacgtgtactggtatcatggcagccgccaggtaaaaccacgtgtgcaggcatcatggtgactgccagaaagaggccacatttgcataataaaagaccaagatgggagggccagtcatttcatgggctatgtaaatggcacacctggtcaaaccaacccctggaccctatgtaaatcatccaccacctcaagcctctgtacaaaattgattgcctcccactgcaaactggaaaccctctcgggcaaccggctttctcagcatgaggacg

SEQ ID NO: 764222 - DNA, 626 bp, Homo sapiens
ctttaagaaagttaaataatagtaatgttaacagtatttatccttgaaaaacttgacacatttcatcagtgcacaaatactgtctatcaattgtaagaaactttgcttaggataaatgtgaggtatttcttatttaatgtaattataagataatttcagattcattgcaaaaaatcaggattaccttaattttaagtaattagtgaatttaactgataatgcgaaaatataaaacttttaaacaaaartaatttataatttaatagtactttataaattgtttttgatacttgttactgtaattttctgaggtacctatagcaaacattgttattgcaataatcaactacattacactattaactatttaaggatggcgaataaatctggatttgctatgctggttagcatagcaaatgctatcgataatcttatgttgagtacaaaattgtggaaaataatttcagcagcacaaaagcgtatcttagtgaacaataatatctatttcattcaggcaaattatccaatatctgtggtttaaagtttcatggtctcagtgaaaatctcacacttcagtacctttgtgtctatagctttaaattaatatttattgcccttctagaaaa

SEQ ID NO: 764223 - DNA, 470 bp, Homo sapiens
gtgggaagctaaccatcttctaaagctatttctagatcatctatttttaaccttatatgacttgtaagcccaaatagaataaaaatgtatgctcgtattatatttaatgctgataatgcagaatacaaagctgtttttttttttaaattaaaccaacaatatttaatcttatttaccaaagatttgaactcaggaaacatttgtgttagttttttatttctgagagtttgaagaatacttaagttatataagtgctcttttyctaagccaattttagaactccaagaagggattttacaaattaatttggtgatatcctccagaggtagaaaaatataacatatatctaacatgcatatctagacatacataaacacagacagatgcaaaaagaggtcttacagctgtcattattcaattttagtcctgggacagtaaaacatagcaatacaagtctgaaactcactgat

SEQ ID NO: 764224 - DNA, 624 bp, Homo sapiens
ctttgcctaataacaagttctccatgattttccctgatgctttcttataatagtttgatagttttagctcttacatttaggtttataagtcattttgagttatgtttgtgtatggggaaaactaagggtctaaattcatccataatactaacaatttgtgccttcactctttttcttggtcagtttttgttaattttgctctttttttattgacttcacaatcaataaaaccaatattctttggaaaagaaatctaatgttttcttatatctatttaatctacttggtctctaacctttattgctttcccttttctgtttgctttttgttttgttttattctttttgtagtttctaatggtggaatcgtargttattgacttctgattgttctacttttctaagatagggttttaaagccatagacttctcactgagcattgctttgtggtgtcctgcaaatttttatctgttgttttcatttttatttaattaacaattgtgttacttgtaatttcttcttcagcctatgtgttatttagaattgtattatttaatttgcaaatatttggaactttcctcattttgtcctattgtttaattataatttaattctgttgtgatt

SEQ ID NO: 764225 - DNA, 544 bp, Homo sapiens
aacaattcaaatgcagatcaactgatgaatggttaaatgtaatgcagaatgtccatacaagtgaagattgaccataaaaggaatgaagaagtacatggtacaacatctatactttcttccaagataaacatggatgaacctgaaaatattaagtgaaataaaccagtaaaaaaaaaaaamaaacctagatattatataatttcatttatatgaaatgtctagaatagtcaaatgtatagagatagaaagtagattaaaatgcttaggactgagggatgggtagtctgcgggataggaggtgatacctaaagggtacaacatttctttttgaggtgatgaaacgactctaaaattgaccattgaggtgatggttgcacatgtttgtgactatacagaaaaaaaacactgaattgtacatttaaataggtgacttatacattatttgcactatatctcaataaggctgttaaaaagttctttatacatggttgaaaaaatttcattgaatatatttataatagctactttaaagtttttatttgcc

SEQ ID NO: 764226 - DNA, 622 bp, Homo sapiens
cttccttttttccctgccaacaagtctctagaaatggaaggagggaaatactcagataaggtatcccacgcttatgtattatttgtttcttacactgttctgtaagttccaccttctccactaggattttgaagtgaatttctggaataaaattctcactagacacatcttctttacagctataagyagcagacaaatttcagaatttcatcatatgctttttggattagctatttacacaagcattcatggggtggctgaagtacatttaatctaaatgtcatgtagcaatcaacagttttactgcctaaataattcctttatagctcttttcttattcttctccaatggcatttttaacttgtgtcttatcttaatgttaactatgtgtctatcttttcaggttttgagctccttgaggctctgtgtcttattgcccctgcatcccttgcatagttccttgaatataaaaagatgctcaataaatatctattggaaatatgaaaaatatcaaagttagtacttcagtattgtctttatcacaagttaatttctgtcactttctttgttctctgtcagctagaatattattagcaaacagtttggcattatttagcaacac

SEQ ID NO: 764227 - DNA, 684 bp, Homo sapiens
caatgaggactaaaccttaatttgattacttatgagcgtcttaaaaattctagcttaggcaacttgggaaggagtaaaatcatttctagattctctgctctgagaatgaaaactttctatattctaaactcaaaaaaggaaaagatttgctgggtttttttggctttaatctattctaatcaatccctgataacttgcttttataaccatgcttctgaaaactacccagttggtgacagtgccacatttctgaaggtcagccaatcagcaatagtgagtgacttttagagacacttgtgcgtctaaagagatacttctacttttagagacacttccatggataaagatcaaccaactccaaatcactccctcttctgaaagtccatcaattcctgaaccccagtttccccaaaaccctgtaaaaaaatcagcaatttgtattkattggtgatgacatgctgtctttgtccactcaggttgctataacaaacgacagtaaactgggtggcttttaaacaatagatatttatttctcatagttctacaggctgcaagtctaagatcaaggtacctggagacgtggtatctggtgagggctgctctctggttcataggtggcgcattctcaccatgtcctcacatggtaaaaggagcaaacaagcttctgtgggcctcttttatgag

SEQ ID NO: 764228 - DNA, 573 bp, Homo sapiens
gagaggtttccctgcagactgacatgacaggcaccacagagggagatataattgttattacacctaataggaaattcataaatataaactgatatgaatgaaatctacaattttagagaggtgggcattatttatatggtacagtgagcaaaaatgtaacttcccatataattctttatgaagcccttakctaatgttggtagaagaaaaaggaaaacttgccaatttgaggtaactttcttctagcctttagccatctatttccctctgacttaacattgtggtgtaaaccctcggcctctctggatttcttccatctctcttctcctttatgcctcttttttctccaactgtggagaaggcttgtggaaagcagcctcactgtggcaagggaggggagtctaggtcatgttagtgctctctgtgggctctggctgactctcattgcagccattgcagcacagcctgggcttgcatatattctagcttgatcttttcacacagccaaggcctaatggagctccacactgatttttcctgaaggcatgattgacccttggaggcctggctgca

SEQ ID NO: 764229 - DNA, 630 bp, Homo sapiens
tttataaaacgtaggattttactcctgtggcaaatgaattctcctttccctaactgaaggcaaactaaaatcctgcctattttttttgtaagcttcaaaattgggaaagtggtgacaatatgaacttatctcgacaaatgcccaagtcctaaatcatcacttttgattttgacctggcaagaacataaattaaagaaaaagtaagccaagaagaacaattaatattttcatgaaatggtgaagacaggcacagaattgtaagacaacagttccaagtgaagacagtactttttattttgctttagtgtgagtagtataacagactatgctaccagactaatagttccatgtataatactagttctaatgataattttactagttttaagatttcatcatagatttttacatccactctatttcaaaatagtagtcaaaccagaatcaatatgtactcatggaaatatcagtrattttttttttttcaggagatgaaattttcctgttcaagaacatataatacactttaggtccaggggtaaaaatgtggtgtaggatgaatttttcttggtggatctggaggaatggggagacgcttaaaaattagctaagaaaactagagtatattat

SEQ ID NO: 764230 - DNA, 644 bp, Homo sapiens
tcttctttggagcaacattcatccaaatcttttgcccatttttaaattgggttatctgcctttttattgttgaattataagttgttagacatattctagatacaagttccttatcagatacgtgatttgcaatatttgctcccattctgtggattgtcttttcactttcttgatagtgtcctttgaagcacatacatttttaattttaaagatctctaktgttttcctttggttgcttatgctttgggtgtcataagaaactattgcctaatccaaggacaggaaaagttacacccgtgtttagttttagcacttacatttaatactctgatccattttgagttaatctttttcataaggtatgaggtagggatccaacttcattattatgtacgtgtttatccaattttccattaccatttgttgaaaagactattctttcccattgaatggtcttggcatccctgtcaaaaatcagttgaatgtaaatttaagagtttatttttggctctcaattttattccatcagtccatatgtctgtccttacgccagtactacactgtcttgattactgtggctttgtagtaaggtttgaaagtgaaatgtgtgagtcctccaactttgttctttttcaagattgttt

SEQ ID NO: 764231 - DNA, 622 bp, Homo sapiens
agaattaccttgcaggaaataaattggaagaaaaattgaatgcagaactatacaagtgaaatgtctcagtattataacccaagatggaaaaaccatggaaaacagtaccttaatgccatgatgaattgctagccaaatgtaacagtgamtatttcttaataattccattttcacttaaagttgaaattaggccataaatagacacattttaaaactataaagttgtacatcaaatttatgtgcatttaatctaagaaataagggataaaatttaataaaaaattattacagtgaattaataaggacatgatttttcagcttaaaattagagaacagaattgtttccactactgtttataaacacaacaaataaagtaatatctgttttgtgagagatgtttggaggaatctagtagctaagtgattatgtcagtttatttaattttgtctaagaacttcaaaatgcctgatagaatgggtgcatattgaatgaatagatgtgatctatatattatttgaagtaaaagtataagagctgagcgttagctaactgcatcaaaataaatgtaaagacccaaacatttttagttgaataaccaaatgaattagctagtctagcccc

SEQ ID NO: 764232 - DNA, 476 bp, Homo sapiens
catgagaacagcatggaggaatctgccctcatgattcaattacctcctactgggtccctcccacaacacatggggattatgggattacaatttaagatgagatttgagtggggacacaaagccaaaccatatcactgaagaatgcatgagcatttcataatagaaaaattgatcaagaagaagaaataagtagtgagyttgaagacaggctttttgaaaacacagtcagagaagaaggaaaaaagtagtatacaagaatgaagatgcctacaggatccataaaatagcctcaaaaggtcaactctgagaattattggctttaaagaggaggtaaagagataggggtagaaggctcattcaaaggaataataatagataacttctaaaacccaaagaaagacattaatgtccaagtaaaggaagtttatagaacaccaagcagatttaaaccaaagaagaggcttcaaagtcatcta

SEQ ID NO: 764233 - DNA, 614 bp, Homo sapiens
  misc_feature 1, 2, 3, 4, 5, 6, 7, 8, 9, 10, 11, 12, 13, 14, 15, 16, 17,18, 19, 20, 21, 22, 23, 24, 25: n = A,T,C or G
nnnnnnnnnnnnnnnnnnnnnnnnnctactctgaataatgctgaaatgaacatgaggatgcaattatctctttgagactgttacttcaattattctgtatatacatcagacataggattgctggatcatgtggtagttctacttttaattttctgaagacctccatactgtgttttgtttgtttgttttttgagatggagtctcactctgtcgcccaggctggagtgcagtggcgcgatctcggctcacagcaacctccgcttcctgggttcaagtgattctcctgcctcagcctcctgagtagctgggattacaggcacrcgccaccacgcccaggtaatttttgtatttgtactagacacagggtttcactgtgttggtcaagctgacttcgaactcctgacctcacgatccgccagcctcagcctcccaaagtgctgggattacaggagtgagccactgcgcctggcaactccatactgtttttaatagtgactacaccattcgatattcccaccaaatgtgtacaaaatttctctacatcctggccaacccttaccttttatttggtaatatcgtaacaggtgtgagacaatatttcattgtaattctga

SEQ ID NO: 764234 - DNA, 559 bp, Homo sapiens
agggaacataagaagtgcactttgagagaaagcctttgaaaagagcaaagaattcttattaaatagaggggtcaaattaaagacaggtacatgacagatagaagagagcaattaattaacaagtctttttcattgccagaaaagtagacccccctggaagttgtgaattagtcctaatttcaatgccatatttcttagagtygctgctgtccatcttttgtatccccaaccctgcccccaacccattattaatttctcctaattttagggttatgacaaagttaatagcacttgtttagaatctagctgtcaatttaatatgaacaacaaagacagttatttagagggcattaatcgaaaagagaatcaatacctacagggaaaatatcagatactatttaattcccaatatctaatcagtaaaaaataaaaatataacaatctggtggtcttaaaggattaatcgaaaaagcatggcatttggtcaaaaaaagaaaattggaactatgtaaaatcttattaaaacattttttgatgtttcatttggaaagaaaatggt

SEQ ID NO: 764235 - DNA, 647 bp, Homo sapiens
ccaggacatgtcacttatcatgcttatttaatcctcacaacaaccccacaaggtaagtaatgttataatccacatattacagatgaagaaattaaaacttaaagaagaaaagggaacttaattaaactaaagagcttctgcacagcaaaggaaataatcaatagagtaaacagacaacctacaggatgggagaaagtagggttcatttgaaaaagggctcatatccagaatctacaaggaactcaaacaactcaacaagaataaaacaaataaccccatcaaaaagtgggcaaaggacatgaacagacatttttcaaaagaagacacagaagcagccrataaacatgaaaaaatgctccatatcactaataatcagagaaatgcaaattaaaaccacaatgagatgccatcacacaccatcagaatggctattattaaaaagtcaaaaaccaacagatgttggcaaggatgcagagaaaagggaacacttatacattgttggtgggaatataaattagtataacctctatggaaaacaatatggagatttctcaaagaactaaaaatagaactaccctttgatccagcaatcccactactgaatagcttctaaaaggaaaataagttattataaaaaacttaatcat

SEQ ID NO: 764236 - DNA, 520 bp, Homo sapiens
ctgcctttctggatggaactgatgtacttcttattgatttgttgtacctgagcgagttagaaaaatgccacattttgagacgaattaagagtcctttattagccagtgaccaagagacagctaatgctcaaaattctctcggccctgaggaaggggcttgattaactttcataccttggtttaggaaggggagtgggggggcgggtgtctagttagaacaattttacagaagtaaagtaggcaaaaagttaaaaggataaatggttacaggaaagtaaacagttccaggtgcaggggctttaagactattacaaggtgawagacgcggggctttgggcattatcaatcagatgaattcctgggaactgcggatatagcttgccacagtatcttatcggttaattgcattcttggatgtgctgggagtcagcttgcacaagttaagtccttgaggaaggggctgccagtgaaagagccaagatggagtctgtctggttctcttagctaagggagagtccat

SEQ ID NO: 764237 - DNA, 521 bp, Homo sapiens
acaatggactactattcagccataagaaagaatgagatccagttatttgcaacaacatggatggaactggagaacattttgctaagtgaaataagccagacacagaaacacaaatatcacatattctcacttatttgtgggatctaaatatcaaaacaattgaactcgtggacatagagagtagaaggatcattaccagaggctgtgaagggtggtggggggtcagcagggggaggtggggatggtttatgggtactaaaaaaacagaaggccgggcrcggtggctcacacctgtaatcccagcacttcaggaggccgaagtgggcggatcacaaggtcaggagttcaagaccagcctgatcaccacagtgaaaccctgtctctacaaaaaatacaaaaattagccgggtgtggtggcgtgcacctgtaatcccagctactcaggaggctgaggcaggagaatcactcgaacccaggaggcggaggttgcagcaagacgagatcacgccactgcactccag

SEQ ID NO: 764238 - DNA, 521 bp, Homo sapiens
acaatggactactattcagccataagaaagaatgagatccagttatttgcaacaacatggatggaactggagaacattttgctaagtgaaataagccagacacagaaacacaaatatcacatattctcacttatttgtgggatctaaatatcaaaacaattgaactcgtggacatagagagtagaaggatcattaccagaggctgtgaagggtggtggggggtcagcagggggaggtggggatggtttatgggtactaaaaaaacagaaggccgggcacggtggctcacacctrtaatcccagcacttcaggaggccgaagtgggcggatcacaaggtcaggagttcaagaccagcctgatcaccacagtgaaaccctgtctctacaaaaaatacaaaaattagccgggtgtggtggcgtgcacctgtaatcccagctactcaggaggctgaggcaggagaatcactcgaacccaggaggcggaggttgcagcaagacgagatcacgccactgcactccag

SEQ ID NO: 764239 - DNA, 527 bp, Homo sapiens
gggtggtggggggtcagcagggggaggtggggatggtttatgggtactaaaaaaacagaaggccgggcacggtggctcacacctgtaatcccagcacttcaggaggccgaagtgggcggatcacaaggtcaggagttcaagaccagcctgatcaccacagtgaaaccctgtctctacaaaaaatacaaaaattagccgggtgtggtggcgtgcacctgtaatcccagctactcaggaggctgaggcaggagaatcactcgaacccaggaggcggaggttgcagcaagacgagatcacgccactgcactccagcctggactacagagcgagactccgtgtcmcaaaaaaaaaaaaaaaaaaaaaatagaaagaatgagtaagacctagtacttgatagcacaacagggtaactacagtgaataataacttaattgtacattcaacatagttctggccagggcaatcaggcaagagaaagaaataaagggtattcaattagggaaagaggaagtcaaattgtctctgtt

SEQ ID NO: 764240 - DNA, 598 bp, Homo sapiens
cacaacagggtaactacagtgaataataacttaattgtacattcaacatagttctggccagggcaatcaggcaagagaaagaaataaagggtattcaattagggaaagaggaagtcaaattgtctctgtttgcagatgacatgattgtataattagaaaaccccatcgtctcagcccaaaatctccttaagctgataagcaacttcagcaaagtctcaggatacaaaatcaatgcgcaaaaatcacaagcattcctatacaccaataacagacaaacagagagccaaatcatgagtgaactcccattcacaattgctacaaggagaataaaatacctaggaatacaacttacaagggatatgaaggacctcttcaaggagagctacaaacyactcactgatcaaggaaataagagaggacacaaacaaatggaaaaacattccatgctcatggataggaagaatgaatatcatgaaaatggccatactgcccaaagtaatttacagattcaatgctatcctcatcaagctaccattgacttccttcacaaaattggaaaaaacaactttaaatttcacatggaaccaaaaaacagcat

SEQ ID NO: 764241 - DNA, 616 bp, Homo sapiens
agtcctagttactcaggaggctaaggtagaaggatcacatgcgtctaggattttgaagctgcagtaaaaaactacgatcgccctactgcactccagcctaaatgacagggtaagaccctgtctgaaaaacaacaacaacaamaaataaggaaattgggaaatcacagacttgtcaggttttgaaaaccaggctttgaaactatccctcaagaacttcagttaaaatgacaccagacacaggccgggggcggtggctcacgcctgtaatcccagcactttgggaggccgaggtgggcggatcatgaggtcaggagttcaagaccagcctgaccaacaccgtgaaaccccatctctactaaaaacaaaatacaaaaaatttagctgggcatgatggcgtgtgcctgtaatcccagctacttgggaagctgaggcagaagaatcgcttgaacccaggaggcggaggttgcagtgagcagaatgcgccactacactccagcctggcaacagagtgagactccgtctcaaaaaaaaaaaaaaaaaaaaaaggacaccagacaactggtccgatgaagatctccctgccaccaagcccagcttgcactgaccaaactcctgt

SEQ ID NO: 764242 - DNA, 533 bp, Homo sapiens
gctagggttgttgagtgtgaaataattagaaatatatcgactggtctctgcactcgattccggacacagagctcctaaaacccttgtagacaggcatgccaggagaatcttttgttctaatatttggtctttgatgctggttcttgacacagagctcctaagacctttgtagtttcccatgtgatgggagcacctgacatagagcagctatattccttgggattttctgggtgatggaggcatctttktttctaatgaggtgactcttggtgggctcctggatggcttcaggatgggcagtggataccaccagatagaccaagccatggttagaagcttggaaccttcaactccaccccccatcctctggggaggggagaaatggaattaataaattatacctatgtgatgaagcctccataaaaatcccaatactatggagttcagagaacttccatttggtgaacacattcatgggcccagagggtggtgcacccaaactccatggggtagaagctcctgcactcgggatc

SEQ ID NO: 764243 - DNA, 677 bp, Homo sapiens
gctgatctcagaggtgagggcagggatccgagcctgactgcttcactgctcatccgtggcttccttttatcttcctttccagtgcagagctccaaagagtttttcaaagcccattagactgcccgatgacattcttaasagaagaaggaacagtgtttgtttagttgaattaggggaagtctcctgtggccagtgaagttttattgagccatttctagaagaactaaaaaaatcaagtgggcttctttgttttgtgctttattgtttatttacatttgcttgaaaaggtaatctgcacaggtttgatgtcagctgggaagtgggacaccattcgtaagacagacaggaggactctgggggagaaaatatttggatagacagaccacttggttgaaatggaaagagggagtcagagaatttcattatgtcagtaatgggctttagtggcactttctgagtgtataatgtgttgggtagtgaaggtttgctggggggtcgaagaagcaattgccagcaaaagcaagatgtgccagatggaaaaaaaaaaaaaacatagggagaagattagttagctttatcaataaggaaaagttgggatagaacaaaagcacaatagcactgtatcacatagccaaaattatcatagaggtatagatgtgtgtgtgcacatgtgtgtg

SEQ ID NO: 764244 - DNA, 677 bp, Homo sapiens
gctgatctcagaggtgagggcagggatccgagcctgactgcttcactgctcatccgtggcttccttttatcttcctttccagtgcagagctccaaagagtttttcaaagcccattagactgcccgatgacattcttaacagaagaaggaasagtgtttgtttagttgaattaggggaagtctcctgtggccagtgaagttttattgagccatttctagaagaactaaaaaaatcaagtgggcttctttgttttgtgctttattgtttatttacatttgcttgaaaaggtaatctgcacaggtttgatgtcagctgggaagtgggacaccattcgtaagacagacaggaggactctgggggagaaaatatttggatagacagaccacttggttgaaatggaaagagggagtcagagaatttcattatgtcagtaatgggctttagtggcactttctgagtgtataatgtgttgggtagtgaaggtttgctggggggtcgaagaagcaattgccagcaaaagcaagatgtgccagatggaaaaaaaaaaaaaacatagggagaagattagttagctttatcaataaggaaaagttgggatagaacaaaagcacaatagcactgtatcacatagccaaaattatcatagaggtatagatgtgtgtgtgcacatgtgtgtg

SEQ ID NO: 764245 - DNA, 557 bp, Homo sapiens
ggttattttttattgagttcctcatccttcatgtttctaatccttcttttgcttccagtctgttctcaagtttattccctgcattctttgtttcagaaaaattcttctattctataatttctctttgggtcttctttagagcttcagtttctccaataaaattcttctctgttcacctattgtgtccaactttatttctaaattctgtaacatatttaagatatttattttagagacctactgactgcaatatccagtcatcagtgggcctgcctctattgactgttttctttttttgattatgggtcatattttcattcttctttacatgtctcatsgtgtgtgtgtgtgtgtgtgtgtgtgtgtgtgtgtgacattttaaatgagagaccaatagggactagattctttatttttgttttatttttcctagagagaaccttccctttcttcagtgcaaaagcttgggaaagatatttttatccatatcctatcatggagtttagcagagctgagactgggagaaaagattaattaatttcagtttacttcttgct

SEQ ID NO: 764246 - DNA, 628 bp, Homo sapiens
acaaacttttgcaaaacttcctttatttcaggcattttgctaagcacaaggtcataaagtataaatgggaaaacttaaatgcatttaaaatgtggacaagacaagaacccgtcctttaggaactcacagtttcctggaccatctggggttgttggggaggtaggagaaagaggaggccacaaatgcctgctgtaatacaaagcacaattgtcaaatgtaaaaagtaagggcaaatatgtcacctaggagggagaaactagttccaagtttgggcatcagtaaagtggtcaagaataagtgtgcctctgatttggacttgaagaattcacagaatttccatagctagaaatgaggataagggcatcccaggtaacaaaatgtaagcaaaggccaggaggcaggaaattacagctgaataatctagccgggcaaatgctggtgtgtgggagtagggtagtaaaggattaggctggaaggcasgaaggagtcagagtgtggcaggcccggatgagctttttaaggagctggactctatttaataaccgaatattattgatacgaataataatagcaaatagacatggtgcttcgtttgtaccaggaattggtctgaggagtttcttaacta

SEQ ID NO: 764247 - DNA, 500 bp, Homo sapiens
gaaagtctagcaccttttaaagacctgaataggaaacatctgtcatctattgtctctaacggcagccactataagacctcaaaaaaaccttgtgtccacaatcttcttaacctgaatatttcctttctacggatcccaggtttttagacaaactccatcaattgtcagaaaaggtttaaatttacctatagcctggaagcccccctcccaccccctacaccctttgagttgtcttgcttttytggaccaaactaatgtatttcttaaatgtatttgattgatgtctcttgcctctccaaaatgcataaaaccaagctgcaccccgaccaccttgggcacaagttctcaggaccttctgaaggctgtgtcacgggccatagtcactctttggctcagaataaatctcttcaaatgttttgcagggtttgactcttttgttgacactagtggctttggctttgtgacactacaagaggcttgagagactgcaagagatgcta

SEQ ID NO: 764248 - DNA, 650 bp, Homo sapiens
gccaattcacagtctgcattttaacagctgctttgggggttgggggatccatgccagagtctgaaaagcccagccctggtaaatcaaggaaaagctctgtccaggagccccacgccaagtctccctgtaataagtagctgctgatgaatgaatgcacattttacaggttagtaagaagaagaggaggcttcattttgtatcatttggagagtgatgagtttcagacagtgagtcctgaaaatgccatggaattcaaggctgactgcagattgtacactggacacagcctcaagacatctagggtragaaaacctgcaaactgcatagccaggcagcaagagtgactgcagatgtggggatactcatcacataaataaacaagtcaggggtgtggatctttatctgggtggaggcattgggcagggtggtaaagttggttttagatattctgagtttgagaaactcatggcacttccaagttgcaatgctgattgttccatgattcatgagatagcatgtgaccttggcaaatttcttaactcctcaggaattctcatcctcatctgtgcaatgtgaacattcacatcagaaggtatctacaactattaagtgagacaaagtacaggcatttttcaagcctggcacaaaac

SEQ ID NO: 764249 - DNA, 611 bp, Homo sapiens
tttttctagtctagggtcttgcagactttgagaattgcatttcctgttggaacccgggagtgcagaaaccaccttcctcccttcactcctcagcactcccgttcacaggctgtttacatttttggccatgcactggccaaggccacctgtggtctctccaagatacagttgaccaatgttggcccttacaaaataagaggacagattgtcttctatgtgtgtcctgagaatcaraaatatatctatgatgctagatcacacacactatgttttgttggttttgctttttttttttgagggttcatatatcacatcgatgtatgcaaatattttgtatttctgacaattcgcagctctgtgttggtacacatgaaaacatcctcccacttgaagcccactgctcagctgcagatgcctgcttagaacctggtgccccagtgataacacagagcacccagtgagagcccattctcccagcagaagctcctgtaaattttaattttaccttaaaaatgctgaactcttatttaatcttctttgtttaactttcccttggacaggcagagcccatgttgtggtaaagtagagccttgtgaggcttctattgggga

SEQ ID NO: 764250 - DNA, 611 bp, Homo sapiens
tttttctagtctagggtcttgcagactttgagaattgcatttcctgttggaacccgggagtgcagaaaccaccttcctcccttcactcctcagcactcccgttcacaggctgtttacatttttggccatgcactggccaaggccacctgtggtctctccaagatacagttgaccaatgttggcccttacaaaataagaggacagattgtcttctatgtgtgtcctgagaatcagaaatatatctrtgatgctagatcacacacactatgttttgttggttttgctttttttttttgagggttcatatatcacatcgatgtatgcaaatattttgtatttctgacaattcgcagctctgtgttggtacacatgaaaacatcctcccacttgaagcccactgctcagctgcagatgcctgcttagaacctggtgccccagtgataacacagagcacccagtgagagcccattctcccagcagaagctcctgtaaattttaattttaccttaaaaatgctgaactcttatttaatcttctttgtttaactttcccttggacaggcagagcccatgttgtggtaaagtagagccttgtgaggcttctattgggga

SEQ ID NO: 764251 - DNA, 611 bp, Homo sapiens
tttttctagtctagggtcttgcagactttgagaattgcatttcctgttggaacccgggagtgcagaaaccaccttcctcccttcactcctcagcactcccgttcacaggctgtttacatttttggccatgcactggccaaggccacctgtggtctctccaagatacagttgaccaatgttggcccttacaaaataagaggacagattgtcttctatgtgtgtcctgagaatcagaaatatatctatgatgctagatcacacacactatgttttgttggttttgctttttttttttgagggttcatatatcacatcgatgtatgcaaatattttgtatttctgacaattcgcagctctgtgttggtacacatgaaaacatcctcccacttgaagcccactgctcagctgcagatgcctgctkagaacctggtgccccagtgataacacagagcacccagtgagagcccattctcccagcagaagctcctgtaaattttaattttaccttaaaaatgctgaactcttatttaatcttctttgtttaactttcccttggacaggcagagcccatgttgtggtaaagtagagccttgtgaggcttctattgggga

SEQ ID NO: 764252 - DNA, 572 bp, Homo sapiens
cccatttgtcccctatagtaatacattctccctgtttttttggtcatagtctgttcattttgcttgcaccccatgaaacttgagcatggactttgttgtgcactttctaagctctggagacccctggaagcacaggagaagggaaggcctggtcctgctgctgagtgaagccgggatgggcgtcgcttgcattgyctgagcttgactcttggctccttcacaccagatcacttggggaaaaatcacttactctttcttaatctcagtttctcatccacaaagtagggttaataatgttactttttaaaaaaggctttaaggattaaatgacatagtatgtgcaatgtccttagcaggatgcctggttactgtcatttctctttcctttcctgcagtctaagggagaagaaagccaccgaacaagcaactgcaatattgtaccataagaacaagggcagcgggcttatcactgctaccgagaaagcctgtgtcatggtgcgtctgttccatatttcagcgatcccagaaatcttcatgaaagaaggggcagccatcttgggaaccaaaagatg

SEQ ID NO: 764253 - DNA, 572 bp, Homo sapiens
cccatttgtcccctatagtaatacattctccctgtttttttggtcatagtctgttcattttgcttgcaccccatgaaacttgagcatggactttgttgtgcactttctaagctctggagacccctggaagcacaggagaagggaaggcctggtcctgctgctgagtgaagccgggatgggcgtcgcttgcattgtctgagcttgactcttggctccttcacaccagatcacttggggaaaaatcacttactctttcttaatctcagtttctcatccacaaagtagggttaataatgttactttttwaaaaaggctttaaggattaaatgacatagtatgtgcaatgtccttagcaggatgcctggttactgtcatttctctttcctttcctgcagtctaagggagaagaaagccaccgaacaagcaactgcaatattgtaccataagaacaagggcagcgggcttatcactgctaccgagaaagcctgtgtcatggtgcgtctgttccatatttcagcgatcccagaaatcttcatgaaagaaggggcagccatcttgggaaccaaaagatg

SEQ ID NO: 764254 - DNA, 660 bp, Homo sapiens
tgagacaaggaagccgcacgcagaggtaggtgagggctggggaagccagggagccgagcgtgtctctgaaggggcaggagaaatggaccccatggcaaatctcatcaacagagggagctctcctctgggtctgatgagcacgaggccaccagcaaactttaaagggcagtttcragagacttgtgaccctgacttcaaggagttcaagacgtcagggttggtgaggacttgcaaagagggggcaggccaccctccaggaaccacgggagggagtggggtgcagcctgtgggtctcccggaagctgtcagggtgagagaggcctctttcgggatggggattcctggctgatatgaaggcctcagtagacagaaagagtaggatgcaagaaatctaggggaaaatgaactaagaaggttttgatgacagagaacagggtgggcttagagaaaaaggaaagaacagggtgtgatgaagtggtaggaaaagagaatcagactcatcaatgcagaataacaagaatgtacataaggggaatgagaaggaggctaggatgaacatcctggacctcagcagaggtaaagggtgaaagttacagttatgcaggatgaatgaacctggagtctaatgagggatccacagggggatctgccatgtaccat

SEQ ID NO: 764255 - DNA, 629 bp, Homo sapiens
  misc_feature 626, 627, 628, 629: n = A,T,C or G
ttgctctgttgcccaggctggagtgtagtggcatagtctcggctcactgcaacctccgcctcccaggtgcaagtgattctcctgcctcagcctcccaagtagctgggactacaggtgcacatcaccacgcccagctaatttttgtatttttagtagagatggggtttcactatgttggccaggctggtcttgaactcctgaccttgagatccacccaccttggcctcccaaagtgctgggattacaagcatgagccaccacccccggcctacattctcatgttttcaagttgataacactttgatattgtctatagtatattgcttaagaaaacttattcacaaagaattggccaaatgtatcagtcagttaacattttatatatatcaaacatacaagcttaagagtattaattattwaaaacatttatgtagaaattttttcaaaagggaaatgaaagattgcagatatttatagaaatatttggtggctttttgattctagatatttatggaaatatttggtggctttttgattgcagatatttatagaaatattttgtggctttttcagaatcctctcaaaagggatttactaccataaactagaacatattattgttagtnnnn

SEQ ID NO: 764256 - DNA, 525 bp, Homo sapiens
ctggtcctgcagctccttgttggggatccactttcctctctgagcaggctcagcaccccaggacaagttagaggggggaggggtgtgtgtgtgtgaacatgcaggtgtgtacacatgtgtgtgactgtgtgtgttcccttcaaagcagagaaacctctgcaccagcctagatcaagatgagagtgctggctttgaacagaatggaggggcttcttctggagccccaaagggctcagaggatgtgggaattcaaggttttcaagtgcgttgacccaaatatcccctcctgagtcttggcgcctgatttcgtcgaccaggccctgttgtggagtgttcagccttttctgaaactctgattctgctacgtcctgaacctrcacctgaacctccatttttctgcctgctgagcataggggaggagagtcccttcgtatgagctggagcccctctggccttcacacttggctgccaactgtgcagcctgtccctgtctttctcccaagcgttgaagcccctggggaatct

SEQ ID NO: 764257 - DNA, 497 bp, Homo sapiens
caaaaaaaagaggtagggcctttggggaactgattgagtcatgaaagtccatcatgtaacaagttggttgatagtgttgttgatggcatttttgtctctttgttctattagttacaagatgactactaaaatctacaaagttatagagatttgtttatttctcccttcagttctgtaagtcagggcttcttatattttgaatcrgttatttgctgcttatgtgtttatggttgctttgtcttcctgataatttgtcctctttatcattgccaaatgtccctttaaatccctattaccatttagttttctacatctattttattacctatattgtcactgtagctttttgctcagtgtttgcatgatacatatgatacatatatttctaccctttactctgaaattatgtatttcttttttaaaggggatttctgtcttcattctttcctttttgtgtgtgtgttttgagacagggtctcactcttttacccaggctg

SEQ ID NO: 764258 - DNA, 539 bp, Homo sapiens
gtacaaattgaaatcttattgcaattggtagacaataggatttttaaaggtctgagaagaggattaccatatggttacgatattacagtctgatttaagcaattctgtcttcttgtaaggcttgctcatgaaatatctattttacatgtggtacaaaccccaactgggattgaaaaacaacaacaacaagaatttgacattcctcaaacagtactttcttattaatcaacaacaacaattaggaaatgtttcaagtaactttaatctctgtgcttgaatacacattgttcattttcctatgtcaacaaatataggctgatgttttmgaacagatttccatatgctaatttatctctttccttttctgaaagattgtctttcctgactgttaattccagctgatggaatggttttgctttttattctctgcaaaataatgcactgttgcaaagtgatttctaataaacaatatctaggaaagagctacaatactgattgtttttgacaaccaaaaatgcattattaatgaaataatgcca

SEQ ID NO: 764259 - DNA, 552 bp, Homo sapiens
gtaacaaaatatcatatgtacccaataaatatatacaaatattatgtttcaatttttaaaaagaacctagatccttgctttccatttagagcttcactggaatggattacattattgggaagattctggagatgcaaatatactccatagagttcaaatgagtctacagtgaacagtgggagtgaccactgtgtttaaaattgtgactcataccgtatttcattaacattatttttcagctttaacttagtcaatcttgattatcctagatcagaggtccctcaagttacacaatctataactaataaaggtaattcttaaaagaaatattatttctagaatcagaagtagaatgtcagcggtcaatacagaatgcmctcttttcatccagagttggctctaaattgtagctacaaaaaaaaaaagaataatacaagacctgaagtaaaactcgacattattttaatttgtgtgatggaagtagggagaaatcagtaatgtatcccaacaacgcagcaaaatctatagctcacaccataattacagtggtac

SEQ ID NO: 764260 - DNA, 580 bp, Homo sapiens
atatacatatatgagtatataaatattatatatacatatatgtacaaatacacatacatttcatacatattatatatcaatgaagacatgtaatgtactatgcatataaaatattgacaaatattacaataattatataattggtcatttaactcaaataactaaaaaactgacaaattattcccaactctttgtgttgctgttgtcttacatataaaacggagattatttatcttaatgtgttttgtcagtgctttaaacacttataaaagtgaagtgcttagatcagtgcctggtatcttaaaacgcttaataaaaactcggtatcattttgtcatcattattatgttttacacgtttgttttctggcctyggtacaaggctaggctaacgtaataaaatggcatgaacttcattttgtatgattttaaaaaatatctactctatcttacaatctatttcataatacaagtattatgtgaacatgattttttttccttacaaccatttaggttgtttgtacattttatgagtctttaactaaaatgctttttatacatgctctctctcttttatattt

SEQ ID NO: 764261 - DNA, 644 bp, Homo sapiens
tggtcttctcttatttacaacctcatttaaacaaattaatgcgcatctatgtttcccccacagcagaattcctgcaggctcatcaatcagcattgctcggtcagtccttcctcctcggttcttgacaagagtctcccgtggccgcctgcatggttctccccagaatcccacggtatccccagttttctctcctattcttacgaatccgcagggatttttcatcacttaaaggagagttgttagtatcacatcaattaattccatcaagaaaaggcaaaaggccaaaacagtgttttataaaagaaatattgataaaaagaggttaacttgatggttctgatatacttttttaaaatgggaaagacagatgctgcttagtgctggcattcagttcaatattaaatcaatgtacacgtggggcatcattattatctgagtcatcaccagtgacattsaatactttttcacagttagaaaaaggacatggaaaaccttctggtctatagcaagggtttcaagatttcttccttctgattttgccactgtaatcagcttttatttttttttcctaagcaaagcagttcataccaagttttataatacgttttgtaagtcatttattggatccatacatttatagttga

SEQ ID NO: 764262 - DNA, 543 bp, Homo sapiens
tctgatcccagggtgcttgggttcttgggtgcaggggcggcagcgtctcactggggccctagtcatgtagagcatggagtggcgtctggcatggtggcagcccctggaggcaggtgccttccccagcctcctggcaggcctccctagggccttccgaagcctgtgcctactcctatcacctttgccctctgctctgtgrttacagtgacgccccgctgcatttaccctgttccctggccctctattttgtctccctgggctggtgctgtaacccaggtcctcatcatctgtgttggttcttgctgggcttcttcactcttccccactggtctttctctaccctcgtttgtaaatcctgctttgctagacacagcaaaagtctcccggagtcaagggcattagctctgaactgtgtcggagtcgctggggggctttgcagactgtgcctgacctcaggctctttctctccacccacgcagctttgttcagtattccctgaacccaggctgctttgctcatggattttccttccccactatcagc

SEQ ID NO: 764263 - DNA, 636 bp, Homo sapiens
ggtgaatatatgtatttgattgggtaaggaaattctaagcatgactcacagtcagaaaaagtactctatgaatatttttccccttcacagtggttggtcattattcctaaaatattatactaacccctgaaccctgctttatgtctcatgatccactagttggaaatttttttgtcttcacatctttcttgcataaaaaacttacatatttagaagatttatccgtaatgggctttacatttaccataaatatcatttttttctcccatgaaattataggtcacactttagacatcaggagactttcagtcctaagaagttacatttgaaattaaacttayctagtttttaaaaacttctaagctagcaggatataaataatgtgctagtgttggcaataactgttcatagctgtttcaaaaatttgaattctggaaatgaattccctcagcagcatgttttgtttgcttcaggcattttgcaaatacaatactttcagaacacagctttctatctcccccatgaagtaatttgagaaccacctttatggtttgtcattttattgtttagacttgaaatggattcatctgtcttactagttaagcctttaactaataatataattacagcatttat

SEQ ID NO: 764264 - DNA, 629 bp, Homo sapiens
aaagtaccacaaaatgggtggcttaaagcattgggaatgacttattctctcacagttctggaggctagtggtctaaaatcaaagtgtcctcagggctgtgctccctccaaagcctctaagaaaggaggccttcctgccccttccagcttctggaagccccaggtgtcccttgccttatggcagcatcattcccatctctgcctctgtcttcacatggtctcttccctgtgtgtctgcrttctcctctctgtggtgtctgtgtccaaacttatcacttcttataaggacagtaatcatgttggattagggcccacaccaatggcctcatctttacttgattatatctgcaaagaccttatttccaaataaagtcctattcacaggcactggaagttaggacttcaacatacctttttgaaggacccaattcaacccataacagtgccatgtaacaaaatagaacataatcacatgaatggtacttcatcatattcattggtcccaggggttacggcatggaatattgggtggtgaggaggcatttttagaattctgcctaccatagtcttcaaaggtgccctttaaataattgtctcatctgctgacttacctaaaaatagatcccatgt

SEQ ID NO: 764265 - DNA, 720 bp, Homo sapiens
ccaccccacccctatttgggggcagccagagctatttgagccccaccaaaacctgcaggctctcgggccaggctcggtggctcacgcctgtaatcctagcactttgggaggccgaggcaggcagatcacttgaggtcaggagttggagaccagcctggccaacatggcgaaaccctgtctctactaaaaacacaaaaattagccgggcgtgctggcaggcacctgtaatcccagctacttgggaggctgaggcaggagaatcgcctgaatccaggaggtggaggctgcagtgagccgagatcgaaccatgccactgtgctgcaacagagcgagactctgtcttaacaacaacaacccctcacgctctcgtccactagtgggttctgctggctacctgttccacactgtggggctctcttctgctcccaacttgctgacactggcactcccsccactcctccaagtgttctctttcgagtggttcctaaccaactatcaggagagcctgcctggaacacactggggctcctccctcccggggccctccgcaggtgggaatcaggagccggtcctctttcaggcagccgtattcccacagcccagccccctcccaaagtctacagcaaaggttcctgtttcagcacaggcccctaagaggacatgtctgcacaccgctgctccctcttctgatggtggatccaggttccaggcctctccccg

SEQ ID NO: 764266 - DNA, 624 bp, Homo sapiens
ctcatctcaaacgtaatgacacccttgtcctcaaagtaaaggtttggagaaaagacctatcatctaaatggaaaacaaaagacagcagaggtcactattcttatattagataaagataaaacttactttttttttttttttgagatggagtctcactctgttatgcaggctatagtgcggtggtgctatcttggctcaytgcaacatccgcctcctgggtttaagcgattctcatgccacagcctcctgagtagctgagattacaggcatgtgccaccatgaacaggtaatttttgtatttttagcagagatgtgggttcaccatgttgggcaggctggtcttgaactcctaacctcaagtgattcacctgcctcagcctctcaaagtgctgggattacaggcatgagccattgcacctggccaatactttaaaccaacaacagtaaagaaacactaagaagggtgcggcacaatgataaaaggttcaatgcagcaagatgacttaaactatcataaatatatatgcacccaacattggaacactgagattcataaaacaagttcttatagacttacgtagccacacaataatattggaggacttcaatactgcaatgacagtg

SEQ ID NO: 764267 - DNA, 515 bp, Homo sapiens
cagtggaggcttgatttatatccggatccttgtgattttagagatgaagtcagctttgctttgggattctaatttccaattaacaaacacattattttatgataactctggtttaatgactaacaagaatgattaacagaaggtcaactgtwttcagaaaggcaggggcaaccctcagagtcacacgtacttctttccttagagatacaatatccaatgttgttatgaattttcatgagaattaatacttggattcgcgtctctgctgaaggtctttgatgatggaactaaaacaagcaagcaaatagctcttcgagcttcatgtggaaaaagcccttaatttattactaatgtcttgttaatcatagaaaaactggagcaagggaaatgggaccagttaactttgagtatgtacagtgttgtggtggttttgcaccttgaagataaccttagtcagagtggaagccaaataactgagtccaagctgggtgcagtggctcacccctgtaatccca

SEQ ID NO: 764268 - DNA, 580 bp, Homo sapiens
ttcaagtgtttgtttttttcagctccacatggattttataattatttttctgtttatataaataatgtcatttggggctgggtgcagtggctcatgcctgtaatcccagcactttgggaggctgaggtgggtggattgcctgagctcaggagttcacaaccagcctgggcaacatggtaaaacctgtctctactaaaatacaaaaaattattcrggtgtggtggcatgcacctgtagtcccagctacccgggaggctgaggcaagagaattgcttgatccagggaggcagaggttgcgatgagccgagactgcaccactgcactccagcctgggcgatagagtgagactctgtctcaaaaaaaataaagaatgtcattgggattttgaaaaagattgtgttaaacctgaatgttgctttggaaaatgcggacatttacaaaatattaattcttccaattcataagaaatagatatctttccatttgtttgtataattttccaatttttattactgttttaaatatgtagatttgtattagtccgttttcacactgctgtaaagatactcaccttagactg

SEQ ID NO: 764269 - DNA, 608 bp, Homo sapiens
aagttgccaagaacatacgatggaaaaaggactgtcttttcaataaatgtgctgggtaaactagataagtatatgcaaaagaatgaaactagatccctttctctcagcatacacaaaaatcaaataaaaattaaagactcaaatctaaaacctggaattatgaagttcctagaagaaaacactggggaaacatgtcaagacattagtctaggcaaagatttcctaagacagacstcaaaagcacaggcaaccaaagcaaaaatggacaaatgggattatatcagctaaaaaccttctgtacagcaatagaaacaatcaacaaagtgaagagacagcctatagaatggcagaagatatttgcaaactctccatgtgacaagagattaataactagaaataatatataaggacctcaaacaactcaatagaaaagcaaagtgattccattttaaaccggacaaggctagacacagtggctcactcctgcaatctcagcactttgagaggctgaggctggaagagcacttgaggccaggagttcaagactagctctggcaacatagtgaggccctgtctctacgaaataattataaataagttagccaggc

SEQ ID NO: 764270 - DNA, 608 bp, Homo sapiens
aagttgccaagaacatacgatggaaaaaggactgtcttttcaataaatgtgctgggtaaactagataagtatatgcaaaagaatgaaactagatccctttctctcagcatacacaaaaatcaaataaaaattaaagactcaaatctaaaacctggaattatgaagttcctagaagaaaacactggggaaacatgtcaagacattagtctaggcaaagatttcctaagacagacgtcaaaagcacaggcaaccaaagcaaaaatggacaaatgggattatatcagctaaaaaccttctgtacagcaatagaaacaatcaacaaagtgaagagacagcctatagaatggcagaaratatttgcaaactctccatgtgacaagagattaataactagaaataatatataaggacctcaaacaactcaatagaaaagcaaagtgattccattttaaaccggacaaggctagacacagtggctcactcctgcaatctcagcactttgagaggctgaggctggaagagcacttgaggccaggagttcaagactagctctggcaacatagtgaggccctgtctctacgaaataattataaataagttagccaggc

SEQ ID NO: 764271 - DNA, 605 bp, Homo sapiens
ctttgaggaccaaaccattgcctgtggtctggatgaggatgattttgcaaaccctgaggggatttttctggtgtcattctgggggaaaagtttcaccctctgagacggtgagcaggcaggactctgagctgcagctgcttgtggccatcctggaaggctacctggaagaggccaatgtgccaggagaaggaaggacaggatgagtgtgagaatycttttatcagctgttcttgaagccagatccacccttagattctgcagcttcataggcctttcaggcttcagccagcacaagttgggtttctacaactcagaattgggactgatggtttgtactattactatccgcatcctttttcaggtaaggttgagtaacttacctgaagtcacactgtgagtaagctgcctaccaattggtcatgatcaaaactgggcaccaaatcactacttaagcaggacacatcggctaggtgcaccatgcacttcccattcaacttcaggcaactaagcacaatatagtttcccagcagctgaaacaaggcaacgcaacccagaaagagccaatttctgtgaggttgggagacaggagatagatgtcactctca

SEQ ID NO: 764272 - DNA, 517 bp, Homo sapiens
tcacagataattttgttctagtcagcatggtcataaaagtgtttctgttcctaagaattactggacaactggtgctatggtttggatgtttgtcccccgccaaacctaatgccaaaatttgaccctcagtgttgggggtgaggcctaatggaggtgtcygagtcatggagttggatcccttaggagtggcttggtgccatccttgcagcaatgagtgagtcctaccctactagttcccaagagagctggcttttaaatagagcctggaacctctcactctcaccttgcttgctctgttaccgtgtgatctctacacacacccattccctttcaccttctaccaggagtggaagcttcctgaggtctcaccagaagcagattctggggccatgcttcttgtacagcctgcagagccatgagtcaaataaacttactttctttataaattaccagactcagctattcctttatagcaacactaaatgggctaagacaattggccacaatcaattggacc

SEQ ID NO: 764273 - DNA, 642 bp, Homo sapiens
attaagtagcagaaattggagtgaatcaatgaaataaaacattatgttttgtaaaattagtaagcttcaaatgtggaacagtttactaccaaatgcaatcagtagggtcttctggaccttttgtaccactgtaattatggtgtgagctatagattttgctgcgttgttgggatacattactgatttctccctacttccatcacacaaattaaaataatgtcgagttttacttcaggtcttgtattattctttttttttttgtagctacaatttagagccaactctggatgaaaagagkgcattctgtattgaccgctgacattctacttctgattctagaaataatatttcttttaagaattacctttattagttatagattgtgtaacttgagggacctctgatctaggataatcaagattgactaagttaaagctgaaaaataatgttaatgaaatacggtatgagtcacaattttaaacacagtggtcactcccactgttcactgtagactcatttgaactctatggagtatatttgcatctccagaatcttcccaataatgtaatccattccagtgaagctctaaatggaaagcaaggatctaggttctttttaaaaattgaaacataatatttgtat

SEQ ID NO: 764274 - DNA, 595 bp, Homo sapiens
acttaacgtaatgactttcagttccatctgtgttgctgcaaatgatatgattcttcttttttatggctgcatagtattccactatatatatatattatatatataatatatatatatatatatgtgatgatctcccaaaaaactaaaaatagaactaccacacaatccagcaatcccactactgaatatttattcaaaggaaaggaaatatatatatatatatataaaactctctmtctatatatgtgtgtgtgtgtgtacatatatatgtgtgtgtgtggatatatatatatatatatatatatatatatatatacagtttctttatccactcatctatagataggcactttggttgatttcttatctttactcttgtgaacagtctgtgataaataggaggatgccatatgggttccctttcctgttgaataaatgttcagtagtgggattgctggactgtgtggtagttctatttttagttttttgggtgatcatcaccctgttttccatagtggctgtactataggaccacaactctgaacagaaaaatacactgtaaataatcagcttgtggccaggatgctgccagtgg

SEQ ID NO: 764275 - DNA, 595 bp, Homo sapiens
acttaacgtaatgactttcagttccatctgtgttgctgcaaatgatatgattcttcttttttatggctgcatagtattccactatatatatatattatatatataatatatatatatatatatgtgatgatctcccaaaaaactaaaaatagaactaccacacaatccagcaatcccactactgaatatttattcaaaggaaaggaaatatatatatatatatataaaactctctctmtatatatgtgtgtgtgtgtgtacatatatatgtgtgtgtgtggatatatatatatatatatatatatatatatatatacagtttctttatccactcatctatagataggcactttggttgatttcttatctttactcttgtgaacagtctgtgataaataggaggatgccatatgggttccctttcctgttgaataaatgttcagtagtgggattgctggactgtgtggtagttctatttttagttttttgggtgatcatcaccctgttttccatagtggctgtactataggaccacaactctgaacagaaaaatacactgtaaataatcagcttgtggccaggatgctgccagtgg

SEQ ID NO: 764276 - DNA, 595 bp, Homo sapiens
acttaacgtaatgactttcagttccatctgtgttgctgcaaatgatatgattcttcttttttatggctgcatagtattccactatatatatatattatatatataatatatatatatatatatgtgatgatctcccaaaaaactaaaaatagaactaccacacaatccagcaatcccactactgaatatttattcaaaggaaaggaaatatatatatatatatataaaactctctctctatatatgtgtgtgtgtgtgtacatatatatgtgtgtgtgtggatatatatatatatatatatatatatatatatatacagtttctttatccactcatctatagataggcactttggttgatttcttatctttactcttgtgaacagtctgtgataaataggaggatgccatatgggttccctttcctgttgaataaatrttcagtagtgggattgctggactgtgtggtagttctatttttagttttttgggtgatcatcaccctgttttccatagtggctgtactataggaccacaactctgaacagaaaaatacactgtaaataatcagcttgtggccaggatgctgccagtgg

SEQ ID NO: 764277 - DNA, 621 bp, Homo sapiens
ctttatatagcttgcttacaggttgctctaggtattttattaaatatgcataacttataagcctaatggtgttatcattttaccagttcaaatgagttgtagaaatttaaccttccatctgttctgataccttttcccatttataatacaattattttgcatttctgctatatacatttaaaaccatattcagtgttatattatttgcttaagtcctcaaacatgatttagaaaattctagaggtgaaggaggatatgttgcattattcatatatttacttttctccattgttctttctttcttcttgaggttccaasattcttacttttattattttctggtagtaaactttctttagctattctttttaagtgtagatgctggtaaaaaactttcttaattttattcaactgagaaagctttgatttccttccttcattcacaaaatacgtcttaactggatatgatagttcttttcttttcagcacttgaaaaatacactcctttttttctggcctctgtagtttcatctgagaaattctctatcattcaagtttttcttctgtaggtaaagtgtcatttctgatcactgctttaaattttgtttgtctttaattttc

SEQ ID NO: 764278 - DNA, 621 bp, Homo sapiens
ctttatatagcttgcttacaggttgctctaggtattttattaaatatgcataacttataagcctaatggtgttatcattttaccagttcaaatgagttgtagaaatttaaccttccatctgttctgataccttttcccatttataatacaattattttgcatttctgctatatacatttaaaaccatattcagtgttatattatttgcttaagtcctcaaacatgatttagaaaattctagaggtgaaggaggatatgttgcattattcatatatttacttttctccattgttctttctttcttcttgaggttccaagattcttacttttattattttctggtagtaaactttctttagctattcttttkaagtgtagatgctggtaaaaaactttcttaattttattcaactgagaaagctttgatttccttccttcattcacaaaatacgtcttaactggatatgatagttcttttcttttcagcacttgaaaaatacactcctttttttctggcctctgtagtttcatctgagaaattctctatcattcaagtttttcttctgtaggtaaagtgtcatttctgatcactgctttaaattttgtttgtctttaattttc

SEQ ID NO: 764279 - DNA, 668 bp, Homo sapiens
ccaattcacagtctgcattttaacagctgctttgggggttgggggatccatgccagagtctgaaaagcccagcccctggtaaatcaaggaaaagctctgtccaggagccccacgccaagtctccctgtaataagtagctgctgatgaatgaatgcacattttacaggttagtaagaagaagaggaggcttcattttgtatcatttggagagtgatgagtttcagacagtgagtcctgaaaatgccatggaattcaaggctgactgcagattgtacactggacacagcctcaagacatctagggtragaaaacctgcaaactgcatagccaggcagcaagagtgactgcagatgtggggatactcatcacataaataaacaagtcaggggtgtggatctttatctgggtggaggcattgggcagggtggtaaagttggttttagatattctgagtttgagaaactcatggcacttccaagttgcaatgctgattgttccatgattcatgagatagcatgtgaccttggcaaatttcttaactcctcaggaattctcatcctcatctgtgcaatgtgaacattcacatcagaaggtatctacaactattaagtgagacaaagtacaggcatttttcaagcctggcacaaaacaagaacttgacaaatatt

SEQ ID NO: 764280 - DNA, 495 bp, Homo sapiens
aaaaaaaagaggtagggcctttggggaactgattgagtcatgaaagtccatcatgtaacaagttggttgatagtgttgttgatggcatttttgtctctttgttctattagttacaagatgactactaaaatctacaaagttatagagatttgtttatttctcccttcagttctgtaagtcagggcttcttatattttgaatcrgttatttgctgcttatgtgtttatggttgctttgtcttcctgataatttgtcctctttatcattgccaaatgtccctttaaatccctattaccatttagttttctacatctattttattacctatattgtcactgtagctttttgctcagtgtttgcatgatacatatgatacatatatttctacccttttactctgaaattatgtatttcttttttaaaggggatttctttcttcattctttcctttttgtgtgtgtgttttgagacagggtctcactcttttacccaggc

SEQ ID NO: 764281 - DNA, 527 bp, Homo sapiens
aatgtcccagtggagaggcgggggttgcactgttctgcagaggatgatcaggtgtacctgttaccacacagaggagacgggtgctcctactgtcatatagtggaagtgggtgagcttgttatcaggcagaggtgtgcctgcgcccattgttctatagacaaagagcaggtgctgtgtttcctacagaagctcacctatcagaggagtggggtctaactccccatgagckaggcagggctgcagcagatgtcctgtaactgagggtgtgtgcctagagtcctctgaggaggcatgggcgtccccaaaaccatgcagaagtgttgttccatagaagtgtgtctgcctgatatgggggacagtttcgccccctgccatgtggtggaggggaggccaaactgaggaggctgggtcccttccccgcagagtcccaagtcagacttgccacagcctctgaaactctcaataacctgtccgagaaaggacaccaaagaaatgaagccactcagagaagtggctcgaggtgcccc

SEQ ID NO: 764282 - DNA, 572 bp, Homo sapiens
cacatacatttcatacatattatatatcaatgaagacatgtaatgtactatgcatataaaatattgacaaatattacaataattatataattggtcatttaactcaaataactaaaaaactgacaaattattcccaactctttgtgttgctgttgtcttacatataaaacggagattatttatcttaatgtgttttgtcagtgctttaaacacttataaaagtgaagtgcttagatcagtgcctggtatcttaaaacgcttaataaaaactcggtatcattttgtcatcattattatgttttacacgtttgttttctggcctyggtacaaggctaggctaacgtaataaaatggcatgaacttcatttgtatgattttaaaaaatatctactctatcttacaatctatttcataatacaagtattatgtgaacatgattttttttccttacaaccatttaggttgtttgtacattttatgagtctttaactaaaatgctttttatacatgctctctctcttttatatttaatttatattgattttttaatgctattttaaaatttgtttttc

SEQ ID NO: 764283 - DNA, 632 bp, Homo sapiens
ccctcttaagacaattcaggtggtcctggcgctcacgcccaggcagaaaggtcagtgagagcagtgacctgcagcagcagcagccaggctcctccgcctggattttcttttctactttggagaggccgctcccatgcagcccctgcagaaggtgcctggggaagcgcagggaatgggcgtgggctgctttgaaaaggaaaggccaatattgtgtgtgtgtgaatgtgtgtgtgtgtatgtgtgtgtttcacaaccaaatcctcagattttgaaaagccacacattttagcaaatgaccttgtttggaaatacaaactaaatagtctaaaaatatttagtgaccttcactgtgtggagggaaaattggaaagtgggatgtcatccgtagcatggagaggattttataaatgttttaactgtaaaagttcctctcaaataacttctttccccaatagtgcctgatctttsctcagttcctgatgaagtaggattcaagttaatgttctccagtatcttcctctctcccgcctaattcacactggctttaccctcggagctatatgaataaacaattaaataaaaactgatgatttaaacattttttattatgtcttctttcttttgattacata

SEQ ID NO: 764284 - DNA, 675 bp, Homo sapiens
aaggataaagctagggctcccctggatccagcagttcaagtgaggcctccaaaactctctctctccattgcttgcctctgagtattggcgctattctccccttctagagtctgccttcttccaagtaggtgtgcaaagtaccagacttacatcttacaacttaagaaccagatcagaaaaagaactctcctctgccaatttctctcattggtaatatcctcaaccactgctgtcaccaccagcacctgccccctcctccagccttaattstgccatcaacatattagagaggtgcacagagcccttgctcctggagggatagttccttccccagcctcaacactacccgcctcacccctacaaactgcctcagagaaggctctggccaacatcaccaatgacctccacttttccaaatccagtggtctatttacgctcctcacattatccaaactgactgtctaccttaccctaggaaagcaccacagctaatcccacagccagtgtccttatttcttatttcactaagaaactaaaagcaattaatacaaaattgcctcattttcttatcagcaactttatcaacctggcttcaactgtactgtatactgtgacacatcccaatgacaaaaaataagccatacttaatcctacctaagcccaaactctccactt

SEQ ID NO: 764285 - DNA, 615 bp, Homo sapiens
ttccaaagtggtgtcgaggatggctttcagatttttttgttttatgcaaccatagaaaccatggtactcttctccaagaaaggaaagctggcaggggacagcttgggagaggaagatgctaagcttactgttggacatttgagtttgagcatcctttaggagctccagacaaaagatgttgagtcatcagtggacttgtgtgtccatgagcagtgttctaaccaagtcaggcaatgtccatgtgggaagaactgttcrcccttggactggactgagaggtccccacctgaactgaggctcaagctcaaagatagagtcctgtatctagggatgttggctagaatcatgacaaatgctgtggttttatatttaatattaatatcaaagcagctaaaatgtactgagtgttcattatatgttagacacatgaattatcttattaaatcttaacacaatcctataaggtataaactattttctctttttagaaataaggaatctgagcctgagaatttaactagcaaaggtcacttggcaagcaagagaggcaagatctaccccaagtctgtcagaccaccaaatctgagctattacatgctgccagcaacccagcta

SEQ ID NO: 764286 - DNA, 507 bp, Homo sapiens
tggtgtgacagaaccctgtatgggaagacctatcaaggagtattgtctggcttcttggcttacgttaaatatgtagatcattctttcctttctccaattctcctcattcctcgggctaatctcttctgactgcctcaaaaccatccagccctttaccagaacttctccagaagagatttgtcttagctgggctccctcaaatctccaatggtgctgggtrctctaaccattttcccacccccataatgttcacagactaaataaaatatagatcccttcccctcagattcatgcccagccctaggaaaaatgatgcttcaaacgctcctcctcctgggccatcccactgctatcacccaagtccaaggcctcttcatctctcacctactctcctaaagtagctttccatttggaatccccacatttcatttctcctatccaatatatcctctattcactttttattaagcttcttaaactcagctctcactatatcattgaactgca

SEQ ID NO: 764287 - DNA, 619 bp, Homo sapiens
aggtgtttttatttcttggaaaaatgtttgcctatattaacatgtaatttccactgtacacctaaaaataagaaaaattattactatataaattcacaggtgggaaaaccagggtggagaagcttttgtttttgttgttcttattagcatcaagtggcastgctaggtctaggatctgtactctcagattcttgattaaggattttttttccgaatcccaggttgacaataaagatacgaatcaccactttaggaggctgtggcaggcgaatcacttgaggccacgagtttgagaccagcctggccaacatggtgaaaccccgtctccactaaaaatacaaaaattagccaggcgtgctggtgcatgcctgtaatcccagttactggggtgactgaggcactagaatagcttgaatttgggaggcagagtttgcagtgagccaagatcacgccactgcactccagtctgggcaacagagtgagactccgtctcaaaaaaagaaagatctcaatcaccattttgcctaagagctgtctggataactcctatgtgaaaatgctctaggtgaaagatataggaatgtagtcactctttgattataatacaacatgaacagta

SEQ ID NO: 764288 - DNA, 659 bp, Homo sapiens
gagatgcctgtttgccaaattccattttttttttctttttccttcctccactgacatctctgcttttgattggcagggaaattacttgattccaccaaggtcattacagtggaaatcttaaagccaactggcatatttattgggcatctctcatggcagtctctcctgctagcccagagggagattaccgggagattctggtctgtcctgcttctacccaacagaggtcatggaaaaggggcagtctaaaatttgacatwcaggcaatggagccaagaattaactgaggcatccatttctttcaatcccaaatctagtaatttcctttctgactttgtcaacattcatccacatggtataagcaacaaggaaccactgccaagtgcccagagagagcctccaggctcttgttctgaagtaacttttgatcagcccctccctttccaaacccttaataaaagaattcttgctcttccactttttgtctaagctcagggtggaccccttagataatagtccagattcaatgttgaggcaacactgggcttggctgtcttacaattaccctcctcaccatggtcagaggaaaatcttctgaagccacagaagttcatcttttcagatttaagaccttcaatacatattccccaagggaaaat

SEQ ID NO: 764289 - DNA, 587 bp, Homo sapiens
tttcccttgttgagatgatgagttttcctaatccttccaaatgtgttcacctgggctcttcctaggcttagtaacaagcccttttaatttatctggccttaaattcaggtcatagtctatggccataaatgtacctttcctctaacgaataaaactaacctttacagggtgtctaatatttttattaaatgaacaaatagattctcaaaacccaagccccaccacccacccctcatagtagcagcgtatcactagacagaatgctaccttttcatatactaactctcctttttctgcaatcacaaccmaagctagatcaaggacgtggaattctttttaggcttaccagcctggtttccattatcttcacatgtatttcctttagggcctgactgttttaaaatcttttgttatggggtttggagtgcatcttgaaatataaatatttatggtgaataaaagcaaaggcaagtcatacaattttacagccaaaactcctccctggacattataagctcatttactgcaaaggaagttctccttattggggagaaagaagcaaggggatgaagcatatcactaaaata

SEQ ID NO: 764290 - DNA, 606 bp, Homo sapiens
ccccacaggtagtttgctaatgcccttcttatcttacctttttcagagctctataagcccccaaactacaagaggatcctaagttcattgaaaataaaatggaaattgtgagcaactgaacttcagagcagcagcccctttactctgtcccactctaagacatgctttaacctccaccttcagccactgccaaagccattaagttaaacttacaccatccagacaaccttgctccccaagcaactagtctggacaactgttctgcctcagcaacctcagctcccaacataactcgttaaccaytaaactgttcctctaatatctcttcaggggccaagtccaggctgcaagcaatgtaaatccgttctactggaaagagttgtatacaacagaatgaaaactggctcaaggtcaagaaaaaaagaacagaaaacaaggctacaaaagacagagtgattacattcatacatcatttttgcagttcttttctgactttcctctcaaaattacaaagaagcatactttaaaaccatccaagtccatggtttcctttattctttcatttagaatcctagctctacacattcagaaactatgacatgattt

SEQ ID NO: 764291 - DNA, 608 bp, Homo sapiens
catgtgttatctatgggatttagatattctcatactggaaggagaatggggtcttgcaggtggaattgttccttgtaccattttgtgatgaaacagatatcaaagactgcaaatgagaagaaaggtccttggtaggtgggggaagtaaatctctctcttatctgcatttgaaaaaaatggtcagaatgtttaagagcacaaaaggagagtgaatattaaaaatggcacctcttggaagtcagctgagaaccaaaaacaarggagcctctttcccctggaatctcatggagaattagagtggcttgtaattccagagaggaagttgtgaaatctaaacactccagttggatgcacagattgtatttaaaatccgtgtgcttcccatttatttcctgcttgatatcttttagagttctgggaagtggtttcgaaggaatgcaaagaaggttctgtgcttcaaaaggtatcaaaggaagattttgtgggtctagtcttgaacaagattgtgaacatggaggacagcacccctgctacccaaagttggttcccacgttgtggaaccctcaccagagagagggaaaccaaaaaaattcaggtgacaaaattgg

SEQ ID NO: 764292 - DNA, 612 bp, Homo sapiens
tagagctgaaaatttgcatacaatttggctccccaaaacttaattacaaatagcttactgttgactggacaccttaccagtaacataaaaagtcaatttacatatattttatgtacatattatatactctatttttacaacagtgtaagctagagaaaataaaatgttattaagaaaattataaggaagagaaaatatgtatgcactttattaagtaagagtggawcctcataaggtcttcattctcatcatctttgtattgagtaggctgaggaggaggaagcagagaggttggtcttgctgtctcaggggtggcagaagtggaagaaaatctgtatataagtgtacctgcgcagttcaaaccatgttgttcaaagtcaaatgtatatggaagtgaagtttaggtgcttgggatacaaggagtaaggacccaggcaccttacagccatagaccagccttccttatgatatggctttcttcctaatggtcaagatcatggcacctgtttttcaaggagccacatggaggaagggagaaaagaaggagcagcattgagaggagtcttggtatttccattgattcatatgtataggagtgaactgtgtcaagac

SEQ ID NO: 764293 - DNA, 602 bp, Homo sapiens
actatgggaaacgtgttttatttttagcatatctcaattaatccatcctcaaagtccttatttattctaccacaagtggaattctgaaatctcctttggttatttcatgtgcaaaccagttttgatatttggcttgatgtcctaagtcattttccttcaccatctgactttgaacatttgaggacaaaaatggagcattcaaaatatttattgtcttacaaagcaggttgtagttgactgtcagtgtttaactaatgraaattaatttccattgcttcttgagatgttttgcagctaatagtgctcattaatttggagataccgaccttgataaggagaagattagcattttatagtaaaaaatatattttaaacagaaatcccattgctcatggtgcatttcaagtttgacaatcctagtaacttaaattactgaatctactgaagaacatgttcagcgactataactgggttgctgaaccaagtgtgctttagcaggcacttaattctactaagaagacaagaaggaggaggaaaggaggaaaggtaagaaagagaagaagataccagtgggaaattcagcaggctatactctgacacac

SEQ ID NO: 764294 - DNA, 602 bp, Homo sapiens
actatgggaaacgtgttttatttttagcatatctcaattaatccatcctcaaagtccttatttattctaccacaagtggaattctgaaatctcctttggttatttcatgtgcaaaccagttttgatatttggcttgatgtcctaagtcattttccttcaccatctgactttgaacatttgaggacaaaaatggagcattcaaaatatttattgtcttacaaagcaggttgtagttgactgtcagtgtttaactaatggaaattaatttccattgcttcttgagatgttttgcagctaatagtgctcattaatttggagatacygaccttgataaggagaagattagcattttatagtaaaaaatatattttaaacagaaatcccattgctcatggtgcatttcaagtttgacaatcctagtaacttaaattactgaatctactgaagaacatgttcagcgactataactgggttgctgaaccaagtgtgctttagcaggcacttaattctactaagaagacaagaaggaggaggaaaggaggaaaggtaagaaagagaagaagataccagtgggaaattcagcaggctatactctgacacac

SEQ ID NO: 764295 - DNA, 516 bp, Homo sapiens
aaaaaaagcttacataacaaatgtatccaagaagccactcaaaatatatattatagaacaatttcataaaatattgaaaaatgaatcaacccagtgtagctttgttgcttttatatatagagtgaaatgacacttcagtggaactcttgtgtgggatagtgcatttatatcaccagtcttttttggaggcaattcataaatgcttattgcataatattattatgcaactatgcctttcattatgtcaacagagattctctgtggcaagcactgtggtaacattaaaattaccaagatgagtaagatacgtctgcatcttcaagaaactttgggacctctgcgggaaaatgacagacctgcagtttcagtactgcaacacatraagtgaaaatgctgggcactgatatcatgggaggctgagcaggagcagttagcatgggcaggaagagagaggctttctacagcaagctgcatgaggcgattgaagaataggctacttaagtgaggttccatgat

SEQ ID NO: 764296 - DNA, 490 bp, Homo sapiens
  misc_feature 476, 477, 478, 479, 480, 481, 482, 483, 484, 485, 486, 487,488, 489, 490: n = A,T,C or G
catgcaacaaataaacacaatcttaagtagatagaaggttctacagaaaatgaggcaaggtaaggagattgggaatgagaggtgtgccactttacatgaggtggtcagggaaagccatagaagtgagtttgtggctcagtttgctcaagagtaaaatgaggatataacagccctctgttaacaattgctgtgtagagtaatttkagttaaatatacagcatgcttaaaacagtgcctgacattatataagtatgttctctcattattaatatatatattattattattatagacatttctatatgttttttctaggggtgggttagagagagaaaaatggggcagcacctagagtggttgcatgtgttgtgactgtttgctttgttctatttcagataagagcttttacagcatgtttttatgcaggtgggaatgccaccgaagaaggataaaacttggtggggcggaagaaagannnnnnnnnnnnnnn

SEQ ID NO: 764297 - DNA, 616 bp, Homo sapiens
catataaatgcattgcttaatgtgtctgtctctggttatataaactatataactatataactatacatatattatatatgtgtgtgtgtgttacgtgttagaacttaagaaataatgtaaagggaaaaatcctaacatgctcacacattttgtgagtgaaataaaaataaaaacagccccactttggggaagttcttctasaaggaactaattctagtaaatttcagtattcatgggaagtggactcaacattgaggatttagacacaaatttaactgaagtttgccacaaagttttgtttcccatttgaagttaagaattggtgaaatacaatgtttgtgaatgttgttttatacatgtgtaaatttttgaaaaataattgtcatgtgattaatatttccagggttgacataatcctgcaattcaaggctccgtgtttttttcgttttcaatcactagcataatttttctagagaagcatctaactttctgaccaggtctgccttttggtttatgttatattgaagtaaatacagatgatgtcctgcatattctgaggggggagggattttactcctgtaaaaatcattctgcaggggtccaaagtacaagtctg

SEQ ID NO: 764298 - DNA, 569 bp, Homo sapiens
tgggcacaggatggaacagtctggagggctcagaagaagacaggaagatgtgagaaactttggaacttcctatagacttggttgatggttgtgatatggacaatgaagtccaggctgaggtggtctcggatggagatgaggaacttactgggagctggaataaaggtcactcttgctatgctttagcaaagacactggcagtattttgcccctgtcctggagatctttggaactttgagcttcagggagatgatttagggtatctgacagaaaacatttctaagcagcaaagcattcaagaggtgaccaggctgtttctaacagtgtacagtcatgcattcacaaagagacaatctgaaattggaacttacttatgtttaaaaggaaagcagagaataaaagttcgaaacacttgcagcctgacsaggtggtgaaaaaggaaaacccattttatcgggagaaattcaagcctgctgcaaaaatttgcataagcaaagaggagccaaatgaaaatcaccaagacagtggggaaaatgtctccaagttgtgtcagaaagcttcatgacagc

SEQ ID NO: 764299 - DNA, 469 bp, Homo sapiens
ctaggtttccaaaagactaaaagaattctgcttttagctcaatttttcaatacctattttttttaagttaaagggtattttttaaagtatattcattttccaacggctcgatcattttcttttcccctaagtaacatatgggttcacaggcatttgatcacaatttgctaatttcctctgtgttgatgacaattarttattattattccctattggggtaatcaaattttgattgcatgttagatatctacaatgttagaattatatctgcttttatattatattccataatggatttgcttatttagcctaaagatatagtctactgttataattggcaattaaatttgttttcaataaccctcaactctcttttttcatttctttttcttatactaccagttttattatctttatgcttcttttcagatatttcattggtttgtaaaaatgctttctttttaagtta

SEQ ID NO: 764300 - DNA, 638 bp, Homo sapiens
catctctgtaccctgccccactttcaggctcagagatgtctgctcccattgcctgacttcttccagctcctggcaccaatcttgaagggaggttggtcctgaatccaggtgttttcacagcctggccgggtgtacacatgtttggggtagcgctgacacgcaagctccccgctatgtcgcccccgccggactttgggtgctgatgagcatgtgagggaagctgaggggaggtgaagggcagctcagtgctgtactgcaggtgccgcttcacgtaaacagcctgggctccatgaacagcggcaagagacagacaggctcctaggtggaaggggacgtgtccctaataaagctccaccttcaagctgggaggacttgaatcccagggcaggctgcgggtcctgcggactagaatggggacttgtggggytttttcagggcccaccatggccacccatggaccaatcggcatgcacttcctcccctctgaggtccataaaagccctgaactgagccatacttgaggacatgacaggatggcaagctgtggagatgaaccacccactccagggtctcttctttgctcagagttgaacattctttgggtcaccctgacagcaaagaggagctatgcattgtgg

SEQ ID NO: 764301 - DNA, 540 bp, Homo sapiens
gaggccatagtgagaaggtggcatctgcagccagggagaaaggcatcatcagtaattaaatcgactagcacctttatactggactttccaacttacagaactgagaaaagaaaattttttgttgttgttgatgtcatccagcctttgttatagcaatccaagtagactataatataccccataataaaaattatttggaagccaggtgtggtggtgtacacctgtagtgcttacttatgggtagctactcatgaggctgaggtgggaggatttcctgaggcagggagtttgaggtayagtgtaatatgattgcacctgtgaatagccactgcacttcagccttggcaacatgacaagaccctatctcaaaaaaaagtttttgtattttttatgagcaaatattaaaaccaatggaatagactagaaatacagattatttcaaatcaatggcattaagactattttataaaagataatagggacaaagggagccatttaacaatgaaactgaatttttgccagccacatacaccatataga

SEQ ID NO: 764302 - DNA, 559 bp, Homo sapiens
agtattttgttaagaatttttccatcaatgcttaccagggatatcagcctgtaattttctttttgatgtgtctttggttttggtatcagggtgatactggcctcacagaatgagtttggaaacactcctttctctatttttcagaatagttggastagaattggtattacttctttaaatgttttgtaaaattcagccataaagccatcagctcttgggccctcttttccttggagacttttatattacatctttgaactcattatttgttatggactgttcaggttttgaatttacttatggttcagtcgtgttaggttgtatgtgtctagaaatttatccatttcttccaggttttctaatgtattgtcatatgcttgctcacagtaacctctaattatgctttgaatttctgcagtattggctgtagtgtctcattttacataacagattttatttacttgggcaatctctcttttttttctgagtctgactacaggtttgtggattttatttatcttctaaaataacaacttttatttcatttatgttttgtatt

SEQ ID NO: 764303 - DNA, 597 bp, Homo sapiens
ggtctcgagctcctgacctcaggtgatccacccgaggtctcccaaagtgttgggattacagatgtgagccactgtgcctggccccattaccttactttacagattgcttccattgtccagcaatttacaagaagagagctgcttctatatcccaggtcaatgttgctttcaggcagtggagccaaagggtagagaagaatgagataatgtggatctatagccatgtgctttttcccctgtgctggcctggaaagaatgtccaaagctctcacagatgtgcacactcaaactaacatttattttatgaaagytctttcctttggcatgcagcctttgtctacaacacagctttctgacaaaattctcccaaggctttttcttaaggtggtgcaagctctaggcttggggtgtccaatatggtagccactaactgcatgtatcaggcccttgaaatgtgtctggtgtgactgaggaactaaacttctaatttcatttaattttaattaatttaaagctaactttaaaactggtaattcagttttggaaatgtttcaagaatgtttggaacaacttggtgcctctgcaaatctgtttttt

SEQ ID NO: 764304 - DNA, 636 bp, Homo sapiens
gtgtcctcccatctcagccttctgagtagctgggactacaggtgcacaccaccatgtatttttttgtattttttgtagagatggggtttcgccgtgttgcccatgctggcctcaaatgcctcagcctcccaaagtgttgggattacaggtgtgagccactgcacctggcctgctttccattcttacctctgtgttaatgacacagcattttcaagacagttttgttcctattctttaccctctgcaaagggtgttcttgatacacagacacacacacacacacacttattttttttaggcaattgcagatwtttgcttctagtccaggggtgccagttacagaggtccccatatctgctgctttgaggctaatgctgagctgtgggattattcttttcatgagccccctggctctgctgcttggttgcagggctggctcagatgactaagaacacaggaccacaggagcaatggtccagtgaggtatgcagtggagctctggctccaccagcctcacagcatgaaattaagacgtcatctctggtctttgctgaagaagatcatatctactagtactgtgctctctttgcatgccagagatttgaccaggtgatgtaaatagaggatgtcaagctc

SEQ ID NO: 764305 - DNA, 641 bp, Homo sapiens
cttgttaccctcataatcaaatcataaactttatatttagctgtttttataattagcatgatgtgtgggaagggactgtgccacacactaaagcagggagtaagcagctggaaaaggaagacatggggtctacctttggctctgcccaaggccctctcactgttgccaagcccttttctccttggtcttcagtttcctgatttataaagagaggagtttggactatatgattttgaggttgcttccacttcgaactttctataattctatggatggagaattagaattatttggtgtggggcagctgacctcatttagcaagtccaatcagctgcttctcttcaacatcttagtctaagcctccatcatctcttggtaatagtctcctatctcatagattgcacatttgcttcctctgatgtgcactgaagccagagttacatttttttttaagaaaaaycaaatgcttttgctcagtataaagtttgcccttgacacatccacaccatccctagctctctgcaatgctgccacgctggctttctgtgtctcagaagtgtaatttccttttcctgtgttcagggccttgtgcatagtttccagttctctgtccatttaattcctactcatctttcaaggct

SEQ ID NO: 764306 - DNA, 627 bp, Homo sapiens
cactttgccccttgttaaaggctttaaattcccaagcaagcctgtgcagaaagtgacatttttccccaaagttgctatgggccacttcctgcttgcatgctttgcagcattttgtattgatttgcccagtttttctgtccccctttaggtctccgtgccttgggactcagtcttggcctgtccccttggatgctgctccatttgggggctgcttgttcctcttctgacctttagctcttccccttcaccatcttagtttcttcaaccgttctctagatctgcttctggtgttccatgtttcatgacccatcaccaccactgttaagactgcctccctagccacacaggggtgtgggaatgggcaggagctttttctaagtggggaatgtctgtttccccaagacacagatttgggggcagctctgatctacaytgaggtgtaagcaagacagtatctttatggaagaagctcttctggcctcctgcttttgcctccagcaagccatgatgttatgtcttcccagaatactcttctcttctcccttgcccatgtcttctcttcctcataaggcctatccttcaccccagctatctgtccaaattctattcatctttcatgttcaactg

SEQ ID NO: 764307 - DNA, 682 bp, Homo sapiens
cccagaaattatacaaactgataaaaagatgggtaggaatatatgcaacacagagtaaggtatgtttgccccactagtatcttgctccctataacactggacataaaggtgcaagaattttctagaatctgagacacagatccaagaaattagttctactagtccctcaggatgctcatgacacagtgtaataacccctcataaagcatgtaaattcttgtttctaatccagaaacttaagtggacaccttgggaccttctgacaaataccaaatatgagttttccagtaacaatccatacattaaatattagtacactatatttctcttatttctacattaaaaattataaactacatctttatggtggagacacaacattttggaagccactgctctccaaacctttttgattgaccaccacayaattaaaaatactttagctgcactcctcctgtatttgtgggttgattggcttatgttattcaaatatatacatccataccactgttacatatgctataaaatatgcataaagtatacataaagtgaaaattagataagtattaaatgaacaatatttatgaatacttttactgtattattgatacaacattaatcaggctatatatcaatataaaactagtacaaaattaatgacaaaagttagtcctttaataaa

SEQ ID NO: 764308 - DNA, 615 bp, Homo sapiens
aagatattaaaaaacattaaaaatgttaataccatcaccttggggtttaagtttgaacatatgaattttagagggacacacacattcaaatcataacaacatcattagtcactagtaaaatgcaaagtaaagctacaatgacatgccacttcacatgtactagggtgactataataaaatgaaaaaaaaaaagtgttggcaataatgtgggagaaactggaattttcatattttgctggtgagaaggtaaaattatagaaagttaaaatagagaaactatttggctgctccttgaaaagctaaatatggaattaccatatgacccagacattttactccttggtttatacccaaaaggattgaaaacaggaactcaaacagatatttatatgccagtgtttattgcaatgttattcataattgccataawgtggatacaacccaaatgttcatcattaaatgaataaatgaagaaaaaattattcagcccttaaaaagaagtaaaattgtaatgcatgctgcaacatgggttaaacataaaaacattgtgttaagcaaaataagttagacacaagagaacaaatgtatgattacatgagatatttagaataggca

SEQ ID NO: 764309 - DNA, 621 bp, Homo sapiens
tctgagccacatatctgacagaaagtaaaataatcaagaaaacatacaaacaaaaccaaaaatagaggtttgcatagtacaactcctggagagtttttcaatcaaatacaaataaatgataaaccaatctacttgtatatggttattaaacaagagaaatgagcaaaattttcagtctacatatgcttgaaatctcccatcctttattcaccaaatataaattgaatccaaaaaagcatccaattattttgaagtcactctttactaaatatatgtttaaaccaactcatggaaatacttccttttgatttgcaaagacaaaaagagaaacaatctaggacacaattttatcaaatacaattctgttggcattacatgtttttttcttccagggaagcatattcttccatcaatctctttttaaggcgattattcaaatatcactacaatattttgcagctctattttataaaagtctattaaytttaactgaaatcaaaataactacaaagcaagcaagttttaccagtgccatcattcttcatccccattgctgccagagtaagtataactaaatagatagcagaggtggtagaggattttgcctgaaatatttagaaa

SEQ ID NO: 764310 - DNA, 590 bp, Homo sapiens
ttcattatttagctgatatttttgttctcctgtttttctttcatgtttttcattatgtaaccactagtcttaggttgaagacaattttttaagtcatttgagcatcagaaccaaccttcaggcagttgcttcacctgtaaatggaaaagctctgggtgtctttccacctttgaaacttgaagactctgattcattttttaaaattatttcttcttattattattttttgagacaaagttttgctcttgtcgcccaggctggagtgcaatggctcactgcaacctccgtctcctgggttcaagtgattctcctacctcagcctcccargtagctgcgattacaggcacatgccaacacgcctggctactttttgtatttttagtagagacggggtttcaccatgttggccagtctggtcttgaactcctgacctcaggtgatccacctgcctcggcctcccaaagtattgggattacaggcatgagccactgcacctggccaaagattctgattcaaaggcaattctagttagtgaaaccaccgactgcttcttccagcagaggcatgaatgtggtcagaggacaatagag

SEQ ID NO: 764311 - DNA, 614 bp, Homo sapiens
cctgtaattctgacacagtttgctttggcaatgattgtaatttactctcatccaatctgaacttattctcctctaaaacgactttgcttccctcctgttgggacaggagggatttcagagacctccttagtgctgtcagattataaatgcctaacgggtctagggttacatctttggggtgggagtygagtggcacgactaaatgtcctcaaatttcagaccaactacttaagccataggttttttttttttgtgttgttgttgttcatttgtttgtttgtttgatttcagggggtggtagggggtgagggtgctctttagtgatttttcatataggaacttcacaatttattccaagtttttgttttaaataaaatttcctcctgattattacagtacaatagatcccctttgtaaaatttcaaaaataaaaaagtaaaaaagaagcataatcactcataattccacttgttttataaagtagttgtataattctcatactttctttgtatgcatatttcaatgaagtttttcattataaaattatatcttgaatttgacaatgacaaaaattggtttttaaaacactcttcatagatacaacttgaattatt

SEQ ID NO: 764312 - DNA, 552 bp, Homo sapiens
tttaataactatatgattgatttttgtatactccataaaatattttttaaaaactcattaaaatgcataaatgcataatacttacattgataaatataaatttacttgctaagacatgaaagatgaaatttatatcctccgtcttgctatgttggtgcattttcctccaaatttgtgtaaatactgttctgagttttgcatttgtaactgagatgactcaaaaacacattgtccttagttcttgaaatgtcacaataaatatttaaactttgagaagttatcttagagtcctgcttcttgctgttgaaactagggtaaattttcttttatytaaattgaagaaattgaaaagtagagctgaaaagaatctcagtcgttgaagtgtctgctcctttccacaaagtctggcttcagaaatgtatctgttttttaggaccccatttaatcattcccgtctacgaaattaatccagtccaaagtatctctgacaatattttgaaccttacaaatgccaacgcgttgtcctaaataacctaaatcaccctgcctccc

SEQ ID NO: 764313 - DNA, 615 bp, Homo sapiens
ccctgaaatgaatctttgctgcacaaatacaactttcaaattttaaaatttgtctttatacattgtttgactttgacaacctgtccaagctcaatgggtcattaatatgtaaatagatgctcaaaatcattattcagcagaaattgaaaattaaaaccctaatgagttacaagactgaaaatagcaaatatggttgagattgtggagcaagttaggctttcatacaatgccatagatgtgaaaaacagtattatctccttggaaaacccttttgcactttctaataaaattaagaattastcttctagatatatatccaaaagaaatgagtgcttatttttacaaaaaggcttctataataatatccatagtagtttaatttaataacaatataacaattataacagataaaatctgttaacaccccaaatactcaacaggaggaaggataaataaatcatggtataatcacaaaataaaatatttagcagaagggagaataaaaagaatgagcttgtgatatactcaacaaaatgaataaacatcataaacagtatattgagcaaaagaaagtagacataattggacatactgttcaactgaaataaggtttag

SEQ ID NO: 764314 - DNA, 599 bp, Homo sapiens
ttgctacatgcatactgtaatggtcaagccagggtatttagggtatctatcgcctttgtatttatcatttccatgtgttgggaacatttcaggtcattctcttctagctattttgaaacatacaatacattgttgttaattatagtcaccctactctgttatcgaacattaaaacttattctatctaactgtatgtttgcactcattagctaacctttcttcatcccctcaccccgcaacacacccttcccagcatctagtaactgtcattctgttctgcctccatgagatcagttgttttagctcccaaatatragtgagaatatatgatgtttttctttgtgcctgacttattttacttgacataatgacctccatttccaaccatgttgctgcaaataacaggattttattcttttttatggttgaatagtattccattgtgtatatattccacactttctttatccatttatttgttgatgaacacatgattctgtgtctttgccattgttaatggtgttgcagtaaacatgggagtgcatgtatctctttgatatactgatttcttttcctttgaataaataccaaatagtggg

SEQ ID NO: 764315 - DNA, 445 bp, Homo sapiens
cagtggcgcgatctccgctcaccgcaagctctgtctcccggcttcacgccattctcctgcctcagcctcccgagtagctgggactagaggcgcccgccaccaggcccagctaattttttttgtatttttactagagacagggtttcaccatgtcagccagatggtctcgatctcctgacctcgtgatctgcccgccctggcctcccaaagtgctgggattacaggcgtgagccaccgcaccgtaccaaggtccggtattttcaatgctgkctcagattctgcttcctgggagacccagctggagattctcatgtgttgagatacatggtggctctctgcaggatctcttgtctctatctagattgatagacttggacagcttggactcatcaaagatcacctcttttctttagtttttcccccatgagtttggaggtatgggaat

SEQ ID NO: 764316 - DNA, 545 bp, Homo sapiens
ctccacatgtttgccagcacaccttgttgtctgcgttttttgtgttttttttaaaaaccatcctagtggtggtacagtgggacctaattgtggttttgatttgtatttccgtaaagactgatgatgttgagcattttttcatgtgcctattggccatttgtacgtcttctttagagaaatgtctattcagatcctttgcacatttttttgtaaattgcgttatttgcctttttatygttgagttgtaaaagctctttatatattttgtacactagacccatatcagatagatgatttgcaagtattttctcccatcccgtgggttgctttttcactttcttgatagcatccttggcttttaattttgatgaagtccagtttgtctatttttttttctgttgcttgtgctttaagtgtcatatctaagaaaccactgggcaatctgaggtcctgaagatatacacataggttttcttctaagagttttacttttagattttacatttaggcctttgatctattttgagtaacttttgtgtaaaacg

SEQ ID NO: 764317 - DNA, 624 bp, Homo sapiens
cacacttcaggagtagaaagttatatttcaccttcttggtgaaatatctacaaaaatgatttagaatttttcttcacaggaaacttgtctattcccatctacttatttattcaatattttatttctaccagtattgacttatagagcttataacctaggttatatatctaatactatttaattttgttgtttcaatcattccagctttggccagtgggagctcttttacttgactcttctgtttctgtcctctgactctgactcctatctccttgtttttggaatgcttcttactttctggaatattacaagatgtataaagttaactgtaggttttccatatrtaccttttatgaagttaaggaatttctttctattcatagtgtgtgttttttttaattagaatttatttttagggcagttttaggtttacagaaaattgatcagaaattaaaccgaattcctatattctccttcccctcatacacattttctcctaatattttacataaatgtgatatattttttataactaaggaaccaatatagatatgttgtcattaactgtagtccacatgtacaacccaaagagtgagacccactaagtctcactctttgggttgt

SEQ ID NO: 764318 - DNA, 650 bp, Homo sapiens
tctgctgagttcaccatctggtgggcattcacatggaacacaaatatcttcacactttttgcccattctgaaaggtctgcatacctctaatctaacttctgagctatgatattaaatagagaatctctgctatgtgagcccatatcaatgaattcagactgatccaacttaatgttcttaacacccattatcacacaccattaatatctattcccacacrtgtttcctggatttctgcttacccatattagaaaacttaagctgttcttttggaaagtagtgcaccatgggtcacaatgagtacctccctttaggggctggctggaactttagtctactactaggtctagaagcaaagcggggtggaagggacaggtcctgagaagagtgaacattgtcttgcatggaaactgcctcagagaaggtcattacagtttccttaggcaatgcagggttaatcccctcagacaagggtggagaggctgagaccaccaaggtgggaaagcagctgtgattggagaggccacttctgctagaggtgagtaggcctcttccactggcaaagaagacttgtcagaatttaggggttcaatgcccttagcttcattagggtcttcccacacatccacattacaacttacaggatccca

SEQ ID NO: 764319 - DNA, 539 bp, Homo sapiens
gattatactctcctactcatatataataattgtcccgaccttttcaagtttgttttgtctctacacgcctttatttttattttcaatggttttattatttttctcttttttaactacatttaaatgttaacttttgttgtctttcaatatgtgcagattagtattccataacaactacctggataaattctaattgttcttctgtaatacargtagttttgagttttgatgaacaaacttataaaattgaattgatttaaatgtaaatttcacacagctgttttatcaatatgaatcctggtaaatttttttaaaaactttttcacccaattacgcacacaacagaatatcaagactgtcattcaatccttaactgttacactgattaactgatcctctttacacctacaaaagtttatttgtattaaataaaacacaaatatcactgaagggagaattactttacattaaattgagaaatgattgtttagtatgggaataagacattgtaattcaggtctttgtattttctctttatt

SEQ ID NO: 764320 - DNA, 526 bp, Homo sapiens
tattagaaaggccaggtggaaatttttggaagtgtgcttcactatcaaaaaagtaaaccaaagaccagcaaaaatagaagtacttattatattactacagcgcctagaatattttaaaagccaagtaagaaagttcttctacattcccacttaatcatcttttggatttttgctgtgcatcttraagaactgccataaattaatgtaggcaaaattaggtagtgactccaatttcaacttatgtttcatatacagactctttggtgggataaatcaataaagctaagtatctggcaaataaccaatgattttgtaaatgacttctgtctataaaaatacacaggagaaaatagaggcaatctcttttctcatggacaatgacaacaaagtaccttcattcaaagctataactttgctctggcctttatcacttttccagctctgctttatgtgcaagggtcttcattatgctgacccacagcactggtgatctaaagatgaaagtatcatacataaaaatttaaag

SEQ ID NO: 764321 - DNA, 616 bp, Homo sapiens
ttaaggaaatcattttttgaacgtacaaataaaactatcctccacaaaaattagtttttattcataggattttttgcttgaaggatatgatctgatctcaggtcaatacatgaaatgcattttctgttatttcttgattaccactacctacaccgcttaaraggctcttgctttatttaggactttaacatgaatagagaaactctctttctcgtagtttgaagtttcaaaaaatgtcttcattggctcttgaaatataattctgtttaagcaagtacctgctatcagatccccccttattgggagaattgcattttattttttgtcaggaaccatgtgtaagacatgcagttgctctcatattttgtggtgcagagtaaggcctatattccacaattgacatgtgcaatattctgcataattgtctgctaaatcatgctgatgttggtagtatcccattgcaaagatgaatatagttatagtcaaaatacagtatgtctggtcatccacctctgataggatgtggatttcaccatctcagctgaaaacaaagaatattatgttctacatggagagggattgcatgcatgccagtgaatccaacaggtacaaaaat

SEQ ID NO: 764322 - DNA, 616 bp, Homo sapiens
ttaaggaaatcattttttgaacgtacaaataaaactatcctccacaaaaattagtttttattcataggattttttgcttgaaggatatgatctgatctcaggtcaatacatgaaatgcattttctgttatttcttgattaccactacctacaccgcttaagaggctcttgctttatttaggactttaacatgaatagagaaactctctttctcgtagtttgaagtttcaaaaaatgtcttcattggctcttgaaatataattctgtttaagcaagtacctgctatcaratccccccttattgggagaattgcattttattttttgtcaggaaccatgtgtaagacatgcagttgctctcatattttgtggtgcagagtaaggcctatattccacaattgacatgtgcaatattctgcataattgtctgctaaatcatgctgatgttggtagtatcccattgcaaagatgaatatagttatagtcaaaatacagtatgtctggtcatccacctctgataggatgtggatttcaccatctcagctgaaaacaaagaatattatgttctacatggagagggattgcatgcatgccagtgaatccaacaggtacaaaaat

SEQ ID NO: 764323 - DNA, 535 bp, Homo sapiens
cattttccccaaaaccaggccccctgtcagcatgaagcagttagatatacctcttcagagatgtgattgatggcagcggcagcccatctggaccagccactgccgtgacgccatcagtgtgagacgtgtagctagggctgtgcactccacagagctggtgggagctgggaataggtgaaaaccctgcctccttgtgagttggcaggacrggagcctcctgttccctggctgctgttgtggccaccgagccgcagccctggagccaggcatccctgtgcttggggatcagagcgagcaggagcagagcctctcccttctgggtgcagctgcagctgcccagccatggctgtggtcccggaagtctctatgctcttgggagctgggagggccctctgcctcctgccccttacgcactccagagtctcctctctgttgagagctaagcagacatcaggactaccagctgcagagaggagctacccactgtgggcttcgtctctgctgagagctgaacactcactgggacgccctgcct

SEQ ID NO: 764324 - DNA, 535 bp, Homo sapiens
cattttccccaaaaccaggccccctgtcagcatgaagcagttagatatacctcttcagagatgtgattgatggcagcggcagcccatctggaccagccactgccgtgacgccatcagtgtgagacgtgtagctagggctgtgcactccacagagctggtgggagctgggaataggtgaaaaccctgcctccttgtgagttggcaggacaggagcctcctgttccctggctgctgttgtggccaccgagccgcagccctggagccaggcatccctgtgcttggggatcagagcgagcaggagcagakcctctcccttctgggtgcagctgcagctgcccagccatggctgtggtcccggaagtctctatgctcttgggagctgggagggccctctgcctcctgccccttacgcactccagagtctcctctctgttgagagctaagcagacatcaggactaccagctgcagagaggagctacccactgtgggcttcgtctctgctgagagctgaacactcactgggacgccctgcct

SEQ ID NO: 764325 - DNA, 535 bp, Homo sapiens
cattttccccaaaaccaggccccctgtcagcatgaagcagttagatatacctcttcagagatgtgattgatggcagcggcagcccatctggaccagccactgccgtgacgccatcagtgtgagacgtgtagctagggctgtgcactccacagagctggtgggagctgggaataggtgaaaaccctgcctccttgtgagttggcaggacaggagcctcctgttccctggctgctgttgtggccaccgagccgcagccctggagccaggcatccctgtgcttggggatcagagcgagcaggagcagagcctctcccttctgggtgcagctgcagctgcccagccatggctgtggtcccggaagtctctrtgctcttgggagctgggagggccctctgcctcctgccccttacgcactccagagtctcctctctgttgagagctaagcagacatcaggactaccagctgcagagaggagctacccactgtgggcttcgtctctgctgagagctgaacactcactgggacgccctgcct

SEQ ID NO: 764326 - DNA, 610 bp, Homo sapiens
acctcattcatcctggacacaggacaagaacttgggacttgccggtatggtggagctaaaatagctgtaacacaaacaggattgaaacatgccccttgctcgccacattgtggatgacaagagggagggaagaaaggagagaagatctgcgacccttcggcaaacccagacttaggagatcggagagccaagactgtgacaccctttctggggctctgtggttcctggcgtctccaagcttctgggcacctcggctttccccggtgccagtcgtggaagctgcttgtggtaagtctggtccaatagcctcacagtaagccaacgtccatgctggtgcctggggcttcccaccccactgcagctggcatgcctggctaggcacaatggctagatcttgtgcttgcttgcttgctcacatacccrtcaccgctctgcaccttactcacccttacaggcgtgagatttgggccagtagtgtgagccaaacccagcctgccaggcctggtgggtggaatgagctcatggggcctgagcaaaacttgggcaaaggcaccgacagccacagaggtttccggctggtgaagtgacacatcaaatatcccgtgacaat

SEQ ID NO: 764327 - DNA, 590 bp, Homo sapiens
taagctaaaccacagtttccttttctaaaagaataaattaatactagctactttgctgcttttttgtcagttaattaaaacaatgcatgtaaagatcttatcacagtgcctaccaaataataagcattatttcaatgtagttgatcacatatataaaacatacacgtgtgttggctgtatatatgtgtatatatattatatagtgtgtgtgtataatcttaagactatggaatttttaaaacatattttgttggtattacctaactgaaatgaraacttatttaagttaaaagcacaatattcattgtctccagaataaataataaatacatttgtttctattaatgcttatattaaatccgcatttctacatacagaaataagttattaactgttattgggagaaaatcatatctttttatccatataataaacaaacttaaatgctgccttattgtgtgattttcaagaatggtaaattcctgcattaaccttttttagaaattatgtaccatgtttttatattttattgctgcatatagttatgaatgaaaggatttcttgtcaaaaagagagaaatacgtgagaat

SEQ ID NO: 764328 - DNA, 630 bp, Homo sapiens
tctaaggtgtgagtacatgcattagttttgatcttccagatatttacacctgggtgggactttgcatactgaatgtcaatgactcaggagcaagttagaaaactcttacagtggcaaggactgtgagacatatccaggaggagctggaggagtggactcggcaatccatctgtgacagaagtggtatccaaagttgggtgccttttggtatgatttttgatcctcacgctgcctcacttctgttaacttctgtatattttctaagactattcatgaatcatctaatgtccttcaaaaaatcattctgctaaaaaccttcaagtctattcctgtttgcaactatgaaccataactgacatatttggtcttcagagtgcartgagaaagataaaagataaagaaactcttaatactctttgacatgattttatgtgaaatattgtagttttattttaaacagttttgttcaactataacccgtctaacttcttacatttagtgagtttctcccctatttagagactgtgtattagttttcaatagttgctgtaacaaattgccacaaatttagtgacttaacacaaatttattactttaatttttgaaggaaagaaatctgaaatgcatctc

SEQ ID NO: 764329 - DNA, 630 bp, Homo sapiens
tctaaggtgtgagtacatgcattagttttgatcttccagatatttacacctgggtgggactttgcatactgaatgtcaatgactcaggagcaagttagaaaactcttacagtggcaaggactgtgagacatatccaggaggagctggaggagtggactcggcaatccatctgtgacagaagtggtatccaaagttgggtgccttttggtatgatttttgatcctcacgctgcctcacttctgttaacttctgtatattttctaagactattcatgaatcatctaatgtccttcaaaaaatcattctgctaaaaaccttcaagtctattcctgtttgcaactatgaaccataactgacatatttggtcttcagagtgcaatgagaaagataaaagataaagaaactcttaatactctttgayatgattttatgtgaaatattgtagttttattttaaacagttttgttcaactataacccgtctaacttcttacatttagtgagtttctcccctatttagagactgtgtattagttttcaatagttgctgtaacaaattgccacaaatttagtgacttaacacaaatttattactttaatttttgaaggaaagaaatctgaaatgcatctc

SEQ ID NO: 764330 - DNA, 512 bp, Homo sapiens
ctgtaagttcctaaaaaggaattttatcatggcgagtgacatacctcatagcttgtcactttgcttctacattactcttttgtctccttctgtttcccaccctgtagccagaatgatttttagaaattaatgtcagattatggcactcttctgattaagatttttgcctggcttctcattgttttaatcataacattcaactctgttatttgatctacagaaccctacattgtaagacactggcaagctcttattctaacacttttcccctgcacattgtcttctagattggccttctaattttctttaagcttccaaaggtgttctcmtcttagcactttacacattttgtcccttctctcctgcttttggagtattctttgttgctacaacccaaggcatgcttctctccctttttgtggctaccctctaagtgttacctctaagagaggcttttactggccagactatgatggagcctctaggattttctctattttctgtgcttattt

SEQ ID NO: 764331 - DNA, 536 bp, Homo sapiens
tgatagattgcctcatagatgccacttgctccaccatgagttataaaagctctggtttttggatgacctaggattggatgaattttagcaaaattattcataggaataaaatgagatgcacaatgaaaggctctgaaagtgacagtgttttctagataacacattgaactaatttgctattacttttcagacttcagatgaaaaagcacgtacttgtttaggagatgtaactgaaagctatatggtgtgtgtsacttcagactgcaaaacttaatacaagattttcagttgcactaatgaaaagtgcattctagattttttaaatgtgcacaaaagaggacagcaaagagatgggcatgaaataaagttttattttaagtacagtcacagagtgtgatatgcggggtatgcaaggcagcaggcagtgggttgttggtggtgctaggattgaggaaagacaggttacacttcatcatgaaatgtgtcattactttaagattaagattaggaatttagtcctccggaaaatacagagt

SEQ ID NO: 764332 - DNA, 482 bp, Homo sapiens
tcatgacagaattatcaacagtgtccaaaacttattagccacccaaatatctattcatcataaaatgaagacatcatctgtggtttatcaatcaacagaatattacatagcaatggaattacctaagaactgctacattaaagaaaaagacactaatgagtacatattatataattcaattacataaacaagcaaaactaatgttgttwttcgaagtcaggctaatccttagttggaggccaaaagtagtcactaaatggttcagaaaaagagagtcattctaggcaggttgtgatagcctataccatgacctgaacagtagttaaattggtatcttcacctcaagatgatgttcaagatgaacttccatttttgaactattcacttagtgtatgtatatttatcttttgtattttatatttaaatatatattttgagagatatataaatcatttacaaaattctaggaaacaaatagaaaa

SEQ ID NO: 764333 - DNA, 482 bp, Homo sapiens
tcatgacagaattatcaacagtgtccaaaacttattagccacccaaatatctattcatcataaaatgaagacatcatctgtggtttatcaatcaacagaatattacatagcaatggaattacctaagaactgctacattaaagaaaaagacactaatgagtacatattatataattcaattacataaacaagcaaaactaatgttgttattcgaagtcaggctaatccttagttggaggmcaaaagtagtcactaaatggttcagaaaaagagagtcattctaggcaggttgtgatagcctataccatgacctgaacagtagttaaattggtatcttcacctcaagatgatgttcaagatgaacttccatttttgaactattcacttagtgtatgtatatttatcttttgtattttatatttaaatatatattttgagagatatataaatcatttacaaaattctaggaaacaaatagaaaa

SEQ ID NO: 764334 - DNA, 679 bp, Homo sapiens
aagtgatttttcacgtctgtatctccttcagttaagttctaatcttggttatttcttgtctttatctagctttggggtttgcttgcttttggttctctagttcttttagttgagatgttaggttattaacttgagatttttccagctttttgatgtgrgcatctagtgctatagatttccctaacactgctttagctgtgtcccagagattctggtgcattgtccctttgttctcattagttaaagaactcattaacttctgccttaattttattctttgccaaaaagtcattcaggagcaggtttttcaatttccatatgttggtgtggatttagtgaatttcttaatctttagttctaatttgtgtgtgctgtagtctaagagactgttatgaattcagttttttgtgtttgctgaggattgttttacttccaattatgtgaacaattttagagaaagtgccatgtggtgataagaatgtatattctgttaaatttgggtaaagagttctgcagatatctatcaggttcacttgatccaaagttaagttaaggcccttaatacctttgttaattttctgtctcaatgatcttctaatactgttagtagggtgttacagtgtcctactatattgtgtgggaatctaagactctctgtaggtctctaacacgtacttta

SEQ ID NO: 764335 - DNA, 679 bp, Homo sapiens
aagtgatttttcacgtctgtatctccttcagttaagttctaatcttggttatttcttgtctttatctagctttggggtttgcttgcttttggttctctagttcttttagttgagatgttaggttattaacttgagatttttccagctttttgatgtgggcatctagtgctatagatttccctaacactgctttagctgtgtcccagagattctggtgcattgtccctttgttctcattagttaaagaactcattaacttctgccttaattttattctttgccaaaaagtcrttcaggagcaggtttttcaatttccatatgttggtgtggatttagtgaatttcttaatctttagttctaatttgtgtgtgctgtagtctaagagactgttatgaattcagttttttgtgtttgctgaggattgttttacttccaattatgtgaacaattttagagaaagtgccatgtggtgataagaatgtatattctgttaaatttgggtaaagagttctgcagatatctatcaggttcacttgatccaaagttaagttaaggcccttaatacctttgttaattttctgtctcaatgatcttctaatactgttagtagggtgttacagtgtcctactatattgtgtgggaatctaagactctctgtaggtctctaacacgtacttta

SEQ ID NO: 764336 - DNA, 529 bp, Homo sapiens
ctcaacatgacatattatcctttttatgtattactgggatcaatttgctagcattctgttaaggacttttgcacctatattcatgaaggacattgaactgtaattttcatatattatattgtctatatctggctttagtatcaagatgatactggccccataaagtgtgtttctttctattctatttcctaggagttaatgtaatagtggtattatttcttctcccttaaatgtttaacacttcactagtgaagccaagattagagatttgtgaaaaaattttaaattacagtttctatttcttttgtaagtatactactatttagatttttaatctctttttgtgttagtttggtaagttgtttttcaaggacttygtccattttgtgtaaaatcaaacaatttactggcataaagttgttcatagaatccccttattatactttgaatgactataggctgtagtggaaaagtagaggcccaaaaatgcaaatgtgcatcactatagcattaaaagaaaactaaacta

SEQ ID NO: 764337 - DNA, 522 bp, Homo sapiens
cccaggattcgaacaatggctatctgtcctgaaagcttatccttttctcactactctgtactgaggataacaaaagggcattttttaggaagaaggaggcagtattaatttttagttacacaagtgatatataagtacagtctgcttttttaaaaagtggcacaaatcagataacactaaagacccctttgaygctatgctaatcttctttacttccagggtaattactgcttgtcatataggtatccatcaaaagagatatttaaaaaaaaaaaacctttgggcaaaaataaagaggagaaaaaagagacgggttctacatgtagaaagtgacagaaataaacaaaaatatttaatttacttaaattcagtcaactccagtaaggagaatgcttttgaaaatcttcaagaaggaaaaagagtcttgaagtccagcatagagaaaacactggaaaagaatatttagacttcaaaatgcagttgagttcctgggcaaagtaaactataccccagattagtggg

SEQ ID NO: 764338 - DNA, 464 bp, Homo sapiens
tcagggtcatgaaggttttcttttttgtttttaaaaaaattcataggtttatgttttacatttatgtctatgaacatttttagctaatttttataaacagcatgaaaaacaagtcaatgttcagttttttccatgtagatgtccaagtgttcaaacacctttatcaactgtcttttctgcattcaattacctttgcaactttgtcataagtcagtcaaccatatttttgtgaacctacttctgtattctatgatctgttccattgtttatatatctttttttatataawatcacactgttttgactacattgctatgtattatgaattaaaattgggcaatgtgcgtcctctaacattttctttttcaaaattgtagaggcaacttctaatgaagtttacaaatatagtcattaaattttaggggctacaaagcaaagttataaagatacaaatttaataaagt

SEQ ID NO: 764339 - DNA, 632 bp, Homo sapiens
ttttttttttttttttttttggatacagggtcttactctgttgcccaggcgagtgcagtgacacaatcagggctcatgtgttcaagcgatcctcctgcctcaatcgcccagtagctgggctgggattatacacgcatcaccacgcccagctaatttttgtatttttagtaaaracaaggttttgccatggtgccaggctggtcttgaactcctggcctcaagtgatctgcccacctctgcctcccaaagtgctggggttacaggcgtgagacacctgcctggccaaaagctcactcttttacatttactcatgtggttaaaattattacttggaaacacatatgtgacttgttttagaatgtctgaatctcggagacaaaagagtaaagtttcctttctattattttcctatgatctgtagaatgaccttatgatcactctcttggagggtttctttgccttgctgaatttcataatgacgtatagtacttggagtttagttcaccttagaagccatcctttggcatgatctccacctcatgtttttggatctttgtccttttgaggtgcaccctttgtgtttagatcctttgccagaaacattcttattcaagatttcttggtaagtgatg

SEQ ID NO: 764340 - DNA, 582 bp, Homo sapiens
acagggaccacccatctctgcccccacagcaccctgcacagagcctggccccaggtgcagctggcagaatgaatgctggatgacagaacaatgccattaagaggaccctgcagatgctccccaagccaggacctggatgaacttgaaccagttccaggcagcaactgagaaaatgcacagaacagcctggggctcagaattaactaacagccttctctttgtccacaactgatgagcgtagaattgatgtgccctccaggtcagagaggctgggtgccaagttgagcacctcgtcaaacactgtggctgaaggtttagcctttgagtgcctgtggctccccacctgggtgggttttcctacagcactgattgyccggcgcctgatgctgccagctccaggagcacccaggtagagccacccaccttcccatcctccctcctaccaaaaaccccctgtgcctgaattaattaggcaattataggctctgatatgaattccatttcctgagcatgcacaggtctgctacggttgtgaaaaacatccttttgaaaccagtgaggacaccaagcctttcgagagcc

SEQ ID NO: 764341 - DNA, 645 bp, Homo sapiens
cataggcattgaagacgctcgcttcagaaatgtccctgactgctgtggcctctgctatgtttagaatgatgtctttctttctttctctttttttttttttttttttgagattgagtcttgctctgtcacccaggctggagtgcagtggcgcgatctcggctcactgcaacctccgcctcccgggttcaagcgattctcctgcctcagcctccygagtagcttggatgacagatgcccgccaccatgccccactaatttttgtattttttagtagagatggggtttcaacatgttggtcaggctggtcttgaattcctgacctcaggtgatccacccgccttggccttccaaagtgttgggattacaggtgtgagccaccacgcctggccccaatgatgaatttcctaatggccttgtctttgggcacatgtcaggcacagttcatgcagtgaatagactgcacgtgctcacggcccttttgggcataatcgttgttccttcttttctttgtcatcttggaggcctggactggagagagctggccttgaattgtttcctgcgtgaagccaagaatcctctcaggctgagtcccaacttggggctcgcctgccctgcgtccaaagtgtgtccttctaaacctcatca

SEQ ID NO: 764342 - DNA, 645 bp, Homo sapiens
cataggcattgaagacgctcgcttcagaaatgtccctgactgctgtggcctctgctatgtttagaatgatgtctttctttctttctctttttttttttttttttttgagattgagtcttgctctgtcacccaggctggagtgcagtggcgcgatctcggctcactgcaacctccgcctcccgggttcaagcgattctcctgcctcagcctcccgagtagcttggatgacagatgcccgccaccatgccccactaatttttgtattttttagtagagatggggtttcaacatgttggtcaggctggtcttgaattcctgacctcaggtgatccacccgccttggccttccaaagtgttgggattacaggtgtgagccaccacgcctggccccaatgatgaatttcctaatggccttgtctttgggcacatgtcaggcacagttcatgcrgtgaatagactgcacgtgctcacggcccttttgggcataatcgttgttccttcttttctttgtcatcttggaggcctggactggagagagctggccttgaattgtttcctgcgtgaagccaagaatcctctcaggctgagtcccaacttggggctcgcctgccctgcgtccaaagtgtgtccttctaaacctcatca

SEQ ID NO: 764343 - DNA, 564 bp, Homo sapiens
ttggatttctctaatgactaaagatattgagtatcttttcatgggcatatttgccatatgtatattttctttggtaaagtgtcttttcaaatcttttgctcaactgtatttttttttcttgagtgttttagagttctttaaatcttctacatacaagtccttaatcacaatatattgctatggtttttgctttctacagtcaattacctcttagaacaatgtagaacaagaaaaaagtttttaaatatttatcttctttcaagctatttttagagatgttcgcttctttgtataaatccaaatttctgtctggtatcatartattctggctgaagaattttctttaacatttcttgtattacagatccacagataataaattatctctgcttttgtttgtctggagagtctttatttcttgtttattttcaagcactggaattctggggtcacagtgtttttccttgcaatcctttacaaaggtcaccctgttatcttctggtgtgcagtttctgataagcagtcgtctactataattctatttgtgcttctgtatgtaatgtg

SEQ ID NO: 764344 - DNA, 553 bp, Homo sapiens
gggccagggagacggctggtgaaagcggacgggagcagacgtttcctaatcatgccactctcagtccccctttccccagcctccaccaggctggcctggctggattcccaccccgcctccccaccattccactgaattcctagtcacgacttcctccccctttcatcattccgtgtggctccattcattttcttgtcttccagaaacgcgctgaagtttcttattcaccgggtaagaactttctcccctttcctgtctgcctcctcccccggaaaaccatatcagccttttgaataggtctccaggcaccacgtggaggcccgagctccacggccggacggccctggacagacagtctacgaagaaagcccaggcgtgatctccgatgataggctgcttggrcctttctgggttccctttatagatgttccagacagttctattcatcctaaacttcctcgaaggtttaataacaatcactcaacctggggccatttgggaagtattgagtcatctttacaacgggggagttgaggtggtggttgaatcaagc

SEQ ID NO: 764345 - DNA, 569 bp, Homo sapiens
ccattagggctcagcaaagctaagtgctctttctgagagggcatgtaattatttgctttgaatggcatggttttgctccagaatcctagggactactctgtgactctctcacttggtgttgccacacgctccacactgcatcttttcccaccagtaacacttgtaacatcacagcacttgacgaattgcttaggctagatgacaaggcagcttgcactactgcctaaaattactgcagtagcctttcccactccaggttctatttaagtgggtakcctctgcgtcacttgctatatgtgcctccagcctccaaagagtacgccaggcaccatagatggcctctttcatggtggtagtgtatgcaaaatgcagaaaggtgtcttactttggagagaatattcaagcatactcttggccaccaactaataaatctcactgatgtgactattccctaaattttcacaggatttaactttcatgctttggaatacctgtgttttaccaatgcttccagttaactagtcacttcttgctcattgtgtccaatcagcatgatatcattaatgtaa

SEQ ID NO: 764346 - DNA, 646 bp, Homo sapiens
gttttaccaatgcttccagttaactagtcacttcttgctcattgtgtccaatcagcatgatatcattaatgtaatagatcagtaccatttttggtagaatgcttatgcagtccagatctcttggaactatgttgtgacaaagggccagartgttaagaaggccctgagataacactgtcactaaatattgctgtttgtttcatatgaatacaaactgttttggatcctcttttaattggaagagaaaataacatacaccaaatcagtagtggcgtagtctgtacccaaggtattattaatctgttcaaggagtaataccacatctgacctagtagctgtgacagggtgtactctttgggtaagtccatggtagtctgaaatcattctccagtctgacaaattgcaaatgggtcagactggctaattaagcaaagatattatagagaccactgctctgcaaggtttaagtcttcattcgtggcattaatccctgccatcccgctgggatttcatagggttttctatttactgtgttgtcctagaaaggcagtttcagaagtttccatttggtcgtcctcgtctaatgatagttcttcctctatagaccatgaatgaaacaattaatccaattgccaaatagactgat

SEQ ID NO: 764347 - DNA, 682 bp, Homo sapiens
  misc_feature 551: n = A,T,C or G
ctgggaaacattttaaaaatgcacgtggctaggtcctatcccatgagaatctaatttaattggtctgggatggagcttataatagcaatttttaaaaactttacttggtgattattctgtgcagcctgggttaagmataatgacatctctatctgatgtaactagagtaggtataatttgtttcatctgggacaaaaatggacagaaccgcatggcaaatttactcatatttgccactgggcttgaaaatcaaagttggcttcaggctcctctgctgtcaagaaattcagcaggtgacccctttgaacagaaatgtatctattaattgtggttttatgcctaatttctttaagacagaaaattacaagacatggggaaagaatctgctattattttagactggtggtctcaggaattaagattttctcatgtacaatgtaaaactggccttctatgtgagactctcctctcatgccaagttagagttcattcattcattcattcctcattcatttagttattcaatctttcattcaaattatatacatggnatctttctatgtcaccagtaacataactggtaaaaaggacagtgtctccagttggatcttccttttgctatctgcctctcagtatgaaaatatgaccatctaattttctcttcaagctggaaaagtaggtt

SEQ ID NO: 764348 - DNA, 614 bp, Homo sapiens
tctaatgttgacgggcatttaggtttattccatgtctttgttattgtgaatagggctgcaatgaatatacatgtgcatgtgttgttgtaatagaatgatttatattcctttaggtgtataccaagtaatgagattgctgggtcgaatggtatttctgtctttgggtctttgaggaatcaccacactggttttcacaatggttgaattaatttacacttccaccaacagtgcataagcattcctttttctcctcaacctcaccagcttctgttattttttgactttttattagccattctgactggtgtgagatggtatctcaatgtagttttgacttgcatttctctaatgatcaatgatattgagccctttttcatataattgttggaaacatgtatgtcttcttttgaaaattgtctctttgtgtcatttgcccactttttaatggagttatttgtctttttcttgtaaatttktttaagttccttgtagatgctggatattagacctttgtcagatgcatagtttgcaaaaattttctcccatgtctctatttcaccccctaggccaggaactccttgatggtaaagatagggtcttattaatttacatat

SEQ ID NO: 764349 - DNA, 620 bp, Homo sapiens
gtaatatttttgttggtttctctgatttatttaagccagatatgtctttatgtatttgtttctggtaaaagtgaaattctgtgtgtgtatgtgtgtgaaatcctgattaattgagttttctgttactttggttctggtctaagggtattttctgttctaaggcaaaactactgttttaaatgtaccttgagtatttggatactcaaggccagtttactaagtattctttttcacttctaaaattaactaaagagttactctgcattattcaggagcctctcttattgctcagaatacttcttagtagtaggttaaccatgatacaggrtttcctgttttaataacatttttgggaaacaggcatgaacttattacctcactacaaacctcctttcactattatataaaatagtcttagattccttcttgctgcatggctgtgcttcatcctgggtaaattgtttacaggagttctgttctttcttctgtggaaagacagtaattagattacatgagataaaaaattggtatctaccaccccatgcttgttaattttttaaaaaataaaacaatgacctaaataggacgtacactaagaagttttcttttaaatatgaact

SEQ ID NO: 764350 - DNA, 523 bp, Homo sapiens
ataaacaacccaataaaatatggacaaaagagttgaacagccactttactaaataatgtgtacagatggctaataaatgataaaaacattgatcttcattcatcttaactaatttttagggaaatgcaaattaaaaccatgatgagataccactacataaccaagcaaatagctaaaattaaaaagaccaactgtcccaaatattggagaggatgtgaagcaaatgggatcttatatgttactgaagcaagtgtaaaatgttacaatcactttgcaaaatgacctgacagtatcctataaaactaagtatacatcaactttattgtctatcaattctactctcaagtgttttctcaaaataagtgaaagtrtatgcccacaaagcaatttctccaagagtgctcctagcagttttattcataacagccaaaatatgtaaacagctcagaggttcatcaagcctagtatattcatacaatgaattgaacacagctcagcaataaagaaaagtgaactattgata

SEQ ID NO: 764351 - DNA, 581 bp, Homo sapiens
cccctcccaccaaatacacattaagagacacgagtttaattttcccctgcctccttgaaaagctccgaaccccttcctataagcccttgtggggacagcagggcttgcacaatgacttttgtaactttaagttctacccaggtttccccacacagttggagtggaggaggaccccacgcctcacccttggcctccaggtcccgcagcagagtttccgcgcgggtctgcaggctcctctctcttctgggccgcgggcagccttcgccatctggtggccatggagagtaaggatctccccagccgaagagagctcctccactcttaaagctgctgctttgtcaggtcctgaacagttccgtcaaaaaaaaaaaaaaaaaaaaaaagaaagaaaaaaarggacccagtggcgcgatctcactgcaacctccgtctcccgggttcaagtgattctcctacctcagcctcccgagtagctgggactacaggcgtgcgccaccacacctggctgatttttgtatttttggtagaggctgggtttcaccatgttggccaggctggtctccaactcctgacctcaggtg

SEQ ID NO: 764352 - DNA, 300 bp, Homo sapiens
caatattattttcaattcaatttaataaatatttaatgagcacctaccacattcatactcactgtaaaaagaaagaaagctaactatagtgtctggatttgtatcttttcactttttcttcttgatggtatgctgrgctttgcttttatgtcatccctttaacaccattaccatggaaacacttctggggctataattctgctttttatagggagttcctagtctgattaccaaaagacaatattagaatcatacttacgtcctcctggtctgcactgccatcttcacaatagccctctc

SEQ ID NO: 764353 - DNA, 300 bp, Homo sapiens
caatattattttcaattcaatttaataaatatttaatgagcacctaccacattcatactcactgtaaaaagaaagaaagctaactatagtgtctggatttgtatcttttcactttttcttcttgatggtatgctgggctttgcttttatgtcatccctttaacaycattaccatggaaacacttctggggctataattctgctttttatagggagttcctagtctgattaccaaaagacaatattagaatcatacttacgtcctcctggtctgcactgccatcttcacaatagccctctc

SEQ ID NO: 764354 - DNA, 527 bp, Homo sapiens
gataaggtgcttttacctagaatatatgaagaatatttataactcaattattttagaaagacagataatataatttttaaatgtagaaagcatctgaatagacatttctccaaaaaagataaacaaatggatagaacccgtggacatggcaaaccaggttatcaagtacaaggctgcagttgcctgggaggctggaaagcctctctccatagagtagatagaggtggcacccccaaaggctcatgaagttcaaattgagattgttgccactgtggtttgccacactgacacctataccctgagcagagctggtcctgagggttgttttccggtgwtcttgggacatgaaggtgctggaattgtgaaaagtgttggtgagggagttactaagctgaaggcgggtaacactgtcatctcactttacatcccacagtgtggagaatgcaaattttgtctaaatcctaaaactaacctttgccagaagataaagtcacacaagggaaaggattaatgccagatggtaccag

SEQ ID NO: 764355 - DNA, 644 bp, Homo sapiens
gaccttgaccagaattgcttcattggagtaatggaaagaaagactatttaaaacgagctgaataggagtacttagagagagtaggagccatttgtagtagcagttctttggaatatgttcagtaatcaactagagattaataaaagcattgatgagcagcagaagatgaaattgggttgtatggcatggatattaaatagaataaacttgtctaattttattcactaactttattgaacgcataaaattcatgacattattgaacacatwcaattcatgacattaatttagataccaaagatttaaagctgaataatacagtctgtgttgtttcttcctagttccctcttcccaatttccctgagaaattcgacgctatattgctgtctagttcctattgaacagataggaactgaagaccagatcatatacctggattccctgacattaaagtggactgctgttctcatatatgaaagcctgtctgctgacaatctagcagatttatcatcattccctcctggccatgccagactcctgaaattgaatgtattgagtatcaatattgggataattttttttctataatctattgaaaatagagatttgagctcctggcctaaattcatccagtttcatgatgt

SEQ ID NO: 764356 - DNA, 540 bp, Homo sapiens
tggggacagatcaagaagctgtcacagatggcggaagaaaacctgaggaaagcgggacaaccagtcacaatgagtaatttaatggtagctatgatagtggttatcaccactgctgtgagtattccttcaacaagggctgacacagagaacaattayacttactgggcatatttatcaatcttggctggtaataatgcctggatgtaatcactatgacacagttacacatgttttctgatctcagtttttaccataataaatttgctcctataattgaggcatactgccctcaaaaacctatttgtaaacaaaattgaacctggccagaaaaaatgaatgtacttgtttaggaagattgcattgcagaagaggcagaggtgctgcacaacaattcctatggaatcattattgattgtcccctaaggggatgtttagcttaaattgcacctctcagtctgcgtgccatggccacattatgttcagctggtctgaacaaaatggtcagatggcagaaatgataagaagtatagcaagagttcc

SEQ ID NO: 764357 - DNA, 540 bp, Homo sapiens
tggggacagatcaagaagctgtcacagatggcggaagaaaacctgaggaaagcgggacaaccagtcacaatgagtaatttaatggtagctatgatagtggttatcaccactgctgtgagtattccttcaacaagggctgacacagagaacaattatacttactgggcatatttatcaatcttggctggtaataatgcctggatgtaatcactatgacacagttacacatgttttctgatctcagtttttaccataataaatttgctcctataattgaggcatactgccctcaaaaacctatttgtaaacaaaattgaacctggccagaaaaaawgaatgtacttgtttaggaagattgcattgcagaagaggcagaggtgctgcacaacaattcctatggaatcattattgattgtcccctaaggggatgtttagcttaaattgcacctctcagtctgcgtgccatggccacattatgttcagctggtctgaacaaaatggtcagatggcagaaatgataagaagtatagcaagagttcc

SEQ ID NO: 764358 - DNA, 620 bp, Homo sapiens
taatgagttgtgttttttttttccctaaaaatatgcaagttgctggtgtacactctaggataaaataatgtgtgaatacagaaatgaatcaataatcactcaatttacaaatcatattcatatggagtaatgtgactaattcttggctctgtactaaaagtaaaactatgagtttcaactctagctctttaattacagctactgcaaaatgacaggaattttggtacagtaagtatctgcttgaatgtttacttcggattatgtcagctctagtccaaccacttgcaaacatttcagacatagaaataaggcatttccaaggcacccttcatattaaaaagctctgctactatggtggctatttcctatggcatttctaaagcaacacrtctaaggaatatgggcatttctacctgtaatgatccaaaatatcagacagaaaaagatggttcccaagagtaacaaaatatatgcaaaacatagaaattggcagtccaaggttatcctttaatttggaggcgcttgcattaaagagaaaaacataaaataataaaaacatatatcatgaattttctttttcatcactactaaatcaaacaacaatcttctttattttctgc

SEQ ID NO: 764359 - DNA, 588 bp, Homo sapiens
gcctgaaagcgctccaaatgtccacttccatatactaaaaaaagagtgtttcaaacctgctctaccaaagggaatgttctactctgtgacttgaatgcaaacatcccaaagaagtttctgagaatgcttctgtctagatttgatctgaagacaatcccgtttccaacgaaatcctcaaggctaggcaaatatcctcttgcagattccagaaaaagagtgtttcmaaactgctccttcaaaacggtggttcaattctcttagttgagtacacacatctcaaataagtttctgagaatgcttctgcctagttgttacgggaagatatttccctttccaacataggcctgaaagcgctccaaatgtccacttccagatactacaaaaagagtgtttcaaacctgctctaccaaagggaatgttctgctctgtgacttgaatgcaaacatcccaaagaagtttctgagaatgcttctgtctagattttacctgaagacaatcccgtttcccacgaaatcctcaaagctatgcaaatatcctcttgcagattctacaaaaagagtgtttcaaaactgctctatgaaaagaaag

SEQ ID NO: 764360 - DNA, 588 bp, Homo sapiens
gcctgaaagcgctccaaatgtccacttccatatactaaaaaaagagtgtttcaaacctgctctaccaaagggaatgttctactctgtgacttgaatgcaaacatcccaaagaagtttctgagaatgcttctgtctagatttgatctgaagacaatcccgtttccaacgaaatcctcaaggctaggcaaatatcctcttgcagattccagaaaaagagtgtttcaaaactgctccttcaaaacggtggttcaattctcttagttgagtacacacatctcaaataagtttctgagaatgcttctgcctagttgttacgggaagatatttccctttccaacataggcctgaaagcgcwccaaatgtccacttccagatactacaaaaagagtgtttcaaacctgctctaccaaagggaatgttctgctctgtgacttgaatgcaaacatcccaaagaagtttctgagaatgcttctgtctagattttacctgaagacaatcccgtttcccacgaaatcctcaaagctatgcaaatatcctcttgcagattctacaaaaagagtgtttcaaaactgctctatgaaaagaaag

SEQ ID NO: 764361 - DNA, 602 bp, Homo sapiens
atacaaacatcacaaagatgtttctcagaacgctgcagtctgcaatttgtatgaattcccgcttccaacgaaatcctcaaaactagccaaatatccacttgcagattccacaaaaagaccatttcaaaactgctctatcaaaagaaaggttcaactttgttagttgagtagatacagcataaacaagtttctgagaatgcttctgtccagtttttatgggaagatatttcctttttcaccttagccctgaaagcgctccaaaagtccagttccagatactacaaaaggggtgtttcaagactgctctatgaaagggastgttcaacttttgacttgaatgcaaacatcagaaagcagtttctcagaacgctgctgtgtgctttttatatgtattcccgcttccagcgaaatccccaaagctagccaaatatccacttgcagattccagaaaaagagtgtttcaaaactgctccttcaaaacggtggttcaattctcttagttgagtacacacatctcaaataagtttctgagaatgcttctgtctagttgttatgggaagatatttccttttccaacataggcctgaaagcgctccaaatgt

SEQ ID NO: 764362 - DNA, 536 bp, Homo sapiens
ccacgaaatcctcaaagctatgcaaatatcctcttgcagattctacaaaaagagtgtttcaaaactgctctatgaaaagaaaggttcaactctgtcagtagagggcacacatcacaaacaagtttctgagaatgcttgtgtctagttgttatgggaagatatttcctttttcaacataggcctgaaagcgctccaaatgtccacttccagatactacaaaaggagtgattccaacctgctctatgatagggaatgttcaactctgtgtcctgaatacaaacatcacaaagatgtttctcagaacgctgcagtctgcaatttgtatgaattcccgcttccaacgaaatcctcaaaactagccaaatatccacttgcagattccasaaaaagagcatttcaaaactgctctatcaaaagaaaggttcaactttgttagttgagtagatacagcataaacaagtttctgagaatgcttctgtccagtttttatgggaagatatttcctttttcaccttagccctgaaagcgctccaaaa

SEQ ID NO: 764363 - DNA, 645 bp, Homo sapiens
agcagttttgaaacactctttttgtagaatctgcaagaggatgtttgcatagctttgaggatttcgtgggaaacgggattgtcttcaggtaaaatctagacagaagcattctcagaaacttctttgggatgtttgcattcaagtcacagagcagaacattccctttggtagagcaggtttcaaacactctttttgtagtatctggaagtggacatttggagcgctttcaggcctatgttggaaagggaaatatcttcccgtaacaactaggcagaagcattctcagaaacttatttgagatgtgtgtactcaactaagagaattgaaccaccgttttgaaggagcagttttgaaacmctctttttctggaatctgcaagaggatatttgcctagccttgaggatttcgttggaaacgggattgtcttcagatcaaatctagacagaagcattctcagaaacttctttgggatgtttgcattcaagtcacagagtagaacattccctttggtagagcaggtttgaaacactctttttttagtatatggaagtggacatttggagcgctttcaggcctacgttggaaaaggaaatatcttcccataacaactagacagaagcattctcagaaactagtttctgatgt

SEQ ID NO: 764364 - DNA, 615 bp, Homo sapiens
aaaacgataagaagaagactagtgattttaatacaagatagagcatcataaatatatgcagatataaggatggttcggagtaggcaggcatgatacctaactggggtccaaggaacaatatgtgccacttttccagagtttgaaagatgatgaaggttttacctattacagcttcatgatcagaagaagcaccagctttgcagygagaaagtcctgcatcctggttgtggctctgctacttcactatgtgattttgggcaaatcatcaaacatctctttgttagtttatttgtccataaaaggaggtggttggcaagatgacttgagaccctttctactcagaaactgttactctcgtgttatctgccccagtggtctaggggtaggtattatggttttttagactgactggataaagactgtgaggtgtggagcatctctggcaatggaagctttgtgccaggtgaagaggtgtgttggagttagaatcccttcaggctgtgttcccagacaggtttggcaagaagcgctgctggtatagtagctgtcactgcttaaaagttgtttacttctcattaaatacagtaaggaaaaaatgcagagtttgttgctgtt

SEQ ID NO: 764365 - DNA, 615 bp, Homo sapiens
aaaacgataagaagaagactagtgattttaatacaagatagagcatcataaatatatgcagatataaggatggttcggagtaggcaggcatgatacctaactggggtccaaggaacaatatgtgccacttttccagagtttgaaagatgatgaaggttttacctattacagcttcatgatcagaagaagcaccagctttgcagtgagaaagtcctgcatcctggttgtggctctgctwcttcactatgtgattttgggcaaatcatcaaacatctctttgttagtttatttgtccataaaaggaggtggttggcaagatgacttgagaccctttctactcagaaactgttactctcgtgttatctgccccagtggtctaggggtaggtattatggttttttagactgactggataaagactgtgaggtgtggagcatctctggcaatggaagctttgtgccaggtgaagaggtgtgttggagttagaatcccttcaggctgtgttcccagacaggtttggcaagaagcgctgctggtatagtagctgtcactgcttaaaagttgtttacttctcattaaatacagtaaggaaaaaatgcagagtttgttgctgtt

SEQ ID NO: 764366 - DNA, 380 bp, Homo sapiens
gatgcagggctgaaacgtagcagctttcctagttaaaactctggtacataatacagtcacgaggccatgtttgactgagtttaccacttgagctgtagtagccacaaatatgaaataaaaagggatttccaagttagatagaaggaacaacttatagtattcaatagtacagtayggaaattatagttaatagtaatttttgtatatttcaaaatagctagaagaattatagtcaaaattgaggtgatggatatcccaatttctctgacttgattattacacattgtatacatgtatcaaaatatcatatgtacccccaaaatatgtacaactgtgctatatcaattaaaaatacaaaaacagaaagaaaaagcaatatt

SEQ ID NO: 764367 - DNA, 549 bp, Homo sapiens
gtctatatggaatcatgatctccaacgttgttattatgactgttactcctcctacttactgtttacatcatataaccataactaaattttcttgatatatgggaggaaataaaggcatttccagtgcaaggcctaaagagcgatcctttattcctgtgaaagaggtaactctaagtacttacattcatccaaaaggcctgatattcattttagtccctgagaaatgcagtaactggaaatgtcatcctcttccctcattttgctttctgttccaggcctgtggctctctattatcagtgtgatggggatgtggcaaacaatctsgttaaatatttggctggagccgtttggtgattgtcaatctgaataaatgttaaaataaatgcacatcatgcttagtacctatggaagcaaggaaaaagcatataaaataaagacccttccagtgttcccacttaaagcaatagaaaccacaatattgcgtttttgcatttgtctcactttttctctgtattttggtttctgttttaatgggaaatggtagatgac

SEQ ID NO: 764368 - DNA, 510 bp, Homo sapiens
gtactgcaataaacatgcaataaacacggggatggagatatctctttgatatcctgattgcctttcctttgtataaatgcccagtagtaggattgctggatcacatggtagttctatttgtagttttctgaaagacatccatactgttctccatwctagtttaccgtatgtttattagttcactgtagttgtagttgactgctgtagtttacattcccaccgagagtgcatgagttctcttttttccacatctttaccagcatttgctattttttgtcttttttgataatagccattctaactggagtgagatgatatttcattataatttttgtttgcatttccctgatgattagcaatattaaacttttaaaaatatttgtcagccatttgtatgtcttctttggagaaatatcggttcagatcgtttgtccattttttaatcagattgtttgtttgctgttgagatgcttgagtgtcttttatattgtggatattaatcccctgttg

SEQ ID NO: 764369 - DNA, 540 bp, Homo sapiens
taacatgcttatgtcacgtgcttttgaactaagtgcaacaaggcagaagtaagtggtaattttcagcattcaaacaaagtgaatgcacatcacgtgtgaatggagatgttgaaatgtgtgttctgtccaacctggcactaaagttctgcataaggcttttgatgttttgtgtctctccctccacataccagatgctgcagaatccacattgcctccaaggcagcccagccatgtgtccttgatgcttcacgaacaatcataaattagcaaagccagcagtggctcccgtgacataaggtggcacactttatgggctctgccctcctcgcttcagtgttatttatwcagctccatatactgtgcaccgcttgctccttttattactcagcagagatttgtaaatacataaactcttccccaagccattttctgaaacagatgactggccgagtggcatgtcctttgtcagagtttgcgcagtgctcacactgccttgacaacagccacatttccttatgttctaagtccttccttaaatgt

SEQ ID NO: 764370 - DNA, 624 bp, Homo sapiens
tggtatacacctgtagtcccagttattctggaagctgaggtgggaggatcacttgaacctgggaggcagagattgcagtgagccaaaatcatgccaccttactccagcctaggtgacagagtgagaccctgtctcaaaaaaaaaaaraaaaagaaaaaaaaattgttggtgaaatgatttggagatttaagcccctccaaacctcatgttgaaatttgattctcattgttgaggtggggcctagtgggaggtgtgtgggttatgggggtggatcactcaggaatggcttagtgccatcctgctgataatgaggagttcttactctattagttcccataagacgtggttgtcaaaaaggccatggcacctccctgccctctctggcttcctttcttgccatgtgatctgcacacactggctctccttcaccttttgctactgaggcctcaccagtagcagatgctggcagcatgcatctagtacagcctgcagaaccatgagccaaatcaacctcttttcttaataaattacccagcctcaggtgtttatagctactaagtattcaaagacaagctcatattcactagaagttagagatgcaaaaagttttaaaaatatgcaata

SEQ ID NO: 764371 - DNA, 633 bp, Homo sapiens
ccattaccatagcctttgcatttattattgcttctacctacaacatcaatatctattctgctgcctctctcaggtttctgctcaaacatctacttcccagagaggccttccctgaccactctatctatagcagcacttcctaatgtaagcattttagaaatctggctcactgttgtattctaggcttccagcaacagaactsggtgtgtaataagtgcttcataaatattagttgaatgagaatgctgtgattctgctgtggaggttttacaatggagttagagggaatgagtcatgcactcactctattagttagggattttgtttcaaagtaagaaacaaattagagccaatctacatagaaagggggaatttattacagaatgtaggaatatattattgaagccaatgataaaagtgcaaatgcgtctctgagagagagagagagactgagtctaggggtcgagggactcgagagctgtcccattctctccatctctcatctctgcccttatctctgtgtctgcctcacccactctgtccctattgaacaattcccaccagtgggtggacgatgttcagccttcagtttccaagcaagtctaatcacttgtagagagactgacttctgaa

SEQ ID NO: 764372 - DNA, 620 bp, Homo sapiens
ggcaatgataacctcaactttaacagtcagatattagttgtgctaagagatagtctgggttaattttaaattatttggatcagtttgaagttacgtggagaaattggcaatggtttaatctacttgaaccagtctataccagataagtacagttagaattaatttgagctggattctgctagtatagacattctggaacacccttggatttttgctaatcctttaacagagatattattggcagttagatagtaattattatgttaagaaaatgtaattatattcttaggttactgaagagtttaatcagaaataattaaatgtttcaaaaatcatgtgggcatctctaacactgctagygtagcaaaacctcctgtccaaaacctccttccagtcactacctcctccatcttttccaaagaaaagccttaccctgacttaacatgccatagtgtggacgaaggattacccaggtgctgaggcaagagactgaaggcacaaactgttgcagtataataaggaaaatagttagaataagaatagttataatacaaattagatatagagataaccatagacattatcaatcattagtataaatattattactcattagcttt

SEQ ID NO: 764373 - DNA, 622 bp, Homo sapiens
aaatgagctggacagatgctataccaggtaggaacctggcacaaaagcacaataggagggagtgagcagtgttcctttgcctcatctaggctattacatactcctagttttaactttcccttatgctttttacctcaaatctgtattttcagcctcaacccctcccgccagctttagaaccatgtccacctgctggacctccrtacccaactgttccacagagtgtacctcacacacaatatatctgagattgagtttatcttttcctttcttctccctctctttgggaaatgcaatcagggtcacattattgttttcgagggctctaggtacttttgatttcatggccccctccttcattaaaaaatgtttaaaaatatatttataggccaggcgtggtggctcatgcctgtaatcccaacactctgggaggccgaggtgggcggatcacctgaagttgggagttcgagaccagcctgaccaacatggagaaaccctgtctctactaaaaatacaaaattagccaggcatggtggcacatgcctgtaatccctgctactcgggaggctgaggcaggagaatcacttgaacctgggaggtggaggttgtggtgagccgagat

SEQ ID NO: 764374 - DNA, 390 bp, Homo sapiens
gctccggaatgtgctgtgggaagaggaggtgagatgggatatagtggatcctgggtagaggctgtgtgcgcagcagggccgggggagtgggaagatggacaggaggggacggccttgtgaaagaccattgcagggtttgaatgaacaggatttggcaaatgattgggtgtggtgcaggggtgggrtgaatgagcaggggaaagacagaataccaagagcatggtgcatctcagcaggaatgaacatctctaggacatgtcttatttaggaagcatcaaaagggtgaaactagcagggaacattatgtgctgaagagaccaggaaatcttttctgagcattagtcagttggatttctcttgcctttagcttccttaaaaattataataaag

SEQ ID NO: 764375 - DNA, 419 bp, Homo sapiens
aaagcctagactttaccactacacagtatattcatgtaacaaaagtgcacttctaccctctaaatctataaaataaaaattaaaatgaaagaaatgaattaaggatcagaaacttgctttgcatcgcatggttggtgagtgatgatgacaccaggaatcagatccaggacttcccagctccatagcccatgctttttacacttacattgcaaagcccacttcaaccaaatttctytgattcctcacatcctcttctcgcacaatttataccccaaaataagccaacctttcctggatgaactcttagccatggcttcctcaggctaaagttttgaagcatggcaggttagcagagccaaaagatagttgggttttgctttaagtgttttctcaagttgttaaaactggctctcaaattg

SEQ ID NO: 764376 - DNA, 625 bp, Homo sapiens
cctggcagagcctcaccttggatagacaagatacctccagtctcagtactgggacactggcaaagccagactcaatgaccatcattcagcctctcatctcctggtaacattttctggaaatacattttttaaattatttgcacggtgtaacttctataagatcgatgtgtcagagtgccgacttttacttagattctatgtgactctttcaacaaattcattctttcagcaaatatgcattgaatacctagcatgcgctgggtcttgctctaggtgctgaggatactgtggcctcccagtcaggcagtgtgacagggagaaccacgactgtgcgtaggttattctcctctgacctcacaacctttttgatgtacatgtggtcatctccattcckcaatgcagccacaggctgggagggtggagcctgatataagccaggcccattgactccaaacccaggtcctcctgcatcctcacaggcttctttctgattctgcatcctcctttctagatcaacccagaacgccatgaccgcaggctgaatcacttcagggtctgcagtgacatcactctgtacaaggctaaaacgtggggcttaggagatgatcaccacaagtagcatccc

SEQ ID NO: 764377 - DNA, 609 bp, Homo sapiens
tatctatccaggaagagattcattataaagtattgaggctgagaagttcaatgatttgctgtctgcaagctggagatccaggaaaggtatagttcatccataaaaggtgtagttcaaactgacactatagattccagtccagatctgaggtcctaaaaacaaggagtgctgagggcaggagaagatcagtgtcccaactccagcagagttaattaaacttttctctacctttttgttctatttaggccctcaacctgaatagattagataacgcygatccatactgagaaggatcatctacttagtccactgatttaaatgctaatctctttcagaaacattctcacaaacacacctaggaataatgtttctccagctatctgggtatcttatggcccagttaaattgacacacaaagttaaccatcacagatgctaagacagtcaaatttcctgaagattcaattatggatcaaagttggagagttgatataattctaggcaaaatagggaaagttactgtaatccctgctaagtgatagcaaattgcttttggtatatttgttgagctggggagaaagcttttgctatgttccatagcagataccag

SEQ ID NO: 764378 - DNA, 593 bp, Homo sapiens
atagaaaaaatatgaagaaacgtggaggcttgtgtaaaattatgtggtcaaataacgaggaactctgaaaatactggctttatttctcatatattcaagtgatgcatatttgaaatcattctcaaaacaaatgaaattaaaatgaacacatttgctaagaacgttaaatgcttaaagagaatttttttcccatggtgaaggtgtgaaacagtgggagaaggacaactacctcaaaataaaatagcaaaggaatgtgatagtaatgaaaagtttcaaaaattgtaaaccaaattagtatctcatatcagattttaaattcctgccattattagaactctcatcttggttacttcttgtgcttttccttttttggtaacttgtcacccttttatattacrgtagaagtagagcggtttaatcagcttcagacctgcatcttagttggatttttccaaatgttggaaaatgcagatctctccacccaactaaatggaaaagcatatgtaagctaatatatgtggtgccctccactcaacccccatccaaggaaaacaagaagaataccttaatctctttatactccaaataggcta

SEQ ID NO: 764379 - DNA, 621 bp, Homo sapiens
tcttggtttgggagacttctcaaacaggaagatttcagggagatttctcagatggagaatagaaggatagtttggaaggtatactcttggagttcttggttagggatctgatttggaaggccttctatccttctcgtctttgtgtgtgtgtgtgtgtatatgtggagtggatctcagaaggaactgctgaaagtccagcaggtctaactcagagaaccctccttatttgtctggtcacattcggtgagccctgaagagagttcaacaggcctgtcttgggacgactatccactcttcgcaggtgactagtgtctgttttgttatgtgtattttgctrggatgaaaaatgttaatttggttcccctgcggcctattgggaaacatcttgcaaaacggagaatcttttgcctgtggttccataaaacagaaaagggtgggtttgtctttggggatctggctttgccctacagctgtgtctacttattaggccctagaaactgcatgctttcctggccctgttctccaagagcttcaccctgaagccaggaatccaactaagaaactggcaaatgaaaaactgtacaactactatatcttctgtctatttatatgtgttgtata

SEQ ID NO: 764380 - DNA, 622 bp, Homo sapiens
tcctttttgttttccagggccaagaaaatgtcttccgagctatgtacagcatttttaacaattgagtaaaatatactcctatgaacaaaattttgagcatatttatttttctctacctgattcttccagaatttggaaactatttgtgagtattctcaatttatggcrgtgtagttgtttgcataagtgtaataaaaatctgttttctttgtaatgggacaccattggagaaactggttattttaccaaggctttgactggaatgatatgccttctttaaagaatcaaagttgactcagagtcactaagaccctcttgagaaatctggcctcatatcttgtctgtacagtccctgtacaaggttcctgacctgtggtaactaaagaatatcactttctaacagacccacgagccccaagtgatcttaggacctccagaggagaagaatttacccagctcctaagtattcgaggatacaaacccatggctagcctcagcttttaaaaagtcttatctgagattccttatggaacagagtcccatcaaagccaattttaaaagcctatgtgaaaaaataattattctcgctgcactttatgcacataatcaggccaagtacaat

SEQ ID NO: 764381 - DNA, 562 bp, Homo sapiens
cctgatgttcaggatccagctgcaccactgggctggcacatccccctcttgctttgccaactgggacctataaacgaacacttattcttaccattttatctttcctcttttcctagtgatagatattttttaaaactgcctagggcattgtatgttacatgagaaaactcatcatttattccagatcaacctgaaatcctttttaccagcatctcaaggaggggaaacccttcctggctgctctgagcctccctggggaggaacgatgaagagaggcagtcatgcccatgctgccggctctgtccccatgtccccatctataatatgggtcattcccrgcctcgtgggccagaaccgaggggtaggaactgcacagggggttcctgagcaagagcaacttctcagggagggccaggccacgcgtggcctgggattctgtggctggaattaatgtcacccttgtgtatgtgtattggtttactgagtgctcacgtaggaggtaatgggaaaagaccttgggaactaccctggaggcagtgcagggctcggagcccgtatgcag

SEQ ID NO: 764382 - DNA, 619 bp, Homo sapiens
actatctgatccttagcggcttgtttttaagcttgttaggtgggtcccaagcagtttagagctaattgtttccactgctagggcaagactttgagaatgctttaaccaacactttatgaatcgtgaggttttccattctggctggtgacaataagcacttttccctctacttttgagggccaggcactgagttctctctgatttcttttggatagtcagcccaaaagatccccagcctctggyagttttctcacgctcacgagctgggcagtactcagctgaatactcagaggcagtgtgcagagtcctcgagctctgtgcagtgtatcctctcccaggcttgtttcaaggcaactccagctgccttagtgttcccagactttgagcagcagctcctcaactcagagttctctgggccttgcctggcttccctctctctgagctgtgacctgaacactcccctaaggcagatgctgggcaaattgtccagatcaccttgttcatttcctacctctcagggattcattgtctgatgtccagggtgttgaaaacttgttccatgcatcttgtccatgtggatgtttcaggtaccccattctgtttgaagcctgattttgaa

SEQ ID NO: 764383 - DNA, 619 bp, Homo sapiens
actatctgatccttagcggcttgtttttaagcttgttaggtgggtcccaagcagtttagagctaattgtttccactgctagggcaagactttgagaatgctttaaccaacactttatgaatcgtgaggttttccattctggctggtgacaataagcacttttccctctacttttgagggccaggcactgagttctctctgatttcttttggatagtcagcccaaaagatccccagcctctggtagttttctcacgctcacgagctgggcagtactcagctsaatactcagaggcagtgtgcagagtcctcgagctctgtgcagtgtatcctctcccaggcttgtttcaaggcaactccagctgccttagtgttcccagactttgagcagcagctcctcaactcagagttctctgggccttgcctggcttccctctctctgagctgtgacctgaacactcccctaaggcagatgctgggcaaattgtccagatcaccttgttcatttcctacctctcagggattcattgtctgatgtccagggtgttgaaaacttgttccatgcatcttgtccatgtggatgtttcaggtaccccattctgtttgaagcctgattttgaa

SEQ ID NO: 764384 - DNA, 477 bp, Homo sapiens
ggggtctgtgttcttcctgggaaatgctgccaatttcaggtgcgacaaagaaagaggttagagaaagacggagaggaaaggggaaggacagggaggtggatgatggatgggctccatggaaccgtcacttcatcttctcctcctctccctgtggcttctcgttcagaggcccaaacttgactgtcagagctgggagagccaggatgcacaaacaccccaaaggagattttcggcagcagcagcagcatcaggcaaccacacargaacttatagcctggggttcatgtagccatagaagggcccagatcctcccctgtctgagtgaccttgtcagccacgaagaggaaaggtttgagacgcacagttgtgtgatcctggattcagctcaggtcatcccctccatgggtgccttgtggttctgtccgtggtgctgaagcgcagctctatggctgaagaaacgcattctaagaccatgct

SEQ ID NO: 764385 - DNA, 598 bp, Homo sapiens
gcagctgcagaggccgcagcgatcacagatggtgtcccctccccagggggccaaggagctctgctccaccctttcattctcaccatgcaggcgccattccagatacccccaccaccccccacagctgtccagctggggagaaagctcaacggcaagggtcatcgtatccaacactgactgaatgctggcaccgcrccgggccctgatcttagtgtgtattacctcactgaatcctcaaaacaatcctaaaaggatctgcagatgggaaactttggctagaggtgaagccgcttcacaccactaacaatgccaaagccagcattaaacctgggcagcctggtgtctgagtccgggctgagccctcagccactcagtgactgacgtttacggtcacacgaaggaatcactacaccaagcgctgaagggacgcgtgtgagccccatttcgctggtgggtaacaggctcagagatgctgtggggcagggccagggtcacacagctgtgccctgtgccagcatgttatgtaacacatgctgcacctgcccctggcgttcctttcctgaacgtgtgctctggatcccagccgaacgtgtgctct

SEQ ID NO: 764386 - DNA, 630 bp, Homo sapiens
agatactttggtgtggggagtggtgaatcagtgatatttgaagtagtagtcaagcgaggatagcaaaggaaaatttttaagattttcttaaaaaaattatcagaatactttggtgtggggaatggcagatcaatgatactggtagtagcagtcaagggggtagcaaaggaaagaatatacatatgatgctaacagtattcttatttgtgaartgaattgatttggagaggctggctaaggcttagttttagagccatgatatatttattaatatataggtcattagtctagggagctggccaactaagtaattaccctgtttaataatggctctacaaatccaggtaattcctacatatctcactacttagattataagttaagctggccacagggcccgccttactgttctctgtcagcttgtatgtgtatgtgtgtgattaggcacttgtaaatttttacattgaagatattaatcacgtggtagctattttttcttttctcatatcagcttacatgttagtaggctgtaagtaaacacctgatccaagggtgactgtgaatattccttttagattaaattaaggattctgaggctatttctccagaaccaggccttgagacaagtgt

SEQ ID NO: 764387 - DNA, 565 bp, Homo sapiens
catttatgtttcatttatgttattctaaatagcttgtttttaacagtaagcatatagatacaaactaaattaaaatgcagttcgaacatcattcattcaacagaggttaattgaatgctcactaaaatacaaagcagtggtctagaaacatggaatagaatattgaagaaaacatgcaacctattctccaggattgtacaattcaagatgaggaatcttgcctagaggtgtcaaacattaataactttaagcactgaaaaagtaactttattgaaccaaactagtgtagttgcctcctcttcaagtcttcccaagatttatcttaggaaaccaaamtactaaagaaacataatccaaatcctgaagacaccatcttttacaatcagcacctttcaaactgatcaatcaagcacaaattgggccttccttccttcctttcttccttccattctcttcccttccccttccttcccttcccttccccttccttccttccttccttcctcctccctcccttccttccttttttctttcattctttctgtctttcttttcttttttttgt

SEQ ID NO: 764388 - DNA, 616 bp, Homo sapiens
ttgtgctgcagaagccttttagtttacttaagtcccatgtctatttttgtttttgttgcttgtgcttttgaggtcttagtcatgaattatttgactagaccaatgaccagcaattttccctaggttttcttctgatatttttagtttcaggtcttacatttaagttcgtgatccatcttgagttggttttcatatatggtgagaggtaggggtccaatttcattcttccacatatggcaatccaattttcccagcaccatttattgaaaaggtggtcctttctccagtgtatgtttttgtcagctttgtcaaagattgttggctttgtcaaagatatgtggctttatttytgagttctctattctgttccattgatctgtttttataccaatactatgctgttttggttactatatctttgtagtatagtttgaggtcagataatgtgatgcctgcagctttgttctttttgcttaggattgctttggctatttgggctcctttttggttacatatgaattttaagatgttataattctgtgaaaaatgatgttggtattttgatagggattgcattgcatatgtagattgctttgggcagtatggtcattttcac

SEQ ID NO: 764389 - DNA, 616 bp, Homo sapiens
ttgtgctgcagaagccttttagtttacttaagtcccatgtctatttttgtttttgttgcttgtgcttttgaggtcttagtcatgaattatttgactagaccaatgaccagcaattttccctaggttttcttctgatatttttagtttcaggtcttacatttaagttcgtgatccatcttgagttggttttcatatatggtgagaggtaggggtccaatttcattcttccacatatggcaatccaattttcccagcaccatttattgaaaaggtggtcctttctccagtgtatgtttttgtcagctttgtcaaagattgttggctttgtcaaagatatgtggctttatttttgagttctctattctgttccattgatytgtttttataccaatactatgctgttttggttactatatctttgtagtatagtttgaggtcagataatgtgatgcctgcagctttgttctttttgcttaggattgctttggctatttgggctcctttttggttacatatgaattttaagatgttataattctgtgaaaaatgatgttggtattttgatagggattgcattgcatatgtagattgctttgggcagtatggtcattttcac

SEQ ID NO: 764390 - DNA, 667 bp, Homo sapiens
ttatcactaaatcctgaaagaagagtctacaaatttccatatgattttgtaggactctcaaaaccctgtaacatctctttctgcaaaaatttgttggagtaaggggtatatttgataaagacattaggcaaaaggcctatgtgtgcacacaactgttataatgaaaatscaaggaagaaaggcaaatttgtaacattagaatttctatgtggaccacatttggaaagcagtgttaatttaatccatacataatatcaaaggatgctttggtgtgtgctcatcttcaaaggaagcattcaggaaaacatgacacaataagccaagactctaataacctcacattctggaacttcagtaaaaacagaccagtacaatacctttattctatctttacagcaactttttctgtaaccttctgattaggctaaattaaacatatgttcaagtttggttctataaattaaatctttttttataaatgcaaaatctatatattatttttaaaacctgttttacacattagaaataagacagaactaaatatttatcgagataagttagggtagtttcttggccatgaagaaataagttagaagccgttctaagttttgttgtaagaagaaaaaattgtactattcaaactaaaatctcctggaacactaaaaag

SEQ ID NO: 764391 - DNA, 667 bp, Homo sapiens
ttatcactaaatcctgaaagaagagtctacaaatttccatatgattttgtaggactctcaaaaccctgtaacatctctttctgcaaaaatttgttggagtaaggggtatatttgataaagacattaggcaaaaggcctatgtgtgcacacaactgttataatgaaaatccaaggaagaaaggcaaatttgtaacattagaatttctatgtggaccacatttggaaagcagtgttaatttaatccatacataatatcaaaggatgctttggtgtgtgctcatcttcaaaggaagcattcaggaaaacatgacacaataagccaagactctaataacctcacattctggaacttcagtaaaaacagaccagtacaatacytttattctatctttacagcaactttttctgtaaccttctgattaggctaaattaaacatatgttcaagtttggttctataaattaaatctttttttataaatgcaaaatctatatattatttttaaaacctgttttacacattagaaataagacagaactaaatatttatcgagataagttagggtagtttcttggccatgaagaaataagttagaagccgttctaagttttgttgtaagaagaaaaaattgtactattcaaactaaaatctcctggaacactaaaaag

SEQ ID NO: 764392 - DNA, 541 bp, Homo sapiens; identical to SEQ ID NO: 751957

SEQ ID NO: 764393 - DNA, 547 bp, Homo sapiens
cctcttctagaacatgcattggttcctttttatgaattccaactcagttaatattttctaccacttcatctattttattgatctttcatccatctttcatagcacatcagtcataattattttaaaatcttccttttcctcctccttcttcttctatagtcttgaaatattgtgtagaatgagtattatttcttcattaaatattttccagtgaaactatcttaacttygtgttttcttgtatggaatatttaaaactatatgttcagttcctctaataagaatggaataattcatatttattcttgtgtgaatattgatagctcgtgaattccaaggaattgatcgattttcatataagctttacaatttatgaaaataggttgtttatattatttccatatttttcttttaatatctgtgaaaacagtagtgatattttcttattcattcctgatatatttgtgcctgttttttttttttctcagtcaaactagttaaagttttatcagttttcttaatcttttcaaagaactagccttttggtt

SEQ ID NO: 764394 - DNA, 551 bp, Homo sapiens
gaatgtatgtaaacacctggatgcccaggcagaagtctgctgcaggggagaagcactaatggataacctctgctagggcagtgcagaagggaagtgtggggtcagggcacccacactggggcactacctggtggagctgtgagaagayggccatcatccaccagaccccagaatggtaggtccaccaacagcttgcacccgtgcacctggaaaagccacaggcactcaataccagcccatgaaagcagctgggagggtgtctataccctgcaaagccacaggggtggagctgcccagtgccgtgggaacccacctcttgcatgagtgtgacctggatgtgagacatggagtcaaaggagattatttcagagctttaagatttaattactgccttgttgactttgagatttgtgtgggccctgtagcccctttgatttggccaatttttcccatttggaatggatgtatttgcccagtgccagtacccccattgcatctaggaaataactagcttgcttttgattttactggctcataggtggaagggactt

SEQ ID NO: 764395 - DNA, 575 bp, Homo sapiens
tctggatggattttgtcttgttgcgtttctgtcataaagtgacaattttaacattggcaggaaactaaaagccattgtaggggtcaaggaaaaacttctttgccctctatcgtatcactgaaaaactcaactgacaaaaggcaaattaacaggggaaacagtgtacaaatttattagcatgcacagggaaaaaatcagagtgattacccaaaatcycaatgggatagagatgcttatatattctactttatagtggaatatagtggaatcttataggaagatgggaaagtgtggatgattttagggggagtattaaatgattttcagggaaattcaatgggcttaaaaaaagatacaatggcctaggatagtgtctcttgggcctgaagagcagatgatggtttgtgacaaaagtctgtccatgagtgtggataggcttctgtctttcttcgtgtgatattagttcagttaatgaaaactgaagtcccagcagacataattgttctgagtccaggctttaggcagataagagaacttcagaaaacaacttcttcttgtgcttcaggaaagacaaa

SEQ ID NO: 764396 - DNA, 587 bp, Homo sapiens
agaagagttgtggacaagcatgtttgtgtgtttgtgtattgtctggatcctgtgggaccaggttcagggtcacatttgcagttctcaactgaagagaacattacagcagaacatgtcccaaaaaggaacctgagttgggtggtaggggatggcacatgatgtggctcagttcactcatggcaggagccgtgactgcccggcagtaggaatggcctttttatattaaactttgaaccccagcatgtcctaagaatgggtaagtgggaagcattgacacagttcaccctgagttactcctggggagaattttatagccaagtcagccttcagttcaaaccaaggagggggagaggggataaactggggatgagaggagaaagcagggaagtgattgccgaagagaagtagggacgactggarctctgatctggacgaggttgtgtcagagccagagaattccttgtagctttttcttccatgtttttagatgagtcgtgactgctgctgggagaaaccaccagaattatattctctcgaaggtgaaaattaattggattgaagcttatctgttagttttgcctggaaat

SEQ ID NO: 764397 - DNA, 469 bp, Homo sapiens
catagcaatgtgagaactggctaacacagaatgtgtgtgtgtgtgtgtgtgtgtgtgtgtgtgtgtgtgtgtggtgtgtacttgctttctttttttttttgaggcagagtttcactcttgttgcccaggctggagtgcaatggagcaatctcggctcactgcaacctccatctcccaggttcaagcgattctcctgcctcagcctccctagtagctgggattacaggcatgtgccaccacgcccagctaattttgtatttttagtagagacagggtttctccatgttggtcaggctggtctcgaactcccagcctcaggtgatccrcccgcctcggcctcccgaagtgctgggattacaggcatgagccaccgcgcctggcggtgtgtacttgctttctaaaaaacattttacttttttactgaggtaaaatttgtgtaaaaaaaattatcattttttaagggcagggg

SEQ ID NO: 764398 - DNA, 656 bp, Homo sapiens
ctagtaatcagtagtagcagcagtagtaagcagtggcagtagcagtagtagtaaaattaaacccttgatcagttatgaaatgccagatactgttctaagggctttacatacctatatattcaatccaccaagcaacccgagagggtatttattatacttatccctgttgtacaaatagagaaacagaggcacagagtcgttatataattaacttgtgaagatcacagatttgctcttgaatctgtgttctcatcacactatgctcttctgtccctacagcagccactttctcttactaccactggtcatctgtcatttattaagaacctactgttggtttgactgtgtgtcaaatactgaaggcttttattattagctctttaatgtcatagtcttaattgaatactttgaggcattgtgaggacactagtttctccagkgcttgggttgacattgtaaactaatgtggcctagggacctgcagcgtcagcattacttagggatcttgttaaagtttggggtggtgttcttcaattgccaacatgaatggaactaaaaaagtctggtctcccaacctcttgttagctatttgatggtggccaagcctcactgtgtgtctgttgccttacgtgtcaagaatggggatcctggagcag

SEQ ID NO: 764399 - DNA, 628 bp, Homo sapiens
tcttccctgcttctataacatttataaaaggaatttgtgctcagttgtggtctattttagtgttaaaataggtaaatgagtaagaaatcctattgcagaacatgatgcctttattgctggaatatccaaaggcattcaaaatattaaaacttgcccagaacatttacactactaaacacaggaatgttataaagatatatrtacatatatatatataatatataatgtcacaagccactaagaagttaaaattgtgccaacattttctacaaactactctttatgtgacacatcaaagcattaaccacataaaatatgaactttttctgttcacactggaataaggcatctgaaagccctaaacactgctgaagtgaaaattagaagaaaaaactcaacattcacataacatcaaatgtacatgctgcacgcacacaaaagacactgagaatatttttaagaagccacacatcacagaatttgatagtcaacttcatgcaatgagttccttttatatttcatcaaaaggtttacttgcccctttacttgttccaaatttccaagattaactcttaaatttgaaaaagtatctttttaataaaaatcaggtatctctttatatccatga

SEQ ID NO: 764400 - DNA, 631 bp, Homo sapiens
tcttatgccatcctcaacccacatccctcaatttaattatatatcaaatactgggtgcatcattatgactatataaatgttgtttattactaaaccatgtaatgtaccataattacttattccttctcctagaacttattgtttttcctcggattcttaatacatcctggtttctgttaattttttaaatgtacttactattacttttgtcctaaatgccccaacggatcttttaaaatctatcggtaatttttgcacttgctgggctacagtttcaaacactctatacgtttctgcctcctgccctcccttcttcgacccacccatcctgcaccctctctcccacggcctacagttcttctgctcctattgtggaccctttgatctccgggccagctacctggctttcatgctaagccttcttttcttcaccctcctccaccccaggcattacatggcctggttttttaataccaygtctttctcttccttgattgactccctcattttataaagaacattcttcatttgcttcttaagaaaagatgtgtagtgggcaaaacgtttgagcctttcatgtcagaaaatgtctgtatactactgtgtaccctcaatcgataatttggcttag

SEQ ID NO: 764401 - DNA, 651 bp, Homo sapiens
acttaacatgacccagtgttaataattaaacagggccaagcattctgtaaatatttaaagccctactaatatacacttggcatcatctatgaaaaattcgggtacctgccacacatttggaattcaggtgtgaattataaagtgctcaacaaatttaaaataacagaaggcaagccacggtcactgcaggcaggagcactaagggtaaggagaagggctaattgacgtcctaacaacaaatgaggaagcaggaaacccataaaaactggtcacaagcatataaaaccccagcattcattttttatagaagcactgaatattaagtgtgccacaggccccaagacattaatgtaatacaacccaacagaaggagacaaagtcgctgcaatgctccctggaaaggcaaagggatcagcaaccaggcayttggaaggccccctgattagccaggccacttggaaaagtcatttaatctctcaaagctgctctttatctacaaataaaaataataattctgtcatttcctactctacagggtcatggtggggatcaaaagtagaaaagctgctgcatagaatcactgactggatttcacaccttgttccctcctctctcttttcttggcttccagcaccccacacaccgtcctgt

SEQ ID NO: 764402 - DNA, 591 bp, Homo sapiens
ctttattttttaaacctttattttaggttcgagctacatgtgagagtttgttatatacataatctcatgtcatgagagtttgttgtacagattatttcatcacccaggtattaagcctagtacccaacagttatttttttctgctcctctcactcctcgcgccccccactctcaagtagacccagtgtctgttgctcctgtcctcgtgttcatgccatgaattcttattcagaaagaagatgaagggtatgttctaccaaacaaagccattaacctaaaaagagaaagcaaggaatgaaaaactaacttgaactccaacccaggagagatgcaaaggtaaggtaattctcatgatgatggtaaaggatgtccccagtcaacagctgctctcaaagatgwaaggcttcaaaaaaaacaaaaacctgtctttctatgtgtgattattccacacacctccacccgtgatatattgccttaatttctctgaatatactgaaaaaatgattgcactgtgtgagttttagaatgaattaaggataggtacacggaaaaaataggcaaataaagtgaagaatgtgttaactctagagt

SEQ ID NO: 764403 - DNA, 563 bp, Homo sapiens
gctgtatgtttttcccagcaagcttgaattcaaactgtggccttgaatgtccccaggccctgataaaggtaattaggtttactagaaagaaaccagccccagcactgagtcaaattcctaaaaccctcatgtaaactctatgctttgacccctttgstgcagacatacccgggtagaacattctttttctcttgccctctgtcatgaggatatgaggcagcactctgcatctaagttccactaataattgctttggactgatcaccctggcattttgtgcttctttcttgtgaatcccaatcagccccatcttgagatggtttggagcactttgtgggaacattcttgcctccacttttggggtgacccaagctataggttcggtgggacaaaataaagggtgactcaaatgtcttacagttggaatcgtctacaggttcttcacttaaacatctggtagctgggctgggatgactcaagggctgtgctctggagctgctgaccagagtgtttacatgtagccttccacgaggcttgggctttgtcagggtatgtatgagcag

SEQ ID NO: 764404 - DNA, 563 bp, Homo sapiens
gctgtatgtttttcccagcaagcttgaattcaaactgtggccttgaatgtccccaggccctgataaaggtaattaggtttactagaaagaaaccagccccagcactgagtcaaattcctaaaaccctcatgtaaactctatgctttgacccctttggtgcagacatacccgggtagaacattctttttctcttgccctctgtcatgaggatatgaggcagcactctgcatctaagttccactaataattgctttggactgatcaccctggcattttgtgcttctttcttgtgaatcccaatcagccccatcttgagatggtttggagcactttgtgggaacattcttgcctccacttttggggtgacccaagctataggttcrgtgggacaaaataaagggtgactcaaatgtcttacagttggaatcgtctacaggttcttcacttaaacatctggtagctgggctgggatgactcaagggctgtgctctggagctgctgaccagagtgtttacatgtagccttccacgaggcttgggctttgtcagggtatgtatgagcag

SEQ ID NO: 764405 - DNA, 556 bp, Homo sapiens
gaatcatcagtagatgctaaaatatggcatattttggtacagaacaggatatttcacagagcctcaaactttcaccctacagactactcaccagttaaaaaaagaaaaaggcacctttatgctgccagtagatagcactttaaccaaatgatgaaagtcaatactgccaataataggactgactgacacactgtctctcctcatgtgatatacggagaaggacatgacatcagcaatgtagtcctgtagccaaaagtgagtttacccgttcatgaacccctgtagagcacgagaacaagaggaaacaatcagatggatccaatttaaaggtcattgtgcaatagaactcttttcttttcttttttttttttttttttttkgagatggagtctcactctcgcccaggctggagtgcagtggcatgatcctggctcactgctatgtccgctttctggggtcaagcaattcttctgcctcagcctcccgagtagctgggattacaggcgcgtgccacccagctaattttgtatttttagtagagccggggtttcaccgt

SEQ ID NO: 764406 - DNA, 489 bp, Homo sapiens
tcacagtagaaccatttctatttctttcctgtaacttttttcaaggtgtaaacattgaaaaatttaggaaagttcatgtcttctattatagtagattttgcccatcatacacaaaccctataatagttgatagaaaaaatcagaagacattttgtatcattaatgattaatcattctgtttgggatgtcattaaatatagtgtgataattaaaaygtgtgaatgatcatgtgtaaatgataatgtgtaaatgatgtgactgttctttttaggagaaggtaagaataaaagaaaatttatactgatacactaataaaaaaattattaccggccaggcacggtggctcatgcctgtaatcccggcactttgggaggccaaggcgggcagatcacgaggtcagaagatcgagaccttcttggccaacatggtgaaaccccatctctactaaaatacaaaaagttagctgggggtagtggtgcgtgcctgtag

SEQ ID NO: 764407 - DNA, 489 bp, Homo sapiens
tcacagtagaaccatttctatttctttcctgtaacttttttcaaggtgtaaacattgaaaaatttaggaaagttcatgtcttctattatagtagattttgcccatcatacacaaaccctataatagttgatagaaaaaatcagaagacattttgtatcattaatgattaatcattctgtttgggatgtcattaaatatagtgtgataattaaaatgtgtgaatgatcatgtgtaaatgataatgtgtaaatgatgtgactgttctttttaggagaaggtragaataaaagaaaatttatactgatacactaataaaaaaattattaccggccaggcacggtggctcatgcctgtaatcccggcactttgggaggccaaggcgggcagatcacgaggtcagaagatcgagaccttcttggccaacatggtgaaaccccatctctactaaaatacaaaaagttagctgggggtagtggtgcgtgcctgtag

SEQ ID NO: 764408 - DNA, 629 bp, Homo sapiens
cctggatccttggatgaaacactcttgattatggtgtattatctttttgatgtctttttggatttggttagccagtactttgttgaggatttttgtttcatttttatcagggatattggtctgtgttttctttttttgttatgtcatttcctggttttggtatcagagtgatgctgacttcataggatatttatggaggattccctgtttctcaatttttgaaattgttttattaggattggtaccaattcttctgtgaatagaygtgtggtagaattcaactgtgaatctatctggccctgggcttgtcgttgtttgcaattgttaaaattactgattcagttttactgcatgttattggtctgtgtagggtttctatttcttcctgatttactctacgatggttgtatggttccaggaatttatctgttttctctgggctttctagtttgtgtgcatacaggtattcatagtaatattgaatgatctttgtatttctgtggcatcagttgtaatgtccttagtttcatttctaattgagcttatttgattcttctctcttcttttcttggataatctcactaatggtctattaattttgtttatcttttcaaagaaccaggtttttg

SEQ ID NO: 764409 - DNA, 636 bp, Homo sapiens
taacctaaaaatcattcaggagcagattgtttaatttccatgtatttgtgtagtttaggggttccttttggagttgatttcttgttttacttcactgtggtctgagaagatatttgatatgattcctattttttttttgagacggagtattgctctgtcactcaggctggagtgcagtggcacgatctcggctcaccacaagctccgccttccgggttcacaccattctcctgcctcagcctcccgagtagctgggattacaggtgcccgccaccacgcctggctaatttctttttgtatttttagtacagacggggtttcactgtgttagccaggatggtctccatctcctgacctcgtgatccrcccacctcggcctcccgtagtgctggattacaggcgtgagccactgcgcgcctggccgatatcattcctatttttaaaaatgtattgagatttgttttgtggcctaccatatggtctatcttagaaaatgttccatgtgctgatgagaagaatgtgtattctgcagttttggggtagaatattctgtacatatatcttacgttcctttgttctagagtgtacgttaagcctagtgtttctatgttgccttgctgtcttgatgatttgtct

SEQ ID NO: 764410 - DNA, 636 bp, Homo sapiens
taacctaaaaatcattcaggagcagattgtttaatttccatgtatttgtgtagtttaggggttccttttggagttgatttcttgttttacttcactgtggtctgagaagatatttgatatgattcctattttttttttgagacggagtattgctctgtcactcaggctggagtgcagtggcacgatctcggctcaccacaagctccgccttccgggttcacaccattctcctgcctcagcctcccgagtagctgggattacaggtgcccgccaccacgcctggctaatttctttttgtatttttagtacagacggggtttcactgtgttagccaggatggtctccatctcctgacctcgtgatccacccacctcrgcctcccgtagtgctggattacaggcgtgagccactgcgcgcctggccgatatcattcctatttttaaaaatgtattgagatttgttttgtggcctaccatatggtctatcttagaaaatgttccatgtgctgatgagaagaatgtgtattctgcagttttggggtagaatattctgtacatatatcttacgttcctttgttctagagtgtacgttaagcctagtgtttctatgttgccttgctgtcttgatgatttgtct

SEQ ID NO: 764411 - DNA, 455 bp, Homo sapiens
tattttcttaaacaaaatttcaaaagtttttgctttctcttcccactcataaacaccatttattcttaggtttggctattttacctaatcccagacttggattgttttacataatcttagaagctgtgttcatttctcttaattattttttgcttcatttttgtctgattagattaatttgaaagccttgtctctgagctctgaaatgcttcattgtaattgttctagtctgctgttsaaagtttccactgcattttgtatttccctaagtatatctttcatttctagaagttctgattgatttttctttgatatctatctctttaaaattttttccattcatgctctgaattgttttttaaatttctttatgttagtttttacttttcacctttcttcttcttgagtaactaaatagttaacattttgaattctttatctggcatttcaaagat

SEQ ID NO: 764412 - DNA, 606 bp, Homo sapiens
aaaaagcagacatttagtgcctaagggaatttgcactagaaaacccttttcttctacaggttgatgcccggtgaaagtaaaaacatgcctgtgccttgcagctagatagatatagatttgaattgcaattctgccacttcctggctgtaatcatctcagacatcagacaagagactttaacgtcttggggcatccatttcatcatctctaaaacagggacaaagccaggcrtggtggttcatgcctgtaatcccagcactttaggaagccaaggcgggcagatcgcttgaggacaagagtcggagaccagcctgaccaacatagtgaaaccccatctctattgaaaatacaaaaattagccaggcatggtggctcctgcctgtaatcccagctacttaggaggctgaggcaggagaatcacttgaatccgggagggggaggttgcagtgagccaagattgtgccactgcactccatccagcctgggtgacagagcgaggctctgtctcacaaaaagaaataaaataaaataaaaataaaacagggacaataccaagggtggccataaaggccaaaagagataatgtagctgctgcctaccacacag

SEQ ID NO: 764413 - DNA, 606 bp, Homo sapiens
aaaaagcagacatttagtgcctaagggaatttgcactagaaaacccttttcttctacaggttgatgcccggtgaaagtaaaaacatgcctgtgccttgcagctagatagatatagatttgaattgcaattctgccacttcctggctgtaatcatctcagacatcagacaagagactttaacgtcttggggcatccatttcatcatctctaaaacagggacaaagccaggcatggtggytcatgcctgtaatcccagcactttaggaagccaaggcgggcagatcgcttgaggacaagagtcggagaccagcctgaccaacatagtgaaaccccatctctattgaaaatacaaaaattagccaggcatggtggctcctgcctgtaatcccagctacttaggaggctgaggcaggagaatcacttgaatccgggagggggaggttgcagtgagccaagattgtgccactgcactccatccagcctgggtgacagagcgaggctctgtctcacaaaaagaaataaaataaaataaaaataaaacagggacaataccaagggtggccataaaggccaaaagagataatgtagctgctgcctaccacacag

SEQ ID NO: 764414 - DNA, 556 bp, Homo sapiens
tgattttttgatatggaaggtaaagttgaaaaaaattacatggcacaaacgtgtgcttacattcttccacattctgaaaaatgtgtaagaaaagagatacgaaagctgaatctaagaggcctcaaccctgcctaagtgaaattataaaagcaaggaacagagataatgggaagaraaagaaataacagaaaaaaaattactcaaagaagaaaggcataaagcttagattaaaagcatccacccaagtgctaagccctatgaatgaaaagtagtactgttgggattgtaaaatcaaacttcctgggttcaaacactggctttaaaactcatttgttggaaaatgagttgggaaaaagttatgtaactttttaaagttgggaaaattatttaattatttagtgcctcagtttccccttctataataggtgtgtaataaaatatgaccttcctcacagagttattgtgaagctgtatcaagtcaatgcatgtaaagttgttactacatgaaagggaggggaatgtagtaattacaactattattatacaccatgacaaa

SEQ ID NO: 764415 - DNA, 630 bp, Homo sapiens
tttatctgcaattctagcagagaccagccaggacatctgttaccaagggtgggattcaagcttctcattcaacagatcattgacattcactaaggaaaagcgaaatattgagtgggtttctctgatcttagtctgcttagtggtctgtatcagacacaggaactcaattgatcattatttatggatgaaaccactcgccattatgaatcagtaacatgccaattacgcatttggaataaataatgggaaagactttttctcattgctgaattgataataaagaagttttgacagtgtctgctcatttttcaggaaaagacaacaaaaaaggacacatgaaacttgtagggaagccagcctccacctgccgttcactctgcccacagtaacaaaagtgcggatgcagccactgttagcgtgttctgcccacggcactatttagtgakgcatcagacctttctcacatttttctgtgtggactcatgtcctgcttttgtgcttctctcaaggactttcggcttctcctgaaagaacacgtgttcatccagcccaacatcttggcaaaggtaagtctttttggcagcagggccattaatgatagtaggtgctggcaaaagtgtaggcagccag

SEQ ID NO: 764416 - DNA, 582 bp, Homo sapiens
acatggatggtagttttggcagaagcactgtgtgcagagaaggcacatccatatccagagcgtctattccagtaaagataaaatgctgccccttccatgatggaagtgtcccatgtaactggttgactactctggggaatgatgccatatcaggggctcagtgctggtctctgctgctggcatattggacactcagcagtggctgtagccaggcccatcttggtgggtgaaagtccatgatgctgagcccaatccatattgttcatccctcccaccrtggccactttgttcgtgagcccattggccattgacaggggtgactagggtaagaagccaattggtatccacagaacaggtcattctagccacttgattaccaaagttttcctgtgctgaagtgaccctttggtgagcattcacatgggacacaaatatcttcatgtcttttgcccactcagagaggtctagccagtaactccttcccaaattgctttgtcaccagttctctaatcatgttcctttcatgtccctgaccatccagccaaaccactggctatagcccatgaattggtatacaactgc

SEQ ID NO: 764417 - DNA, 582 bp, Homo sapiens
acatggatggtagttttggcagaagcactgtgtgcagagaaggcacatccatatccagagcgtctattccagtaaagataaaatgctgccccttccatgatggaagtgtcccatgtaactggttgactactctggggaatgatgccatatcaggggctcagtgctggtctctgctgctggcatattggacactcagcagtggctgtagccaggcccatcttggtgggtgaaagtccatgatgctgagcccaatccatattgttcatccctcccaccgtggccactttgttcrtgagcccattggccattgacaggggtgactagggtaagaagccaattggtatccacagaacaggtcattctagccacttgattaccaaagttttcctgtgctgaagtgaccctttggtgagcattcacatgggacacaaatatcttcatgtcttttgcccactcagagaggtctagccagtaactccttcccaaattgctttgtcaccagttctctaatcatgttcctttcatgtccctgaccatccagccaaaccactggctatagcccatgaattggtatacaactgc

SEQ ID NO: 764418 - DNA, 644 bp, Homo sapiens
taaaataaatgtactgcagcctcagtgtgccatgttgataaagtctgcagtcatgtacagcaatgtcctaggccttcacattcactcagcgctcactcactgactcacccagagcagcttccagtcctgcaagctccgttcatggtgagtgcccaatagaggtgtgccattttaaatcttttctatcatttttaccgtaccttttctatcatatttttactggactyttgtgtggatatgtttagatacacaagtacttattagcactgtgttccaactgcctacagtattcaggacagtaacatgctgtacaagtgtgtggcctagatgcaatcagcccagcgtctggtctaggtgtatagcaggctctaccatctagtttgtgtccatacactctatgatgtttgtacgaggataaaataacttcacaatgcatttcccagaatgtgtcctcatcgttaaacaacacacgactgtactccaaaagggcagaaaggcttacacgtcttggtgcccaccccgggagcttggcccagctgcctggtattcagagtcccacagtcaatggtggatgaattaatgcttgcacagatggagacaagtcatcattgagtgaccattatgcacaaactgcacatgttaca

SEQ ID NO: 764419 - DNA, 604 bp, Homo sapiens
aaccggctgaggtgagcaggcatgcggccccgagctgacaggcagctgctttgtgggttagcttaggctcggggtgcagctggtcagaggaagtttacttagatccatacccagtgacccattctttctcccgaaccacttcatttaagatttctgacctttatagtcgtccttggggagaataaaagaggaggcggccctattcattgccagtcactagaggaccacactaatccaccacaccaggctggagctgggtcaggcatccatcccygtccagatatccattagtgaagtgagctcccagcctctcttaaaaagcagggcaggagctcctcctgggacctggtgccatcagccctcctcagcaccgtcctcctcaccacaatggatctgctctgtaccagtgagagggcagagcgtgagagagctacagctgaagtctctgccccagaagaccaggtcggcggaggtttcagcacatctggccaatgggcagatttggtgcataccctgcttttatacagccatcaaactaagcatggtttctacatttttaaatggttataaaaacgccgaaacaaagaatatgcaacagagtccc

SEQ ID NO: 764420 - DNA, 604 bp, Homo sapiens
aaccggctgaggtgagcaggcatgcggccccgagctgacaggcagctgctttgtgggttagcttaggctcggggtgcagctggtcagaggaagtttacttagatccatacccagtgacccattctttctcccgaaccacttcatttaagatttctgacctttatagtcgtccttggggagaataaaagaggaggcggccctattcattgccagtcactagaggaccacactaatccaccacaccaggctggagctgggtcaggcatccatccctgtccagatatccattagtgaagtgagstcccagcctctcttaaaaagcagggcaggagctcctcctgggacctggtgccatcagccctcctcagcaccgtcctcctcaccacaatggatctgctctgtaccagtgagagggcagagcgtgagagagctacagctgaagtctctgccccagaagaccaggtcggcggaggtttcagcacatctggccaatgggcagatttggtgcataccctgcttttatacagccatcaaactaagcatggtttctacatttttaaatggttataaaaacgccgaaacaaagaatatgcaacagagtccc

SEQ ID NO: 764421 - DNA, 604 bp, Homo sapiens
aaccggctgaggtgagcaggcatgcggccccgagctgacaggcagctgctttgtgggttagcttaggctcggggtgcagctggtcagaggaagtttacttagatccatacccagtgacccattctttctcccgaaccacttcatttaagatttctgacctttatagtcgtccttggggagaataaaagaggaggcggccctattcattgccagtcactagaggaccacactaatccaccacaccaggctggagctgggtcaggcatccatccctgtccagatatccattagtgaagtgagctcccagcctctcttaaaaagcagggcaggagctcctcctgggacctggtgccatcagccctcctcagcaccgtcctcctcaccacamtggatctgctctgtaccagtgagagggcagagcgtgagagagctacagctgaagtctctgccccagaagaccaggtcggcggaggtttcagcacatctggccaatgggcagatttggtgcataccctgcttttatacagccatcaaactaagcatggtttctacatttttaaatggttataaaaacgccgaaacaaagaatatgcaacagagtccc

SEQ ID NO: 764422 - DNA, 492 bp, Homo sapiens
aatgcatttctcactctttttaattacaaagatatttaatgtttacataatttatccactgacatgtatatatgaagtatgttggtgccagacatcatgcagggagcagggatgcaacactgagtcaaagcagacatgctaggattgaacaaacatttgtagaaggcagaggcacctttgtgacatctgagtggagagtagaacacaggtgtttggcagctggctctgggtggtcaggtatatctagttagagtcatagctgagatcacctgggttgggaatatgrcttgagaaaagcagagggccagtgtcagcatttgtattgtgccttattctagaagggttgcagatgaattgatttgggatcccaggcgagtgccatgaggtacaggaaaagcagaagagaaatcatcaagaaacatgggactgaagtagtgagggggaagtagggtacaggagaaggtggagctcctaaaaaagccaggagtggag

SEQ ID NO: 764423 - DNA, 605 bp, Homo sapiens
agcagattgattagagttgtccgcagttggcagtggtgatcttcttgccagtctcaccattcccggacccagagcactccatggcttccatgatattcactccctcttctcactttgccaaagaccttgtgcttgccatccagccactcagtcttggccacacaggtgaaaaactgggaaccatttgtgtcgggccagcatttgccatggacaagatgccaggacctgtgtgcttcargatgaagttctcatcatcaaatttctcctggtagatggactggcattattatggtgtgtgaagtcagcactctggcagataaaataaaccctggaataattctgtgaaagcaggaacccttataaccaaatccttttcctccagtgctcagtgcacgaaagttttccactgtttttggaactttgtcggcaaacagctcgaaggagctgcatgggccaaaggagttaccatcaacaatgatgtcaaaagaacacagtggcgttgaccatggctagaggcaggtggcttcaggtggcagcgatgactacaaagccccatttctcctttgaacctaacttcctttcctattttaatgtcccgtgaaggt

SEQ ID NO: 764424 - DNA, 653 bp, Homo sapiens
gaggctcatctcagccaataccagggtacagatataaatgaaatagccttcagatggcagacatggtaaaaaaaggaaacatactgggcctgaagtcacagagctttagttctagtcctgcagctggaagggcatgtacaaataattgattccaactccctatgtcattgattgttcactcagaaaatacttgtccagtctgggcatagtgactcatgcctgtaatcccagcacttttggaggccgaggtgggtggatcacctgaggtctggagttccggaccagcctggccaacatggtgaaaccccgtctctactaaaaataaaaaatagccgggtgtggtggtggrcgcctgtagtcccagctactcggaggctgaggcaggagaatggcttgaactcgggaggcggaggttgcagtgcgccgagagtgtgccactccactccagcctggatgacaaaagtgagagtgtgtcttaaaaaaaaaaagaaagaaagaaagaaaagaaaaaagaaaatacttgtccaggccctgccatgtgccagacactgctctaggcaccatggataaaacgaacaaaagagacagcgggtacaaaactaggaagatgcagaaagtataggccctatgaagatatttgtgacatatgtaaa

SEQ ID NO: 764425 - DNA, 612 bp, Homo sapiens
tatcttcattaggggaagaacttcagcaaggtcttgctgggatttagccccctgaagtatcgaagatgacacttgctgacagtggaggaaaccgaggaggcagcacagaggatggtgtttgtgcacagagatgagaggggtgcagctttcaccgacaaggggaggagggcacattcccaaccccagggagtgttccatgccagagacggaaagggacagctcagacattgtcccagacccgtccctgtctcctccaaataaggaggcctccaactccagttcaggaagttagcggctcataaaggatgagttgatttagagcctttccctgtgaagaagcttggaagagccagggttcaaagcctttgagataaacyaacaactgtgcccctgctgggaagtcattagtgtttgagggtcccacccattacttttgtaaagacacatgctttgtggacttataaataaaacttcaaaggtgatgacagtccagcagctgtgtagatggttgcatccttatgaactgtggacagaagctgaagtgggtaggagtcagggcaactttctggacagcagattaaacctgtgagtgtgttgctgatttcagtgtta

SEQ ID NO: 764426 - DNA, 653 bp, Homo sapiens
tggcatcatgtaaaacagagttcctctcctagcttgagattaaataatacatgatagaaagaatatagtgaataattgccttgagtcctctatatttttttcccaaaggtaaatggaaagatctaataaatctgtttccagaaatgctgaatgtatttatatgtgttttgtttaaaacataaccagcrtagagcaacttctctatgaggtgccaagaaagtctttaaactcctcatttgtctttgttttcaatccacctgttcatttccatttcagaatgtctagaaaagattgacaaaactttttaggctgcaaacctaaatgtccacaattttacatttcaacaattgtttaatatctcagaatttgacataatgacatttagttcaagagtacttagctgtcaactgtaacaattcatatctacgccttcctactttgtaacatagttgcctccctcatttgtgacattaatttatgactcagcccacatttcaaaggaaagtgatatatgttggggaaacaatactactaaaagaaaaagcccacacctctacattactataagtgagaggcgtgtttgcttatattaataaagatattccttcacaaagatcaatatggatcctattgcatccatttgacaaagtagc

SEQ ID NO: 764427 - DNA, 632 bp, Homo sapiens
agttcttctccctgtgctgggagcaccctgagccttcagtgggcattggctaagatgattcagtagacagtcatgactggacccaggctccagttacttcctccacatttgcaggggtttatagttactgcagctcctccaggcacatcagtagaagaggctttggtagctgggagaggtgcacttttttgctgtaaggatgactttgttcaggaccatcaggataggtatagagaccgctgcaatggggtcttgtagtggaggagaaagactgggcacaagtccaaagtacagcatgggcaaatgggaatttgtagccaaggagcagtgtgraggtcagtggttagaaaattaccaagaggaaacatcaggggtaagaggaattctggctaaactgatctaacaggattcttgctgaagacaggctggggtgatcagatatcacctggggggtggtgcaggatgaggaacctgatcagatttggagaatttgggtttcagctaaattgacttagcagggttcctttactaaaactggattttacaagaacatgcacagactggcctatgagaaggttcagaagcctgaataaggtttggccaagcaaacaagaaaagaatctttttttttt

SEQ ID NO: 764428 - DNA, 543 bp, Homo sapiens
aaccaccgcacctggccaattctgtctctttttaaataatctactagattcagtttataaagattttatatgtttacttatgttagtatttaacaaacatatatttccttttttttttggggggggggatggagtcttgctttgtcactcaggctggagtgcagtggtgtgatctcagctcactgcaacctccgcctcccaggttcgagcaattttcctgcctcagcctccggagtagctgggattacagacacgtgccaccatgcccagctaatttttgtatctttagtagagatggggttttgctatgttgcccaggctggtcttgaactcttgacctcaagtgattcacccgcctcagcctcccaaactgctgggattacaggcgtgagccmccgtgctcagcctttcctcaattttgtcttttttttttttttttttttttgagacagactctcgcactgtcgcccaggctggagtgcaatggcgcgatctcgacacattgcaaccttggcctctcaaagtgctgggattgtaggtgtt

SEQ ID NO: 764429 - DNA, 564 bp, Homo sapiens
atactcattgataaataaatttcaacaatataaaagtattggaaacttaaatatagaatttagatgataatttaatagttttttcatacattagaataaaagagagttacttaatattccttcccttgaatcatctgattttaagttctaactatccaggtaacaatatgagtttaaaattcattcttagctgttgaagcctacagtttagtgctagctttgcaataaaagctactttaaattttagtctgatttccaaacagtaaaacaaatgtatcctaatataatgactagttgcatatatttatctgttatgtaagaacttagattaaaaaagtggatgatttcagtaataaaatggctgtatttaaaaaccaatataacagacatcagatarttttagatgtgttcagatctaataaggactttttactaaacaaagcaaagtaatttttttaaaggaaatacactcttaaataaaatcttaagtcaatttgtggcatatcatgtttagataactaaaacagagaatgttagttaaagtttaagtgagctgtaaattta

SEQ ID NO: 764430 - DNA, 620 bp, Homo sapiens
cttcctgtacagcctatggtaccgtgaggcaattaaacctattttctttataaattatgcagtcttgggtatttctttatagcagtgcaagaatggactgatacattctatcataaagacacatgtacacctatgttaattccatactattcataaaaactaaatacatggaatcaacaaaaatgtccatgaatagtagactggagaaaggaaatgtggtatgtatacattatggaatactacacagctgtaaaaaataatgagatcatgtcctttgcagcagtatagagggagctgcaagtattatacaatggtatacaattataccaagccaagtaatgcaggaacagaaaaccraataccacatgttctcacttataagtgggagctaaatgttgagttcacatggacacagttctacttgggaaaaacagacacaggtctacttgagtgtggagtgtggaaggagaaagaaaatagaaaaactacctatcagttactacagttactgtgcttattaccttagtaacaagattatttgtataccaaacacgggtgacatgcaatttccttatgtaacacacttgcatatttagtcctgaacctaaattaaaagttaa

SEQ ID NO: 764431 - DNA, 625 bp, Homo sapiens
tgacaatttaattatgaatatgatgatttatgacatcaatagatacatattaaaagtaaatttgtgtcttttaaagtgtagtttgtaaaatggattggtttgatggtgggtgataaatacacagagattatttaatagatgtgtttgcctattgaaaatccaagtaaagattgtatttcatgtgctagaaaatagataggtatagggaataatgataaggaagttaatattttgcctaccacaattgttcagtygaacttctttctttcttttgcaaaggtattgctagcttgtgtcaactgattctgatggtcaaatatttttataaataccttcaggagaatttcatagtgatcttaaaaactacaaagaaaaaggtactataacaagtttttagaacaagtaagtcttgaattctgatatgacatggcatccaaatcttgtactatttcagcctttgactgagtggttaccttaagggattaaggcatatgatcttttcaaaataaaatcaattgtcatcagaagatctattttgcacatttcttttagaacatttcagttgtcataagtaaaatatgcaggtgaaatgtataaataataaaagtagagacattaaaatcca

SEQ ID NO: 764432 - DNA, 625 bp, Homo sapiens
tgacaatttaattatgaatatgatgatttatgacatcaatagatacatattaaaagtaaatttgtgtcttttaaagtgtagtttgtaaaatggattggtttgatggtgggtgataaatacacagagattatttaatagatgtgtttgcctattgaaaatccaagtaaagattgtatttcatgtgctagaaaatagataggtatagggaataatgataaggaagttaatattttgcctaccacaattgttcagttgaacttctttctttcttttgcaaaggtattgctagcttgtgtcaactgattctgatggtcaaatatttttataaataccttcaggagaatttcatagtgatcttaaaaactacaaagaaaaaggtactataacaagtttttagaacaagtaagtcttgaattctgatatgacatggcatccaaatcttgtactatttcagcctttgactgartggttaccttaagggattaaggcatatgatcttttcaaaataaaatcaattgtcatcagaagatctattttgcacatttcttttagaacatttcagttgtcataagtaaaatatgcaggtgaaatgtataaataataaaagtagagacattaaaatcca

SEQ ID NO: 764433 - DNA, 625 bp, Homo sapiens
tgacaatttaattatgaatatgatgatttatgacatcaatagatacatattaaaagtaaatttgtgtcttttaaagtgtagtttgtaaaatggattggtttgatggtgggtgataaatacacagagattatttaatagatgtgtttgcctattgaaaatccaagtaaagattgtatttcatgtgctagaaaatagataggtatagggaataatgataaggaagttaatattttgcctaccacaattgttcagttgaacttctttctttcttttgcaaaggtattgctagcttgtgtcaactgattctgatggtcaaatatttttataaataccttcaggagaatttcatagtgatcttaaaaactacaaagaaaaaggtactataacaagtttttagaacaagtaagtcttgaattctgatatgacatggcatccaaatcttgtactatttcagcctttgactgagtggttaccttaagggattaaggcatatgatcttttcaaaataaaatcaattgtcatcagaagatctattttgcayatttcttttagaacatttcagttgtcataagtaaaatatgcaggtgaaatgtataaataataaaagtagagacattaaaatcca

SEQ ID NO: 764434 - DNA, 615 bp, Homo sapiens
ttactttctttttctcatctttgaaaactatagctcatcaaggtgatgaaaggaagcatacttttttttttcatttttatccaagtttgtgctttcactgtttggtagctttattactgggaataaattttgcttaccagttctctcttttctaccagayacatttcagaaaagccacagggagtagtttgcatcctctgtccacaggggtggtggtactggttcttttggaactgcatgacttggactatctacagttgtagtagtttcataattgcctattttcaggaaaagcatatcattctaagggttattttgtactgattgtacaatgtagttttccattagctcattctctggttgtatgaaaaatgaagtaaataattttattctagttttcttcctcatgaataaaatttgcacatcctaatttcaaatctatacatatttgttttactgcaaattttcaaatacttatgatagaatcaagtattatacactgaagcagaatgagccctaagaagatttaggaaatctgggtcatgttctagtttaatctacattttttttccctaaggacttattttatttccaacaatcaatggtcacatatcc

SEQ ID NO: 764435 - DNA, 617 bp, Homo sapiens
ataggatcctagtccagataagcaaatgctaagggaacttgttaccctaagacctatcatggctgggtgcagtggctcacacctgtaatcccagcactttgggagtcccaggtggttggatcacctgaggtcaggagttcgagaccagcctggccaaaatggtgaaacctcgtctctattaaaaatacaaaaaggtagccaggagtggtggtgcatccctgtagtcccagctacttgggaggctgaggcaggagaatcacttgaacccaggaggtggaggttgcagtgagacgagactgcaccactgcactccascctgggcaacagagcgagaccctgtcaaaaaaaaaaaaagatgtatcttaaaagaggtactgaagggagtgctaaatatagaaatatggaaaggaaaaacacctaatagccaccacaaaaacacactgaggtacatagatcactgacactgtaaagcaacctcacagtctgcataataaccagctaacaacatgatgacatgatcaatttcatacataccaatattaaccttgaatgtaaacaggctaaatacaccaatgaaaaggcacagagtggaaatttgaataaagaagcaacatcca

SEQ ID NO: 764436 - DNA, 624 bp, Homo sapiens
tattaactttaactgacttggaaaaataattataattcaaatcaacatatgttgtattggttggacttttttgtatatttaataaagttactgtatagggacataaaaaaggaaaatttcatgaatattatttaatgccctttttaacatcagagatactaataatattgaggaaattaattttgccttgccatcaaaaaccttgtaaaatataaacgtctattcctgaactacttcctataaaaacgtaatggaaagtcaaaaataaatctttctttaagatgttaagtaaggtatttttgaagcaaatggagaaggtaagcagagatgaagcagcttattttyttaatagtgttacacaaatttattcatattattttgagcatcctatttatatagtgtatgccatagtgttaaagacaaaacatctactcctcatgaccttaacctttagttaaacaggtgactaatgccatcttaattcatgtttaactctttcaacaattattcagtagtccaggacagattttatgcaccaagggaaacttaagaaatagttgcttacttgaaatctaattaagcctctagtgcatttatggtgaattctttttgcagtggttgaat

SEQ ID NO: 764437 - DNA, 505 bp, Homo sapiens
ttctattactttggtgaaccctgactgataaaacatctgaagaaactaagccatagagaggttacgtaacgttttcaacagcacatatgaaatttttagcagagtttgtattcaaactcaagcaatctctgtctaccatctgagtaattgacctctatgttatgctaacaggtttaagcatgacaaacatttttacaagytgaaaaatgggagtaagcactccacccagaagaaacagcatgacagcatgagcaagagcaccagacaattagagcacagatattctagtaaggctagtgaactggacccatggtagctaggaagtcatattatacattatcctacactgctcacagaaagaatgagctaattatgttgatgtgacccctttattttgccgtaattagtcagatggtattcatcccaacctcaaccagttgccttgagcaatgttttatcatcatagtcatgagcaggactttactagtattactttctatatgaa

SEQ ID NO: 764438 - DNA, 656 bp, Homo sapiens
aatattgcattattgtatgtggaagtcctatatataaaattaggcttaagtaggccctggaggcacaagtttaatcaggaagtgagccaaatattcatgaccccaattcttgctgcactacttactctgtctcctagtctgcagatatggccttataaccagttccctacaactagttgactgaggaagacaaaacttgagcttggtttagtgatggttctgcacaatatgcagacactacccaaaagtggatggttgaagcactatagcccattgtggacattcctgaagacagtggagaaggaaaaccatcccagtgggtggaaatttgagtagtgtacccagttgtttatttactcagaaggagaaatggccagaggtttaagactatattaattcataggctatagccaatgggttggctgaaagatcaggrgcttggaaaaaacattgttggaaaattgctgaggtatgtggatggagaccctctaagtgggcaccaaatctgaagatatctatgtcttatgtaaaggctcaccacgggttgcttcactagaggagggttttattaatcaagtgaatagaatgatccatcccgtcaataccagtcagcttcatttcccagccattcttgtcattactcaatggtgacagtt

SEQ ID NO: 764439 - DNA, 576 bp, Homo sapiens
gtataacaatagttttgagctgtacatctcacacagaatccactttataaaacatactcatagctttataatctgtaaactttgcttgcagattgaagaccaaattttcaaagagtagcttttcatttgcatcctgaaggacatgcagtggcaaacattgcatgtgcagcttgctggactggcaattcttaccaaggcagctgagagccactgcttacatctaatgaaaaaagactccttaaaattatctccagttatatacctaatgtaaatgacgagttaatgggtgcagcacagcagcatggcacatgtatacatatgtaacaaaccttcacattgtgcacatgtaccctagaacttaaagtataataaaaaaawaaaaaaattatctccagttatacagtcttaaccttgaaaaatttacctattagccaaatatttgcattccttttcatttgagatatttcatcagaatgtcatttaaacatttaatgactcacaatagaaaatatccagagtgttactgttggaatcagattttgaagcctgctcatgtaaaggtctaggagctgaaag

SEQ ID NO: 764440 - DNA, 576 bp, Homo sapiens
gtataacaatagttttgagctgtacatctcacacagaatccactttataaaacatactcatagctttataatctgtaaactttgcttgcagattgaagaccaaattttcaaagagtagcttttcatttgcatcctgaaggacatgcagtggcaaacattgcatgtgcagcttgctggactggcaattcttaccaaggcagctgagagccactgcttacatctaatgaaaaaagactccttaaaattatctccagttatatacctaatgtaaatgacgagttaatgggtgcagcacagcagcatggcacatgtatacatatgtaacaaaccttcacattgtgcacatgtaccctagaacttaaagtataataaaaaaatwaaaaaattatctccagttatacagtcttaaccttgaaaaatttacctattagccaaatatttgcattccttttcatttgagatatttcatcagaatgtcatttaaacatttaatgactcacaatagaaaatatccagagtgttactgttggaatcagattttgaagcctgctcatgtaaaggtctaggagctgaaag

SEQ ID NO: 764441 - DNA, 505 bp, Homo sapiens
caccctttacaaatttgatgaaagttttatctatgaatctaagaagctcaacaaacttcaaggaggataatctcaaagaaatccacatgtacacacactatagtcaaactgtcaaaacctggaaaggaaaaaaaatcttgaaagyagtgagaaaaaaacaacttattacctacaaaaaaattccccaataagttaacatttgacttataatcaaaaacaactggaagccaaaaggcagtcacatgacatattcaaagtgctgaaagaaaaagaccctcaaccaagaatcctatattcaacaaaactatccttcaaaaataaaggaaaatgtaagacatttccagataaacaaaaaccaaaagaattttgttgctagcaaacctggcctagaaaaaaaaaaaaaaaaggccatagggatttcttcaggctaaaatgaaagaacatgatacagtaagctgaagcaacatgaagaaatcaatagctccagtaagtacctacataggta

SEQ ID NO: 764442 - DNA, 505 bp, Homo sapiens
caccctttacaaatttgatgaaagttttatctatgaatctaagaagctcaacaaacttcaaggaggataatctcaaagaaatccacatgtacacacactatagtcaaactgtcaaaacctggaaaggaaaaaaaatcttgaaagcagtgagaaaaaaacaacttattacctacaaaaaaattccccaataagttaacatttgacttataatcaaaaacaactggaagccaaaaggcagtcacatgacatattcaaagtgctgaaagaaaaagaccctcaaccaagaatcctatattcaacaaaactatccttcaaaaataaaggaaaatgtaagacatttcyagataaacaaaaaccaaaagaattttgttgctagcaaacctggcctagaaaaaaaaaaaaaaaaggccatagggatttcttcaggctaaaatgaaagaacatgatacagtaagctgaagcaacatgaagaaatcaatagctccagtaagtacctacataggta

SEQ ID NO: 764443 - DNA, 633 bp, Homo sapiens
ataattctccctaaaaggaaccagcgctcccttggataaatggttgattctagggctgggacaagaagtataaaatatgaacctggagcatcttgtagcaccagaaattaaggaattgctcaaaaaacaaaacaaggattacatgtcaaaaggacacaggagccaacaggaagagcttctaaaggcccagctggaataatttgacaacaaaatggataccattgtattagattataacccaaagcatactataaatatccatgagtcgataatcatatgaataaataattgaatatagaataaatatgaggaaaacaaamaaatctgtgcaaaagaatgccaaataacttattgatatccctttctcaaagaggtagagcataactcttccctccttaagtatggcctgcacatgataacttccttccagagccaattgtgtaaaggagggaaaaaagtagctttacagtggagaaatctgtaaaacactacctcaaccagggagtcaaggttaacatctacagtgacaagtcatgatgacgggatgatgtgataaaagtggcactgtaactctatggtcttcccccctcaaacccataaaccatgtttaatcatgagaaaaacttaagacaa

SEQ ID NO: 764444 - DNA, 602 bp, Homo sapiens
acaaagactttcaggctgggtcataaatgtgtttatcttgttcggtgtaaagcaattcaacttcctcttcctatgtgcaagtgtgcacatttctaaacaagagaattttaaaacttagatgtattcagttacaacttgtttaccaaaatgtatatgaatgtaatttggaacaagaagaacatcctctttctactgtcaagattatttttgttttaaacatgatatgtcrtgatttcaagctaagtagatgtatcagggaggcatacttttttatagaatttagttttatatactaaaatctagtactcccatcttaaagttttattgactattttaaaattacatttatgagactgctatatgaaaaatttcagtggcatattttgggtactaaatttattttacacacacaaagcctatcctggtggcatatttcttcatctagtatataacatctaggaggatttttgctgctattaaagttcaagaaagaatataggccaggcgtggtggctcacacctgtagtcccagcactttgggaggccgaggcgggcggatcacctgaggtcaggagttcaagaacagcctggccaacatgata

SEQ ID NO: 764445 - DNA, 549 bp, Homo sapiens
ttaaagttattataaagtagcctttgtctgtcaaagagcatgccaaataatctcatcaagatttgagaggggtagtgaaaagacgcaaagagactatgaaacaccaagcttcttagatcattttctgtgcggtcatcattataaatagtaaacatcaaatattcctttatttaaaataccctaraacaacactgtccaagaaaactatctgtgatgattggaaatgtctatgtctgtattgttcaaaatggtatctgctacccacatacagctactgtacacttaaaatgtagctagtataatgaataactgcatatttactctaaattcacttatatttaaatagactcatacgactagggattatattaaatagcacagctctagatatcctacttaccaagaaatgatttaaatgttatgtgcttacatttaatttttaaagtttatatctctttgcttattttcagatggttctttgaaacatatagttagttggattccaaagttggtaacagtaaatttactgagcaattccataacaaaaag

SEQ ID NO: 764446 - DNA, 549 bp, Homo sapiens
ttaaagttattataaagtagcctttgtctgtcaaagagcatgccaaataatctcatcaagatttgagaggggtagtgaaaagacgcaaagagactatgaaacaccaagcttcttagatcattttctgtgcggtcatcattataaatagtaaacatcaaatattcctttatttaaaataccctagaacaacactgtccaagaaaactatctgtgatgattggaaatgtctatgtctgtattgwtcaaaatggtatctgctacccacatacagctactgtacacttaaaatgtagctagtataatgaataactgcatatttactctaaattcacttatatttaaatagactcatacgactagggattatattaaatagcacagctctagatatcctacttaccaagaaatgatttaaatgttatgtgcttacatttaatttttaaagtttatatctctttgcttattttcagatggttctttgaaacatatagttagttggattccaaagttggtaacagtaaatttactgagcaattccataacaaaaag

SEQ ID NO: 764447 - DNA, 549 bp, Homo sapiens
ttaaagttattataaagtagcctttgtctgtcaaagagcatgccaaataatctcatcaagatttgagaggggtagtgaaaagacgcaaagagactatgaaacaccaagcttcttagatcattttctgtgcggtcatcattataaatagtaaacatcaaatattcctttatttaaaataccctagaacaacactgtccaagaaaactatctgtgatgattggaaatgtctatgtctgtattgtwcaaaatggtatctgctacccacatacagctactgtacacttaaaatgtagctagtataatgaataactgcatatttactctaaattcacttatatttaaatagactcatacgactagggattatattaaatagcacagctctagatatcctacttaccaagaaatgatttaaatgttatgtgcttacatttaatttttaaagtttatatctctttgcttattttcagatggttctttgaaacatatagttagttggattccaaagttggtaacagtaaatttactgagcaattccataacaaaaag

SEQ ID NO: 764448 - DNA, 610 bp, Homo sapiens
atgagagtatgagaaagtcttaaatatatttccgatcctcctgctatataaatgtataaccagagattctggatgttgaggtacacttaactaagatatttccttccctccctgtgtccatagtgacattttatcagtttgtctttgaaacttatttctaaaattactttgttaaagcaggaaggmcttttccttgcttactaattgaagattggagtatttccagaggtaactttgagaaacaagaagcaaatatggtaaactccaagaggagatgaaaaatatgtttgtaatctatttttagaaattttagtatttataaatccttttattccgtgagatttctacaacagtgggagtcaaatccctattttgtgataaggagttacagacttgggatttgcccttaatatacttgatattgtgaattaaggatgaataaagatgaacttatcagagaaataaagattttactttaccatggggtaaaggaatattctaaatattactaaatatcttcatatggagacagagagaaggaaaggtctgaactgaagtgcactgataaccttttacaagagctttactatattatgggatgtcaagagcc

SEQ ID NO: 764449 - DNA, 610 bp, Homo sapiens
atgagagtatgagaaagtcttaaatatatttccgatcctcctgctatataaatgtataaccagagattctggatgttgaggtacacttaactaagatatttccttccctccctgtgtccatagtgacattttatcagtttgtctttgaaacttatttctaaaattactttgttaaagcaggaaggacttttccttgcttactaattgaagattggagtatttccagaggtaactttgagaaacaagaagcaaatatggtaaactccaaraggagatgaaaaatatgtttgtaatctatttttagaaattttagtatttataaatccttttattccgtgagatttctacaacagtgggagtcaaatccctattttgtgataaggagttacagacttgggatttgcccttaatatacttgatattgtgaattaaggatgaataaagatgaacttatcagagaaataaagattttactttaccatggggtaaaggaatattctaaatattactaaatatcttcatatggagacagagagaaggaaaggtctgaactgaagtgcactgataaccttttacaagagctttactatattatgggatgtcaagagcc

SEQ ID NO: 764450 - DNA, 624 bp, Homo sapiens
ggggctggaagtctgagattaaggtgctggcagaattggttccttccaagggctgtgggagagaatcgattccatgcctctttcctagcttccagtgttttgttggcaatctttggcattccttgtcttgtagacccgtcactctgattactaccttcacgttcacacagcattctctctgtgctcatatctctgtctctgtctaaatttcccctttttataaggacactgtcacattggattagggctcaccctgatgaccacatcctaacttgagcgtctgcaraaaccttatttccagggttacggtcacaggtactgggggttaggactttaacatcttttaggggaacacagtgcaacccacaataataacacagttacattcaacatacggttattgggtatttatgtaggtttgcattatattaatattattttatattaatattaataatttatcatttttactacatgctgagcaccatttatcttcattgtaccactgcatttccacaacattcttaagagacaggcactattattttttcctctctttgctggaaaaactgaggtttagggagttttaaaaattgttacagataggcagttgtatcatttagg

SEQ ID NO: 764451 - DNA, 647 bp, Homo sapiens
ccaggtgcgggatataatctcctggtgcgccgttttttaagcctgtcggaaaagcgcagtattagggagtgagtgacccgattttccaggtgccatctgtcacccctttctttgactaggaaagggaactccctgaccacttgcacttcccgagtgaggcaatgccttgccctgcttcggctcgygcacggtgtgctgcaaccactgtcctgcacccactgtctggcactccctagtgaggtgaacctggtacctcagatggaaattcagaaatcacccatcttctgcgtcgctcatgctaggagctgtagaccagagctgttcctattcggccatcttggctgccagaagaaattttattaattgaaccaagaagaagaaagaaataaaaacattctgattccaactacccaaccttatttcctcccaagcctccttgacttacttccttctttctgattatgggtattaaaggatatgctcctttaataaatattcagaaactgcacctcagccatgttaagggttttcttgttgcctttcaatttttgaaaaaggacacaaaagtccaaacttccagattctttctttggttccagggcaacgtataatattaactttgtatttttctttatctgtgacatagt

SEQ ID NO: 764452 - DNA, 647 bp, Homo sapiens
ccaggtgcgggatataatctcctggtgcgccgttttttaagcctgtcggaaaagcgcagtattagggagtgagtgacccgattttccaggtgccatctgtcacccctttctttgactaggaaagggaactccctgaccacttgcacttcccgagtgaggcaatgccttgccctgcttcggctcgtgcacggtgtgctgcaaccactgtcctgcacccactgtctggcactccctagtgaggtgaacctggtacctcagatggaaattcagaaatcacccatcttctgcgtcgctcatgctaggagctgtagaccagagctgttcctattcggccatcttggctgccagaagaaattttattaattgaacmaagaagaagaaagaaataaaaacattctgattccaactacccaaccttatttcctcccaagcctccttgacttacttccttctttctgattatgggtattaaaggatatgctcctttaataaatattcagaaactgcacctcagccatgttaagggttttcttgttgcctttcaatttttgaaaaaggacacaaaagtccaaacttccagattctttctttggttccagggcaacgtataatattaactttgtatttttctttatctgtgacatagt

SEQ ID NO: 764453 - DNA, 664 bp, Homo sapiens
atattttttaatattctttaacttacagatttgagtctgctggttaatgaaatgaaatgtaaatttctcagttactccaagttcagttttgttcagtgaaacctgacacactccccaaggagatgcaatctaacaaaattcatactgtgcacatccatagccagtggttctcaaccctgaatacacattagaattgtctgggctgcttctcaaagatacagatgcctagcccccacatcaattgttttaaatcaggctggctaggactggacacccgcataacattttttcactttgtaggtgattataatataragcaaggatgagaccgtgaaaagaacataaaacaacacctgacacattgtagacattcaataaatgttagcctctcctcctgccattagtatataatctgagatcaagactaaaacagcacataaaaaagctgtattgtgcagacttctactgaaatacagaataaaaagaaaaggatattttaagaaagccttgttcaaagaaggctttaagcaggagaaacatcttaatcagggccttgatttggaaagtacttggaagggcaaaagaagagaatgaaaccattccaagaagaaaaggttgcagggacaaaggaaaagaggcaaggatggtgttaacacatggggca

SEQ ID NO: 764454 - DNA, 641 bp, Homo sapiens
catatgtaacaaacctgcacattatgcacatgtactctaaaacttaaagtataattaaaaaaaacatgaactatcttaaaaataatttgagaaaaaattatatttataataaaatcaataagaataaaatacttgggaataaatttaaatatgtaagacctatacattgaaaactataaaacattgataaaacatattaaaatatatgttaatgaaacaccagatgtttgttctaggtcctgctaaatgctgcacagaaagccaatcactgagacaacaaatagtgccaagaaagaaaccttttattgggtgttgcagcaaaggagatggcgatcagtctcaaatttgtctctctgattgcctaaaattagagkttcatatacccggaagaaatgtaacaatgtgtaggaaaacaggaatttgggaggcagaaggttgcaatcaggatgaatgatggtgcttggcccctcattgtctgaatatgatgatctggtgagtttcagttctttgatacattttgagaggcctgaggatcctttactgagagagaaactcagataaaatttatgtaaatttcaagctttaagaccacaaggatcaatttctatgtgtatccaaaaaaacctgtctataggactact

SEQ ID NO: 764455 - DNA, 521 bp, Homo sapiens
atatctaatcgtacatgcccatgctgcaatatggaaagaaagggagttcttaacctctgggggaacccccattaaataccacaagcaaattatggagttactgcacgcagtgcaaaaacccaaggtggtggcagtcttacagtgcaaaagccatcaaaaggggaaggagaggggagagcagcagcataagtggctggctgaggcagggaaagaccagaagaaaggagagaggaagggacagagacagaaagtcaaagagagaggaaggaacagacaaagtcaaagagagaaagagacagagacaaagagggagtcagaaagagagagtcaaagaagtcaaagagagagagagatagaagtagtaaaaaaacagtrtaccctattcctttgaaagccagggtagatttaaatcctataattgaggattgaaggtcttctctgtggccctataacactccaatgccaccttgttgtcagtgtaaacaggggtgtagcccaaaagcactgaggccactgataac

SEQ ID NO: 764456 - DNA, 612 bp, Homo sapiens
aaagaagtcaaagagagagagagatagaagtagtaaaaaaacagtataccctattcctttgaaagccagggtagatttaaatcctataattgaggattgaaggtcttctctgtggcyctataacactccaatgccaccttgttgtcagtgtaaacaggggtgtagcccaaaagcactgaggccactgataacccatagccttcctatcaaaaatccttaacccagaaggtttcctaacaggggatctaaatcttaattaattgccatacaaagatctgaccagacatagaaggaactcccttcaggacaggatgatagatggttccccccaggtgattaaggaaaaaagacacaatgggtattcagtatgtgataaggaaactcttatagaagcagaattaggaaaattgcctaataattggtctgctcaaacgtgtgagttgtttgcactcagccaaatcttaaagtacttacagaatcaggaaggagacatctataccaattctaagttaatatggactgaatgaggtctgattaatagcaaagaaaaattaaaatcccaaacttacaaggttttcaactaaagcaaagtttgttaaaagttaacagtgt

SEQ ID NO: 764457 - DNA, 653 bp, Homo sapiens
gtaacagaaagaatggggaacgaagagtcagaaatactgagttctaaccactcctctgcttcatcatgttcacgcttttatttaaatcctttataaagaaatatatttttaattcatgagtgcttttaaaatattagatagcaatgtactrtatattgcttaatatcccaaacaggaatgaagtagctcccataatcagatacattagtatttcagcaggaaaagctatgaattgttatgctaagaggaattaaaataaagacagtaatttacatcatgttagttgatggtagaaattatcacctgatatgttattttaaaatctcatttcagattattttttgtttcagatttttgaattatggataatatattttggatctataactagatataatgtttggtatcactcaggttccttccagataaatttatgtgtatgaattacataatttctaagtttctttacaaaactgataccctatgaatccttgatctaataaaaagcaaatgcaactatctgttttatgtcatttgctttataatagatatgaaacccacaagcaacatttccatagataggctacacaaatatctcacacagaagacaattctcagggcttggcttacctcttcttcttaatgtcaccctt

SEQ ID NO: 764458 - DNA, 586 bp, Homo sapiens
tttattctattttttatttgatcagtaatttggctgaacttagaaaccttatgattttaaaggtattttacttacagggttagagaaatttaaaccattctgagacccatccttgtgtgaaaccagttacgggtttatgtccactttcccgccatttatatgctgaagtcttaaatccccagaacctcggaatgtgagtgtatttggagggttgggtcttcaaagaggtaattatattaaaatgagattattacggtgggccttaatctaacatgacagatgtggacacaartacatacagaggaaagacagtgggaagacacaaggacaatatggccatctacaagccaaggagagaggcctcagaagaaactaaccctgccgcctcctgtatcttagacttgtaggcttcagaactgtgagaaaataaattcttgtttgagccaccccgtctgtggcactgtgctatggcagccctggaaaactaatacttgacatactttttttttctggatacttctaggaccttcttcttctgccctatgatctgaaatttctcaataatatgtattttcaatttaagtag

SEQ ID NO: 764459 - DNA, 586 bp, Homo sapiens
tttattctattttttatttgatcagtaatttggctgaacttagaaaccttatgattttaaaggtattttacttacagggttagagaaatttaaaccattctgagacccatccttgtgtgaaaccagttacgggtttatgtccactttcccgccatttatatgctgaagtcttaaatccccagaacctcggaatgtgagtgtatttggagggttgggtcttcaaagaggtaattatattaaaatgagattattacggtgggccttaatctaacatgacagatgtggacacaaatacatacagaggaaagacmgtgggaagacacaaggacaatatggccatctacaagccaaggagagaggcctcagaagaaactaaccctgccgcctcctgtatcttagacttgtaggcttcagaactgtgagaaaataaattcttgtttgagccaccccgtctgtggcactgtgctatggcagccctggaaaactaatacttgacatactttttttttctggatacttctaggaccttcttcttctgccctatgatctgaaatttctcaataatatgtattttcaatttaagtag

SEQ ID NO: 764460 - DNA, 591 bp, Homo sapiens
agtttgagagcagcctgagccacatagcaagacctcatctctacaaaaaataaaaagaaaaatagcgagccatggaggtgcacaactgtagtcctagctccctgggaggctgagggggaagaattgtttgagcccaagagttcaaggttacagtgagctatgatcacaccactgaagaaagatctaaaatcagtgcctttagattaatacatttgcaaatctkgaaaatgaaaagcaaattaaagccaaaagaaggagaaaaatagatacaatcaaagtggaaaccaatgcaatagaaaacctaaaagaaaaaagggaaaaagaaaagaattggtaaaaccagaagctggttctttatgagatcaatacaattgataaagttctaaaaagactgatcagggaaagaagagagggtacaattaccaatatcagacatgagagcaatgacatcactacagaaattacaggtgctaaagtgataatgaggaaatattatatataaatgcatgcagtaaattcacaacttatgtgaaatacacaaatacataaaagataattacgggagctcacccaggaagaatcagacaaccc

SEQ ID NO: 764461 - DNA, 598 bp, Homo sapiens
gatttaatatattgattcgattttagtttagacttgtagaatcatgggcaaagttcactgaacattttcaaatagagaagaaagaacagtataatttagattgattccatttttattttaaaatgggattatattttcatatttagatgggaatttgagcatacaatttgtgtttaattctataaaaacaagagggattattagcattgctaactttaaatgctcctttaagtacatactaaatgtacccctacataaaccattaatgacagtaagctgctttaaccctatatttttcatcaaagttcagatttgctgctaagactggtaggcattcctgcaaatatgcagttcatttaatgtctataatcctatggaaaaaaaggaaaggatataaatattataaaagctgagattgtattttcataaggagaagtgacttgakacactaatccaacccaactagttaaaataaacacttttctgttataataaatataatatcccatatatagttcctttaatacagagaagaaatacagatttgagaaggccttgataacattttctatttttcctactatttttctattttcca

SEQ ID NO: 764462 - DNA, 546 bp, Homo sapiens
ccgaccagtttcttatcttgtttaggatccctgtggagtcaatctaaaggcagaatgagaggagaaaggagtccagttgttaagtagtggccaagaaagatgacctacattcctgctcctgatggttaggcccgtcaacctggagtgggtcygtgtaggtcattgcaaggagtgcaagacgcagaacttgtctacaagaaaggaattttcaaggggctttgggaatagtttctcttgctgaaagaaataagccatctctgaaggaaagaaaagagaaaggttttgaaataaaatataaactccctcctgtgcatttagactctaaagtctgcaggtaaacaagacagcagggagcatttccacacagtgtgaggagagaagcaaggagcagagattaccacttgttacagcacttgacattaattaaacctgttttaaataaagaaggtataagattatttttatattgcatgcaatatttacactaattatgccaaatgctcaaaccattttctataactaactcatctgttatatgaatttact

SEQ ID NO: 764463 - DNA, 546 bp, Homo sapiens
ccgaccagtttcttatcttgtttaggatccctgtggagtcaatctaaaggcagaatgagaggagaaaggagtccagttgttaagtagtggccaagaaagatgacctacattcctgctcctgatggttaggcccgtcaacctggagtgggtccgtgtaggtcattgcaaggagtgcaagacgcagaacttgtctacaagaaaggaattttcaaggggctttggsaatagtttctcttgctgaaagaaataagccatctctgaaggaaagaaaagagaaaggttttgaaataaaatataaactccctcctgtgcatttagactctaaagtctgcaggtaaacaagacagcagggagcatttccacacagtgtgaggagagaagcaaggagcagagattaccacttgttacagcacttgacattaattaaacctgttttaaataaagaaggtataagattatttttatattgcatgcaatatttacactaattatgccaaatgctcaaaccattttctataactaactcatctgttatatgaatttact

SEQ ID NO: 764464 - DNA, 546 bp, Homo sapiens
ccgaccagtttcttatcttgtttaggatccctgtggagtcaatctaaaggcagaatgagaggagaaaggagtccagttgttaagtagtggccaagaaagatgacctacattcctgctcctgatggttaggcccgtcaacctggagtgggtccgtgtaggtcattgcaaggagtgcaagacgcagaacttgtctacaagaaaggaattttcaaggggctttgggaatagtttctcttgctgaaagaaataagccatctctgaaggaaagaaaagagaaaggttttgaaataaaatataaactccctcctgtgcatttagrctctaaagtctgcaggtaaacaagacagcagggagcatttccacacagtgtgaggagagaagcaaggagcagagattaccacttgttacagcacttgacattaattaaacctgttttaaataaagaaggtataagattatttttatattgcatgcaatatttacactaattatgccaaatgctcaaaccattttctataactaactcatctgttatatgaatttact

SEQ ID NO: 764465 - DNA, 661 bp, Homo sapiens
ctgcaggtaaacaagacagcagggagcatttccacacagtgtgaggagagaagcaaggagcagagattaccacttgttacagcacttgacattaattaaacctgttttaaataaagaaggtataagattatttttatattgcatgcaatatttacactaattatgccaaatgctcaaaccattttctataactaactcatctgttatatgaatttacttcataaattcatgtattttggaatccaacaggatacgtcagcaaaggagtcgagcatggctttactctgtgcgtgaaattaaaaagtcctgctggagagaggtagtccctcctttccacagcaaattctgcttctgtttctttctcccctgtggaatcattagtgagcaacattcccccatagcacacaggggttgggagtcatcttctctgytttctcagcttgtggcctggaatattattttctggggctgaaaccctgaccaagggctacttcctgtttttcattggtttcctgtatccattgagttccagtgcttccaattattaggttggcgcaaaagtaattgcagcttttgcaattactttaaatggcaaaactgcaatatgagcatagtaagataacaatggaagtcattccatagcacctaaggatccctgctc

SEQ ID NO: 764466 - DNA, 661 bp, Homo sapiens
ctgcaggtaaacaagacagcagggagcatttccacacagtgtgaggagagaagcaaggagcagagattaccacttgttacagcacttgacattaattaaacctgttttaaataaagaaggtataagattatttttatattgcatgcaatatttacactaattatgccaaatgctcaaaccattttctataactaactcatctgttatatgaatttacttcataaattcatgtattttggaatccaacaggatacgtcagcaaaggagtcgagcatggctttactctgtgcgtgaaattaaaaagtcctgctggagagaggtagtccctcctttccacagcaaattctgcttctgtttctttctcccctgtggaatcattagtgagcaacattcccccatagcacacaggggttgggagtcatcttctctgctttctcagcttktggcctggaatattattttctggggctgaaaccctgaccaagggctacttcctgtttttcattggtttcctgtatccattgagttccagtgcttccaattattaggttggcgcaaaagtaattgcagcttttgcaattactttaaatggcaaaactgcaatatgagcatagtaagataacaatggaagtcattccatagcacctaaggatccctgctc

SEQ ID NO: 764467 - DNA, 661 bp, Homo sapiens
ctgcaggtaaacaagacagcagggagcatttccacacagtgtgaggagagaagcaaggagcagagattaccacttgttacagcacttgacattaattaaacctgttttaaataaagaaggtataagattatttttatattgcatgcaatatttacactaattatgccaaatgctcaaaccattttctataactaactcatctgttatatgaatttacttcataaattcatgtattttggaatccaacaggatacgtcagcaaaggagtcgagcatggctttactctgtgcgtgaaattaaaaagtcctgctggagagaggtagtccctcctttccacagcaaattctgcttctgtttctttctcccctgtggaatcattagtgagcaacattcccccatagcacacaggggttgggagtcatcttctctgctttctcagcttgtggccyggaatattattttctggggctgaaaccctgaccaagggctacttcctgtttttcattggtttcctgtatccattgagttccagtgcttccaattattaggttggcgcaaaagtaattgcagcttttgcaattactttaaatggcaaaactgcaatatgagcatagtaagataacaatggaagtcattccatagcacctaaggatccctgctc

SEQ ID NO: 764468 - DNA, 592 bp, Homo sapiens
ataatattgataaacctcaacttaatgccattttccatattaaaaactttgcccttttttcatataatttaatagcatttatcaaaagcctttgcatatgatcttttcattattgtttgatttctgccctagaatttctatcaaagccaatgtaaatttatatctgaaacacagtattagggaattgcttagtaaaagatttactaaatggaattatggtactgaacagcatgcacctgtgcgattgcattttagaacttgtgtttgtgcttcggatatttaaagaaaaaaacagcatatgatttggttatattgaacatttggttatctcaagcaaacagtatgtcacttacttgtktagcatgttctatgtatcaggaaaggtcagtggagtaggtggtagggctaagaaataaaatttcaaagaactgttcattggttattaactgcggtgacaaaggagtaatgaaagagtaaggtaaaggtcattattgtctaaattctgatatatcagatgctctgaggtcaaagttcaaagtctgactgctttttggcataatgcattcagagttttcctagactcactaagaaa

SEQ ID NO: 764469 - DNA, 597 bp, Homo sapiens
ggacagacaaatttatatctactctataactaaagaagaccttagtaacttacattttttatttttttactttttagttttttgtttgttttggcaggcggaagggggagctgacatgacattcaatccctggaaaatctaacattttttttttttttttttttgtgacggagtctcgctctatcgcgcaggctggagtgcagtggcacgatctcggctcactgcaagctccgcctcccgggttcacgccattctcctgcctcagcctcctgagtagctgggactacaggcgcccgccaccatgcctggctaatttttttgcatttttagtagagacggggtttcaccgtgttagccaggatggtctcgatctcctgacrtgatccgccagccttggcttcccaaagtgctaggattacaggcgtgagccaccgcgtctggcggaaaatctaacatttttaaaaactattcttatgtgagtaataccattttcaaattggcaacatgcccatcagaaacatttccaaaatttcttaaaccaaaaaataatattttaaaatacattttctttcagttttagggggtaaaaaaagctaa

SEQ ID NO: 764470 - DNA, 628 bp, Homo sapiens
gtgaggaaattgaggcactgacttcatcaaggttaccaaacaggtcagaacccaggcagtctgatccaggagtctgtattctcagctactatgctattatggacagggtgctacaggacacagaagggcaattaaccttgggggttaggcggaggcagcgctgcctgcgctgaaaaacatgtagaaggtagcccagcagacaagagaaggaggaggtttccaagcagcgggggctggtgtgtgcaaagtcatgaagatacgaacagcaagggtaggcatggcgcatgctgcagtgccgtattattggaccttagggtgcacacaggagactgctaggtcagatcacagagagctgtgtaaattgtgctaggggttcagcacataggcaatagaaagccagaaaaaggttatcagcaaggaactkgcaccgtaagacttgtgttctaaaaggatcacaagagttacagtttggagactgggttgcaagctgccagggctggactgttgggaattgacaatacatcaacagcgtggtaacagaagagatggagctggcccaggtttgaaggatgttcaggaagttggcagtactaggtcacttttaagatgtgggacttgaaagagagga

SEQ ID NO: 764471 - DNA, 606 bp, Homo sapiens
ctttaggaggccaaggtgggaggatcctttgaggccagaagctcgagaccagcctgggcaacatagtgagaccccatttctacaaaaaataaaaaaactagctgagtgtggtggcgtgtgtctgtagtcccagctacttgggcagctgaggtggaaagactgcttgagcccagaggtcagggctgcagtgggccatgatctcaccactgcactcagcctgggcaacayagcaaggccctgtctcaaaaataaataaataaataacacaaacttatttaacagtttactataaaataggctttgtgtcagatgattctgcccaactgtaagctgctggcagtgtaaatgttctgagcacgtgtaagccaggctaggtgtcttaaatgcattttcagtttcaacttagaattggtttatcaggacgtagccccttggtgttgaggggcatgtgtattaacagtctccttagtgacttttttttttttgagatggagtcttgcactggccgtagtgcagtggcacaatctcagctcactgcaacctcttgtctcccgggttcaagcgattctcctgcctcagtctcccaagtagctgggattacaggca

SEQ ID NO: 764472 - DNA, 534 bp, Homo sapiens
tgtatagtgatgtgttaattgaagaggtagcagcaaactttgttctttgcagtcactcacagttaatgtaccctggtaactgaaatttgaaccatattgtcgggagtctagtgttatttaactaaaccatggtaactgaaataacagtacaaaataagaactgcctttactaagttgaacaaaktggtttcaggcttttgtacttaatttatttcttcatgaaaatgtgcccagtggctcattttttaaataatagtgacaggtgacaatgtgctggcagccctcgcttgctctcgctgcctccttggcctgagcgcccactctggctgcgcttgaggagcccttcagcccgctgctgcactgtgggagcccctctctgggttggccgaggccggagctggctccctctgcttgtggggaggtgtggagggagaggcgtgggcgggaactggggctgcgccctggtgcttgtggaccagtgcaagttcccagtgggtgtgggctctgcgggccccacacttgagcagctggctg

SEQ ID NO: 764473 - DNA, 622 bp, Homo sapiens
agtattcacattcaactaaaatttaccgaaccttcatattagttctaggaatatagttgttatctctactttataagtgaaggaaagaatttcggcaaatttaaggagcttgactgaggaacatgactggtacattttagaactgggatatgatctgtcattttctaacccacatcacattgagatagaaggttctgtatccaatgataattcataaactaagaatagataatatttattgaggtcttatataagccaagtactattctaagttctttacatgtggtatttcatttggtccttataagaactctatgaggcaaatgctattatttccagtagtgcatagatgaggaaattgaggtwcagtgaaggcaggcatcctgacaatgatcataaaaacgataggtggcataattgggaccctggttccagagttcaccattgtgtttgcttcacattatctctgttagtatccactgtctaccaagggaggcagcaaagactgggatccttcttagaactttccttctagaatacaagggaacaatagaaagaataggaagaaaaagttttcataactttctggggagatttttctatgtatcttgtcaatcacatt

SEQ ID NO: 764474 - DNA, 568 bp, Homo sapiens
  misc_feature 546, 547, 548, 549, 550, 551, 552, 553, 554, 555, 556, 557,558, 559, 560, 561, 562, 563, 564, 565, 566, 567, 568: n = A,T,C or G
agattccgctacatcccagcccagcgcccttacagcagagggaaatagttaacaagacgtgcaagtgaccatgcactggacgacgaaggcttgtgtgtgtgttaatctcccgtaggaacgggaatggggaggaaggttggaaacctaggaaaaggtgccagcgggaaggcccgcagcggcgccgcgactcgcgccgcaggagtccgtaggactcgcttgcatccgcaggcccgtggtccccctggcttcgaatgtcaaaacctgttaggtttattttggggggcttttttttaacctgtcattaaaatttgcatttccctttgccctaaggcaaagctccgacaccccgccaattctcagcctagcctcgggagccctggggatcctggcayctccccagccccgcctagaatcggaaaagccctcgggcgcctccgggttgaatccccgctagcgagttagtagcatctccttaagagtggagaggagggggcaggggccagtggaaggagagaggaggaggggacgagagagggggaaaggaannnnnnnnnnnnnnnnnnnnnnn

SEQ ID NO: 764475 - DNA, 498 bp, Homo sapiens
agatagaatattgtccatttgttacatcctctcttatttccttgggcagtggtttgtagttctccttgaagagtccctcacatcccttgttggctgtattcctaggtattttattctctttgtatctaccgtgaatgggagttcattctcattatttagctctcgtttgtctattgytggtgtaaaggaatgcttgtgatttttgtacattgattttgtattctgagactttgctgaagttgcttatcaatttaaggaattttgggctgaggagatggggttttctaaatataaaatcatgttgtctgcaaacagagacaattttacttcctctcttcctattttaatatgctttatttttttctcctgcctgattgcccttgccagaacttccaatactatgttgaacgagagtggtgagagagggcattcttgtcttgtaccagttttcaaagggaatgcttccagcttttgcccattcaatatgatattggctgt

SEQ ID NO: 764476 - DNA, 520 bp, Homo sapiens
tttgactagaatcatacagtatgtggccaggcacggatggctcacgcctgtaatcccagcactttaggaagccgaggcaggcggatcacctgaggtcaggagttcgaaaccagcctggccaacatggtgaaacctcrtctctactaaaaaatacacaaattttccaggcgtggtggcagacatcttaatcccagctacttgggaggcagaggcaggagaatcgtttgaacctgggaagcggaggttgcagtgagccgagatcaagccattgcacccaaacctgagggacaagagtgagacttctctcaaaaaaaaagaaaagactcatacagtatgtgtttttgtgactggcttatttcatgtaacataatgtcctcacgaccaggaatggtggctcatgcctggaatcccagcactttgggaggctaaggtgggaggatcctttgaacccaggaggtcgaggctgcaataagctgcatttgtgccactgccctccagctggggtgacagagcaagaccc

SEQ ID NO: 764477 - DNA, 656 bp, Homo sapiens
  misc_feature 1, 2, 3, 4, 5, 6, 7, 8, 9, 10, 11, 12, 13, 14, 15, 16, 17,18, 19, 20, 21, 22, 23, 24, 25, 26, 27, 28, 29, 30, 31,32, 33: n = A,T,C or G
nnnnnnnnnnnnnnnnnnnnnnnnnnnnnnnnnatgtttctgcatggtcagggctttctgagcatagaaaagtagaacctgggttaaaagacaagccttggaagttaaaagatgacttaagggatataaaacccagagtgttggaggcattcccaagatcgtaaacccagtaacgcttatcttaccttctcctggagacatttatttatgttccaaagggtaagatcccagggatcttccccttttcttcccaagcagaatttgcttaccataggtagattgctttctttcactttctcaggcgaaggcggcasgtgggcagttatcctgtacaaacctacagattcaaaattttgggattcttctcctgtggttcaacccttacctatcaatgggttttcattgcattgtctatggggtattaggtatgggaaaatgatgtatgtcttgacttaagtaataataactctgatctctgctccagaaactttgtgtttactttcaggttacaagaatgaatcaatatagagattaaaaacttaaatatttttaatgtaaaacacttcttaggagaatatacttaataatttctctgtacagaaatgattgtatgtatacttcaggtttaagctttaccttagtattcctaaaacttt

SEQ ID NO: 764478 - DNA, 656 bp, Homo sapiens
  misc_feature 1, 2, 3, 4, 5, 6, 7, 8, 9, 10, 11, 12, 13, 14, 15, 16, 17,18, 19, 20, 21, 22, 23, 24, 25, 26, 27, 28, 29, 30, 31,32, 33: n = A,T,C or G
nnnnnnnnnnnnnnnnnnnnnnnnnnnnnnnnnatgtttctgcatggtcagggctttctgagcatagaaaagtagaacctgggttaaaagacaagccttggaagttaaaagatgacttaagggatataaaacccagagtgttggaggcattcccaagatcgtaaacccagtaacgcttatcttaccttctcctggagacatttatttatgttccaaagggtaagatcccagggatcttccccttttcttcccaagcagaatttgcttaccataggtagattgctttctttcactttctcaggcgaaggcggcacstgggcagttatcctgtacaaacctacagattcaaaattttgggattcttctcctgtggttcaacccttacctatcaatgggttttcattgcattgtctatggggtattaggtatgggaaaatgatgtatgtcttgacttaagtaataataactctgatctctgctccagaaactttgtgtttactttcaggttacaagaatgaatcaatatagagattaaaaacttaaatatttttaatgtaaaacacttcttaggagaatatacttaataatttctctgtacagaaatgattgtatgtatacttcaggtttaagctttaccttagtattcctaaaacttt

SEQ ID NO: 764479 - DNA, 538 bp, Homo sapiens
attcatacaaaagaatttaaaattgctgttttgaatgaactcaagataatacagaaggaattcagaatcctatcagatacatcaaagagactgaaataattaaaaagcatccagcagaaatcctgtagttgaaaaatgcaactgacatactgaagaatgtatcagtctcataatagaattcatcaagcaaaagcaagatttrgtgagcttgaagacaggctatttgaaaattttcagtcagaggagacaaatgaaaaaaaaaaaaaaaatgaagcacacctagaaaatcggcatgaacatcaaaggtagcctagcagtactccccgtgggcctgtgttggtaatggaatggggacaaactcctctgcctggggaaaggggaggggaagagtgggaagaagtttgtcttgtggttttgatgccagctcagctgcaccaaaattttctaacacaagatctagaaaatatccttaaaagggcaaacctaagagttactgcccttaaagaggaggtaaagagagagaggtagaggtagaaag

SEQ ID NO: 764480 - DNA, 620 bp, Homo sapiens
gtggcatgtgcctgtagtctcagctacctgggaagctgatgtgggaggatctcttgagcccaggaggccaaggttgcaatgagtagagattgtgccactgcactccagcctgggtgacagagcaagaacctgtctcaaaaaaattaaaaaggaaaaaaagaaaagtaatggaactcagtatttggtaagcartgtaactgtggtagaatttttttttttttttaaagcttaggaattacatctgaaagtcttttaaaaagtataatattctacttagaaattcagggtcatttggaatgcattggtaccagaaaaagtttttgttttccttttctcatttctccctccagcttttttgaggtataattgacaataaaattgtgtatatttaaggtatatgacatggtgatttgatacatgtttatattgtgaaacttaccgtaaccaagttagctaacacgtgtatcaccttacgtagttaccaattttttttatgtttgtgtgtgtgagagagaacattaggatgtactctcttagcaaattgcaggtatacagtatagtattactagctatagttaattatgctgtacattagatttccagaaatttttcatcttata

SEQ ID NO: 764481 - DNA, 620 bp, Homo sapiens
gtggcatgtgcctgtagtctcagctacctgggaagctgatgtgggaggatctcttgagcccaggaggccaaggttgcaatgagtagagattgtgccactgcactccagcctgggtgacagagcaagaacctgtctcaaaaaaattaaaaaggaaaaaaagaaaagtaatggaactcagtatttggtaagcagtgtaactgtggtagaatttttttttttttttaaagcttaggaattacatctgaaagtcttttaaaaagtataatattctacttagaaattcagggtcatttggaatgcattggtaccagaaaaagtttttgttttccttttctcatttctccctccagcttttttgaggtataattgacaataaaattgtgtatatttaaggtatatgacatggtgatttgatacatgtttatattgtgaaacttaccrtaaccaagttagctaacacgtgtatcaccttacgtagttaccaattttttttatgtttgtgtgtgtgagagagaacattaggatgtactctcttagcaaattgcaggtatacagtatagtattactagctatagttaattatgctgtacattagatttccagaaatttttcatcttata

SEQ ID NO: 764482 - DNA, 624 bp, Homo sapiens
ctcattctaggaaaacattatccaactgactctggtagaccacatgacactagctaacaagaacacccccaccttgggggtccagccaacagcactgattagagaaaacaccagctttacaaatattctctcctgataagcagctatagaccctaagctggttccaactggcttacagagatggcacataaaacatctttgtcccttatagttcaccttttgatgcaaagaaccaaattcctcctcattttaatgttaaaaccccaccccaaagtgaatatagaatgtatgttatattaatgttatatctggacatgcatttgactttccctgtaaacattcacagacattccccaaatctgatgaatatgtaagacagaccctggaaggcttaaatgctgctatttccctcccttcagccaagygtgtgctttcagtttccccagaagctaggtttcccaaaactgcagattgctaacttggaaaataaaggtttttttcctttctccttcctccggtagatctcacattcattttttaacatactgaagaaagcagggtaagcagtccctgaaatcacgcctcaactactaagccaaatctgtccatttattacctgaaaat

SEQ ID NO: 764483 - DNA, 533 bp, Homo sapiens
aagaacttccaattttccttatttatgagttttctaaattctctaagtttataaaatgcatccacattctatcagtgaaataagcaacacattgaactatcgggactgaatactagtcctggttttgcttttaaactccacatccttgaggaagtcctatttctctctctgggctgcagacactgctgaaccataaactttccagtttcagtagcctcamagtctgtattaaaaacaatcatttgcaatattgctttcattttgataagaaatttaaaataaatatctaaccaattaatagaactgacaaaggtattttacttaaattgtctcccacaatatttaagagtccttagaatataatggtggatagcagaggggagataaataaatatatactacaagtagttacgtagtatgtagttatgtatatatgtatttatacacatacacaacataaatacctaactacaagcaccatcaaaatgacctcgtagtttactcttacccaatataaacataagtttaagcat

SEQ ID NO: 764484 - DNA, 614 bp, Homo sapiens
ggaatgccttacctaatgagttaagacaatgaaaaaagtaaaccagttagaatacttacactttctgatttaaaactcagtaaaactatagtaataaagacagtatgttactgacataagaacagacatacagaccaatggaaccaaattgagaattcagcaataaatcttcacatttatgatccactgatttccaacaagggtatcaagayaattcagtgtaaaaaatagtcttttcaacgaatggtgctgggacactgggtctacacaagccaaaaggaatgaaattggactctaatctcataccacatacaaaaattaactgaaaaaggatcagaaaccaaaatgtaaaagctaaaactgtaaaattcttaggaaaaaatacagatgtaaatcttcgtggtcttggattaggcaatggtttctaagatatgacaccaaatgcacaaacaacaaaagaaaaaacagatatttagacttcacaaaaagcaaaaacttctatgtttcaaaggtcactatcaagaaagtaaaaaaaaaaaatccacagaatggaggaagatagttgcaaattatatatctgatgtacaggacttatatccaaaatgtattttgaa

SEQ ID NO: 764485 - DNA, 512 bp, Homo sapiens
tctcttacttgattacacagttttaggtcaagcacgttgtttcagaatgcattcaacacctagcagtaggtgttaaataagtacttgttgactatatggatgtcctatgtgctcagttagcctgagatacaattgctgtatctccctagtmcccagcacagtgctatgcacagggtacatgtggaggattaatttagagggctttgcaggatcacatagaaaagagtttttttttaatctggcattttctcttactttaccatataatcttacctgaatagacttagcatttttctatgaattattcattttggcacgtaccctgtaaaacatctaaagtttctaaccttttgaaaccacaaggcttccccagccagcatttagagtgaaatctctgtggtagcactttaccaatttaccccttagctctttttcagttcttggctcatgtgaataagcaggccaaaatgctcttctgggaatgcacagcatggatatatattttttactat

SEQ ID NO: 764486 - DNA, 613 bp, Homo sapiens
catgtctattgaatatttaatatttttgcctttatttaaaacttcaatattttcgaagtttttacttagacctaatgacatttggccctcataaaccctcattcaatgggagaactgagagaggggctaagtagcctacctgaatttacatagattattagtgacagaggtaagtaaagctaattagaaactaaaatggctaagcagacatagctaaatcctcggttcctgtttccaaatgtaatttaatttggagatgtgaggacatagaaacccatgaggtttggaatggtaatcctaaattgccagagtgccaagaatcgccagratccagattggggtaccccaacattgggtgtaaatattaatttggatcacagggtagctatctagatattaatttgtcttagtcttctagggctacggcaacaatatttcacagattggctggtttaaacaacagaaatttattttctcacagttctggaggctgaaagtccaagatcagggtgccagaatggttgagttttggtgagggctctcttcctggcttgcagacagccaccttctcactgtgtcctcacatggttcagcattctcttttcataaatcc

SEQ ID NO: 764487 - DNA, 626 bp, Homo sapiens
aaagactcttatctccagatatagtcatattgcaggtcagggcttcaacatatgaatttggtggaagtgggggatataattcagtgcatagaataattcaaaagcagatctttaaaaattgtcactccataagagttagaaattagggtaaaatttttatttatatatatatatattttttaattatactttaagttctagggtacgtgtgcacaccatgcaggtttgttacatatgtatacatgtgccatgttggtgtgctgcacccagtaactcgtcatttacattaagtatgtttcctaatgctatctctcccccctccccccaacccacaacaggacccggtgtatgatgttccctttcctgtgtccaagtgttctcattgttcaattcccacctatgagtgagaacatgcggtgtttggttttttgtcrttgtgatagtttgctgagaatgatggttccagcttcatccatgtccctacaaaggacatgaacgcatcatattttatggctgcagagtattccatggtgtatatgtgccacattttcttaatccagtctgtcattgttggacatttgggttggttccaagtctttgctattatgagtagtgctgcaataaac

SEQ ID NO: 764488 - DNA, 594 bp, Homo sapiens
gaaaaaacaaatatcgcatgttctcacttataagtgggaactaagctatgaggatgcaaaggcttaagaatgatataatggaccttgggaacgtggggtgggaggaagagtggaaaagtgggtgagggataaaagactacatattgggtagaatgtacactgcttgggtgacaggtgcaccaaaatcttagaaatcatcaaacttatctatgtattgaaaaaccacctgtaccccccaaaactatgtttttaaaaaagaaagaaatctaattatttaaaaaggtttggcttccaattttttaaaaaatgtgctttygaggacctatgcagactctcctcactgctttgaatttggtttcctttgtgtcttcccatttggttcttgactctgtgtactttgactgctactttgggagaaagacaccttcccccagctcttccagacaaccccaccagcgtagtcaaccactgattatttccttctgcctccatcagagaagagggatttagatgcacttttcatttttgctagttgggtttctaagcaggtaaatggtcaatactatttcttaactagtcataactctttgatgc

SEQ ID NO: 764489 - DNA, 609 bp, Homo sapiens
tcataccactctaatagcctgggtatccctggtggaactgcagcatgctgcctctctctggggtcaggattcagccatagcccctgctgtcagtgaggtcttctccactcttagatagattctgctcttcggaaagatttttacccaactatttttgtcctattcattaattaacaatataaatatatacttttaaattaacaactcctccaaaaacagtgaaccattaataataaaattttataatcatcataaaaccgtccagggcatggaagatggtgtaataattcacacctaattgctttcaacctcggkcccacaaacacactagttagagaaatgaattcagatactgtaattcatgccaggtcatgttttattatttaattcatcctcgatacttggaaaaaaaaagactttgatgttcaaacactccacaaactcaccatgccaccaactccatggggatctagagaaattcctcatttatctatatcatgagccccttggatggaaattcaacctgaatcttggtgttttctatagcacacagattattttacttaataatagaaataacttacataatataaacaattaccttaagta

SEQ ID NO: 764490 - DNA, 504 bp, Homo sapiens
aatcagttcacaagcaattcatctgcaacttcttcagtttcactgatttcatagattacaaccaaaaataagctgagaatgaagaatcaaaaggcaatggagagactctgagcgtctaatcttacatgcaactctctttgtgatggagcctggatgaggttgagagaaggcagtaacaattttaggaggcctagtatgacaccagctcttcctggctcttccttgtttcttgagaagacagatttgatttcactgacrgaagctgttccttacctatttgccatgcctcccactgtattcctgttggctcagggtggtctagcaactataaccactgatacttgggctggggactggatgtaattattctgacctttagaagcaactctagcttgaaagggttagaatataacattatgaaaacccctcagagatttgtgggtaagaattttgtctataatgacaagctcctctggtttgtctcaaagagagtaactagaagta

SEQ ID NO: 764491 - DNA, 634 bp, Homo sapiens
aatcaaagcagcaaacatcttcagcaacagtcattgttttggataagtaaatggcccaggttgatccactcagagagaatcctgggacttgtgaactggcactgagggaagcaagttctcactctaggccgccttggagctgtgaagcaatgggctagcactggcacccctgcagctgttctgtcactccacgtgtgtaacttgtatctgagcaagagttaccacagtgattgagcctctggtcaggtctatgtctaggctactattttgaaagcaaatgtgcttccatttgctgaagtcaattgaaattttgtgtgtgtgtcattttcagttgaaaaaaagtcttaccagttataaataataataatctattgatttcttackctctacccagcactctaagagttttacatggatggtctcactttatccttacacagccctataattaggtggttactgttattatcctcacttcctatgagaaggctcgaggcttaaagaagctgagtgatcagctcatggacacagagctggttactagagaagcctggatatcatagtctgtcttcaaagacttaaccactctgctaaaaattaccttgtgatgtcgaaggaaaaggctgagtaaaat

SEQ ID NO: 764492 - DNA, 634 bp, Homo sapiens
aatcaaagcagcaaacatcttcagcaacagtcattgttttggataagtaaatggcccaggttgatccactcagagagaatcctgggacttgtgaactggcactgagggaagcaagttctcactctaggccgccttggagctgtgaagcaatgggctagcactggcacccctgcagctgttctgtcactccacgtgtgtaacttgtatctgagcaagagttaccacagtgattgagcctctggtcaggtctatgtctaggctactattttgaaagcaaatgtgcttccatttgctgaagtcaattgaaattttgtgtgtgtgtcattttcagttgaaaaaaagtcttaccagttataaataataataatctattgatttcttactctctacccagcactctaagagttttacatggatgrtctcactttatccttacacagccctataattaggtggttactgttattatcctcacttcctatgagaaggctcgaggcttaaagaagctgagtgatcagctcatggacacagagctggttactagagaagcctggatatcatagtctgtcttcaaagacttaaccactctgctaaaaattaccttgtgatgtcgaaggaaaaggctgagtaaaat

SEQ ID NO: 764493 - DNA, 502 bp, Homo sapiens
tttggggccggatgtggtggctcacgcctgtaatcctagtaccttgggaggcagaggtgggcagatgacaaggtcaggagttcgagaccagcctggccaatatggtgaaaccctgtctctactaaaaatacagaaatgagccaggcatggtggtgcccacttgtagtcccagctacttgggaggctgaggcagaagaattgcttgaacctgggaggtggaggttggagtgagccaagattgtgccactgcagtctagcctgggcatcagagtgtgagactccatctgaaaaagaaaaataagaagaagagggagaaaaaaagaaaggaaatagtgtttttgtagatgggattaatttagaaakctcaggatttagatttcctggatttaggatacgctgtaaatccagtagctggtatccttacaaaagaaaggagaggggatttgagacatagacatacagacacagaggagaagttcacgtgagggaggtggaggttgta

SEQ ID NO: 764494 - DNA, 646 bp, Homo sapiens
gtagggaactaagtgggtgagtaacctgcctttggcttccagggtgcaaacagaatcattgctaaccccctttgtgtctcacaatgggtaatgaaattcatactatggcaccaaagcactttgagctctttagaaaaagtaatcataccaacttagagcattaaaaccacmccgtattttgaaggactcatgatctgcactgtgcttggctgctggtggaagcttaaagacaccagtaattggcagaactttatcttagacttccatttgaccctcacaacctcacacatgattttacacagcttcctataatgggggagaaaagcccttcttttaaatctaatgttagtttaaatgctaaggctttcaaagtgggcctttaaagtcactttttagaatttgtattttttttttaacctaaaatagacatgccaacattattctgactaaaagaagtagacaaggtcattcaactcctaaaagcttattttccaaaagcacagttaggtctcagctttcagggtgcttctggctgtatcaaaaagacagaatatactggtcactgtgttgttttctgaaagtgccgagggtaatctgtgtatgagttaaagggccaatttcctataggaaccttctcttagatggg

SEQ ID NO: 764495 - DNA, 555 bp, Homo sapiens
agagaatacaggacaagagagaaaagaaaaatcatgacaagcagaaaaaaggatttgaagagcatagaagtccagtgatgttttgtgacagggtggtcttcagcagcccctgagtaaaccccaacgcagccagaccactgagagtggtacaygccactccctctccctgcctcagcagagcttctgaggaccccaacacaacacctcatgatcttgagggaaagacatagaaactgtagtgttccaactagaaagcatatggagcatgataggagcagtgagccatgtgctttctccccagtctgtttctgtgacagctgaacatcacagatgaaaactgaagacaagggacctgagtgccatcttgtggagggacaggccatggtgcccctggtggtcctctcactgtgtgggggtttggtttggtttattggtttgcatggtgtatcctggccttcctcctgtccctaagccccacctgcctgcaccatgggaactgatcctttctggggtgatgagtacattgttaccagtcattctgtgatgcaggatcat

SEQ ID NO: 764496 - DNA, 510 bp, Homo sapiens
acttaagggatttggttgactccacatgggtcagcagcatgatggggctgccaagaccagtgaaggcaactggaggctgtgttagactcagtataattggtctagacagagggaggagacactctttcctcaccctgtgctactctgaccacacatggataatgatgctaattgcagatcccatgtgctaagagagacatgtatcaagagcacctgcaaagaggacccccaggaaaccaaggacattaaaaccatgggagataccaaaatggataaggactgggaatacctattctgcaaagataacatcctaagatgaatagtagcactgctttcaggcattagagggctgtcatatggatgaggaattasacggttttataggagcctaagggatataactaaaacccatagtggaagtacaggaggattcaatttctgctcagggtaagaaacattctccagtcagcacaattgccatggcagataatagatgcttcttattggaga

SEQ ID NO: 764497 - DNA, 624 bp, Homo sapiens
ataaaactcttgggcagaaaccaactaaaaataatgaggagaggagggtttactgggaagggaataagtaaaataagaaaacattttggaggcccatttttaagagggtaggctgggataaagaagacctgacttagaattctcttttcacccctcattgaatgagtcccattggctgcatagcttaatgttcctgagtctcagtttctgcaacgttaaaatgccaccttcacagatttgttatgtgggtcaaataaaattagagaagtgaaagtacttcgtgagccacagcgcacggtgtatatgttagtggtgccactatattttgtgatttagatgttcatgggggatccctagaaattttttcaattctttataattaaacatttcagcaaaaagataaaaagccctagaaagctcaaggtcaatgaaataagcaattcttgcatctagtcwaggctcagatcttggcaaacacagagttgatgtattttattaaaacaaaaccttggggagactggtttaggccaaatgcctaactgatggggaatttttattttgtcaatagattttgttaatcacaaggtttcttttatacattaaaacacacacacattcccatag

SEQ ID NO: 764498 - DNA, 540 bp, Homo sapiens
ctcctggtatttattctcttgagtaaactcttcccttgagaatgagacgaacctagtaatttggttttttgtttgtttgttttttgagatggagtctcactctgtcacccaggctggagtgcagtggcacaatcttggctcactgcaacctccaccacccaggttcaagtgcttctcctgccttagcctcccaagtagctgggattacaggcctgcgccaccacactcggctttgtatttttagtagagacaggatttcgccatgttggccaggctggtctcraactcctgacctcaggtgatctgcctgtctcggcctcccaaaatgctgggattacagatgtgagccaccatgcccagccctagaaacttgtttctaacaaagagaatatagcaaatataacaggctgtcacttctaagattagattacaaaaagactatggcttctatcttgggcattctcttttgctatcttacctgctcactttgatgaagccaatatgaattgacctatgaagaggccacacgacaagatgcta

SEQ ID NO: 764499 - DNA, 565 bp, Homo sapiens
ttattgtgggagtgggttagttatcacagatgtttagctcctcctttcctctctgtctcatgggctcccttccactttctacctttcagccatgggataatacagcaagaaggcctacaccagaagccaacatcacacttttggacttctcagccccagaactgtgagccaaaataaataacttttctttataaattacccagtctgtggtactctgttaggggagcagaaaacagactaagacagaaatgtattagaggaattagacctcacaactgtggaagttgctggaagagaaagtcccaraaagagttggagggtcagagaaaaagttaccaaccagccttcttgaagcactgacaccaatagccaagttagagtttgcagaggggtctccagccactgaagcagatcttgggaggggagctcgtagagaagcctatgagcagctcttcccctgtggagctaccacattgtgggtccactgccaggcatctggaagtggacctggagccagaaatgaatctgttggtcagaagaaccagcaggtgggaagatgagctat

SEQ ID NO: 764500 - DNA, 604 bp, Homo sapiens
accacattgtgggtccactgccaggcatctggaagtggacctggagccagaaatgaatctgttggtcagaagaaccagcaggtgggaagatgagctatggtcactgcttcacttctgcctcccaagctttatacaagttcttcttttggccaactctatcctagaaccatagagggaaggggattctgggaaactaattcccagcttaaacaatttgataatacaacaatccagcacattttgttctggcttttagataatctctgcaaagtccatggttagaagtgggcctccttttgccagaaaatccacagccactgacgatgaaaggcccacgagcaccaggaaaaactgttgacacagctcctctgtgtgggcctccacgatgtgtttaatcaaatgtcagcagacagtctgtaggtggaggataaatatccwtgcacagactggctctggccctggaaggtgctaggctgactccacacctctccacatcaccaccctgttcctgtcctctcatcttagcacccttatccccagcttccttgatcctttgatgtcaattctcaagtgtttatttggaaaacgaaaaatacttctcact

SEQ ID NO: 764501 - DNA, 630 bp, Homo sapiens
cagcacatgaccttcctttagttccttgaacacaccaaactcattactgcctcaggggctttgtacttattcttccctttcttatcatttaggtctcagttcaaatgacactgtcttagaaaatctcacttgacctctatctaaagttacatctaactctcatatcatttaaaaatcacaatattctattttcttccyagcatttattgtcacatgaaattaccttattcatttgtttatttgcttattgtctgttctcctgcattaaaatgttacttgcctgaggtcagggacttggtctgtgttggtcacagctatatttccagtgcttcttagttgagtgcctgtctcatattgtcatcaatacacatgtgcatgatcatgaatatattgcctacatggaaagggcaaagaaagatccttttccttctatgcggtctgcactctctcttctccattatgttgtttgccaagaatatcagatgaatagaaatggaaatagaaatctatgatctctctggagcacctagcaaggagtgacatgttataggatacagacaacccagatggccatctggtgtgttaatgatgtttgatttgtgttcaaagcaagtttatgttgccctttcc

SEQ ID NO: 764502 - DNA, 620 bp, Homo sapiens
taatataaagacatattttcaaatcaaaataaataatgaagcaaaaatcagatagacatgtactcctttgccaaactggaacacaatttttctttctttgactaaatttcaattcaaatgaagtcctacaaagacaaaacaaatcaactaacaaacagcccaacaaaaacacctaaaccaaacagcccagcaaaaagcggaatggtcattttcatttatccaacacaaatctacttagtgctgggctggttctggtaggcaaccaagtgtttagtggatacccgagcagctcattctaatacaacatggcaacttaaaatcaggtgaagaaatgcagtgggagaaaacaragaggaattggtaactctgcagagcagtgacatttgaatagacttgtcaaggaagactagatttagtcaggcaggagggagagagggcagggagggaattctacctgactaaggaagagcatgtgcaaggcctaggggaatggaagagaagaatgagttcaggtgtctggaagaggttgtcttagtaggtttcctgttgcagtaacagaatactacagagtgggtaatttataatgaagagaaatttatttagtgtatggttttggaggc

SEQ ID NO: 764503 - DNA, 520 bp, Homo sapiens
gctgattacaggtagatgtggcttctgaagcaaagttacataattcacctcttgttcctgatccacttttagcaaaacttccgtggaaaggaccttgtaccttcttgaagtatccaacatgcagtcatctttatgttttcctaccaagttcccacatttctgcctcagtgggttctacagtctgaaccccagaaacaatttcatagttcaaatatctggcatgctattacatcaaagggattgcagattcccaacctggaatggaagaatscttgactccccgcacccgccccccaattctgctctacctcaaaactgcctacatcatctcaaccacccaagttttgggaaacgggtgaattccctcttccttttcattgagactagcccaggtcatagacccaatctctttactggggacttaggctaataatttcgagcacacaaaatcaatagcaaaaataaagtcccacgttgcagaacatcctcaactgaggagagagctcattggttgagagtg

SEQ ID NO: 764504 - DNA, 526 bp, Homo sapiens
tccgtgccatacaggcaagttaccttctactcaagtcaggcctcttattctatatccaataggctcacttttgcaattaatcttggctcatcctacttttttctccacataatgcacccagctctgcacatttatccatccaaattctgtgtttccttcaagatcaggatctaactcaagtctggcttctatgactctttccctaactcacttgtctataatgggatctactttatccaagtcattgtagcaaagtgttacatggtctctctcaaaagagacacttttagcaaggaaggtctctgcagggaaaaaacaatcaacctccaaaggaagggagtagtactaggttctcaatctttaaaatcatgtgcctgggccrggcatggtggctcatgcctcccagcacttcggtaggccaaggcaggcagatcacttgagctcagcagttcaagatgagcctgggcaacatggtgaaaccccctctctaacaaagatataaaaaattagccggatgtggtagtgt

SEQ ID NO: 764505 - DNA, 653 bp, Homo sapiens
ggttgacagagcactcactgctctacattgctggtcagccaaggaaatagccaagggggtgggaaggtctcagcttctccggcccagggttggcacaaatcacactcatacagaaccagccagatggcctcagggggtcaggaggtacaattctaccacatgcccagaagcagagttcaaaatagtctgcaaccagcatcaaggacttaaaggatggaaagtttaaatgacgtggttcttgcctttggtggagcaatcagtccagttggggagacagacacataatttgaaattttcacatcctsagtgccaacagaagtctgcaaagaggtatgggagcagagagggaaagtggtgaatccagattggatgtatggagggtagcaaaggccttgaaagcccaaaaaaatgatattcacagagtcagatgtagactctgctcattcagctctgttcagagcgagagaatctcagcaaacggaatttgagactttcaatcatattgccaaggccaatcccattatgagataactgcctcaggggttatcagagcctgatgctattgaacatgctattgtttaaacaattcctcttaggctaattctggtgctctctaagcaaacatctccatagggatcctcttccaatgtaat

SEQ ID NO: 764506 - DNA, 528 bp, Homo sapiens
atctgcacaaggagtggggagtagcaggcggtggtaagccccacacagttcccacacacttggtgaggccaattcactctcacagtgttccactggcagcagcaagctgagttctagtcagcctgtattcagaactcccaactgccttgagtcataagctttcccagtgaagatagcaatggagctttcaggccacccaccttcccctccctgttggctgcaaagctgggtgcctggctattgcagttgcaactcctgcacttttgccccttttcactctcccttgccctggccctggccaagggagttggtctcactcgaggttatatcatgaaaycctgttgggggcttctttcaacctgcaaccactgcctgaacattttggctgtcctccacagggtcccctgtgaagaataaggaatggttgtcctcagttgatgccggtatctgggagtgcatgcaagggtcttcccgctactgctcctacttttatattccaggaccctccccaggtcggttcctgtgctg

SEQ ID NO: 764507 - DNA, 634 bp, Homo sapiens
tgtttattttactttaatgctttacttaaattataaagtatgcacatagtgcaaaatattccaactacatagaaagttatacatttaaaagcccaaaagccttttggttcttcacctttccattcctagtgccacactttagagacaattgtgtttaaatctgtccagagtctccttggtggttaatccaaaaatttaatatgttatactaatttctatgtttgtttttaacctttatatagtatctgttgacttcatgttaagaaaaattgagaatttagcagttataattctaacaacctcctttaccccccatgcttcctgattttgttrgtaatattattatttttgttttaaaacacttaacctctatttcttgatcctaaactttgaacagttctactacataatataagcagtttagtgttcctccctgatccttctctcatcatctttcacctcctactactaggcttaacatgtcaaaatttctgtgttttaaatcttgttctataattataattcttcaaggatttatccataagttgatattaaacttagaaaattttataaatagaatttataatagtatgattatattaatcttaggattaaaatgaaaagtagaatgtct

SEQ ID NO: 764508 - DNA, 586 bp, Homo sapiens
gaacctctctgtttaatacaagaagagcagattgatgttgaacatgagacaaactttttttttttaacactaaaacaatttattctcatactatgtaaggccaaaggtaaccattaaagatgcttgctgaagtacaccaaaagaataataaacttagcaaatcaatagatttctcttggttttytaaggtttaagttttcttataccttaaatatctgatatcagtcaatattcatagaaactactcagatatttcaaacaagaaatttaatacagataattaattacaaaagagggagaaggataacaggaacaaagaggagaagggaaagcttctcagtgtaataactgtagcagctcctatacaaccttaggtgtgaaagagaagtagaaaaaactgatgtcaccagaactcatgattgctctgctgttgaggctgcttgagcatctactgaagctatcattgctaatgtacaagccattgatacttccattgtgtgagaattctgcactgtactgctagtctatatatatacaattaccagtgcattgctagtatatacatacatatatatatacatgtata

SEQ ID NO: 764509 - DNA, 615 bp, Homo sapiens
aaatttaatacagataattaattacaaaagagggagaaggataacaggaacaaagaggagaagggaaagcttctcagtgtaataactgtagcagctcctatacaaccttaggtgtgaaagagaagtagaaaaaactgatgtcaccagaactcatgattgctctgctgttgaggctgcttgagcatctactgaagctatcattgctaatgtacaagccattgatacttccattgtgtgagaattctgcrctgtactgctagtctatatatatacaattaccagtgcattgctagtatatacatacatatatatatacatgtatagataaaatagtgttataattttattttctaattgtttattgctgtgtaaagaaatgtaattagtaacaataagtacctgataaacccgataaaccttttctcaacatcctaatgattaatctgtggttttccttcgattttctatacaaacatttcacctgaatgtaattacaactcttccattttttagatagtttctttttttgttgttgttctaggtatttttcctttttgtatagctctttaaatttcttggcttaaaactattttttaatatccacttctaatcttc

SEQ ID NO: 764510 - DNA, 585 bp, Homo sapiens
caatatatgaaccttacaacaatatatttctaattaccaaactcctgcactttgtgtccttttgtcatatgccgtacctctacatatgctataaaccccacagtacattttttgtttttgttgttttttgagaccatctcactctgtcgcccaaactagagtgaagtggcaggatctctcctcactgcaacatctgcctcctaggttcaagtgattctcgtgcctcagcctctgagtagctgggattacaaacattcagcaccacacccagctaatttttgtatttttagtagagacagggtttcaccatgttggtccgactggtctcgaactcttggcctcaagtgatctgcctgcccactckcccgcctcagcctcccaaagtactaggattacaggcatgagccatcacactgggccccacagtcatttttaacatttctactttaaatagcttgaatttcactttaaatactcttttaaaaagacttaatcttgtgaagtaggtctgctggagataaattctttcagcttttgtctgtctgaaaatatctttatttctctttcatttttaaaagatatttt

SEQ ID NO: 764511 - DNA, 608 bp, Homo sapiens
tgaaccatatagagttaatttttatataaggtgtgaggtttaggttgggtttattttttcttttgtcagtagtgtccatttgttttatcaatgtttgttgagaagactattttttctccattgactctctttagttcctttgtcaaaaataagttgggtatatttacataggattatttctgagtattctattccatccatctatgtgtctttccctttgccagtatcgtacagccttgattactgtaactgtatgattttgaaatcaagtagagtgattcctcccaatttactcttatttataaaaatggtcttagctattctagttcttttgcctgtccatataaatttttgaaaactgttcccctttgtcygtaaaagtcttgtggagatattgattggaatttcaatatgttacatatgaaattgagaataattgatatatttactatgttgaatcttcctatccacaaatgtggtatgtctctccatttatttaggttaaattaaaaaataataataataagcaaggtgtagttttagcatgcaagcactgcacatgttttggtagactgacttttttactttttgaagtatttgtaaatgat

SEQ ID NO: 764512 - DNA, 619 bp, Homo sapiens
ttgtgtcattgacttttctttgtcatcattctgttttcaattttattcatttctgctgttaaatttattatgttcttcctctctttgctttggatttattttgccttttctaggtcttgagatgggaacccagattattcatgtgagacattttcacttttctaatgtgtgaacctaatgctatgaatttatttttccccagtatttcagctgtgtcctacaactattgttatgttgtattgtcattttttccagctcaatgtattttttttaatttaccttgaaacttctttgatctatgaattatttaaaagtgtgttatttagctttccagtttttggagattttcttatctttctgttactgatttctagtttggttccatggtagtcagaaaatataatctatgttatcttcattcttttaaatttgttgaggtttattttatgtctctggatatagtkatattggtatatgttccctagaaacttgaaaatccttcacataaatgtgattagatcctgattgttgatcgtgttgttgagtttttccacatccttgctgatttttctagttctcttatgttttgaaagagcaatgttgaaggctctaactatat

SEQ ID NO: 764513 - DNA, 648 bp, Homo sapiens
tgcagctcttatgacgatgatggggtttttctggttgttgttcatccagtattgttctgcctttaggctgcctcttcattttggatccatccacatcaaaatgaaaaagaactgccatcaagggtctgcttatatagtgagtgggctttgagagggatctacagaaaactttttttttgaaatggcatctatttagtagaaacagggctatgttcccaccttctttgcrtctcctccccatcttagccaaagaaaaagcaaaagggaagcttacttgctcaaatatatcaattcaggaaaagaaaattagtcttggtttgtgtttagtaatttaatgtcaagcaaaatcattttctgtataatctaaattaaagccttgctatcatgggaaactgatttaaaaaaaatctccacccttctgcataaaaatacttcagaatgataagcgtttggatgtgcaaccattgattttattcagatgaatacaaaatatacttagagtgtagaattaatgatgtcaaatttaaaataaggttttgttttcagcatttactagagtgggctttatctgtccaattctttgagtccctgctgctagccactcagaaaccagtttttcccatattacccactgagctgactttcatt

SEQ ID NO: 764514 - DNA, 532 bp, Homo sapiens
ttatttgccaccttatgctgtaaaccctgggccacagaacttggtaataaaatgtaagagtatcatactttctccatctgtataaagtccttacagaaaagcaggagtctattgcaaatgtcaccctaggtttcccatggttaatacatgtggtaagactgaactgtcatgctacagatttgtcctaaaagtagaatgtgaattcaacaactacactctcccagtgaaaatgatctgtttcattttttagtgtttttccttccatcaataytcaaaggaactggtttgcattagtgagtgtctacaaaggtttcttcctcttctggacaattaatttgtatcatataagacaaatattggcacatctggacaaactcagcatgagtctaaaaaccatgaaatttctcaaggcatctgtgaataaaaacacctctctgagcttttccaagatgacagaccgaagaggggagaagtggagaaatggacacaatagccctctttgaagatcagaaaggctgttgtgtgaaagagg

SEQ ID NO: 764515 - DNA, 652 bp, Homo sapiens
agttcttttttattaataaggtggccacaccaagtcagaaattataaccatctgctttagccattaaatacagattcaaaggcctaatgataaagtgacctctttattaataacagagagcgacaagtggccattttcccagagtgttcacagaaataaatcaatccgtaagtccaggtatcagctatatcggttcttaagttttctcttcgatttggcctttattattttaaatcacttaggaaacaaaaagggagctcaggaagtaccttttccatgagttttgtttttatctctgctcttgatgagatgtcacttagccacctcacataacttgaagacacgatctttcattctccacatcacagaagaatcatccccatgcaccatctaaccgatgagtagacacatgggacttatcagcmgcagggagtatatctgaatcaaagcctcaaacaaaggtgtgtaggaaaaccacagctctgtcaaaggaaacaatagtggaatcactgcagctgtattttaatatggcaggaacacagccccttgttttctttaattcacatattagaattttaattatcaagttgctaaagtgtggtggctttcaattgaagtgggttttaccgacccagcctcgcagggcagacag

SEQ ID NO: 764516 - DNA, 629 bp, Homo sapiens
caaaagcatgcaaatgctttttaattctttaagaatactcattaaatcatataaatgacataaaactaatgcaaaattacaacattgtaatcataataatacagcaattttctcctatcataataaataawtaaaccatctacaccagggctcagataaaataacaaaatcagcaataagtaatatttattaagttcctactatatgccaagagcattatattatttcatttaatcctcaccaaaaaaaaaaacctagcaaaatacccaacatatactttttatagatgaaaaacatctgagattaaaaaggttaattaatatccccacagtggcagctctgggattcaaggtcagtcaaacttcaccatgctacatcctagaattacgaaaatccagactatcgagtctcaaggttgaggaagttcccagatttttctcatcagagcagcacatctcagatgttaatgtgcagatgaattacctgaggatcttgatgaactgcagtgtctgattcagtaagtctggagcacatctgagattctgcatttccagcaagctcccaggtaatgtggatgctgccagtactcagacctcctgtcctgcagcacatccaatcattgtctgtct

SEQ ID NO: 764517 - DNA, 631 bp, Homo sapiens
ccccttcataccgctttagctgcatctctcaaatttcaataggctatgatttccttatcatttagtttacatattttctaatttttcttgtgaattattctctggttccagagttattaaaaatgtcgattaatttttaaatgtagatggattttctacatatctttttgctattgatttctaatttacttgacttgtggccagagaatatagtctatgatttcaatcttttgaaatttactgagacattgtatggcttagcagatggtctatcttgatgaatgttatgtragtgcttgaaaagaatgtgtgttctttagctgttggatgtagcgtttcataaacatctactaaatcaagttaattgatagtgttcccatcgcttacatacttactgattttctatattcttgctctatcatttactgagagaaaagtactcaagtctccaactgtgattgttcattttctattctcccttttgtcaatttttgctttttaagctctatttttaggaacatacatataaacacacgaaaatttaggatttttatgtgatcttaatgaattgatttttaactctttgtcttctttctttttgtgtttttaacagtgtctctttttaatttta

SEQ ID NO: 764518 - DNA, 631 bp, Homo sapiens
ccccttcataccgctttagctgcatctctcaaatttcaataggctatgatttccttatcatttagtttacatattttctaatttttcttgtgaattattctctggttccagagttattaaaaatgtcgattaatttttaaatgtagatggattttctacatatctttttgctattgatttctaatttacttgacttgtggccagagaatatagtctatgatttcaatcttttgaaatttactgagacattgtatggcttagcagatggtctatcttgatgaatgttatgtgagtgcttgaaaagaatgtgtgttctttagctgttggatgtagcgtttcataaacatctackaaatcaagttaattgatagtgttcccatcgcttacatacttactgattttctatattcttgctctatcatttactgagagaaaagtactcaagtctccaactgtgattgttcattttctattctcccttttgtcaatttttgctttttaagctctatttttaggaacatacatataaacacacgaaaatttaggatttttatgtgatcttaatgaattgatttttaactctttgtcttctttctttttgtgtttttaacagtgtctctttttaatttta

SEQ ID NO: 764519 - DNA, 560 bp, Homo sapiens
cagatctgttgttttcttatgatgtgaattcatttttaatagatctaaaatagttaataatttgaatgcattgctctatcaataaatatttaaattgtttttctttaataagcagtgctgaaataaatatccttgcatgtacacccttacatatgaattcattttttctttagacttttaagattgcttggttaaagtatatgttccattttaaaatgtagtatttccagattaccttcaaaaatgctatagtaattgacatcttcctagagagatagataggtgatttccccatactttttccaatgtgatattgattatttatttatttatttatttatttaagatggagttttgctcttgttgcccaggctggagtgcagtggtgtgatctcagctcactgcaacctccacctytccagttcaagtgattctcctgcctcagcctccagagtagatgggattacaggtgctcaccgccacacctggctaatttttgtatttttaatagagacagggtttcagcatgtctgtcaggctggtctcaaactcctgacctc

SEQ ID NO: 764520 - DNA, 648 bp, Homo sapiens
ttcatcctttaaagcttttctacccttcccacagatctctgagattgctattaccatcattttacttagaaaaccaaagctcagagaaatttaagtgcaaacagccaagttctcacatcatactcaataactcaccaagcctagsttttgccacattgtggagcaattgaactccatttttttccttctgtaacagaaggtaggccctgtttatgtgagctatgtctcctttaatatgttaactaactacatctatgaattttcttccagaaagttgtattacaggtggaaggaaatgtctgaagcaggagactccataaagaaatcacaaccaaacaatcaaatataaaaaccccacttggcagaggacagtctagtaggccttctgtgtctccttttctctggttctctggtacgtcaagtggcaagacacaagaaacgccatgtggtgccacaaaatgatggcaaacctagcactacggtacccaaattaactcctggaatatggctttgaagcctcaacatatattctgttggagcaacgacagtgtccatagtgagtagagaagtccatcaaatggattacctgtgagatataacctggaggcacatgaatgggaggaatggatccattgggtgacatcatgg

SEQ ID NO: 764521 - DNA, 588 bp, Homo sapiens
caaaggcatactaacccagcaataaaggaaaagtgctgccctctctcccaactttctagtgcttttttttttttttttttttttttttttgagtcggtctcactctgtcatctaggcgaaagggcagtggcatgatcaacactcactgcagttttgacctcctggcttcaaacaatgctcccatctcagcttcccaagtagctgggattacaggcatgcccaccacatccagctaattttttttgtcagagatggggtcttgctatgctstccaggctggtcttgaactcctgggctcaagcaatcctctcgccttggctcacaaagtgatcctcccatgcctggcatcttgtgcttaatttttaacttaaaacaaaaaataaaaaaaaaaattctcaatttccagtttttaagcacatcaaaactctaaaatatcattttaacaacttcaagtcatattcaaaaaaacctaatacctccgtatagtgtactgctactccttgcaaagttctacttaagacttcacttttattttgtttatcacattaatgcatgctggcagtggatgctctaatccagcacaagagg

SEQ ID NO: 764522 - DNA, 523 bp, Homo sapiens
ataatttaaattaaaatttataatttaaagtgtaatcatttttaagtgtacaattcagagacattaattacattcacagtgttgagcaaccatcagaactatgtattcccaaaacatttttatcactccaaacagaaactctataaactttaagcaataactctacattcttcctgcctcccagcacctggcaccctttaatctattttctgtcccaatggattgtctattctagatatttcacgtcagtgcaatgatacaatatttgtgctttgatgtctggtttcttttgcttagcataatgtttttaaagtttattcatgttgtagcatctttgagagatttrtttgtttgtttgtttgtttatttatttatttatttattttgagatggagtcttgctctgtcgcccacgatggagtgcagtggcgctgtctcggctcactgcaggctccgcctcccaggttcacgccattctcctgcctcagcctcctgagtagctgggactacaggcgcccgccaac

SEQ ID NO: 764523 - DNA, 640 bp, Homo sapiens
caacttggaggtcactgatgaccttgacaagagcactttcagtgaagtagtaagtctgtttagataaaataaaagaggaaatggaaaaagttaaaaatttcaggtatggaccaattaatacaagttttgcaataaattagagaagagaaatggggtggcagatagaagggaattggagtcaagagtggactttcagagagttcaatgtttgtatgctgatggcagttatctcctaagagaggaatattgttcaggcaargaagaaggagttttcactgaagccatgtccttatgtagaagagacaggatgtaatcaattgcctagaagaagaagtttcccaaggactgaactatgagagaagaggagttcaagaaactgtgaagctggaatacgaagagaatcatctaaatggatatttaatgtcccgtgatgtcatactgaagtgaggttggagagtgttacagagagccaaaactgcaactgtgatggtgagtgacccaaggaggatggcaaaaacgaggaagtaaaaggggaatgggtagtaaaatcaatgataagggattggagctgagattttactaatttggagggctttagagaagcagtaactttacagtaagaagatgaaaggaacattga

SEQ ID NO: 764524 - DNA, 483 bp, Homo sapiens
aaaaatgttgaagaggaagtgagtggaactaactgatttgttgtagagtcccaaggggcaggtataatctgcaagctgtcagattccattatggggactgttgccatcaatcagaactgacatttgtatatcagaggttagtataactaattatatgtatgtttatggaatgtaaaccatgtgacattttagatttaatctttaaattaaaacatcygtataatttataagcttatcggttgactgagtatgtgattatgtattttagaaaggaagacagtagttcttaaatcttgcaagctgttgcctggtctacacctatagtgttagaatgtgatttgtaacaattccaggctattttcaccacagaagatgtactaggcaagcattcttgaaggttgctctttagcttagttaatagattccaaacatttttcaactaaatgtaccatattttatcaattgtaagatacattttgaaaa

SEQ ID NO: 764525 - DNA, 505 bp, Homo sapiens
ggctcctgagatttgatgatatatagtatactattgtattttagtggctatgttttgatattttatcattctggttttaaaaaagtcacatatgtgattacacagtttgctcccggttttctacagtctaagtactaaaaatttcaaaatcaattttaaatgttataaagacaagaaaktatacttttatctttaaaatttgtgtattccttttgattcaaaactttaaatctactttttagccatatgcttcaaagtaacaaactgttccaatagtcaaaatgataaattatttaaaattcaatatgatatcaatatgacttgtataacttcccatcagatataacaagatgagttaaacatacaacaggctacttttatgcatcacatacatttttgtgtcttaagccagatatatattctcaatagtaaaaaataaaaccttaggactccattttatgtataatgaaacaattaaaattggaaggttttaaggattgaggtg

SEQ ID NO: 764526 - DNA, 617 bp, Homo sapiens
gaaagatttctacaatatcttgttcagccatatagacttaaaattataagatagtcaaatttataaacttcttctgtggtttgtgccttttttgttcattgtgcttttttgaaaatcccagtttatcccaagtgtatgaagttcttccacatttttcttctgaatgatttaaagttttattttttagatttaagtcttaagtctctctggatttttattgttactttggtaagagcagggktattattttatttctttacctaaagaaagccattttgtcatcatctctctagccttttctagtgaattataatattatctttgccatattctcaattctagtgttgtcttgtggctattactgagctgtgtttgttgttgttgttggtggtgtgtgtgtgtgtgtttgtgtgtgtatatctgtatctggccctccttgaggactacactgttttaattactatcattttagtataagtcttgattataaagcaaattcagcctcattattttattctcatgtattagaatagccatagctacttactgaacattttaattttgaaattggactctttcattacatcaaaagatctgtttgggtttttattagaagt

SEQ ID NO: 764527 - DNA, 617 bp, Homo sapiens
gaaagatttctacaatatcttgttcagccatatagacttaaaattataagatagtcaaatttataaacttcttctgtggtttgtgccttttttgttcattgtgcttttttgaaaatcccagtttatcccaagtgtatgaagttcttccacatttttcttctgaatgatttaaagttttattttttagatttaagtcttaagtctctctggatttttattgttactttggtaagagcagggttattattttatttctttacctaaagaaagccattttgtcatcatctctctagccttttctagtgaattataatattatctttgccatattctcaattctagtgttgtcttgtggctattactgagctgtgtttgttgttgttgktggtggtgtgtgtgtgtgtgtttgtgtgtgtatatctgtatctggccctccttgaggactacactgttttaattactatcattttagtataagtcttgattataaagcaaattcagcctcattattttattctcatgtattagaatagccatagctacttactgaacattttaattttgaaattggactctttcattacatcaaaagatctgtttgggtttttattagaagt

SEQ ID NO: 764528 - DNA, 605 bp, Homo sapiens
atcaagagaagtggaaagatatatccgtccctatatcctcaccctgagaatgcttctgaaggcttaggacagtgtaagagtgttagatattttcattcagcaaacaattatgggcctactctgggcagcattgagacattcttcaaaggaaaaattcaagggcaaactgcccaagcctcgcaggtcctagcggtcagaaaagagctcacatgcagccctatcaaatgtgtcctgctggacatggttttcagcgaacacagaagcacagagcatttaatgtgtgagtggaccaagtctttctttctttctttwctttttttttttttttttttgagacagagtcccactctgttgcccaggctggagtacagtggcacaatcttggctcactgcaacctccgcctcccaggttcaagcgatcgtcctgcctcagccctgctagtagctgggattacaggcacgtgccaccatgcctggctaatttttgtatttttagtagagacggggttttgccatgttggccaggctggtctggaactcctgacctcaggtgatctacctgccacggcctcccaaagtgctgggattacaggcgtgagccacca

SEQ ID NO: 764529 - DNA, 605 bp, Homo sapiens
ctatgttgcccaggcacagccattattttaaattcttctctaaaaacatttacaatcagctataatccaaaattgcttttcataaaagactctaacaagtactcctaaacacaggtttctaataactttaagattaatagactaaagaaaaatttcaaaaactctaatgaaatctaatacattcataaagattgctaacccaacaccaaacaaaacaaaattacatgagactaaactgataaaatgctaagatgatttttatgactttttgactttttttaaaaacattactggttctttttttttttttttttttttgggacagtgtctggaatgcagtggtgtaatcacggctcactgcagcctcgaccttcttggctcaagtgatccttccatctcagcctcccaagtagctggaaccacaggtgaaaaccaccacgcccagcaaatttctgtatttttttgtggagacagggttttaccatgttgtccaggctaacatayacttttataaacaaaattaaagcattggccaggcatggtggcttatgcctataatcccagcactttgagaggccaaggtaagtggatcgcttgagaccagg

SEQ ID NO: 764530 - DNA, 599 bp, Homo sapiens
actttgggaggccaaggcaggcggctgggaggtggaggttgtagctagccgagatcacgccactgcactccagcctgggcaacattgagcactgagtgaacgagactccatctgcaatcccggcacctcgggaggccgaggctggcggatcactcgcggttaggagctggagaccagcccggccaacacagcgaaaccccgtctccaccaaaaaaataacgaaaaccagtcaggcgtggcrgcgcgcgcctgcactgggcaggctgaggcaggagaatcaggcagggaggttgcagtgagcagagatggcggagtacagtccagcttcggctcggcatcagagggagaccgtggggagagggagggggagggggagggggaggttaactgttcttaatgccttatgtatattcattgtgagctcctgaaggtaggaacagtagtatcaaaatgttttccatcaaagagaaatctactctgggtatatcttttactttctttgggaacacctgtctcagattactcctaactcagattttgccaggctgctttactgtttgaatgctgagccccacctgcctgtggtagggaacagaatt

SEQ ID NO: 764531 - DNA, 572 bp, Homo sapiens
tcctgggttctttctgacagccttggagactgcccactctactgggctagatgtttttcctccatgcctggttctgagtcacagtccactcaggtggggagccagcttgtcgggggctcgcctcccatcttagtcacagaagcaaattccacatccagagcacacctcctgcagctggggtgggtaatgtacaattattctagtcttcagctgaggtgtctttgcatgttttccccttggactctggccwtgcacacacacacacacacacacacgtgtacatcctcacataagtgtgggatttgggggatggatgaacagaaagtaacagcaggcagagggtcctacacttggatgcgatccctgtagactgggaactctcactggatgggccacaggaccccaacaaagccccacatcctttgcaggccagtgactgtgcacaagggctccacaaagccctgtgttctttaggcaactgtgtgcacctgtgcagttttcagagcactgagtcttttgatcagaccatcagggagctctccaggagtttccacaatgagggaaaggaaagc

SEQ ID NO: 764532 - DNA, 572 bp, Homo sapiens
tcctgggttctttctgacagccttggagactgcccactctactgggctagatgtttttcctccatgcctggttctgagtcacagtccactcaggtggggagccagcttgtcgggggctcgcctcccatcttagtcacagaagcaaattccacatccagagcacacctcctgcagctggggtgggtaatgtacaattattctagtcttcagctgaggtgtctttgcatgttttccccttggactctggccttgcacacacacacacacacacacacgtgtacatcctcacayaagtgtgggatttgggggatggatgaacagaaagtaacagcaggcagagggtcctacacttggatgcgatccctgtagactgggaactctcactggatgggccacaggaccccaacaaagccccacatcctttgcaggccagtgactgtgcacaagggctccacaaagccctgtgttctttaggcaactgtgtgcacctgtgcagttttcagagcactgagtcttttgatcagaccatcagggagctctccaggagtttccacaatgagggaaaggaaagc

SEQ ID NO: 764533 - DNA, 572 bp, Homo sapiens
tcctgggttctttctgacagccttggagactgcccactctactgggctagatgtttttcctccatgcctggttctgagtcacagtccactcaggtggggagccagcttgtcgggggctcgcctcccatcttagtcacagaagcaaattccacatccagagcacacctcctgcagctggggtgggtaatgtacaattattctagtcttcagctgaggtgtctttgcatgttttccccttggactctggccttgcacacacacacacacacacacacgtgtacatcctcacataagtgtgggatttgggggatggatgaacagaaagtaacagcaggcagagggtcctacacttggatgygatccctgtagactgggaactctcactggatgggccacaggaccccaacaaagccccacatcctttgcaggccagtgactgtgcacaagggctccacaaagccctgtgttctttaggcaactgtgtgcacctgtgcagttttcagagcactgagtcttttgatcagaccatcagggagctctccaggagtttccacaatgagggaaaggaaagc

SEQ ID NO: 764534 - DNA, 640 bp, Homo sapiens
gattccagaatcactcagccaaagggaaaagtcaacctgggaactgcagctcggcaaacatgcctcccattctattcctaaataagagagctatgaagaaagctacacacctccgtcagtacctccccgcaaggaaattccttgtggaccggtacagacagaaccgaaagtcctccctctgctcacgtgagacaaatgcgtaactggtggtttcctctgccctcttgtttcactaagccagactaaggtataagtgatgattcctgtaaattgtgtattcagtgaaaggctcatcagaaactcagaagaatgcaaccatttgtctcktatctactgatgacctggaagccctctctgagcttagagctgtccagcctttccagaccaaaccaatgtacaccttacatgtactgactgatgtctcatgcctccctaaaatatataaaaccaagctgtgccccgaccacctcgggaacatgtcatcagggcctcctgaggttgtatcactggtgcgtccttaaccttggcaaaataaactttctaaaccaattaaaacctgtctcagatacttttgggttcaccgttaaatcaggctacacacaccttcctgggctcagaagcctggaaagggaaggcatat

SEQ ID NO: 764535 - DNA, 632 bp, Homo sapiens
gagctcagcttccaacctgcccaggagtgatccctgattggaagggatgtgtgtgtgtatgtgtagctcttcccttcctctcccataccatgggggctggcctggagagtgtgccttggtcttccttcccactgtgctactgtgctgtgggagctgatttggggagggggttgcagtcgccttcagagctggcagcttgttggggtgtctgtacaattcgagagccccattgaggccacacagctggcttggtgggtctcctascttttatcagggatacctacctgactcctgtctttctcaattgatcttctttcaaatgttgggtcagggaaaagggattgtattggcctcttaaaacctcaacatgaaaaaaaccaaaaactcaaatgtaaattatctgtttggagtacacagagggaaatcttgtttctgacccagaacctttgtctgagcccagaggtccctgagaaggtggggctggtgcagggtgatgctggttggttggttgagggggtagagcttcttggggtagagctttttttggggttgaggttatttgggcctaaggccatgtattcattctcatgctgctaataagaacatacccaagagtgggtagtttataaagg

SEQ ID NO: 764536 - DNA, 632 bp, Homo sapiens
gagctcagcttccaacctgcccaggagtgatccctgattggaagggatgtgtgtgtgtatgtgtagctcttcccttcctctcccataccatgggggctggcctggagagtgtgccttggtcttccttcccactgtgctactgtgctgtgggagctgatttggggagggggttgcagtcgccttcagagctggcagcttgttggggtgtctgtacaattcgagagccccattgaggccacacagctggcttggtgggtctcctagcttttatcagggatacctacctgactcctgtctttctcaattgatcttctttcaaatgttgggtcagggaaaagggattgtattggcctcttaaaacctcaacatgaaaaaaaccaaaaactcaaatgtaaattatctgtttggagtacacagagggaaatcttgtttctgacccagaacctttgtctgagcccaraggtccctgagaaggtggggctggtgcagggtgatgctggttggttggttgagggggtagagcttcttggggtagagctttttttggggttgaggttatttgggcctaaggccatgtattcattctcatgctgctaataagaacatacccaagagtgggtagtttataaagg

SEQ ID NO: 764537 - DNA, 479 bp, Homo sapiens
catccagacaacctaacccagcatccaccacagttctggacaacagagcactgtgtttgtgtccccagtgctgagagctgtgcctgcacaaagtaggtgttcaccaaatatacttttgggatgagtgagtgcaggcatgaatgaaagaatccactgctgttggaagtgtaaattgctacaacccttaggagagtaatttgacaatattcagtaaaattggaaatactcacattccacagctcatgacatcactcctgggatataactagagaaacattcacacacctgcacaaaggcayataaaagagtattcgctgcagtactgttgtgctcatgtgggctggtgtgaagtggagaggagtttgcggaaacacatgatgcatgttccccagtggggtgtcatgtcataccacagttaaaatggatacattccatcgatatttaccaacacgatggatctcagaattaataatattgac

SEQ ID NO: 764538 - DNA, 660 bp, Homo sapiens
gtgaatggaatggggttgaatgagccatgtagggagatgggggcttcaatggagggaggggcttctgctcatccttattttgacttggatgcctcccttgaaatcaacagattgtaccaaagcagtggcttctgctcagagtgaagggtggaattcggccacacagggtaccacacaaagggaccatccctgctgatcagaggctggaaggcatyagttgggagtctgggaggagaacaggggacagctgtgaggatgccaggccccaagctgttaaggaaccaagacacacagggtctgagcctgtgccaagcctcctaggagtggccagggtaggcatgaaagcaaaatgagccacccagtctcaggaccaccaactactcctgtttatttgggactttccaggtgacagcactaaagtcttacatcccagggttttcctgggactgtctgaattttaaaactgaaagtcctacattccagaaacccccttagtgctggacaaaccaagatggttggtcaccctgccaggtccccacccagagaagggcaaccaggtcataaaggtaccggcaaggacgtggtactgtttttagaggagcctagtcaacctgccctgggaggagacccagagctgctcccactagcccccctggctcc

SEQ ID NO: 764539 - DNA, 631 bp, Homo sapiens
ccgggcaacttttttcaatggtgcttattagaagaagttttttcatcttgtcattttaagaaaataaaactggaaattgaatatgggtggcatgattgtacccttttagttctcttatttttctactcctctgtccctctataactatgccatactattatatgctggtccactgaatgctgagatgatctgttttttggggttttttttttttaaraaatattttcactggttttctgtgactctctaaacacttcatcgaaactagaagactgaattatgaggaaactatttggattagtggccagaaacgatgaaatcttatagatcttttgacagtttctctgtttaggggagcctagactgatatcaagtttcttcatatcaaagcttcattggtgacctcatttgctttacaagtgaccagccatcttgcaggcttcatgcttctgagagccttacttagaagatgctgctggagtcacagctgaggagaggaatactatcaacatggactatcctgggaaagagctaggaagtagatgctgaggtccccatccaaacagcaagctaggaaaaagcctgccttgaaaatatttctagacatcaaagataacttacaacccaaagt

SEQ ID NO: 764540 - DNA, 631 bp, Homo sapiens
ccgggcaacttttttcaatggtgcttattagaagaagttttttcatcttgtcattttaagaaaataaaactggaaattgaatatgggtggcatgattgtacccttttagttctcttatttttctactcctctgtccctctataactatgccatactattatatgctggtccactgaatgctgagatgatctgttttttggggttttttttttttaagaaatattttcactggttttctgtgactctctaaacacttcatcgaaactagaagactgaattatgaggaaactatttggattagtggccagaaacgatgaaatcttatagatcttttgacagtttctctgtttaggggagcctagactgatatcaagtttcttcatatcaaagcttcattggtgacctcatttgctttacaagtgaccagccatcttgcaggcttcatgcttctgagagccttacttaraagatgctgctggagtcacagctgaggagaggaatactatcaacatggactatcctgggaaagagctaggaagtagatgctgaggtccccatccaaacagcaagctaggaaaaagcctgccttgaaaatatttctagacatcaaagataacttacaacccaaagt

SEQ ID NO: 764541 - DNA, 619 bp, Homo sapiens
agccacattggtatcttgggaaaaacattccaagtagagggaatagctagtgcagggccctggggcaagaatgggctacagcaatcatgactagggccctgcagtgtagctggagagggaggtgaggaacaagaggtagacactgaggccagagatgtgcaggagactaaagttaataaggctcttttgaaaaaagtacacatctgtcagtcatcaagcattatctactagttctagcttcagacagacatattatagaattcccaaggaaaggatcactggcttcttggcagagtaaaagcatcatgcgccatcatatgaggtgtttgttaattgggcatarctctgatgctctccctggttgcttgctagggtcccaagtggcccatcccactaatgcacatttgggcacatgatgtgacagttggacaatggctttgggtaactgtcattagccacgtgcaccatggcaaagtgaagttgttactgacttcatggttcggatttccatttcaacattcaagggggtaaatgaccgtactcactctcaaggaataattgacataatttatctttaaaatctcagtaggtcaaacttcccatttgtaaaactttccag

SEQ ID NO: 764542 - DNA, 634 bp, Homo sapiens
caagttatctaccagatgtagctaagattattaatgaaggttgctacactaaacaacaaattttcaatgtaaatgaaacagccttctatttgaagaagatgccatctacaactttcatagctagagaggagaaatcaacatctggcttcaaagcttcaaaggaaaaggtgtctctcttattagcagctaatgaagctgttgactttaagttaaagcaaatggtcatttggcatttcaaaaatactaatgtccttaaaarttatgccaaatgtactctgcctgtgctctataaatacaacaacaaagcctggaagatagcacatctgcttactgcatggcttactaaatattttaagcccgcccttgagaattattgctcagaaagaaatatttcttttgaaatattactgctcattgacaatgacctagtcacttaagaactctgagggagacgcagaaggagattaatgtcctttttatgcctgctaacacaacgtccattctgcagcccatggatctgggagaaatctctacttttaagtctattatttaagaaatatatgttgtaaggctatgtctgccatagatagtgattctcttgatagatatgggcaaagtaaattgaaaaccttct

SEQ ID NO: 764543 - DNA, 634 bp, Homo sapiens
caagttatctaccagatgtagctaagattattaatgaaggttgctacactaaacaacaaattttcaatgtaaatgaaacagccttctatttgaagaagatgccatctacaactttcatagctagagaggagaaatcaacatctggcttcaaagcttcaaaggaaaaggtgtctctcttattagcagctaatgaagctgttgactttaagttaaagcaaatggtcatttggcatttcaaaaatactaatgtccttaaaagttatgccaaatgtactctgcctgtgctctayaaatacaacaacaaagcctggaagatagcacatctgcttactgcatggcttactaaatattttaagcccgcccttgagaattattgctcagaaagaaatatttcttttgaaatattactgctcattgacaatgacctagtcacttaagaactctgagggagacgcagaaggagattaatgtcctttttatgcctgctaacacaacgtccattctgcagcccatggatctgggagaaatctctacttttaagtctattatttaagaaatatatgttgtaaggctatgtctgccatagatagtgattctcttgatagatatgggcaaagtaaattgaaaaccttct

SEQ ID NO: 764544 - DNA, 624 bp, Homo sapiens
ataatcatcttgaagctcagtgagatgcaacaatatatagacaactaaataaaattagaaaataatgcattaacaaaataagaagtttaataattaaatagaaacaactccccacccccaagaaaaaaacagaagaatctctggagctgagaaaaatcaatgacagaactgaaaaactcaacagacaatttcaacagcagactcaaycatgtggaagaaagaattagtgaactcaaaacaggtcatttgaaattagccaattacaggaacaaaaagaaaaatatatataaaaagaataataaaaacatatgggcctacagaacataacaaaatgtgcaagtatataaattatggtagtaccagaaagagaagagaaatagaaaggggaagaaagcttattctaagaaatattgcctgagaacttctaaaattttggaaatgatgtggacatgcagattcgggaggtccaaagcatggtaagcaagatcaaatcaaaaaaagaacactccaagacacattataatccaattgccaaaagtcaaagaggatttcaaaagagcaagagagaagaaacttgtcacatgtaaagaatctttcataaggccatcagcagattttcaacag

SEQ ID NO: 764545 - DNA, 624 bp, Homo sapiens
ataatcatcttgaagctcagtgagatgcaacaatatatagacaactaaataaaattagaaaataatgcattaacaaaataagaagtttaataattaaatagaaacaactccccacccccaagaaaaaaacagaagaatctctggagctgagaaaaatcaatgacagaactgaaaaactcaacagacaatttcaacagcagactcaaccatgtggaagaaagaattagtgaactcaaaacaggtcatttgaaattagccaattayaggaacaaaaagaaaaatatatataaaaagaataataaaaacatatgggcctacagaacataacaaaatgtgcaagtatataaattatggtagtaccagaaagagaagagaaatagaaaggggaagaaagcttattctaagaaatattgcctgagaacttctaaaattttggaaatgatgtggacatgcagattcgggaggtccaaagcatggtaagcaagatcaaatcaaaaaaagaacactccaagacacattataatccaattgccaaaagtcaaagaggatttcaaaagagcaagagagaagaaacttgtcacatgtaaagaatctttcataaggccatcagcagattttcaacag

SEQ ID NO: 764546 - DNA, 624 bp, Homo sapiens
ataatcatcttgaagctcagtgagatgcaacaatatatagacaactaaataaaattagaaaataatgcattaacaaaataagaagtttaataattaaatagaaacaactccccacccccaagaaaaaaacagaagaatctctggagctgagaaaaatcaatgacagaactgaaaaactcaacagacaatttcaacagcagactcaaccatgtggaagaaagaattagtgaactcaaaacaggtcatttgaaattagccaattacaggaacaaaaagaaaaawatatataaaaagaataataaaaacatatgggcctacagaacataacaaaatgtgcaagtatataaattatggtagtaccagaaagagaagagaaatagaaaggggaagaaagcttattctaagaaatattgcctgagaacttctaaaattttggaaatgatgtggacatgcagattcgggaggtccaaagcatggtaagcaagatcaaatcaaaaaaagaacactccaagacacattataatccaattgccaaaagtcaaagaggatttcaaaagagcaagagagaagaaacttgtcacatgtaaagaatctttcataaggccatcagcagattttcaacag

SEQ ID NO: 764547 - DNA, 499 bp, Homo sapiens
tttgaaagtgcaaatgaattaattaaaattattgaaaaaataatcaaaggatcgatatattagatggatttcaagaacttccttttacattagacatgactaattaggaaataacatggaaaatattccatccactagataaatagctattaatggaaatattgcaagagtgatgaaatgtctaagtcattatttttagttggtaattgttgataaattttgtttcttctgtagtttttattattttatattttctatattgatcaagtatagcttttagaataaaaaggcaataaaacatttaataaagcattactttgtgtacacctataytcttagctactggggaggctgaggtgggaggatgactagtaccaaagaggtagaggctgcagtgagctatgattgcaacactgcactccagcctgggtgacagagcaagaccctctctctaaaaaaaaacaaagaaaatattaccttagtaagaagtgactttggg

SEQ ID NO: 764548 - DNA, 635 bp, Homo sapiens
ataaatgtataatataaaaattccatagataatatatattttatataaaacattaacgtttataaatcatatttatttataatattgttatatattatatataaattatatatatataatttaaaaaatataaactttatttaacacttactttcatggcttctggtcctatattatgttagaaagaaaatctctcctccatgactataagaaacagcaaaatgatgaattgttaagtaaaataaatctacatgcacacacagacacacactcacacatacacacccaaatttggccgggtgcggtggcttacacctgtaatcctagcactttgggaggccgaagcggggtggatcacgaggtcaggagattgagactatcctgctaacayggtgaaaacccgtctctactaaaaaaaaaataaaaataaaaaattagctgggagtggtggtgggcgcctgtagtcccagctacttgggaggctgaggcaggagaatggcgtgaacccgggaggtggagcctgcagtgagccgagatcgtgccactgcactcctgtctgggcgacagagggagactccatctcaaaacaaacaaacaaacaaaaaactacacgaaatatatatcttgattataat

SEQ ID NO: 764549 - DNA, 482 bp, Homo sapiens
gtctttatgagcagcatgaaaatggactaatacaacacacataatagcactaccagaaagagaagaaaatgaagagaaaaaaatttgaaaaagtaatggctgaaaatttcccaaatcaaagagaaattagacaatactttgatataaataaaactgaagacacatcatatcaaaatgtatcaaatgcaattacagcaatacttagagggaaattgatagttacaactaactatatgcagaaaaaagaaagatctcaaatcaataatctaaacttctatcttamtacacaagaaaaagaagagaaaactaaattgaaagcaaagaaaacaataaatattagagcagaagttaatgaaatagataatagaaaaacaaacaaaaaaatcaatgaaaccaaagttgtttcttttaaatggtcaattaaaataacaaacttctcgcaggattgactaaaacaaacaaacaaacaaaatgagagaaag

SEQ ID NO: 764550 - DNA, 639 bp, Homo sapiens
tgccagccatcagtcaactcactactgtacaaaaagacagcactttggagattctaaggattttaggagttgtatgccaagaaaaggtgggtggggtggaagaccaaatatatattttacaatatcacatacacaaaagaaatacatatggccaaggaagagactgaaatgtattcatggcctgacgcagcagctcacctgtagtcccagttactccggaggctgaggtgggaggattgcttgagcacaggaattcaaggttacggtgaactatgatcacaccagtccactctagccttggtracagagcaagaccctatctctttaaacaaaaaagaaagaaaaaatgtatatattcacccttttttctgcattcctaaggatgtgtaggaactcagtcactgttgttaggaatttaagttgattcaactgttctggagaaaagctagcaaaaactgtaaatttacaaatgcaaaaaaatagtatagttcctttaacctaacggttttctttctgttacaggaaagaaataatctgatagctgtctaaaaaggttcatgggtttttttttttgagaaggagccactcttgtcgcccaggctggagtgcagtggcatgatctcctttcactgcaacttc

SEQ ID NO: 764551 - DNA, 639 bp, Homo sapiens
tgccagccatcagtcaactcactactgtacaaaaagacagcactttggagattctaaggattttaggagttgtatgccaagaaaaggtgggtggggtggaagaccaaatatatattttacaatatcacatacacaaaagaaatacatatggccaaggaagagactgaaatgtattcatggcctgacgcagcagctcacctgtagtcccagttactccggaggctgaggtgggaggattgcttgagcacaggaattcaaggttacggtgaactatgatcacaccagtccactctagccttggtgacagagcaagaccctatctctttaaacaaaaaagaaagaaaaaatgtatatattcacccttttttctgcattcctaaggatgtgtaggaactcagtcrctgttgttaggaatttaagttgattcaactgttctggagaaaagctagcaaaaactgtaaatttacaaatgcaaaaaaatagtatagttcctttaacctaacggttttctttctgttacaggaaagaaataatctgatagctgtctaaaaaggttcatgggtttttttttttgagaaggagccactcttgtcgcccaggctggagtgcagtggcatgatctcctttcactgcaacttc

SEQ ID NO: 764552 - DNA, 643 bp, Homo sapiens
aatattgcaagtatcttgcccaccatctcaaggccagtgtgtgggaggcaggatggaaacccatggctaattcatgccatagcctctaaagagacagtgtaggtaggacccaagtcatcttgcttcagcaagttgctctggttgctttcccctttcttctacctaagccctaattcttccatccagttctacagcctaggaacttcttacatattttgtggcaaattggatatcgtaacaaaggaagcagatgaggagacacataaggtgaggtacgggggaaggggcagggagcttccatgccctctatgcgcaagctgccctccatgtgttcagctagagggaagctctctgaaccatgtccttttcggttttcattatgtaggtgtcattgattaaactgttggcccgccatttgtgatcaacttaaccttcagcccttgtccyttccctgaaggttgtgggtggggctgaaaggcccaactctcttcttccccaacctagagctacctaggtgctgctagccatcagtcaattcactagcatacaaaaagacaccactttgtggagattctaaaaattgtaggcgttgtatgcctggaagcagggtctagaaccaaatatgtgtttcacaatatcacac

SEQ ID NO: 764553 - DNA, 592 bp, Homo sapiens
aagccaacttactttcacagctaggaggcaggtagcctgggacaagttctcagccctgctcacccactgcctggaaacagacttggtgctgttgggtgggggacggtgggagtgagaccagcccttcagattgtgtgggaactgggtgaggcctgtgactgcaagctttccctgactcctctaacaacctgcgtgacacagtagagacagccataatcctcctaggaacatcacatcacaggatggttcacatcacaggactctgtgcagacaacccccagtascagcgtagagcctggtagacttgctgggtgtcttgatccagaagagagataacaatcactacagatcagctctcaggaagccacatccataggaaggtgagagagtactacatcaagggaataccccgtggtacaaaagaatctgaacaacagccttcagtcctagaccctccctctgacagagccagcctaaatgagaaggaagcagaaaaccagctctggaaatatgacaaaacaaggctctttaacacaccccagaaatcaacctagctcaccagcaatggatccaaaccaagaagaaacccctg

SEQ ID NO: 764554 - DNA, 541 bp, Homo sapiens
acttgcactagttatcctgtctctagtcctttacccttcctgttagcatatgaggattatgcaaaaatattcaatatgtggctgcaaggccctttcttttgttttgaagttattgttcatccactgagatacattggctttaaagtggrtattttcaatatttttaatacccttcccaagcctttagtttttagaaattgttattaaaggtttcactgtgtttcatccacgtctgagatccataaatatcttaagaataatcttttgtgggagagaggtggataattcattaatgtatcttatatatatcttatacagaccttaatttacatgagactatttatattctatttattctgcaactattacttcaaattctactggagttgttacaccatgtattgtttatgaaagtgttgcctatttaaatttgaaatactctgatttttaatagacagatataccaaagaatttaagaaggtagacctttatttattaggctatattataatgatcccttcagaatgtgttccacttactt

SEQ ID NO: 764555 - DNA, 609 bp, Homo sapiens
ttaaacagatttttattaaaaaattatatatgaaaagggggcacaaatcatcaatgtacagcttgacaacttaatataaaattaaagtctctctaaaatgaaagacatcagggaccagtgaccgcacaggggtaccccactctcctctctggaaacaatgaagatggcacatgcctctgtggattcctgacagtgtaaaatttctccccagggtaggtgctaatgcacctgaaggcaacacacctagggaaactgggggttgaaggagttttgtttcttttttattatttttgagatggagtctcgctctgttgcccaggctggagtgcagtggcacgatcttggctcactgaaacctccaccttacaggttcaagcaattctcctgcctcagcctcccaagtagctgggaytacaggtgcctaccaccatgcccagctattttttttgtatttttagtagagacagggtttcaccatgttggcaggctgttcgggaactcctgacctcaggtgatctgctcacctccgcctctcaaagtgctgggattacaggcatgagccaccacgcctggctatttcttaagatataatttggacagttcctgttt

SEQ ID NO: 764556 - DNA, 609 bp, Homo sapiens
ttaaacagatttttattaaaaaattatatatgaaaagggggcacaaatcatcaatgtacagcttgacaacttaatataaaattaaagtctctctaaaatgaaagacatcagggaccagtgaccgcacaggggtaccccactctcctctctggaaacaatgaagatggcacatgcctctgtggattcctgacagtgtaaaatttctccccagggtaggtgctaatgcacctgaaggcaacacacctagggaaactgggggttgaaggagttttgtttcttttttattatttttgagatggagtctcgctctgttgcccaggctggagtgcagtggcacgatcttggctcactgaaacctccaccttacaggttcaagcaattctcctgcctcagcctcccaagtagctgggattacaggygcctaccaccatgcccagctattttttttgtatttttagtagagacagggtttcaccatgttggcaggctgttcgggaactcctgacctcaggtgatctgctcacctccgcctctcaaagtgctgggattacaggcatgagccaccacgcctggctatttcttaagatataatttggacagttcctgttt

SEQ ID NO: 764557 - DNA, 609 bp, Homo sapiens
ttaaacagatttttattaaaaaattatatatgaaaagggggcacaaatcatcaatgtacagcttgacaacttaatataaaattaaagtctctctaaaatgaaagacatcagggaccagtgaccgcacaggggtaccccactctcctctctggaaacaatgaagatggcacatgcctctgtggattcctgacagtgtaaaatttctccccagggtaggtgctaatgcacctgaaggcaacacacctagggaaactgggggttgaaggagttttgtttcttttttattatttttgagatggagtctcgctctgttgcccaggctggagtgcagtggcacgatcttggctcactgaaacctccaccttacaggttcaagcaattctcctgcctcagcctcccaagtagctgggattacaggtscctaccaccatgcccagctattttttttgtatttttagtagagacagggtttcaccatgttggcaggctgttcgggaactcctgacctcaggtgatctgctcacctccgcctctcaaagtgctgggattacaggcatgagccaccacgcctggctatttcttaagatataatttggacagttcctgttt

SEQ ID NO: 764558 - DNA, 630 bp, Homo sapiens
cacagaatgtctcaattcaaggcctcagtgatgaatggactgcagatgaggcttctgactttgcaaaaaaaaactgtactttatcactcccaaagcctgcccttggctggaaacagatgttccaaaccccgtccgctccgcagctgcagcgtgcctgcttccggagccgcttgtctgtcttcagggccggcatctgccgagggccttggctttctgggaagagtctatgtctaaaagtcatggtcgtccgagttcagttatataatgttattgatcccggttggtttgcttaagaaaaacacaactaattagactctataaaaacctacacaccaaattaattctgtattgctctagtgacttccgcctgaaaaaaacgttataaatatagatgaccactggacctatatttagccagcactggattacctggtatttataattaaggaagtccagaragagagagagagaatggacattttgttgttatttcttaaagcattttttaaaaactgcttcccatttcagtcacatatacacatagcaacattctgttattgcaataattacaatcctgacccaagttaagatgattgcacaatttcccagtctcctaaaattactttcttc

SEQ ID NO: 764559 - DNA, 575 bp, Homo sapiens
aactcagtaaagtttgggccctgtacatagccctggtcaaactgcctgcagggcacactcagctgggctcttggggtggaagaagtgaagaacaaggaaacacccctcacacccatgcctacccagcagacccggcatggggcaggtgtgcagacaaggtaagtgtgtgctgcatgaacaggagaacaccatgcagatgccccttagtgctgacaaagccaagctcgattcctgcagagcactttgcatgcatccggcatgcccatgggggccccaggtcatgaggaggtgcagggaccttcctgcacctgagggtcscgagcgggatgtggccctgggtggggaggctggcctgaccttggcaggtgcacaggctctgccttgtcgttcaggtgcaaccaccaacgtaggctccgaggcaagaagggcgggctgggaaggctcctctcttcagtgacttggtctgggtctcacttctgcacagccctatcttacaggagaggagacccagcgcagaggccagagagacaggaaaagcggaggcaggaggatccaaccccaggcctgtctgatgt

SEQ ID NO: 764560 - DNA, 471 bp, Homo sapiens
acatgttataaaatggatgaaccttgaaaacatgctaagtcaaagaagccagatacaaaaagaccctattattactgtatgattccattatatgaaatgtccagaataggcaaatctagagagacggagagtagatgagtggctgcttagggttaagggagtggggtagatggggactgactgctaagacggggatrgcatttctttctggggtgatgaaaatgttatcagatggggtgcggggacagttgtacaactctctgaatgtaccaaaacccactgagctgcatgctctagataggtgcatcctatgtgaattataacttaacagaattgttattaaaagagaataaatttttatatacaattatgtaaaagttaactctccagtttaatcagaagacaccccatacaggtaaaaaaaattcataaactgggaaacacggtttcccactcctgttaactgacaaa

SEQ ID NO: 764561 - DNA, 488 bp, Homo sapiens
attaataaagattttaaagaggccatgaaaaaaacacctaggtgagcaattacaaatatgcctaaaacaaatgaaaaaatagaaagtctcaataaagaaactgaaagtctcagcaaagaaatacacgatataaagaggaaccaagtagaattattagaactggaaatacaataatcaaaaagctcagtgatgggctcagtaatagaacccacaggacagaagaaagagtgaactggaaaattatatatatatatatatatatawaattacccaatctgaacaacataaagaaaaaaatttaaaaatatgaacagagcattagggacttgtgagactataacaaagacctaaacttcatgtcactagagtggacaggaggagaggaaaaagggccaggagtggtggctcacacctgtaatcccagccctttgggaggccaaggccggaggattgcttgtgcccaggagttcgaggttacagtgagctat

SEQ ID NO: 764562 - DNA, 521 bp, Homo sapiens
gttaacacatagtgaacaacagtattatttttgttgtgttccacatctgccgtgtataatctccttttatttttttctgagttaactttgttttcttttttctttgttttttttttttgtttgtttgtttttctgctgactacctacttatctgtcataactttgtttttattgtggtaagaacacaatgtgagatctagcttctttttttttttttcattttaaacaagaagtttatttaaacaacaagacgcttgacttgaagggaaaactatgtaggattcttttttgttttagagtaatttatccttacttaaagacagattaccctacatgtaacagctacgtacaaaaaagttataaaattgtccttggttttwcaatgataaatgaaaaacattaaaattctccaattgaacaaggtatgcaaggatttttatgttgttgttgttgttttgttgttgttgttaaaacagtgagagcaaaataacttactggaatataaagataggagctgaatg

SEQ ID NO: 764563 - DNA, 644 bp, Homo sapiens
ggcggaggttgcagttaaccaggatcgcgccattgcactccagcatgggcaacaagagcgagactccgtctcaaaaaaaaaaaaaaaaaaaaaaaagcagtaaattatatagtgcaatgcctggcacacaaataaatatcatttatgattgttattcattgtttgagataaaatcagtcatctgtagccgggcgcggtagctcacacctgtaatcccagtactttgggaggccgaggcgggtggatcacgaggtcaggagttcaagaccaacccggccaaratggtgaaactccgtctctactaaaaatacaaaaaattagccgggcgtggtggctggtgcctgtaatcctagctgctcgggaggctgtagcagagaattccttgaacctgggaggtagaggttgcagtgagcagagatcttgccaatgcactccaacctcggtgacagagtgactccatctcaaaaaaaaaaaaaaaggaaaaaaacgaaaaagacccaggttccttaagcgaaccaggaggtggtagttaggcttctccacatggaaaccccttagtttcactggccatggccaaaaacctgcagttgcttccatgtttgggcgctgcccaccaacggtcctgggttggaaaggaagacaga

SEQ ID NO: 764564 - DNA, 592 bp, Homo sapiens
ccccggctgtattttttttttttgagagagagttgtgctcttattgcccaggctggagtatggtggcgcgatcttggctcactgcaacttctgcctcctgggttccagcaattctcctgcctcagcctcccaagtagctgggattacaggcgcacgccaccactcctggctaatttattattattattattagagatggggttttgccatgttggccaggctggtcttgaactcttggtctcgagcgatccacctagctcgrtgtcccaaagtgttggaattacaggcgtgagccactgcgcccggccagaaatgacttttagattgcctgccctctggagccgtctgaccctgttcttcagcaggagttaccgtgagtccgattgtttcctgagtagcagatggagcagaagaacttcatgccatgcagggaagacttcccatatgatagatgttttaatgcaggtttgaaagaaaagaagggatgtaaattaatcaataaccgagattttgtttttctgtcttgtagctggaaaaggattttggtctgagatgctgggcgtgggggacttctattacgaactaggtgtcc

SEQ ID NO: 764565 - DNA, 592 bp, Homo sapiens
ccccggctgtattttttttttttgagagagagttgtgctcttattgcccaggctggagtatggtggcgcgatcttggctcactgcaacttctgcctcctgggttccagcaattctcctgcctcagcctcccaagtagctgggattacaggcgcacgccaccactcctggctaatttattattattattattagagatggggttttgccatgttggccaggctggtcttgaactcttggtctcgagcgatccacctagctcgatgtcccaaagtgttggaattacaggcgtgagccactgcgcccggccagaaatgacttttagattgcctgccctctggarccgtctgaccctgttcttcagcaggagttaccgtgagtccgattgtttcctgagtagcagatggagcagaagaacttcatgccatgcagggaagacttcccatatgatagatgttttaatgcaggtttgaaagaaaagaagggatgtaaattaatcaataaccgagattttgtttttctgtcttgtagctggaaaaggattttggtctgagatgctgggcgtgggggacttctattacgaactaggtgtcc

SEQ ID NO: 764566 - DNA, 633 bp, Homo sapiens
gctatatttagagatatagatatatcaatatatatcacactatatatatctctgcatgcatatatgtatatgtctcctaaagtttcctcaaacattaacctttacaatgcattctgatattttcttttctacttctttttctttttctttttttttttttttaagatggagtctcattctgtcaccaggctggagtgcagtggctcactgcaacctccgcctcccgggttcaagtgattctcctgcctcagcctcccaagtagctgggactataggagtgcrccaccacgcccagctaaattttttatttttagtagagacggggtttcaccatgttggctaggatggtctcgatctcctgaccttgtgatctgcccgcctcggcctcccaaagtgctgggattacaggtgtgagccactgtgcctggctacttcattttttgaatgcttgtcaggactcactacattgatttcactatccactgtgctcacacaccaaacttatactcagggccttttcactggctgttccctctaccaacaatgcccttccccctgactgcccgcattggcaccttttcatcctttacatctcaggttaagtgtctcctgtccagagaagtcagctagcct

SEQ ID NO: 764567 - DNA, 542 bp, Homo sapiens
tcctgcatacaatgattggtccactagtggtcatataacataggcaggccaaccagcccttttatggaatgaatgtatgttacaggcagaaacatcttgtgattactgaataggaggatgggagactgggactgtcagaagccatcctatcagctttatggagagagcctgcatccagttgtgactgttcaacctcgagattttcaagatgcagaagaactttgcttagtaagtcattagcagcaaaatggaattccaatcttataactstttgcccagcagatgtctcacattatttcctaagaaatcctgacagtatttcatcttgccaccttctagactctcctctcttccccatactctttccaatgcttaaaagggaagatcccccttctcagcctctcatgttccccttatttacaacctcaggctccatctccaatgttatctctagattgagagattttcaatggggcttattcttcccatgttttcctacctgtattaaacacctcctaagatggcttgtaatctcctcctct

SEQ ID NO: 764568 - DNA, 612 bp, Homo sapiens
cctctttcatcccctagggtgacagtcactgtgcagtttttattcaggtcaaacttttcactgtacaagtgatagtctggagtcacccatccgacccagacacaggatggatcctgtccagcaaagatgcggatggcgtagtagcactgctgtggagagaccgcagaggggagtcaatggcccccagcccccatccagttgaagatagggggcccaagaggcagaaataacacagcagctcacttggcccccccttttttttytggaaaagtgcacactagtagaggtaggctagatgctagatctggaaggaaggctgaatagggattctggcttcctaatttttcctttctattttgctgtagcatctggcaaagcaaatgcttaagctaatctaccaccctttgcccagaagacactggtgctgaaatcaggagatgctgtggatggaagcagtggcagctgctcagaatggcagcacagagccctaaccctctcctgggcaccagggcagatctgagctgcaggagagagcgggcacagtccctgccctcagagaaagagtggtcaagggtcagagcatccccgttacactttctccttctaaaggga

SEQ ID NO: 764569 - DNA, 612 bp, Homo sapiens
cctctttcatcccctagggtgacagtcactgtgcagtttttattcaggtcaaacttttcactgtacaagtgatagtctggagtcacccatccgacccagacacaggatggatcctgtccagcaaagatgcggatggcgtagtagcactgctgtggagagaccgcagaggggagtcaatggcccccagcccccatccagttgaagatagggggcccaagaggcagaaataacacagcagctcacttggcccccccttttttttctggaaaagtgcacactagtagaggtaggctagatgctagatytggaaggaaggctgaatagggattctggcttcctaatttttcctttctattttgctgtagcatctggcaaagcaaatgcttaagctaatctaccaccctttgcccagaagacactggtgctgaaatcaggagatgctgtggatggaagcagtggcagctgctcagaatggcagcacagagccctaaccctctcctgggcaccagggcagatctgagctgcaggagagagcgggcacagtccctgccctcagagaaagagtggtcaagggtcagagcatccccgttacactttctccttctaaaggga

SEQ ID NO: 764570 - DNA, 562 bp, Homo sapiens
actactgtctagggaccaaaagtagcttccatcttctgcgatggcttcttgctcttcttctcatttgattgcttttaacatcactcctagcactgcacagagacatggggcagctgactcacaaaagtttacacaaaaaaggcaaaccaaaagatttaattgagcgccctccaactgatgctcatttcaatcagaaaggcagtgttggatccctgatggcaaatgggcaacaagtatccaatgatgcccagttaggagctccaggtagagcttttgctttgcactgaataactgtctttcccccacttgagaaatgccacagatgtgttctggaagcatcaagatggatattaaaagacagagtaattggcaattaaagaggatctctagacrgatctttgctgtaaggggcatattaccaggcacaacaaagaatcaaataattaaaaccataattgagcacatttacttactgttgttgtatgagagagtatttcttgcatctgtttcctgggggaaagataatccatgttttagttattcagctgtattgagaatccca

SEQ ID NO: 764571 - DNA, 503 bp, Homo sapiens
gagctgtctcaaatacgcagtccccccagatgatgacaagcagagactgccagtgacgaagcctgcttctccccactctgtagaagcacagctgcagtcccacatgtcccatcatgccatctgctctgaaatacacctcctgagccgttgaatatcgcgtctggccactaattagcacgatagtccccgtgtgtgcagatgttgaagggtcaggaaaaaaaactccccatattttagtagactttccccacagatcactgtgttttagagatataacttcataaaaatagagatgttagaactataagagatctcaaaaaaatgayatagcattccacttagtgagatgcccttgtcaccattttacagatgacataactgaggccccagctcatatagctgcgttgtataaaagggaaggaccagtggcttcagttctgcttgcacacgcacagattcatttacttcatttggtttcactcatagtaaatctgattttgttt

SEQ ID NO: 764572 - DNA, 444 bp, Homo sapiens
  misc_feature 1, 2, 3, 4, 5, 6: n = A,T,C or G
nnnnnntatcgttgctttttatcttgttacctattcctatccatcttggaacaccctttcaaatcgtagactagagcaattgactgtcaagataggatcagtttgtctgaaaacactactttggggttcatacatcttactgcccttactgccctttatatcgacctttcawctttgtcagaatatctctgaagggaacaaatctcaccatttgtcatcggaagtattgaaacctctggaagagtgtatgggggacttggcaatggcaacccttgatagggtagttccatcagtcactctggaaagggcgggtcttttgtgaggatgtgccagcagcactctaaagccacaaaaacgtgagtttaggctccctttgtggttaccgccaaaggagaactgaaaataggctgagttacccatatgtctcctatatcacctgctgag

SEQ ID NO: 764573 - DNA, 595 bp, Homo sapiens
cacagaattgaacctttcttttgattgagcagtttggaaaaactatttttgtagaatatgaaagtggatatttgaaaggctttgaggactatggtgcaaaaggaaatatcttcacattaaaactagacagaagcattctcagaaactttgtgatgcatgcattgaaatcagagagttgaacctttcttttgattgaacagttacaaaacggtgtttttatagtatcttcaagtggatatttcgtgccatttgtggcccatagttgaaaaggaaatatcttcacctataaactagacagaagcattctgtgaaacttctttctgatgtgtgcattcatctcacagagttgaacctttcttttgattgagcagtttggaaaaacsctttttgcagaatctgcaagtggatatttgaaaggcttgaggcctatggtgcaaaaggaaatatcttcacattaaaactagacagaagcattctcagaaacttctctgtgatgcatgctttgaaatcaggcagttgaacgtttcttttgattgaacagttacacaacggtgtttttgtagtatctgcaagtggatatttggtgccatttgtg

SEQ ID NO: 764574 - DNA, 638 bp, Homo sapiens
tgaaacactgtttttgtagaatctgcaagtggatatttgtagcgctttgaggcctactgtggaaaagcaaatatcttcacataaaaactacacagaagcattctgagaaactactttctgatgagtgcattcgtctcacagacttgaamctttcttttgattgagtagttttgaaacactctttttgtagaatctgtaagtggatatttggagcgatttgaggcctattgcggaaaaaggaaatatcttcacataaaaactacacagatgcattctgggtaacttccttgtgatgtgtgcattcaactcacagagttgaacctatctttgtttgaacagttttgaatctctctttctgtagaatctgcaagtgaatatttggagccctttgtggcctattttggaaaggaaaatatcctcacataaaaactacaaagaagcattttgagaaacttatttgtgatgtggtcattaatctcacagagttgaacctttcttttcattcagtactttggtaatgctctttttgtagaatctgcaagtggatatttgcagcgctttgagacctacggtggaaaagtaaatatcttcacataaaaactacacagaagcattctgagaaacttcttcataatgtg

SEQ ID NO: 764575 - DNA, 636 bp, Homo sapiens
agattctacaaaaagagagattcaaaactgctctatgaaaagatagttgcaactgtgtgagctgaatgcacccatcacaaagaagtttcccagaaagcttctctgtagtttttaagtgaatatttttccttttccacaataggcctcaaagctctccaaatatccacttgcagattccgcaaaaaaagagattcaaaactgctcaatcaaaagataggttcgactttgtgtgttgagggctcacctcaaaaagaagtttctcagaatgcttctgtgtaattttcgtgtgaagatatttgctttyccacagtacataacaacgcgctccaaaaatccacttgcagggcaaaaagagagattcaaatctgcttaatcaaaagataggttcaactctgtgagttgactgaacccattacaaagagcttctcagaatgattctgtgtagtttttatgtgaagatatttccttttccaaaatagacctcaaagtgcttcaaaactgctcaatcaaaagaaagattcaactctgtgagttgaatgcacacatcacaaagaactttctgagaatgcttctctctagcttttatgtgaagatattcccgtttcgaatgaaggcctcaaagagttgcaaatatcc

SEQ ID NO: 764576 - DNA, 636 bp, Homo sapiens
agattctacaaaaagagagattcaaaactgctctatgaaaagatagttgcaactgtgtgagctgaatgcacccatcacaaagaagtttcccagaaagcttctctgtagtttttaagtgaatatttttccttttccacaataggcctcaaagctctccaaatatccacttgcagattccgcaaaaaaagagattcaaaactgctcaatcaaaagataggttcgactttgtgtgttgagggctcacctcaaaaagaagtttctcagaatgcttctgtgtaattttcgtgtgaagatatttgctttcccacagtacataacaacgcgctccaaaaatccacttgcagggcaaaaagagagattcaaatctgcttaatcaaaagataggttcaactctgtgagttgactgaacccattacaaagagyttctcagaatgattctgtgtagtttttatgtgaagatatttccttttccaaaatagacctcaaagtgcttcaaaactgctcaatcaaaagaaagattcaactctgtgagttgaatgcacacatcacaaagaactttctgagaatgcttctctctagcttttatgtgaagatattcccgtttcgaatgaaggcctcaaagagttgcaaatatcc

SEQ ID NO: 764577 - DNA, 648 bp, Homo sapiens
tggctcatgcctgtaatcccaacactttgggaggctgaggcgggtggatcacgaggtcaggagatggagaccatcctgcctaacatggggaaaccctgtctcgactaaaaatacaaaaaattagctgggcgtggtggcgggcacctgtaatcccagctacttgggaggctgaggcaggagaatggcgtgaacccaggaggcagagcttacagtgagcagagatcgyaccactgcactccagcctgggtgacagagcaagactccatctcaaaaaaaaaaagaaagaaagaaagaaaagaaaagaaaggttcacttctatgtcaggaatgcacacatcacaaggaagtttctcagaatgcttctgtgtagtttatatgtgaagttacctccttttccacaatatgctcgaaatcactgcaaatatccacttgcagaatctacaaaaagggtgtttccaaactgctcaaaagagaggttcaactctgtgagatgaatgcacacatcacaaagaaatttatcagaatacttctgtgtagattttatgtgaagatatttccttttccaccataggccacaaagggctcaaaatatccaattcaaggttgtacaaaaggagagttttaaaactgctctatcaaaagacaggtt

SEQ ID NO: 764578 - DNA, 648 bp, Homo sapiens
tggctcatgcctgtaatcccaacactttgggaggctgaggcgggtggatcacgaggtcaggagatggagaccatcctgcctaacatggggaaaccctgtctcgactaaaaatacaaaaaattagctgggcgtggtggcgggcacctgtaatcccagctacttgggaggctgaggcaggagaatggcgtgaacccaggaggcagagcttacagtgagcagagatcgcrccactgcactccagcctgggtgacagagcaagactccatctcaaaaaaaaaaagaaagaaagaaagaaaagaaaagaaaggttcacttctatgtcaggaatgcacacatcacaaggaagtttctcagaatgcttctgtgtagtttatatgtgaagttacctccttttccacaatatgctcgaaatcactgcaaatatccacttgcagaatctacaaaaagggtgtttccaaactgctcaaaagagaggttcaactctgtgagatgaatgcacacatcacaaagaaatttatcagaatacttctgtgtagattttatgtgaagatatttccttttccaccataggccacaaagggctcaaaatatccaattcaaggttgtacaaaaggagagttttaaaactgctctatcaaaagacaggtt

SEQ ID NO: 764579 - DNA, 646 bp, Homo sapiens
gtctaagaggatgttttgatttataatagagagatgaaaaggatagctgaaagaagagataaaaccaaaaagaaagatgtgagaattataacctcagtttactagattaaatttggtggtatatgcactctccagccctcacctgctcatcagaaaaaaacaagcttgtaggcctgtagagcacaggaaatgaaaatttccttctagacgctgcattctctgaaagacagctgtgaattgaggataaatattattgctccatatcctcatacatttacagtgcaaagattcagatattattgtactttccctaccaatgaaaagttactcagcgttaggattcttacatgcaaacattartgactgcaaagatgttcgctaaatgatcaatgcataatatgcaatatcattgtcttttaaatacacacttttaaccgcacacacaataagtagcagcttgaatggggcttctgtgacaccgaatttcttttagtctagagtaagtgacaaaaaattattcacacttcatcattttatttgtagctttaacgtattatttcatgttccacaataaaggtcagttttgaatggaaggtttatttttaatacatactctttctcaattatcccagtataataccaattg

SEQ ID NO: 764580 - DNA, 590 bp, Homo sapiens
cccattcttcaccccatgaatcaaaaagtaattttgagacatacctttcataaggctgtagctgccatagtgatttctctgatggatcttggcaaagtaaattggaaatcttgtagaaaggattcaccatcctagatggyatttaaaataattgtttaatgtttgtaggaagaggccaaaatattaacattaacgggaatttggaagaagttgtttccagctctcatggatgactttgagggcttcaagacttcagtagaataagtaactacagttttgatggaaagagcaggagaaccagagttggaagtggggcctgaagaggtggctgagttgctgcaatctcatgacaaaattttaatgaataaggagttacattttatggataagcaaagaaagtggtttcttgagatagaatatattcctggtcaaaatactgtgaacattgtcgaaatgacaacaaaatatttagaatattatgtaaacttagttgacaaagcataggcaaggtttgagagaagtaactccaatagtcacataagttctgtgggcaaagtattatcaaacaacatcccatgctacagagaact

SEQ ID NO: 764581 - DNA, 590 bp, Homo sapiens
cccattcttcaccccatgaatcaaaaagtaattttgagacatacctttcataaggctgtagctgccatagtgatttctctgatggatcttggcaaagtaaattggaaatcttgtagaaaggattcaccatcctagatggtatttaaaataattgtttaatgtttgtaggaagaggccaaaatattaacattaacgggaatttggaagaagttgtttccagctctcatggatgactttgagggcttcaagacttcagtagaataagtaactacagttttgatggaaagagcaggagaaccagagttggaagtggggcctgaagaggtggctgagttgctgcaatctcatgacaaaattttaatgaataaggagttacattttatggataagcaaagaaagtggtttcttgagatagaatmtattcctggtcaaaatactgtgaacattgtcgaaatgacaacaaaatatttagaatattatgtaaacttagttgacaaagcataggcaaggtttgagagaagtaactccaatagtcacataagttctgtgggcaaagtattatcaaacaacatcccatgctacagagaact

SEQ ID NO: 764582 - DNA, 644 bp, Homo sapiens
atgacatggtggtgagttcctgggtttttgttttggctccatatttcccagatttggagctgaagagatcagaaacccagaaatggcaataggtacatatatatacacacacacacagagaaaaaacatttgactctttctggccaaaggacaaggatagagcaatttaataagacagaaaaatttgaggcaattaacactttcatccacccatacataygagaaaaatgtatggccttatcctcacctaggccatcaatgccctaatgaataatctacatttctaccttcacccggctatgacaaggttcccccagtttccatcagggtaacgtcaaagaagatcacacagaagccaggacattcatccctgccaggcagtaaccaggccaccctccaccctttgtatcatcagtggagataacatagggatcctgaacttctacccctaccatccctatatgttgggatggtgtcaaactaggcttagaggagagtcaggactttcaccaccacccaggaataatgacaccaatacccaacccccctgccgtccaccagcacggtgtcagtggtgaacaagttggtaatagttacaaggcattcctattcctcccagccagggaggtatcaatggaagtcta

SEQ ID NO: 764583 - DNA, 644 bp, Homo sapiens
atgacatggtggtgagttcctgggtttttgttttggctccatatttcccagatttggagctgaagagatcagaaacccagaaatggcaataggtacatatatatacacacacacacagagaaaaaacatttgactctttctggccaaaggacaaggatagagcaatttaataagacagaaaaatttgaggcaattaacactttcatccacccatacatatgagaaaaatgtatggccttatcctcacctaggccatcaatgccctaatgaataatctacatttctaccttcacccggctatgacaaggttcccccartttccatcagggtaacgtcaaagaagatcacacagaagccaggacattcatccctgccaggcagtaaccaggccaccctccaccctttgtatcatcagtggagataacatagggatcctgaacttctacccctaccatccctatatgttgggatggtgtcaaactaggcttagaggagagtcaggactttcaccaccacccaggaataatgacaccaatacccaacccccctgccgtccaccagcacggtgtcagtggtgaacaagttggtaatagttacaaggcattcctattcctcccagccagggaggtatcaatggaagtcta

SEQ ID NO: 764584 - DNA, 532 bp, Homo sapiens
tgtcgggcagatgctgaggccaaaattcctgccaagcggaacctcccattagaaatacctatggaaggaccctgggtattgaacaaccccctccaacagattaagccccagtattccccaactgaaacagaatggggactttcacggggkcatagttttctcccctcagggtggttaatgacagaagaaggaaagttacttaaacccaaagccagccagtggaaaatacttaaatccccccaccaaacttttcatatgggtattgaaaacactcatcaaatggccaaatccctatttacagggccaaatctcctccagaccatccgacaggtagtcaaagcctgtgaggtgtgccaaaggaataatcccttgttccatcataagtaccctttggggaaacaaagaataggtcactatcctggagaggactggcagttagacttcacccatatgcctaagtcaaagagatttcaatacttgttggtctgtgttgatacctttacaaattggatagaacctttccgcttcaaga

SEQ ID NO: 764585 - DNA, 590 bp, Homo sapiens
  misc_feature 563, 564, 565, 566, 567, 568, 569, 570, 571, 572, 573, 574,575, 576, 577, 578, 579, 580, 581, 582, 583, 584, 585, 586,587, 588, 589, 590: n = A,T,C or G
gtgtgtgtgtgtgtgtgtgtgtgtgtgtatgtggcagttgtgaatgggattgtgttcttgatttggctgttggtttgattgttgttggtgtataggagtgctagttatttttatacattgattttatatcctatgactttgctgaagtggtttatcagcttaaggagcttttgggtcsagactaatttggttttctatacagagaatcatgttatctgcaaacagagatagttgacttcttctcttcctatttggatggcctttctcttgcctgattttgctggctaggacttccaataccatgttgaataggagctgtgagagacagcatccttgtattgtgccagttttcaagaggaatactttcagtttttgcccattcagtaaaatgttggctgtgggtttgtcatagatggctcttattattttgaggtatgttcattcaatacctagttcattgagagtttttaacatgaagcaatgctgaatttttttaaagccttttctgcatctattgagataatcatgtggtttttatccttaggtcttttttgtgatgagtnnnnnnnnnnnnnnnnnnnnnnnnnnnn

SEQ ID NO: 764586 - DNA, 570 bp, Homo sapiens
aatggaaaaacactccatgctcacggataggaagaatcaatatcattaaaatagctatactgctcaaatcaatttacagattcaatgctattcttgtccaactaccattgacattcttcatagaactagaaaaaaactatttaaaattcatatggaaccaaaaaagagcctgaatagccaaggcaatcctaaggaaaaagaacaaagctggaagcatcacattacctgacttcaaatcataccacaaggctacagtaatcaaaacagsatggtactggtacaaaaaaggcacataggtcaatggaacagaatagagagcccagaaataagcccaaaggtcacacatctatgagtgtctgatctccaacaaagctgacaaaaacatgcaatggggaaaagacttcctattcaataaatgatgctgggataactggctagccatatgcagaagattgaagctggagtccttccttacatcaaataaataaatcaactagagatggattaaagacttaaacgtaaaatttaaaaccataaaaaccctggaagacaacctaggcaatttcatcc

SEQ ID NO: 764587 - DNA, 570 bp, Homo sapiens
aatggaaaaacactccatgctcacggataggaagaatcaatatcattaaaatagctatactgctcaaatcaatttacagattcaatgctattcttgtccaactaccattgacattcttcatagaactagaaaaaaactatttaaaattcatatggaaccaaaaaagagcctgaatagccaaggcaatcctaaggaaaaagaacaaagctggaagcatcacattacctgacttcaaatcataccacaaggctacagtaatcaaaacagcatggtactggtacaaaaaaggcacataggtcaatggaacagaatagagagcccagaaataagcccaaagrtcacacatctatgagtgtctgatctccaacaaagctgacaaaaacatgcaatggggaaaagacttcctattcaataaatgatgctgggataactggctagccatatgcagaagattgaagctggagtccttccttacatcaaataaataaatcaactagagatggattaaagacttaaacgtaaaatttaaaaccataaaaaccctggaagacaacctaggcaatttcatcc

SEQ ID NO: 764588 - DNA, 570 bp, Homo sapiens
aatggaaaaacactccatgctcacggataggaagaatcaatatcattaaaatagctatactgctcaaatcaatttacagattcaatgctattcttgtccaactaccattgacattcttcatagaactagaaaaaaactatttaaaattcatatggaaccaaaaaagagcctgaatagccaaggcaatcctaaggaaaaagaacaaagctggaagcatcacattacctgacttcaaatcataccacaaggctacagtaatcaaaacagcatggtactggtacaaaaaaggcacataggtcaatggaacagaatagagagcccagaaataagcccaaaggtcacacatctatgartgtctgatctccaacaaagctgacaaaaacatgcaatggggaaaagacttcctattcaataaatgatgctgggataactggctagccatatgcagaagattgaagctggagtccttccttacatcaaataaataaatcaactagagatggattaaagacttaaacgtaaaatttaaaaccataaaaaccctggaagacaacctaggcaatttcatcc

SEQ ID NO: 764589 - DNA, 610 bp, Homo sapiens
caataaggatcaaaaaagacaaaaaagggcattacataatgataaagggttaaattcaacaagaagacctaactatcctaaatatatatgcacccaacacagaagcacccagattcataatcaagttcttggcttcaaagasacttagactcccacacaataatagtgagagacttaaacacctcactgagagtattacacaaatcactaagacagataagtaataaaaatattcaggacctgaactcagccctgaatcaaatggacctgatagacacctcaaaactctccacccaaaagcgacagaatatagattcttctcactgccacatggcacatactctaaaattgatcacataatcaaatgcaaaacattcctcagcaaatgcaaaagaactgaaatcataacagcaactctctcagaccacaacacaatcaaattagaaatcaagactaagaaattgactcaaaaccatacagttacattaaaatttaataacctgctcctggattacttttgggtaaataatgaaattaagacagaaatcaagaagttatttgaaatgaatgagaacaaagatacaacataccaaaatctctagacacagct

SEQ ID NO: 764590 - DNA, 610 bp, Homo sapiens
caataaggatcaaaaaagacaaaaaagggcattacataatgataaagggttaaattcaacaagaagacctaactatcctaaatatatatgcacccaacacagaagcacccagattcataatcaagttcttggcttcaaagacacttagactcccacacaataatagtgagagacttaaacacctcactgagagtattacacaaatcactaagacagataagtaataaaaatattcaggacctgaactcagccctgaatcaaatggacctgatagacacctcaaaactctccacccaaaagcgacagaatatagattcttctcactgccacrtggcacatactctaaaattgatcacataatcaaatgcaaaacattcctcagcaaatgcaaaagaactgaaatcataacagcaactctctcagaccacaacacaatcaaattagaaatcaagactaagaaattgactcaaaaccatacagttacattaaaatttaataacctgctcctggattacttttgggtaaataatgaaattaagacagaaatcaagaagttatttgaaatgaatgagaacaaagatacaacataccaaaatctctagacacagct

SEQ ID NO: 764591 - DNA, 595 bp, Homo sapiens
tctgtctacttcatgtctgaaggatattctcaccagatatttattctagggtaaagttttccccccgccccccttagcactttaaatatgtcttgccactctctcctggctttccattgaaaagtctggtgccagacgtattggagctccattgtatgttatttcttttctcttgccgcttttagaatcctttctttgatctttgggagtttgattattaaatrccctgaggtcatctttttggattaagtctgcttgtgttcatataaccttcttgtattcaaataccgccatctttcagtaggattgggaagttttctgtttttattcctttgaataaactgtctacttctttttctctacttcttctttaaggtcagatctcaaatttgcccttttgaggctttttttttttttttttttttttgagacggagtctcgctctttcacccaggctggagtccagtggcatgatctcggctcactgcaagctctgcctcccaggttcacgccattctcctgttgaggctatttttatagaggctattttctatatctttaaagcatgcttctttttttttaattttttcttttg

SEQ ID NO: 764592 - DNA, 611 bp, Homo sapiens
aattccggtctttgttttctggccataagctcaaagagaaaaaaataacaattggaaacatttcataattgttagataaatcagaatatgactgcaaagagacagagaacaactctcttgtccagattctaaaaataatggtgaaatttatcatcttagcacagtcccaagytatgtatcatcagaggaaatttatcaaacttgagaatcaataagtaaatgaacagaatatttctataaacaaaggaaatatggtattttcattcatgtagtcaataaaaataacttcaatgcacaacatttgggaacaagaacctggactatcccacatacatgtattctttcataatttgggatgtttctgtaccaaaatttagttgctatgcatcataaattgtcaaatgatgaaggcagatgtgtataaaaggttactagaggaaaatatgtaatttagaaattaaagaatcattgaattgattattctaatcgctgttgatatatctaaaagtgaaaacactttccatttgtggagcaaagagtatggctgtcctttcatcaataaaattataaactgttaacattttcaaaaagctatttgagtattgcatttt

SEQ ID NO: 764593 - DNA, 477 bp, Homo sapiens
  misc_feature 74: n = A,T,C or G
gggagtttatgcttctttcagttccatttgaaataatttttaaaacgttggaggaaaggtaatcagtaggaaanagtcacaaaaattggactagaattcctgagtacccatagaggtatgcagaaacatggtacaatttaaaattaactacaaatatgggtacagtattaactaaaatacaaatgaagaaaaaacttgagctttcaaatttstgttttgtttagagcaaccaccaaaattttcttttgctattctatccagggttaaacaaaatagtctagaagcatcatgtcagggatagagtctagaagcatctatagcctagaagcatcatgtcagggacggaggcacattggaaaagcatcagccactggaaccagacaaacctggacttgaatccctgctgttacttactagctctgtggtcctgtccaaaagtttatttctttgtccctaaaggtgaaatacatatcttgc

SEQ ID NO: 764594 - DNA, 612 bp, Homo sapiens
  misc_feature 527: n = A,T,C or G
actgatagacaatgagctcttggagaaaataattcatatacattttcgttcttagtatattttatgcttgacaatggttggcattcagtaaagtcaggatattgtgaaatgacttgtgtgtcaagttaagaagagtttggcttttttcctatagagwaaaagaaattattttctctgtttctctttctctctctctctctctcccctcctttcccaccccccttgctcttttatgcaaatagaatgataaacataaaaaattttccataagaaaaaaaaattagtctaaaatgcaaatgtttattcatgtggattttagagtgtttcataatttattcagtactttcacatatttttaaaaattctaaattagccgggcgcggtggcgggcgcctgtagtcccagctactcgggaggctgaggcaggagaatggcgtgaacccgggaagcggagcttgcagtgagccgagattgcgccactgcagtccgcagtcccgcctgggcgacagagcgagactccgtctcanaaaaaaaaaaataaaaaaaaaaaaaaaaaaaaaaaaaaaaaaaaatttctttttatggggcttttttctgaaatcctttagcatc

SEQ ID NO: 764595 - DNA, 612 bp, Homo sapiens
  misc_feature 527: n = A,T,C or G
actgatagacaatgagctcttggagaaaataattcatatacattttcgttcttagtatattttatgcttgacaatggttggcattcagtaaagtcaggatattgtgaaatgacttgtgtgtcaagttaagaagagtttggcttttttcctatagagtaaaagaaattattttctctgtttctctttctctctctctctctctcccctcctttcccaccccccttgctcttttatgcaaatagaatgataaacataaaaaaytttccataagaaaaaaaaattagtctaaaatgcaaatgtttattcatgtggattttagagtgtttcataatttattcagtactttcacatatttttaaaaattctaaattagccgggcgcggtggcgggcgcctgtagtcccagctactcgggaggctgaggcaggagaatggcgtgaacccgggaagcggagcttgcagtgagccgagattgcgccactgcagtccgcagtcccgcctgggcgacagagcgagactccgtctcanaaaaaaaaaaataaaaaaaaaaaaaaaaaaaaaaaaaaaaaaaaatttctttttatggggcttttttctgaaatcctttagcatc

SEQ ID NO: 764596 - DNA, 612 bp, Homo sapiens
  misc_feature 527: n = A,T,C or G
actgatagacaatgagctcttggagaaaataattcatatacattttcgttcttagtatattttatgcttgacaatggttggcattcagtaaagtcaggatattgtgaaatgacttgtgtgtcaagttaagaagagtttggcttttttcctatagagtaaaagaaattattttctctgtttctctttctctctctctctctctcccctcctttcccaccccccttgctcttttatgcaaatagaatgataaacataaaaaattttccataagaaaaaaaaattagtctaaaatgcaaatgtttattcatgtggattttagagtgtttcataatttattcagtactttcacatatttttaaaaattctaaattagccgggcrcggtggcgggcgcctgtagtcccagctactcgggaggctgaggcaggagaatggcgtgaacccgggaagcggagcttgcagtgagccgagattgcgccactgcagtccgcagtcccgcctgggcgacagagcgagactccgtctcanaaaaaaaaaaataaaaaaaaaaaaaaaaaaaaaaaaaaaaaaaaatttctttttatggggcttttttctgaaatcctttagcatc

SEQ ID NO: 764597 - DNA, 580 bp, Homo sapiens
tggccttttaatctcccttctttccaaataattcttgtctatctagtcagaccacaagtcattaagcaattaaaagacaatataaaataaagcatttgaaattcaagcactctaggccaggcatggtggctcacgcctgtaatccgagcactttgggatcgctgagcactgattgcttgagcccagggggtggaggttgcagtgggctgagactggggcactgcacttccagtctgggtgacagagcaagactctgtctcaaaaagaaaaaacaaacaaacaaaagaaattggagcgctgtaatgtaaaaaaggagagaggttaatattagctagagttactagctatrgctttaaggaaaaactataatcactgaatatcagatttataaaaaatagttattaaaagaaccaactatcagttcataagcattatcttatataattgatagaacaaccttataaagtaggaattattgtctctattttacacatgaggatatcaaggtctagtctaggaattaacttgttcaagtaggattatagaagttctttggatacagttagataatattttcctt

SEQ ID NO: 764598 - DNA, 593 bp, Homo sapiens
ttaccatttctgtcttactgcttgttattagtctgttcagagattctatattttcctggtttaatctaggaaagttgtacatttccaggaatttatccatctcctctaggttttctagtctatgtgtataaaggtgttcacagtagccttgaataatcttttgtatttctgtggtatcagttgtaatatcccctgtttcatttctaattaagcttatttggattttctctctttttggttaatctcaytaattgactatcaattttatttgtcttttcaaataatcagcttcttgtttcatttatcttttgtattttttgtttcatttcatttagttctgccctgatcttagttatttcttttcttctgctgggtttgggtttggattgttcttgtttctctagttttgtgaggtctgaccttagattgtctatttgtgctctttcagactttttgatgtaggcatttaatgctatgaagtttcttcttagctccacttttgctgtatcccagaggttttgataggttgtgtcactattattattcagttcaaagatttgtaaatttccatcttgatttcattgttgacccaa

SEQ ID NO: 764599 - DNA, 553 bp, Homo sapiens
gttttgataggttgtgtcactattattattcagttcaaagatttgtaaatttccatcttgatttcattgttgacccaacaatcgttcagaagcagattatttaatttccatgtgtcacagaatccttggggtgtcacatttctggctggaagcctctgtgtccagtgacgcctttgcccaaattttgctygggcctgctgggcttgttccacacattcagcctggcaagttgtgctcagcttctgctactcgcctggatcctgtgcctaccaggggcaagtcagatgcagagtggtgaggagtgtgtgagcaagtgagcatggagtccagccactgcacagagccaggcatgctggctgtggcagggtgggcagctctaggtgctggcacaggggctggctccctagaaggctgtggctggaccaggtgtaccacaaacagcttccatgcctggcaccagggactgcagtggtgcctggaagcttggagtagccaggaactgcaaagccccaaagagggtgtcacaaccctggctcggggagctcttaggtct

SEQ ID NO: 764600 - DNA, 508 bp, Homo sapiens
tgggagttccagaccagcctgaccaacatggagaaaccccatctctactaagattacaaaattagccgggcatggtggtgcatgcttgtaatctcagctgagtagctgagattactcgggaggctgaggcaggagaatcacttgaacctggaaggcggaggttgcagtragctgaaatcatgccattgcactccagattgggcaactaagagtgaaactctgtcaaaaaaaaaaaaaaaaaaagatacaaactgccaaatatcatattagaaatcaatactaaaatttagttaactatttgaccaaattaagaaattataaaaataataaaataacaaaaaattaccaaaaaatttaaaaattacaatagaacaaaaataataaaatataaaatgtagaatagataagcctttattaatcaagataaaatggaagtggtcacaaacattttaggaatgagaaagctgagagttttgaatgctattgtgattttaaaaatgagattaat

SEQ ID NO: 764601 - DNA, 554 bp, Homo sapiens
atgtaatgttcccatttacaagaggaacaaaaagtaaaaaaacacctaagaataaagctaataaaattattcctgacatttttggagaaaattataaaaagaaattcaggaatatctaaaaaaaaataaagctatactgtctccgcaaataraaaaatgtgaggctgggcgcggtggctcatgcttataatcccagcactttgggaggctgaggctggcggatcacttgagatcaggagttcgagaccagcctcaccgacatggcaaaaccttgtctccaataaaaatacaaaaattagctggacatggtggcaggcacctgtaatctcagctactcgggaggctgaggcatgagaatcacttgaatccggaaggtggaggttgcagtgaaccaagatcatgccattaccctccagcctgagcaacagaataagactctgttcttactgtttttttcttttttcattttttaatcacatttactctatacattcaatacaacttcactagtgaatatgatgaaccaactctaacatttacaggaaatagtagaa

SEQ ID NO: 764602 - DNA, 576 bp, Homo sapiens
aatggagtactattcagcaataaaagagaatgagattcatgccaggcacggtggctcacacctgtaatcccaatattttgggaggccaaagcggctggatcacttgagaccaggagtttgagaccagcctggccaacatggcaaaaccccatctctagtaaaaatacaaaaaaaagaaaaaaaaaaattagccagagctggtgacacacgcctataatyccagctactttggagtctgaggcacaagaatcatttgaacacaggagctggaggttgcagtgagccaggttcatgccactgcactccagccttgatggcagatcaagactctgtctcagaaaaaaaaaaaaaattcagtaatttgcaataacatggagatcattattttcagtgaaataagccaagcacagaaagacaaacatcacatattctcacttatttgtgggaactaaaaatcaaagcaattgagcccatggagatagagggtagaaggatggttaccagaggctgggaaggatagtggaggagtggggagggaggtggggatggttaacgggtacaaaaacacaatgaatg

SEQ ID NO: 764603 - DNA, 596 bp, Homo sapiens
aaagggtgccctgagtagatcttttcagagccatttttaaaacttttcccatgcttccctggccaacccactcaaaaaaaaaaaatgcttttctctatgttgctcacccagttctttctttttccccttccaggtctcccctgggaaaagagcagggagaccgctcctgaattgggacactgtagccatctttgtggtgctggctgcctactgtcttagcatattgccttttttttttctctctctctctctctctctttcttctctcgcccctgacagcgttttaaaagttttgtcttatttctttttactttggtactctgagatcctattttcagcacttgcgtcccaagggctctcaagtccggaccctgttctcctgctagcaagtcccattaagccgccgggcgcttgtgttttctcggcttctttakttccactcgctcgcggcactctggtaactttgttttgagatcaccttaccagagacagctctaacctctgagaactacccttactgacagaggctcctgagtgacggcgtcttcccaggcacaggagccagggaaagatgttgagtagccagcttttgcgag

SEQ ID NO: 764604 - DNA, 530 bp, Homo sapiens
atggcatttccctattttggggacccagaattcaatgtaaatgtgaaatccttaatttttaaagatctagatgctctgccttccggttgtgtctgcttctcatatattagatattaaactctaaaaacagcaaatttttttttgtgctattcattaaatggctccaccctgaagccagtgattcaattaagaaacaagctaarctgaaaaaaccaactatcaaactaaatcagtctccaaaatacaactttctacactgggatagctggcaagctatatgcagaagaatgaaactggaccactacatttcaccatgtacaaaaattaactaaagatgaattaaagatttaaatgtaagatcctcaaactataagaatcctagaagaaaacctaggaaataccattctgtacattggccttgggaaagaatttatgactgaggctgaaaaacagttgcaatgaaaacaaaaattgacagatgggagctaattaaactaaaaagcttctgcatagcaaaagaaactattaac

SEQ ID NO: 764605 - DNA, 605 bp, Homo sapiens
cggcgtactttgggaggatcatttgaaatctggccagcttggaacccatttaaaaaggaagaaacttgtcaggagagagttgggagtagtagaaattatcttccaaaaaatattcgtgacagtataaaaaagagagactgggctgggcttggtagctcatgcctatagtcctagcactttgggaggctgaggygggcacaccccttgaccccaggggttccagacaagcctgggcaacgtaggagatctcatctctacaaaaaattcaaattagttgggtgtgaagtggtgtgcacctgtagtcccagctactcaggaggctgagtggggaggattgactgagcccaggaggtccagaccatgagccaagatcacaccactgcataccagcctgggtgacaaagtaagactctgtctaaaaaaataataacaataaaatagagattggagctgttggagagatgaggagaggaaggatattgtacaacaaagagcattttacctggagttgtttacacacagtaaccttgtgaaggccaggtggctcaaagtggtatttcctagcagggacactataggcattttgggtgggatacttcttagta

SEQ ID NO: 764606 - DNA, 592 bp, Homo sapiens
gacttctgaaagatactatatagatggttaagaataatctaagccatgaactcagacaccaattctgatacttttcagtacacagtcagtgcgctcaactgtctgtgcctcagtttctacatttctcaaaacagaacaataacatgtattggttttttttttttttttttttttttgagacagagtcttgcattgtcgcccgggctggagggcaatggcgtgatcttggctcacttcgacctctgcctcccgggttcaaacgattctcctgcctcaggagattacaggcacctgccatcacgcccagctactttttttatatttttaagagagatggggtttcactatgttggccaggttggtctcgaactcatgaccttatgatccacctgcctcggcctcccaaagtgctgggattacaggcatgagccacctcacccggccaacgtgcacttytttgggtggttgacaggagcaaaagagagaatgcatatgaagcccttacctggcatgaagtacctgcccagcaaatagtggttagtagagttaggaagaggtatgtgatcaccagcagacagcaggcatctggtca

SEQ ID NO: 764607 - DNA, 617 bp, Homo sapiens
aacagaatgagccatgatgagttttattcctgagttctaaggaaattgtagtttaattttcagttttggaattgaaccaagagatgcctcaccatctcatattccttctggattgaggcagtattgtaataactgcctacagaagtaaatcacatacttttgcaataaaaatttctttgaatgacacttaattttataattaaacttggcagtacagcctctgaagtgtctcatcttgcctaatcacaatgatctatttcctttcagagtacttccgtatgcaatgattagtccttttgttatcatcacattatagattgaaaagaataattcttaaaaagaaaaagaatraatgattgtattttacataaaattcaaaccactgattatttctgttgtttgttttaaaaatattttcaccagtcatggtggctgatgtctgtaatcccagtgactggggaggctgaggtgggaggatcacttgaggccaggagttggagaccagcctgggcaacaaaagaataaaataattggctaggcatggtggtgcatgcctgtagttccagctaattaggaggctgagtctgtaggatcccttgagcccagaagttcaaggc

SEQ ID NO: 764608 - DNA, 645 bp, Homo sapiens
gtctggtcaccaggatgttttctcactaagtggttttccaggcctgggggcctcttttacaggactgagttctgtcacttctctgggttcctaggcctccttcccccacctccaatttgtgcaaaaggccttctgcagactgggttaattacctctagtggtcagtcttgggtgtatgttgaatattgtggagagggaattacctcaaccttttacatctctgaggatataaaattataaagatttaaaatgatctatgggcatgtgttgtaagcaaacaaagaaaccaataaaactccttgtattttggaagactattgggttgaaccatacaaaatttctgatattcaattgtttctgacccataaaaaagtgaacttgaacttcgtattattcggcctagtagctatgactatgaggtttcatgtttctgtttatttgtttattttgagcttctgattgcaactggattatactaggcattygggatgaagaggatgggctgggagggagcttttgaattgattatcctagtatttgatacatgcagagggaaatgccacatggattctttgcccagcatttgaattgggaaacaggattcagggatatcttctttgcacggtattgctgatgatccagcat

SEQ ID NO: 764609 - DNA, 507 bp, Homo sapiens
gagatgaaacaaaaagctatttgacagaaggactgcattacaaaggcagtgaggggattccaatgcattcaccatcttctaggtgtagacagcaacaggcggaagctgcctggctgtttcagcttgatgtctgagtcactgggccctcctgtgctgctctccatgcactgtgtaggaacttaaccagggatgacggatttttaaaggaaattaagggggcaaagtaaaactttcatataacaaaatttaatagaaacgatcacagtagaattagtattttcattttaaattttattataactggaaatgtgaatgrttcacacaatggtgagaaatcttaattaggactgccaatatggtatggatgtatttgaaaaatcagctttaccaggtttcaataaagccagaataaaaatagaacaggttggtggtaggataattcagggtgatgatggtcttacaaacttgaggtcaaatattggccctcactctctgagctacagatag

SEQ ID NO: 764610 - DNA, 621 bp, Homo sapiens
aatctgtatgaaactgtaacatacaaacacaatggtctctacaaacttgacaagcattgactgagacagaaactttcctctggcaagaaggaatccagtgcatccttggtctctttgctccccaccaagaccgccacgatccacatagctaacagtatttccgcatataggaacagccacaatccctcataaacttttaagaggcacagaacaaagcaggcaagctcatcactgcctgacagcaaagactctgacacatcacgttaatgtaacagcagatctaagacagctggctgtaggggatttggtcactttccacttccctggtttgactaataatcaaatgccaaaatctaacttttcaaatctttttttttttaaagacagaatctcatgctgttggccaggctggagtgcagtggcatgatcatggctcactgcagccrcgacctccccagctcaagcaattctctcacatcagcctcccaagtagctgggactctaggtgtgcaccaccacgccctgctaatttttatagagatagagtttcactgtgttgcccaaactggtcttgaactcctcggctcaagcaatctacccatctcagcctcctaaagtggt

SEQ ID NO: 764611 - DNA, 619 bp, Homo sapiens
ttgcttgggaagctggtatttctgttctattcaggccttcaactgtttggatggggcccacccacattatgaagggcagttggcttactcagacttcactgatttaaatgttaatctcattcaaagcaccctcaaagttgacatataaaattaaccatcacatctaccacacagtaaaatgagtagttttgaaattagttctcagacagtatgatatatgaatacatttttttctctgtggattcataaaaatatcaactgtaaagggagatgctttctgccttcatcacattttgtaatcctttgagattttatgggaaaactrtagattttctgagttattagcattaatcaataggctctaggacctacttgtttgaaatgtgccctgcttgtattccagaccaaagtaatgaaatcctaattaatgtctttgaaaccatccatgagatctcatctggcattttaggctcatagtctgtaaaggattcacagaaattctatttggtttttattagcaacattaaatgtattccccaattggggattagtagcattttaatacatagcatttattatctattagtataggttaagaacagctggggacctctttgag

SEQ ID NO: 764612 - DNA, 586 bp, Homo sapiens
acggacttgaaggatggtgaatgtgaagattttattgagtggtaaatgtggctgacagcaggatggggaactgaaaaggggatagaatgtgcaggcagtcttcccctggagctcagccaaactcctctcctttcacagtttctgatgtccagcagcttcttctcttcttgatgttcagatgcttctctcttccgtgtgtgtatgagctgagtttggggtctggagttcttatyggcacaggatgggggcatgctgggccaaaaggcaacattcaggtgggaaaacagggaagtaaagttctcatttagggctgtggggcccagctttagggtggaacccttgccagggactccaccctcttctacccagtattttccagcctcctgtccatatcagtagcagagtttgaatcctggcactactaattttgagcaacttacttaacctcactgcatttcaattttcttatctgtaaaatgagcataagtttaataatagaattattgtaagaactgaatgagttaatatgcatgaattctttagaatagtgccaaacatataataagtactatgctacatgtattag

SEQ ID NO: 764613 - DNA, 627 bp, Homo sapiens
gaataaatgaaacctataaactattagaagtaataaatttaacaaagttggtgaatacaataccaataagaaatagtttttaatatattgacaaaaaacaagtagaaaatgaaataggaaactataccttttatagcagcatcaaaaayaccaagtacctaagattaaatccaatgaaatatgtgaaaaccactatgatgaaagctaaaaaacatttttgagataaattatggaagtcctaaataaatagatatattcatgaatatatctttgttatgaaaaaatccacattgtaaaacttcagttattttacaaattgatttgaagattcacaacaatcccactcaaaatgtcagtgtattttaaaaatgaaaatggataagctgattctaaaattttggtggaaattcagtatctagaagggccaagacaatgcttaaagaaaaacaaagctgtataactgatactactggatattaaaacttagcgtaataatacagtaattaatacaatgtgctactggcacaagaatagtcaaatagacttaaaacatagagtagatgccagaaacatatccatttatatgaagtcacctgacttacagtaacattccactgcaactcaggg

SEQ ID NO: 764614 - DNA, 603 bp, Homo sapiens
aaactaaattaaatcacatatactcattactttttgactacaaaattaattatatgctgagtgaaatactgatcatagcttttttaaaaagcaattagtaaatgtgaacacaaaaacattttttaaaaatatgaaaaccgaagacattttttattgagaactttcttagtgcaaacattttytttttcataaccttgtattctttgctttgctttttaatactaaattcagcagagatgtaaactaatgatctctttttatcacttacatttaaaaatatgttgctttcagattagtgttccatgaattgttcgtatagtttacttcccctaaaacacttatatcttaaagaaaaatcctttcacatattcagtaagttatgatgtaattacattgctgttcctgagccaactagtccacactaaaatgcgtttttattcttaagactcttctttaagaaattaataaaatttgtgctcctaaaacaaattaactaattagaaaaacttaatacagtctccagaagtaattgagccattaactggtttatacactgattagattgtgttaaaacctaaaataagacaattccttaagaagtat

SEQ ID NO: 764615 - DNA, 603 bp, Homo sapiens
aaactaaattaaatcacatatactcattactttttgactacaaaattaattatatgctgagtgaaatactgatcatagcttttttaaaaagcaattagtaaatgtgaacacaaaaacattttttaaaaatatgaaaaccgaagacattttttattgagaactttcttagtgcaaacatttttyttttcataaccttgtattctttgctttgctttttaatactaaattcagcagagatgtaaactaatgatctctttttatcacttacatttaaaaatatgttgctttcagattagtgttccatgaattgttcgtatagtttacttcccctaaaacacttatatcttaaagaaaaatcctttcacatattcagtaagttatgatgtaattacattgctgttcctgagccaactagtccacactaaaatgcgtttttattcttaagactcttctttaagaaattaataaaatttgtgctcctaaaacaaattaactaattagaaaaacttaatacagtctccagaagtaattgagccattaactggtttatacactgattagattgtgttaaaacctaaaataagacaattccttaagaagtat

SEQ ID NO: 764616 - DNA, 638 bp, Homo sapiens
attggtagaagtctcatttatcatttagtccaatataattattctgacctattctatttcataccaaaataactttggaggaatccaatggagtttggcagaaacacttttggggggatgaaaagaaacgtagcttttgcagtgtcattctttaatatgagccacaaaagactgtgtaggggtgggggtgtctactcaaatcacagaggtgaaaagacttaagacatgagatccaagaataagaaaagatttatagatcctaaaatgtatagagtatgaaaatggacaccctttaaaagtattgtatgacatggtcaagttttaaggaaagaaagaaagaaagggcttaatgaatccacctcttctaaagaaattggtcccccaaatttccatttcattgccatgacaactagtactccatcattgccatggtaaccagctgaatagcattagtctaaagacaagctctctgattgggtgaccaacgaaagccaktaggtgccccaccacaatgctgaaagactgttttgcaatcactttgacctatttctagcttttcaatgtgttttaattctccaaagtgtttccctaaaaccaaatgttttttggaatgagacaatttcaagaagtgcataata

SEQ ID NO: 764617 - DNA, 543 bp, Homo sapiens
tccagtgagcaagaagtagcaaacacactggacttattggtgagacatttgtgtgctagaggatgggaaataaatctgactaaaattcagggaccttctacctcagtaaaatttttagaggtccagtggtgtggggcctatcaagatattccttctaagatgaaggataagttgctgcgtttggcccctcctgcaaacaagaaagaggcacaacgcctagtgggcctatttggattttggaggcaacaygttcctcttttgggtgtgttactctggcccatttatcgagtgactcaaaaggctgccagttttgagtggggtccagaacaggagaaggctctgcaacaggtccaggctgctgtgcaagctgctctgccacttgggccatatgacccatcagatccaatggtgcttgaggtgtcagtggcagatagggatgctgtttagagcctttggcaggcccccataggtgaatcacagcggaggcctctaggattttggagcaaggccctgccttcttctgcagataactgctctcctttt

SEQ ID NO: 764618 - DNA, 622 bp, Homo sapiens
ccagaacctcctcttatgtcctcttttgtccatgtatactcaacatttagctcccacttataagtgagaatgtagtgtttagttttctgctcctgtgttaattcacttaggataatggccttcagctgtataaatgttgctacaaaggacgtgatttttttcatggctgcgtagtattccmtggaatatatgtaccacattttctttatctagtccaccatttataaacatctagcttgattccatgtctttaccattgtgaaaagtgctgcaatgaacatacacatgcatgtatctttaggatagaacaatttatattcctttgtgtatatacccagtaatgggattgctgggttgaatggtagtcctcagttctttgagaactcatcaaactgctctctgcagtggctgaactaatttgcattcccatcagcagtgtataaatgttgtcttttctctgtaacctcaccaacatctgtcattttttgacttactaataatagccattctgactggtgtgagatggtatttcattgtggttttgatttgcatttctctaatgattagtgatgttgagcattttctcatatgttatgggccacatctatgtcttctttggaga

SEQ ID NO: 764619 - DNA, 622 bp, Homo sapiens
ccagaacctcctcttatgtcctcttttgtccatgtatactcaacatttagctcccacttataagtgagaatgtagtgtttagttttctgctcctgtgttaattcacttaggataatggccttcagctgtataaatgttgctacaaaggacgtgatttttttcatggctgcgtagtattccctggaatatatgtaccacattttctttatctagtccaccatttataaacatctagcttgattccatgtctttaccattgtgaaaagtgctgcaatgaacatacacatgcatgtatctttaggatagaacaatttatattcctttgkgtatatacccagtaatgggattgctgggttgaatggtagtcctcagttctttgagaactcatcaaactgctctctgcagtggctgaactaatttgcattcccatcagcagtgtataaatgttgtcttttctctgtaacctcaccaacatctgtcattttttgacttactaataatagccattctgactggtgtgagatggtatttcattgtggttttgatttgcatttctctaatgattagtgatgttgagcattttctcatatgttatgggccacatctatgtcttctttggaga

SEQ ID NO: 764620 - DNA, 590 bp, Homo sapiens
cttttatatatttatttgccatttagattcctgcttgctcatttttctattgggtgcctgctatacaggttcttcatatattctggatatgagcaccttatctaatacatgtatattacatgtatcttttcccactcttaggtttgactctttattctcttaaggttatctttttatgatagaaatttctaacttaaacatagtctaatttatcaatcttttcctttatggttagcttttttgtgtcctgtttaagaaatgttcattcatgtataccctgttggcgggaatgtaaattagttcagccactatagaaagscactttgaagatttctcaaataacttaaaattcccattcaacccagaaattcagctactggccatatacccaatggaaaataagtcattctacaaaaaagacatatgtactcatatgttcattgcagcactattcacaatagcaaagacatggaatcaacctagatccccatcaacaatgaactagataaagaaaatgtgatatagcctgtaatcccagcactttgggaggccgaggcggacggatcacgaggtcaggagatagagaccat

SEQ ID NO: 764621 - DNA, 590 bp, Homo sapiens
cttttatatatttatttgccatttagattcctgcttgctcatttttctattgggtgcctgctatacaggttcttcatatattctggatatgagcaccttatctaatacatgtatattacatgtatcttttcccactcttaggtttgactctttattctcttaaggttatctttttatgatagaaatttctaacttaaacatagtctaatttatcaatcttttcctttatggttagcttttttgtgtcctgtttaagaaatgttcattcatgtataccctgttggcgggaatgtaaattagttcagccactatagaaagccactttgaagatttctcaaataacttaaaattcccattcaacccagaaattcagctactggccatatacccaatggaaaataagtcattctacaaaaaagacatatgtactcatatgttcattgcagcactaytcacaatagcaaagacatggaatcaacctagatccccatcaacaatgaactagataaagaaaatgtgatatagcctgtaatcccagcactttgggaggccgaggcggacggatcacgaggtcaggagatagagaccat

SEQ ID NO: 764622 - DNA, 612 bp, Homo sapiens
ttggcctgcactttactcaggaactgcttggttgatactttcagtctgttgacctccctccccaaatccctgatcgtgtctggtcaccaggacatttgagagattatgcaagagttctctctagctctccatctaattgtcctgcaggaaacgaacattttcatacatcaaaacctcgttcaaaaataaaagtgaggatttcatttcttcttgagtctgtactgcaatctatgtcatggacatactgtacttagttatattgcaaggacaatgtctaataatcctctttatatttccatagtgccaaccccagttgtgggcaatatttcatacaagtgatagaagactatcaatmaatatggattgattgattaatgtttttccattgatgcttttccagagatggagtggcaaatgcattcgttgcattgaagttgctgttcctcctctaatactatataattggatttcaaaaattggtcacagcactttttctgaagtgctgaagagatccccaaatagtgccccaagatgacattaccaatgtattggcacgcaggagaacgtctatttgccatctattcttttttgtttttttttaatactttaagt

SEQ ID NO: 764623 - DNA, 607 bp, Homo sapiens
cagatatcacagcaagctggtagtttggggacagcagtgcatttcttttgcaaacttacaccaaattgatttcccaacacatgtttatagatgtgctctcctgagctccacacacagagaaccatttcccttttgaacagcttgtctggttacatcttgtagtaatttatytgtgtgctctctgccaactagtttgtagggaaaacatgtttgatacataacaatagatcatttggggataaatcaaactcttaatgaagtcctgcttctcttcagccaggcatttcactctgaagagtctctctgaggcgctggtgacttgaggaaagggaacgtgggtgccccagtctgcgagacaagtagacgcatggaaagctgggtttctccaagacaagactaaagacacagcatccctggggtcccttctcatggagtccaactaaaaccactgaagttggattggagactagagcctggagacagttcagattagacctatgtttggaagaaatgagagatctattttgcccaaagcctcacactttccttggaggggagccatgaccgcccacacacccttgtctttcccagttcctgtagagaaagg

SEQ ID NO: 764624 - DNA, 699 bp, Homo sapiens
cacctacagattcttgctgctgggatccctttgcactcccaaaatcaaaaatgatccatctctgactctgtctcctggtagcacatgtatggtccttaggaagtcattttgtattccttgctccaacatgccttgggaacacagtccaaccccagtagagaaattttcttctgataacagcaccaaaacattgggcagccctcctctttttttgtagattccccagacagcggtcagaccctgtacccaaccacatagtggcttcctcaaaatctcctctcactacacaagaagtgaagaaatagaaaatcacctcgcacctctccctttttatrgtcttacctgcctgagggggtcaaacatttatcaagcagttcctcaggctcatttcctttataaatatgcaactggcaatcagggactccttttttgaatttttcatcaattgtattttggagcctgcttataacttcaatgttaacaccccattatagtcttaattgcctttgtttcatttcatggtaagcagctgttttcttctttggactgctaaattcactatctgtaaagaaagacagtgtttataaaatgctagatatcaccagttcaaattagctcactctttctcttatatttcctcatttttaactcctctggaaggaataaaattgcactgaaacacctttggtcaatgcgtgg

SEQ ID NO: 764625 - DNA, 699 bp, Homo sapiens
cacctacagattcttgctgctgggatccctttgcactcccaaaatcaaaaatgatccatctctgactctgtctcctggtagcacatgtatggtccttaggaagtcattttgtattccttgctccaacatgccttgggaacacagtccaaccccagtagagaaattttcttctgataacagcaccaaaacattgggcagccctcctctttttttgtagattccccagacagcggtcagaccctgtacccaaccacatagtggcttcctcaaaatctcctctcactacacaagaagtgaagaaatagaaaatcacctcgcacctctccctttttatggtcttacctgcctgagggggtcaaacatttatcaagcagttcctcaggctcatttcctttataaatatgcaactggcaatcagggactccttttttgaattttycatcaattgtattttggagcctgcttataacttcaatgttaacaccccattatagtcttaattgcctttgtttcatttcatggtaagcagctgttttcttctttggactgctaaattcactatctgtaaagaaagacagtgtttataaaatgctagatatcaccagttcaaattagctcactctttctcttatatttcctcatttttaactcctctggaaggaataaaattgcactgaaacacctttggtcaatgcgtgg

SEQ ID NO: 764626 - DNA, 699 bp, Homo sapiens
cacctacagattcttgctgctgggatccctttgcactcccaaaatcaaaaatgatccatctctgactctgtctcctggtagcacatgtatggtccttaggaagtcattttgtattccttgctccaacatgccttgggaacacagtccaaccccagtagagaaattttcttctgataacagcaccaaaacattgggcagccctcctctttttttgtagattccccagacagcggtcagaccctgtacccaaccacatagtggcttcctcaaaatctcctctcactacacaagaagtgaagaaatagaaaatcacctcgcacctctccctttttatggtcttacctgcctgagggggtcaaacatttatcaagcagttcctcaggctcatttcctttataaatatgcaactggcaatcagggactccttttttgaatttttmatcaattgtattttggagcctgcttataacttcaatgttaacaccccattatagtcttaattgcctttgtttcatttcatggtaagcagctgttttcttctttggactgctaaattcactatctgtaaagaaagacagtgtttataaaatgctagatatcaccagttcaaattagctcactctttctcttatatttcctcatttttaactcctctggaaggaataaaattgcactgaaacacctttggtcaatgcgtgg

SEQ ID NO: 764627 - DNA, 678 bp, Homo sapiens
ccttcaataagggctgacacagagaacaattatacttactgggtatatttatcaatcttggctggcaataatgcctggatgcaatcactttatgacacagttacacatgctttctgatctcagcatttactacaataaatctgctcctataattgaggcataccaccctcaaaaacctatttgtaaacaggattggacccagttggaaaaaataaatgtacttttttaggaagattgcatygcagaacaggcagaggttctgcacaacgattcctatggaaacattattaattggtcccctaaggggatgtttagcttgaattgcacctctcagtctgcatgccatggccacactatgttcagctggtctgaacaaaatggccagatggtagatacaataagaagtacggcaagagttcctattatctggaaccatggcggtatagtggcacttcaacctcaaatgatatggcctgctctaggagcttaacataaggattgaaaactgaaagaacaaatatttaaagcatcccatgcaaatctgaccttaatgccaggaactggagtgcttaaaggagctgaaagtggataaaaacacttggaagctctgtgatttcaatgatggttgtgcttttaatctgtgttgtgtgtctttgtatagtctgcagatgtggatcc

SEQ ID NO: 764628 - DNA, 678 bp, Homo sapiens
ccttcaataagggctgacacagagaacaattatacttactgggtatatttatcaatcttggctggcaataatgcctggatgcaatcactttatgacacagttacacatgctttctgatctcagcatttactacaataaatctgctcctataattgaggcataccaccctcaaaaacctatttgtaaacaggattggacccagttggaaaaaataaatgtacttttttaggaagattgcatcgcagaacaggcagaggttctgcacaacgattcctatggaaacattattaattggtcccctaaggggatgtttagcttgaattgcacctctcagtctgcatgccatggccacactaygttcagctggtctgaacaaaatggccagatggtagatacaataagaagtacggcaagagttcctattatctggaaccatggcggtatagtggcacttcaacctcaaatgatatggcctgctctaggagcttaacataaggattgaaaactgaaagaacaaatatttaaagcatcccatgcaaatctgaccttaatgccaggaactggagtgcttaaaggagctgaaagtggataaaaacacttggaagctctgtgatttcaatgatggttgtgcttttaatctgtgttgtgtgtctttgtatagtctgcagatgtggatcc

SEQ ID NO: 764629 - DNA, 678 bp, Homo sapiens
ccttcaataagggctgacacagagaacaattatacttactgggtatatttatcaatcttggctggcaataatgcctggatgcaatcactttatgacacagttacacatgctttctgatctcagcatttactacaataaatctgctcctataattgaggcataccaccctcaaaaacctatttgtaaacaggattggacccagttggaaaaaataaatgtacttttttaggaagattgcatcgcagaacaggcagaggttctgcacaacgattcctatggaaacattattaattggtcccctaaggggatgtttagcttgaattgcacctctcagtctgcatgccatggccacactatgttcagctggtctgaacaaaatggccagatggtagatacaataagaagtacrgcaagagttcctattatctggaaccatggcggtatagtggcacttcaacctcaaatgatatggcctgctctaggagcttaacataaggattgaaaactgaaagaacaaatatttaaagcatcccatgcaaatctgaccttaatgccaggaactggagtgcttaaaggagctgaaagtggataaaaacacttggaagctctgtgatttcaatgatggttgtgcttttaatctgtgttgtgtgtctttgtatagtctgcagatgtggatcc

SEQ ID NO: 764630 - DNA, 525 bp, Homo sapiens
gagtagggcttaggtccagccatgggttgacccactgttaggttcttaaagaagcagtgggaggaggagttgattgatttgtgttctgaggcatagcagaactcaccctcagacccctctgacctatatggtggcagtggagctgaggggtaacctttgtctagtaactgcatctgtagcaatctattatttcagagtcaattgactcsattgattgagatcaccaaactcctcagcctggcatttaaagcgctttacaatttggcacttctttttcttttcatgcttaattctcaggatatgcctctatatacccaacttcagtcacaatcatccactcaccatttcccaaatgtagccttcagtcaagggatgctaagccattgctcaacctgttttctttacttagaatgccttctcatactatgactcccaaagtccgacacattcttcatgtctcagctgaaatcaccctccttcctcatagattctcccagtagaatttaagctcccctttccatattt

SEQ ID NO: 764631 - DNA, 582 bp, Homo sapiens
aaaaatcatactaaaattatacaaataattatataaacgaatcatacaaatcatacactaagttggcataatagtgggcttatatttattcttattacttttttaatataactttttttctgtagggcatacagagttaccacataacccagaaattccactcctaggtatataccccaagagaagtgaaaacatatgcctacgcagaaacttgtatgtaagtgttcmcagcagccttatcataatagccccaaagtggaaataacctaaatattcagcaactgatgaatagataaataaaatgtgtatatctatacagtgggatttcatttggccataagaatacaggaggtactgatatgagctacagagcgaaggaaacttgaaaatattttgctaagcgatagaagttcatcacaaaagaccacttactgaatgattccatttacatgaaatgtccagaatagacaaaatgacagggacagaaagtaggttattggttgcctaggacttgggggtacaggcgagaaatggagtgactactatactaataggtatggggtttcactgtaggctgatgct

SEQ ID NO: 764632 - DNA, 582 bp, Homo sapiens
aaaaatcatactaaaattatacaaataattatataaacgaatcatacaaatcatacactaagttggcataatagtgggcttatatttattcttattacttttttaatataactttttttctgtagggcatacagagttaccacataacccagaaattccactcctaggtatataccccaagagaagtgaaaacatatgcctacgcagaaacttgtatgtaagtgttcccagcagccttatcataatagccccaaagtggaaataacctaaatattcagcaactgatgaatagataaataaaatgtgtatatctatacagtgggatttcatttggccataagaatacaggaggtactgatatgagctacagagcgaaggaaacttgaaaatattttgctaagcgatagaagytcatcacaaaagaccacttactgaatgattccatttacatgaaatgtccagaatagacaaaatgacagggacagaaagtaggttattggttgcctaggacttgggggtacaggcgagaaatggagtgactactatactaataggtatggggtttcactgtaggctgatgct

SEQ ID NO: 764633 - DNA, 630 bp, Homo sapiens
gtgtttctgtaatggatgtaaaaggaacaccaggatgcaaaggagttcaaggcgttagtaagggtacagttgaaacctgtgattcatttcaaagtacacattctatgcagatttttcaagaaaaaaacatgcagcaacttaagaacagagactcttcccttccggggcctaggattactccttatactcagaagatattcagatatttttgaatgagtgaattaattaacaaacaaaaatctgactttgctaaacatttctgaatgtattaggtttacttttgtgatgaatatgttgattattttagagaattagaattctgtaccaagagccacattcctataatttacttatactaaaatgactagaccaatgccaaattcaatctggaacacaaaagtttattagaataaaaatacacatacrgtatcaacactaaaattatttcacatcgcatttaggttttacctccattagttttttttaatgcttataaagtctatgctctaaataatttgcacatttgtaaacaaatcttagatgaccaaagatgcagtgtatctatcagatattgaatatcaaaacttaaggatgggaactgatagcgaaatccaattacactaaacattc

SEQ ID NO: 764634 - DNA, 577 bp, Homo sapiens
gtgggatcccatgttatacttggagtgaatctggtcgctcgctccccgtccccgattcccactttgcttgcctcttctccccatccatctaccccacacgcattttccagaaatctccccaactcgacgcccactcaggctactgaaccccaataacgccacccttttactaagaggagcctccgtcgtcccaaccccttgctccgagcgggaagcttggtgcagcgcaccaaggtccggtagaggggggcggcgccccctgcgccgtgggccagcaggccgcrgacgcgcagacagcaagtagaccccaagggctggagccgcaacgcaagttccccctgactgggggacgccgcccagctcctggagcctgcgaaggctcttgaagctgagcttcccagggataccagaagggacactctcgtgcaattccggctagggaaagcgagggaaggtggcggctccgggcagggagcgagcgagtgctccacgccgcccgcaggatcgagtgagtcacgcggccgccagacgaggccggtggcgcacgcacccgagatccgatgtagtgcaccgcctc

SEQ ID NO: 764635 - DNA, 577 bp, Homo sapiens
gtgggatcccatgttatacttggagtgaatctggtcgctcgctccccgtccccgattcccactttgcttgcctcttctccccatccatctaccccacacgcattttccagaaatctccccaactcgacgcccactcaggctactgaaccccaataacgccacccttttactaagaggagcctccgtcgtcccaaccccttgctccgagcgggaagcttggtgcagcgcaccaaggtccggtagaggggggcggcgccccctgcgccgtgggccagcaggccgcggacgcgcagacagcaagtrgaccccaagggctggagccgcaacgcaagttccccctgactgggggacgccgcccagctcctggagcctgcgaaggctcttgaagctgagcttcccagggataccagaagggacactctcgtgcaattccggctagggaaagcgagggaaggtggcggctccgggcagggagcgagcgagtgctccacgccgcccgcaggatcgagtgagtcacgcggccgccagacgaggccggtggcgcacgcacccgagatccgatgtagtgcaccgcctc

SEQ ID NO: 764636 - DNA, 548 bp, Homo sapiens
aggatccctaattagtgagcccaaatcaataaattcagcctgatgcatctgtatgttccttccagcattatcccacacccttaatatccattcccgtgcctgttctccaaatttctgcttatataaattagaaaactcaattcaagtgtagctcacctccccatgggtcacactctgaacctcacttctgtgggcccatcgggactttagttataggtctagaagcaaacaaaggtgttgagggtgctagaggagaatcgatattatcttgcctggcaactgcytcaggggaggccatcactgttgcctcaggcagcacagggtttatctcctcagacaaaggtggaaaggctgatggcagcatgggtcggggagaggatgttgccactattggggatgccattttcctttctctttcttctgcctattaaacctccactcctaaaaaaaaaaaaagaaaaaatgatgaactcagggattctaactcctggcttcagaagcagatactaagcctcaaatctgctaagattgccctgagtgagtcttat

SEQ ID NO: 764637 - DNA, 599 bp, Homo sapiens
ctcatgggatggacacgctacgcatttgcatatccatcctactgtgcctagtcctgtgagtactttccaaatctgctgagtgctccttttccaacaaatattttgttcggacccttttgaccttcctgaagtgaaattcatagatatgaaaatgttctgaaattttggccgggcgcagtggctcacgcctgtcatcccagcactttgggaagccaaggcgggtggatcacgaggtcaggaattcgagaccagcctggacacatggcaaatccctgtctctactaaaaatacgaaaattagctgggtgtggtggtacacacctgtaatcccagctacttgggagattgaggcaggagaatcgcttgagcccagggagcagaggtcacagtgagccgagatcatgccactccgtcttaaaaaacaaaaatggccaggyacagtggctcacgcctgtaatcccagcactttgggaggccaaggtggatggacctgaggtcaggacttcaagaccagcctgtccaacatggtgaaaccctgtctctactaataatacaaaaattagccaggcatggtgacacatgcctataatccgcctactc

SEQ ID NO: 764638 - DNA, 673 bp, Homo sapiens
gctcatgtctgtaatcccagcactttgggaggctgaggcaggtggatcacaaggtcgggagatcaagaccatcctggccaacatgatgaaaccccatctctaccaaaaatacaaaaattagccgggcatggtagtgtgcgcctgtggtcccagctactcgggaggctgaggcaagagaatcctttgaacatgggaggcagaggttgcagtgagctgagatcatgccacttcactccagactggcaacagagggaaactccatttcaaaaaaaaaaaatgtagccaactgtttgaactgtgttttaatagggcaaacgccgagctgtaaccaattcaactgttactgtacctcacttccgttttctgtacgtcactttccattttttgcccktaagtctcccaccacataactgcgttggaatctcggaaacttctctggctcagatggctgtccagttccccaatcattcattgctcagttaaactcctttaaatttaattctgctggagtttttatcaatatcaatttactgatacaaatgaattgtgcacaccaatcagtgatgtcatctgaaaattagtttatatcaaactgatctaaatataccatgcctggaccctgtccactagatgccagtagcacaccccatagtttgtgactataaaaactgtt

SEQ ID NO: 764639 - DNA, 639 bp, Homo sapiens
taaactcctttaaatttaattctgctggagtttttatcaatatcaatttactgatacaaatgaattgtgcacaccaatcagtgatgtcatctgaaaattagtttatatcaaactgatctaaatataccatgcctggaccctgtccactagatgccagtagcacaccccatagtttgtgactataaaaactgttccagacattccaaatgtcccccttgaagaggggagggaggagacagtgcaataaccatccatcatttgagaactactgattwatactgatgacatagttgatgatgataacgatggaaacatcatcatagcaataaaataataaaaacaatttcctcctattcagtactctactcagatgctatgccaagtactttatatacactttcttctgtaagaccaccctatgagacaggtattctaattttccacattttatagtaaagaaactgaggctcaggaaagttaaatgccctatttaaggtcacacagtaagatgctgtcctaatctgttcctgttgctataacagaacgccttagactgggtaatttgtaaataacagaaattcacttctcccagttctggaggctgggaagatcaagatcaacattccagcagatgtggtg

SEQ ID NO: 764640 - DNA, 632 bp, Homo sapiens
gctgcactgttacccatctttatttataataatctcttctggagtctattttccctattacagtactaacatacccagtttcagtggtttatatacaagaggtgttagtaagaggggtaatactttttctgcagataaggggtttagttcttttctccccatgactatataaaacagggattgcaaactccaagtctttagagtcaagagggtaactcaagagtgacactggcctggctgagagggtcagaaactttgggtggggtggtgactggaccagagagtactcacctggtataagaaattcaaaacttaattaaaaatcaaacaaacattttgttggcacgtcaaatatttgcaacagccttcttcagcctccacgtttccactttgtgacttctgttaaggaatacrgctccttgcctccctgcagctggaaaactagagcgaggggggcttgctttctgtcactcatccttttgagtgtgtccctggccccatgatcaaaggccgcgttgtggctgtgctttggctgtccctctcacatccatggagatgctgctgaaaataagaaccttccttaaagaacaacctatgcccttcttatttgaattctctgttaccctagaagt

SEQ ID NO: 764641 - DNA, 621 bp, Homo sapiens
acagtatccaacagggcccttgggcaaagatgttcactttcaaaattcaccatgaggagatttacgtgccatctgggaggattgctatcttgggcccatgatgctattactgctctcatgaaccttattactgagaggacaagaaaggtgagagaggcagaagaagacacatcactggcaaaaactgctctgtctgcttaccatgagtttattttagactcctgcctgcggaaatacaaccagtgtgtcaaggcctatgtggccattcagcatttcccagagactctatgacttctcctagttccaaagactgtctcatagaaaactaacatcagaattcccacttttttcatcaaaattggtcaagcactaattattaaaagtatgaaaaatgctaccatatgttcatcttttagttgccttctaggtaccgtagggcatwggtgatttaagctcccatccatcctgccacgtgcaggaagaaactgacacgaggaaacccactggccagctcttgttctgataatgtccagcaacccttaataggggcaaggtactctacatgcctcagtttactcttgtgtaaatgatacctgtgtgcctcaagtgtttctcaaagta

SEQ ID NO: 764642 - DNA, 670 bp, Homo sapiens
gcagtcgactctaagagacccctccaaagagaacctggttgggcgcagtggctcgtgccttaatcccagcactttgggaggccgaagcaggcagatcacctgaagtcaggagttcgagaccagcctagtcagtatggcgaaagcctgtctctactaaaaatacaaaaaattatccaggcgtggtggctcacgcctgtaatcccggcactttgggagggcgaggcaggcagaacacctgaactcaggaattcragaccagcccagtcagcatgacgaaatcctgtctctactaaaaatacaaaaaattatccacgcatggtggctcatgcctgtaatctcagcgctttgggaggccaaggcaggcggatcacctgaagtcaagaattctagaccagcctggtcagcaaggcgaaagcctgtctctactaaaaatacaaaaaattatctgggcatggcagtgtgtgccagtagtccgagctattcgggaggctgaggcaggagaatggcttgaacccaggaggcggaggttgcagtgagctgagattgcacagttgctctccagcctggggcgactctgtctctaaacaagaaacaaatgagaactcggaggctcagagaggttagagacttgcctgaggcacacaactagaaagtagcaaaatttgatttt

SEQ ID NO: 764643 - DNA, 595 bp, Homo sapiens
tcagctgttccagccagtcatggattccagccttgagccggccccctccccgaaacggtgtgccgtccccctcctccagctctggcctaaaccaagcgccccttcacctgcaccgttcataggagtgatctggggctgcctcagcgtccttcctgttaggaaggcagggctcctgagggctgcagaggagaagtcattctctcctcacaggccctttaatgcctcagtttccccaagtgagcagttagaaggaataggsagtctcataccctaagactggtgtggaaagcgtttggagttctagagcttcggggcagctgtgaggaggccttctaggggggatgggtcaggggcatatgtgggacaggcactctgacctcctctgcccacccctgagaaagctgaatgaggcaagagatagcgagagggggtaccctcccagggtttggggttcaaggtctgagctggggcctgggcaggcaggaggccggccagcagggctggtgccaggctgcgtcagccagggcagaaaggcttcattgttggtggtggagagggctgtcctgctcctacgtggtgaggggcctcgaagctg

SEQ ID NO: 764644 - DNA, 641 bp, Homo sapiens
tccttgttggatggaacctgctgggatttgaggagtgtgtgtgagttttttttgtttccagtatagaaagaccaatgcactcagattgcaatatatatatatagaactatatataataaacatataaaaaaagatgtatatctttttatatgtaatatatacaataaattttactaaaatatatattttttaaatttattttttgggggggtcttgatctgtcacccaggctggagtgcagtggtgcaatcacagctcacctcagcctcgaccgcctgggctcaagcaatcctcccacctcagcctcccaagtagctgggactacaggtgtgtgccatcatgcctggctagttttctttattttttaattttgtagagacggggtctccccctatgttgtccaggacggtctcgaactcctggactcaggctatcctcccacctcagcctcccaaagctctgggattacaggtgtgagccactgcacccagccacatkgcatatctgaaccccatgccacagcctgcccctggggactgggcaggaggtttacaggcactcacacagtgaccccccgccaagcctggaggttctgcagcctggaggaaaacttgccagtagagcctcatgcctcttcgcac

SEQ ID NO: 764645 - DNA, 566 bp, Homo sapiens
tgtcccaagctcggcctccactattccaggggatccagccagtcaccggctcctgcccgtcctttagaaacatccccctttctccagcccactgccatccctggctccatgcctagacaactgctgtcacagccccgacgcctctgtctgcatctagcccycaccaggtgaatattcctcaagcgcccccttgaccatgccacaggctgcttcagccttcaataccccccactgcccatagaaaaaagtcctaattgcaaggcttacagcagcctgttcccactggccttcccacatggacttcctgcaacccacctctctccaccctgtccttgtgcccagaggaccctcacgtactccttctccttcaggtggaaccccactttcccatgaagacccagctcaaaggacccattgtctgtaaaggccccctgactgcccagcctcgacgggcttcccctgcctcctgtgccctcctctggcaaaatacacactgcactgccttctacacctcctcttaatctgctcattgggtcttcaatcttgtggtagcttggctatgagct

SEQ ID NO: 764646 - DNA, 566 bp, Homo sapiens
tgtcccaagctcggcctccactattccaggggatccagccagtcaccggctcctgcccgtcctttagaaacatccccctttctccagcccactgccatccctggctccatgcctagacaactgctgtcacagccccgacgcctctgtctgcatctagcccccaccaggtgaatattcctcaagcrcccccttgaccatgccacaggctgcttcagccttcaataccccccactgcccatagaaaaaagtcctaattgcaaggcttacagcagcctgttcccactggccttcccacatggacttcctgcaacccacctctctccaccctgtccttgtgcccagaggaccctcacgtactccttctccttcaggtggaaccccactttcccatgaagacccagctcaaaggacccattgtctgtaaaggccccctgactgcccagcctcgacgggcttcccctgcctcctgtgccctcctctggcaaaatacacactgcactgccttctacacctcctcttaatctgctcattgggtcttcaatcttgtggtagcttggctatgagct

SEQ ID NO: 764647 - DNA, 627 bp, Homo sapiens
ctcagggggaatgctttcaacttttccttattcagtgtaatgttggttgtgggtttgtcatagatggcttttactgccttaagatatgtcccttctatgctgattttgctgagggttttaatcataaagaggtgctggattttgttaactrcttctattcagatgatcatgtgatttttgtttttgattctgtttatgtgctgtatcacatttattgacttgccacatgttaaatcatccctacatccctgatataaaacctacttgattatggtggatttttttttttgatatgctgttggattcagttagctagtattttgttgagggtttttgcatctgtgttcattggtctataggtttctttttttgttgtgtccttttctggcttgggtattagggtgatactggcttcatagaatgacttagggaggatttttctatatctgttggaatagtttcaataggattgataccaattcttttttgaatgtctgatagacttcagctgtgaattcatctggtcctggacttttttttgggtggcaacttttaaattaccatttcaatcttgctgcttgttattcatctgttcagagtttctatattttcctggtttaatctagt

SEQ ID NO: 764648 - DNA, 464 bp, Homo sapiens
  misc_feature 30: n = A,T,C or G
tctttctttctttctttctttttttttttngagatagagttttgctcttgttgcccaggctggagtgcagtagcgcgatttccactcactgcaacgtccacctcccagattgaagcaattctcctgcctcaacatcctgagtagctgggattacaggcacccaccaccatgtccagctaattttttgtatttttcccacagatggagtttcaccatgttggccaggctggtctcgaactcctgacctcaggtgatccacctgcctcrgcctcccaaactgctgggattataggtgtgagccactgtgcccggccagcatttacctttctatgcctggcttatttcactaggttcattcacattgttgcagatgacagaatttcctgttttttaaggctgaatagtatcccattgtgtgtgtgtgtgtgtgtgtgtgtttgtgtgtgtgtgtttgtgtgtgtgtg

SEQ ID NO: 764649 - DNA, 577 bp, Homo sapiens
gtttacacacagaatttccccaaaggaatatacaagaaaatgataatagtgattggctccaaggaggaaaactgggaagtcaggggagaagttggagggagactatgttttcatacaaaatccttctgtgccttttgagttttgtatcatgtgcaggaattgcctatgtataagacaaaataattttaaatgaattaatgaagataatttttgatattaagacaagaactaaaagttagcttaatactaggaataactggccgggtgcggtggctcacacctgtaatcccagcactttgggaagccgaggcaggcagatcacctgaggtctggagtttgagaccaggcctgaccaacatggaaaaaccttgtctctactaaaaawacaaaattagccaggcgtggtggtgcacacctgtaatcccagctactcaggaggctgaggcaggagaatcgcttgaacccgggaggtggaggttgcagggagctgagatggtgccattgcactccagcctgggcaacaagagtgaaactccgtccaaaagaaaaagaaaaaaactaagaataactaactgta

SEQ ID NO: 764650 - DNA, 504 bp, Homo sapiens
gaggtaccactacttccatattaaaatagcttaaacctaacaaactgacaataccaaatattgctgtattaccagttaagtctcagatacacttttttcttcattatctaatctgaaatcagtctcaattttcacatccataaaatgtggctgctaattaatgcttgtcctcacttgcttattgtgctgttgtgaaaaacaaaagcaattatgtagaaaacattttgtaaaatacaaagtaatttactaacataatgaaaaattattattgtggaatttcagtgaagatttgagaaaagsttcaaaatgcaaatgcttaaagcagcataataaatttttagattaagtatattggtaacttatttttaggcaaaattattgagaaaatcataaaaagcatcattatgaattaattattacaatgatacaaatttatttttaggcagatttattgagaagaccataaaaagcatcattatgaattattacaatgatacaaattct

SEQ ID NO: 764651 - DNA, 589 bp, Homo sapiens
tatcttttgactctacatcctagtacttgtcctaatttggtttatttttgccattcaactattttaaaagtactttctcattgtgctcttgatttatgttccgaatcactaaatatgttgaattgaagatttctcagtcatttggtcatttcttggattattggtcatttgtgtttctcttttgtgaaaagcctgttttcatgtcttttgccctttttaaaaatctattatttgtgcttttcctttttatttggaggaacattttatttatactttttgttacctatatttcaagtagtttctcccagttggtaatttgtctttttgttttatttaaggtgcctttgacagtcagaatgtgaaattaacttgggcatgagattattgggagtcacagrgtaagttagacaggtgcatactggcctcttctccacacatgccctaagttatgtactgccatttgaggaaatggataagaatggtggacaccgagaagggctctggtgtaaatgggagaaatgggcaagaaaattacttacttttttaaaaattgaatttttagaacacaaacataactcttgctggtttt

SEQ ID NO: 764652 - DNA, 618 bp, Homo sapiens
taaaaagccaaatatatgtgttttgtaaagtgatttaaactttaagtgaaaaaaattatatccatgaaagcttgttaaatgttaagaatgtaagttatactatttctgtaagaatatgtaagttatactatttctacaagaataataataggatgtaaaccctattggttcagcatttattcactgacagattataatgtgggacctcttctggtatgagagattcacagtgaacaagacagaggagctttctgtactcacagatctcatattctatgggatggatgttgaaaacatcaagtcaaaagtgtgcggtaatttgtggaagtcaagaggatcaataagagagacaagtataggcaggtattatttaaagaatagctcgaaattactaaattgattattttgcattttttggtgacatacatttttttcaaagtrttccacataattgaaaaagtcactgcactaaagcagcacctagaaatggagaagagaggccaagctatgtgaatgtctaaaaaccacttgagaattggtatctaaaaagaaagttttgcttactagagttttacagcatataagaggtaacatggatcatgataaagtcaagttaca

SEQ ID NO: 764653 - DNA, 479 bp, Homo sapiens
ttttttattgggtactttattctaatacagtataatatgcttcaaaatgactttactttttataacactgacagatattttttccatgtaatgatttagctttaaatataatgtttctaatatttcaacattactgtacatattactaacatttgccttgcttatctttttcaytcctttattttttccctttttgtattttgatttaggcatgtctctttttaacaggatctacttagattttttcctactcacctaagtggaaaatctctgatagttaagaggaaaaatttaattcattttcagtattttttgtttctattaattttagatgggtgggtgcgtgcacatggagatttaggtacatgagctacttctgccattttagttcaatttcctcttgatattttttttcctaggataagcactgagcattaaaaacaacatttctttgattgaaatactctaaagtacggtag

SEQ ID NO: 764654 - DNA, 700 bp, Homo sapiens
gtgctctgttgacagtgtgtcatgtggcccgttctggtgtctggagagctgtgttccacaatacacctgaacacattgatcaggctgggtggtgtggctcatgcgtgcaatcccagcactttgagaagccaagtcaggaggattgcttgagcataggatttcaagcccagtctgcacattatggtgggacgtggtctctgcaagaaattttaaaacagccaggagtggtggtgcactcgtggagtcccagctactggggaggccaagttgagagaatcacttaagcctgaaaggtcaaggccrcagtgagccatgatcacaccactgcactccagcgtgggcaacaaatcaagactgcgcctcagttcaccataggtgatcagtttggctgattacagctgaaaaagtgaggagaatctgaaaataataacaatttaaaagagagataaggccattaggaggataatacaactcaatgcttcttatagcaagtttctttcttattttaatacattggagagaaaacataccaaaacacaaaaattatttatatgggagcaatccatcccacagagttggttgtaaattcgggaaaaaaagagaaaactatctgtttccaccacattatagaaaataattctgtatagcacaattttatcattgaacagtatcatttcacaacccctctccatgaagcaat

SEQ ID NO: 764655 - DNA, 620 bp, Homo sapiens
cagatttcggaagataaggaaatgagtgaaaaagaattaagtccatactaactgcttctccctagagaaataacaccttttcagtaaaatctaaatataggtttttcttttattttgcttttctcctagggtacagtagacatgacataccttttaaggtctcaattatggattatccctgtataacagctragaccaattttaaaaatatatcaagctagtataattaaagttattttgggtctgactaattacagtgtatagtatgaagataaaactgttattgtgtcatctgtctttacataggaatcagttataatttattatttttaagtgaaagaaacaacataaatccccaatgagtggagcttctaggacccaagcatctctccccaaggttcctgagccttgccacttggcagctgtagtgtattcagggtgtaagagcatcaaactgggggcttgtggaaaaggaaagcagaagtgagattgctcagatccacgtgttctaggtaggagatgtaattagaccacagcagtagctgtgaaaacagggagctgtcaatggagttggcatctctttttgaggtggaagcagcatgatttgatgatagattaga

SEQ ID NO: 764656 - DNA, 620 bp, Homo sapiens
cagatttcggaagataaggaaatgagtgaaaaagaattaagtccatactaactgcttctccctagagaaataacaccttttcagtaaaatctaaatataggtttttcttttattttgcttttctcctagggtacagtagacatgacataccttttaaggtctcaattatggattatccctgtataacagctaagaccaattttaaaaatatatcaagctagtataattaaagttattttgggtctgactaattacagtgtatagtatgaagataaaactgttattgtgtcatctgtctttacataggaatcagttataatttattatttttaagtgaaagaaacaacataaatccccaatgagtggagcttctaggacccaagcrtctctccccaaggttcctgagccttgccacttggcagctgtagtgtattcagggtgtaagagcatcaaactgggggcttgtggaaaaggaaagcagaagtgagattgctcagatccacgtgttctaggtaggagatgtaattagaccacagcagtagctgtgaaaacagggagctgtcaatggagttggcatctctttttgaggtggaagcagcatgatttgatgatagattaga

SEQ ID NO: 764657 - DNA, 489 bp, Homo sapiens
taaacttaactaaccttacaactagaacactgacaataactcacacctatctctctgttattctcttatcccattgccatcaatttgcttttcagatcattcagagttgaagtttatgagagtgggataaagaattagctatctgagattaggagctgagatgttttgaaggataataaaggaaaaataggagcacaaagacaaattttttctacttcagaattcagttaagggcttcttgcatactttacatcaacatatcagtcaayatatggacaactaattaaaatgacagaaaaattaaagtttattccccaaattttctttttctgaaaaatcatgagtagaaattaaagcaaggttggtagcacaaatttcactcaaagcatttcttagaaataataaaccacagactttcatgtagctagtctaacttcaattagattccccctgacaaatgcactatctcaactaattataatctttgca

SEQ ID NO: 764658 - DNA, 608 bp, Homo sapiens
atatgtttgctatttcacctaaagaatttctttttttaaaaaaaagtgttatacattgacaaatgacagttgtatatatttataggatacaaaatagtgttatgaattttgagtacaatgtgaaaagattaaattaatctgattaacatatcacctcaaacatttaacatttgtgtgatgagaacgttagaaatgtacttttagtgttattgaaatgtacagaactcgattattagttctattcatcacactgtgcaattgatctaaaracaatcaaacttattcctcctatctgaggcttcgtatcctttgactatcatttttccattccccccattccatggtggaagagcgtcttgtaagcaccattctactctctgctacttagagttcaattgttttacatatcccacagaagagaaagcatgcagtatttgtccgtacgtattgggcttattgtatttaacataatgctctccgtttacatcagtgttgtcagaaatgacagagttccttctctttttaaggctgaatagtattccattgtgcatgtataccacattttcttcattcattcatcccttcatggacacctaggttgattctat

SEQ ID NO: 764659 - DNA, 537 bp, Homo sapiens
tcttccataaatttttcttttaatggaaattctgcaaagttaaaatgtgaattcaatttgggttacagttagaaatattattgatctgcattttattctatgcttttaactaaattactttaaaaacatgttattatataatttattttaatcattatcattaatcatttatgtgaagaaaaagagggaaagagaaatatagagaaagagagatactataaaaatgccaaatatgggactacatgtaatatatataattgaagttaatcttgcagagggaagtacaaagcattgttttcctcaatattattatcacttaatcatctcttttttgacatccaaagatgctttttgcaycacagctctaacataatttctctgcagcaagataagtccccacagctggtaaatagagctgcgatttgaacccaggcattgtgagttcctgaggttcatatgtaactcctttcctcatcgcctcactatgaagtggctctagttatcctattaggcagctcacacctattatatagctta

SEQ ID NO: 764660 - DNA, 635 bp, Homo sapiens
cctgctggaccgctgtgggtgctgccgaaggtgtgtagattgtgtagatgctgttggtgaccagcgagactgtgtccaggtcgggggcatttctttggcactgttcccgcttgtgggtcataaacactggcagcgagttgaattgcttcttacacttcccacagagaaagacatcctcatcatccaatggctggatagcaggggrcgcattgacactctggcctctgggatcagggactgctccttggccatccagtaatgatgggacagctagaatggtctggttgtccattccctccagggccttaaagatcacctgcaccatcttggagcccctatatttcttataattaatcaatagattttttggggaggtagggtttctatgctgttagtcatacctgcaaacaatgatgtttctatttcttctcttccaatcatatttccttaatttatttttctttctttttaaattattcttgtaaggcattgtagtacatgaataaatgtaagtattaatagtgtaccttccttgtgtcgttttttattttaaagggataatgtctactatttccctgtttacagtaatatgtgggtgtgtacatgtgtttttgtgtgtttaacatggaaagttc

SEQ ID NO: 764661 - DNA, 629 bp, Homo sapiens
aaaggcttcaatgagcatgtcagcactcaaaaagttttggattttagagcatttcagatttcagatctttggactggggatgctcaactagtattttctaaagtttctgcaatgaatgtgtatttatttaattgtttaatggtgccattagtatgatgaaaaatttatttttgtaatcttatttaatggtattttaataggaaacaaaaactatacgcaacaatatatcagtattttccttatgtaactctgtataagaaagttgttttatctccactttacatgttattaatttcctgtagtaatattctactgctgtacttctttaaacttattaatcacctgtatttctattcatataaaggcagacaagccttttgttgttattttctgggagaggtgattacaagatattgaagataacgacccctatgcaaatattcaasggactaagcttaatttgtactactgtaatgtgatatcaattatgattttgtttgccgtgtggaagaacaggcagtatgctaaagctacagaaggtacctcttcatagttcatcctctcctaatgttgcattgattggaacagagaccacaagagaacaagggtagatcagcatgaaatgtcct

SEQ ID NO: 764662 - DNA, 613 bp, Homo sapiens
atgcttagaaggaatgctaaatagtgctttgagaggttttatacatgagattcagggaagacttttctaagtaagtgatagttaagctgaggtctgtagtaaatgtagtaaacagtaaaggggagatcagttaaggcagatggartaacttgagtgaagggccatggcattttaaagaaactgcatgaaggccagtattggctgaagtcaagagtagcagagaggggactgattttagaagaggaacagcagacacctgctgtgtactgtgcttgcgttttggaatacaaagacaaacgaaacagtgtcctgttttagtatttacagtgtagtggagggagacagaaaaagaggtaggcagaatgcagtgttacaggcaccctaccagacatctttagagagtgctgtagggagattaaagatagtggtaagtttgatgaaactttgaggaaacggtttctaaataatctccagagttaacttttgtgggtttttgtttgtttttttttagtttctatttgtgatgaaaacacacaagagacatgtaaagtgtttggacgttttccgataacaggtgcttggtggagagtgaaggtacaagtaaagcctgtgg

SEQ ID NO: 764663 - DNA, 613 bp, Homo sapiens
atgcttagaaggaatgctaaatagtgctttgagaggttttatacatgagattcagggaagacttttctaagtaagtgatagttaagctgaggtctgtagtaaatgtagtaaacagtaaaggggagatcagttaaggcagatggaataacttgagtgaagggccatggcattttaaagaaactgcatgaaggccagtattggctgaagtcaagagtagcagagaggggactgattttagaagaggaacagcagacacctgctgtgtactgtgcttgcgttttggaatacaaagacaaacgaaacagtgtcctgttttagtatttacagtgtagtggagggagacagaaaaagaggtaggcagaatgcagtgttacaggcaccctaccagacatctttagagagtgctgtagggagattaaagatagtggtaagtttgatraaactttgaggaaacggtttctaaataatctccagagttaacttttgtgggtttttgtttgtttttttttagtttctatttgtgatgaaaacacacaagagacatgtaaagtgtttggacgttttccgataacaggtgcttggtggagagtgaaggtacaagtaaagcctgtgg

SEQ ID NO: 764664 - DNA, 613 bp, Homo sapiens
atgcttagaaggaatgctaaatagtgctttgagaggttttatacatgagattcagggaagacttttctaagtaagtgatagttaagctgaggtctgtagtaaatgtagtaaacagtaaaggggagatcagttaaggcagatggaataacttgagtgaagggccatggcattttaaagaaactgcatgaaggccagtattggctgaagtcaagagtagcagagaggggactgattttagaagaggaacagcagacacctgctgtgtactgtgcttgcgttttggaatacaaagacaaacgaaacagtgtcctgttttagtatttacagtgtagtggagggagacagaaaaagaggtaggcagaatgcagtgttacaggcaccctaccagacatctttagagagtgctgtagggagattaaagatagtggtaagtttgatgaaactttgaggaaacggtttctraataatctccagagttaacttttgtgggtttttgtttgtttttttttagtttctatttgtgatgaaaacacacaagagacatgtaaagtgtttggacgttttccgataacaggtgcttggtggagagtgaaggtacaagtaaagcctgtgg

SEQ ID NO: 764665 - DNA, 626 bp, Homo sapiens
ccttgtttcaagcaattctcatgcctcaccctcccgagtagcaggcattacaggtgcttgccaccacgcctggctgattttttgtatttttagtagagacggggtttcaccatgttggccaggctggtctcaaactcctgacctcagatgatccgcttaccttggcctcccaaagtgctggcattatagtcatgagccactgcgccyggcccatatgtctattctaatgccagcaccatattgtctttattattgtagctttgtagaaagttttgaaattaagaagtgtgagtccttcaactttgttcttctttttcaagtttgttttggctattatgggtccctacatttccatatgaattttaggatctacttgtcagtttctgcaaagaagcaaactggaattttgttcaggagtgtgttaaacctacagatttgggaactattgccattttaacagtattaaatcttctgactcatgaacacagatgtctttccatttgcttaggaaagacaggctggagtgcagtggtgcaatcacagctcactgcagcctctacctctcaggctcaagcagtccaacctctttaaccaccccacctcaaccactcttgtagctgtgacta

SEQ ID NO: 764666 - DNA, 620 bp, Homo sapiens
tgggattatatgcatgtgctaccatgcccagctaattttgtatttttaatagagacagggtttctccacgttggtcaggctggtctcaaactcccaaactcaagtgatccacctgcctcagcctcccaaagtgctgggattacaagcatgagccactgcrcccggcatgggaagttttaaagctactgattaaatttctttacttgttataggtgtatttagcttttctatttcttcttgcgtcagttttgacagtttttctctagaaatttgctcatttaatctatgttttttaattttctgacatacagttgatcatagtattcctttatggttttttaaatttctgtaaggctggtagtaaagcctctgtttcattcctgattttagtaatttgagtctctttttttcttggtttagctaaaagtttatgaattttaatctttttaaaggaccaacttttggtttcattggttttctttactgtcttcctattctctatttcattaattttaactcttgtcctattacttttaggagggcctcttaaggaggggtcgtatgctgacttaaattgagggttggtcaaagttcaaaagcctgggggaaggaagcttaat

SEQ ID NO: 764667 - DNA, 620 bp, Homo sapiens
tgggattatatgcatgtgctaccatgcccagctaattttgtatttttaatagagacagggtttctccacgttggtcaggctggtctcaaactcccaaactcaagtgatccacctgcctcagcctcccaaagtgctgggattacaagcatgagccactgcgcccggcatgggaagttttaaagctactgattaaatttctttacttgttataggtgtatttagcttttctatttcttcttgmgtcagttttgacagtttttctctagaaatttgctcatttaatctatgttttttaattttctgacatacagttgatcatagtattcctttatggttttttaaatttctgtaaggctggtagtaaagcctctgtttcattcctgattttagtaatttgagtctctttttttcttggtttagctaaaagtttatgaattttaatctttttaaaggaccaacttttggtttcattggttttctttactgtcttcctattctctatttcattaattttaactcttgtcctattacttttaggagggcctcttaaggaggggtcgtatgctgacttaaattgagggttggtcaaagttcaaaagcctgggggaaggaagcttaat

SEQ ID NO: 764668 - DNA, 620 bp, Homo sapiens
tgggattatatgcatgtgctaccatgcccagctaattttgtatttttaatagagacagggtttctccacgttggtcaggctggtctcaaactcccaaactcaagtgatccacctgcctcagcctcccaaagtgctgggattacaagcatgagccactgcgcccggcatgggaagttttaaagctactgattaaatttctttacttgttataggtgtatttagcttttctatttcttcttgcgtcagttttgacagtttttctctagaaatttgctcatttaatctatrttttttaattttctgacatacagttgatcatagtattcctttatggttttttaaatttctgtaaggctggtagtaaagcctctgtttcattcctgattttagtaatttgagtctctttttttcttggtttagctaaaagtttatgaattttaatctttttaaaggaccaacttttggtttcattggttttctttactgtcttcctattctctatttcattaattttaactcttgtcctattacttttaggagggcctcttaaggaggggtcgtatgctgacttaaattgagggttggtcaaagttcaaaagcctgggggaaggaagcttaat

SEQ ID NO: 764669 - DNA, 620 bp, Homo sapiens
tgggattatatgcatgtgctaccatgcccagctaattttgtatttttaatagagacagggtttctccacgttggtcaggctggtctcaaactcccaaactcaagtgatccacctgcctcagcctcccaaagtgctgggattacaagcatgagccactgcgcccggcatgggaagttttaaagctactgattaaatttctttacttgttataggtgtatttagcttttctatttcttcttgcgtcagttttgacagtttttctctagaaatttgctcatttaatctatgttttttaattttctgacatacagttgatcatagtattcctttatggttttttaaatttctgtaaggctggtagtaaagcctctgtttcattcctgattttagtaatttgagtctctttttttcttggtttagctaaaagtttatgaattttaatctttttaaaggaccaacttttggtttcattgrttttctttactgtcttcctattctctatttcattaattttaactcttgtcctattacttttaggagggcctcttaaggaggggtcgtatgctgacttaaattgagggttggtcaaagttcaaaagcctgggggaaggaagcttaat

SEQ ID NO: 764670 - DNA, 474 bp, Homo sapiens
aaactgatcattgttccttatttttttcttggttatagaatgacatttccatgaacactcatttctggtttagctatacacaataaacacaatagctattaccaattatttagtccctactgagcagttcatcaaggatttgtgaaggcaatggcatcaattgatattccttcctttccttctcctgcctgctctgtttaaagataacatgttctaagtctaggcatggaaataacctaccttcaggccattgcctcsaaaatgcagtttctatcttcacctcctgtagcccatagcaaaatgaagttatcgctctctggtgggttagctactaaaatgagaattcaaagtttacactgtgcaggaggaaggatagtatgtgtagagctttctggatgtcctgttcctttcaagctttgtggacttatttccttgaagattttgaggctagataggcagctacagtggtgatgt

SEQ ID NO: 764671 - DNA, 641 bp, Homo sapiens
cttatatactatttgaggaacttcatgtctatttagtaaagaaaatgattgtctcagcagttgttcaatttctctttattgtctaagaggaaaggtaattccgccttaagaaagagcaaggatacaagaacataatgaaaaatgcaattgcatacaaaccacaaggttctgaaaagttagttaatttctttattgtttctacattatctgctactaaaaagtaatttccccatatttatacgacccattacagactaaaatatagcctttgaaagagacaagtgtgatattttttccttgattgatgaccgttagatcatcaagttcccatggtttgtcccagttctcccaaagttgtatctactcaatcacttgtttgagctagttttgacttggtcagcaaaattattggaaaactaggttccataatttagtgrcacttgggacacactcatttgtccaatagacttttgtatctgatattccacagttaaatctgtggcacctggtttgaaatgtttctggttggctccatcagcacctgccccatctaatctctcggtctaagcttcacggccacaatctagtaccttgataagggatatgatggtgatgacaatgacaatgaaaaacaaaattta

SEQ ID NO: 764672 - DNA, 601 bp, Homo sapiens
cccccacatggggaagcaaaacaagactcaatgtataataaaggtgctggcacccacagactgttcaccagcctttactactttacacggtaagtgctggttaagtatttgctgaactgacaaatagtaatataaccaagaaacaattgctgcccaatcccatgaacactcagttaaaagtttggagccaagatacttcaactgcttaaaaactayacaacttcaaaaccagctcattaaaaaagaaagcaggagtgggaggaaaccctcagtcctcggcctgaacgcttggtggctgtcgcttcaaggcatgctgcatgagacgcataagcaaacgaatttcagatcatcagaaagatcttcctcattttcttctggccctgacccaccttccgactttctccttgacactaacttccttgtcaaagcctcgcgtccattaagcatgtctggtatttgatctctgtaccttccatcccataactagagtgcccttgtcacagatcttcatcttttgcaattctgtcttctaaagtcagaaaaacataacatcctccacaaagacttgtgcaaggggcccatactctgcggccccagggag

SEQ ID NO: 764673 - DNA, 492 bp, Homo sapiens
tgatactcaaaatcctcctgtaggttgtccaatgccctttggcatagtcataaatatacatgcaattttatgattataagaatttggaaaacttaatcatttcaatttgctatggctgattaattctgctatggtctatggtactggaaacagaagagtactcagatttctggctgctaagagctttcctgcctggagctgtcttcctcaaagcaacagcttggggaatacaaattttctaccactacaaccactctgcaggccacccatctgtaactattctctgggtagaacaacagttagagtaacatacttttargttagtttttgtgagtgtaaacttataactggatgatgaaaagcaagtaaaactactttgtaatttttggtaaggatcaatgggttatatcatctaggtccagagtaatttttaactaccgttaatttccagagaaggctttcccatagtcattccattagtccaatgcttat

SEQ ID NO: 764674 - DNA, 521 bp, Homo sapiens
ttagcaaagagactggtggtactttggacctgccctagagatttgtggaactttgaacttgagagagatgattaagagtatctgatggaagaaaattctaagcagcaaagcgttcaagcagtgacttgggtgctgttaaaagcactctgttttaaaagggaaacagtgcataaaagttcaggaaatttgcagcctgatgatgcagagagaaaaccccattttttgaggagaaattcaarctggctgcaaaaaatttgcataagtaacaaggagcagaatgttagtccccaagacaatggggaaattgtctccagggcatgtcataggtctcatggccacccccctcatcacagacccagaatgctagaaggaaaaaatggtttcatgggctgggcccagggtctccatgctgtgtgaagcctagggacttggtgccctctgttccatctggtccagcagatgtatggaaatgcctggatgcccagggaaaagcttgttgcagtgacagcgccctcagagag

SEQ ID NO: 764675 - DNA, 579 bp, Homo sapiens
aactgcaatttcaagaaaatgttctaatgcatatttaagcctgtcactacttcagttgccagcgtttcagctaaaatatacaatctatctttaatttcctttttatttctagccctagggatttctttctttccagcttagttagctgttaaaattttccttacatgttttatctagcatttttatgtgtatgtactaatcaatcttgtttaaatctcacagtctttaagtcttgattggaaatgaatatagccaaatcttgctggcctaaaactgtttcatttctttgagaaaatgtgaacaaattmcctaaggtcattttctgaaagcagccataattttcttatttcagaattcctacagctctttgttagacaaaaagattgagcaccaccaggttagaatttctcatcttaaacatatgcttccttattctcatgaaaatactctgtctttatccaaagagattgttcttaggatcccaaaataaacatatttcaccttctgaaacatatttacagtctcgacaataaacatcatgtaatagtatcataacctgatagctaccagtatagccaa

SEQ ID NO: 764676 - DNA, 631 bp, Homo sapiens
ttattcctctgagttattttacaaaatctatgtcatcacctttggttcagtaaccataaatgaagtccatactatgttctaggattgggtcactgtctaaacattgtgttatgagattgtgtgctaagatgttgttggctaagatgattaattaattagggtttctttgtaaatataaaaacaagactcacctttacttttcactatttaattcaactgatatttttatcttcattcacaagaaattcaaggattktttttccggaaaataattatatagtttactacttgtaacacatttaaagagaaaaaagtagcttcaataacatgtgttccctgaggaactggtaggtgatatggctaccgtttgatgataggtcagtgcaggagagttgagattcatgagtaaacttgtaaacagctggtaacccatggtttatatgtatgcaaagaaataaaacaaactaaaagtctaataaattttttaagtaccagaattccatgctttgtgcaagtgagaaaactgaaggaaattgtatctctgaaaaaaagcataattacgcaatgcagaaatatgagcatcgtcccacctccaagataaaactttaagaatttaatatgtctaattcct

SEQ ID NO: 764677 - DNA, 383 bp, Homo sapiens
tcagagtgtggcaggggacttcatgagataggcaaagatagattggcaaagataaacttgtttggagaatctctcctcagcgactagttaagacgggtatggtacatttctttctaccatgtccacttccttctttctcctcatgaagcctggcttgccaatttatgtcataggtgattatgaaataattagaataaaattatsgtatgattttgtcttttctttgtacttttttctttctttgatataattctgacacatctattagccttttcattttaaataaaagaattttaataaaatacattaaaaaggattcaaaaacacataatggctaaatagctatagaatgttcaattcatcaacaaaggtagaaatttaca

SEQ ID NO: 764678 - DNA, 614 bp, Homo sapiens
ccagttcgtaacagtccgcaaactggtaccagtccatggcccggggaccaggcacccctgttagacaaccaccattttgccctcagaaattacttcttatacttactgtcaattttaaaatactttacatttcctccccaaatatattttatcatattcagtccttgaatttccttgatcacttgtagtaagtaaaggagtatcctgggaatccatcggtcatctccccggactatggaaggtgggaaaataatagcataggaaaaggcaaagaggcaggaggaaacttcacccagacttagtcactctyacccaccttccaacaaccctgagtcactttctcttaaagtgtgaaataatcctttctgtgacctgtcaacaaaatacagaaacaacagttttgaaatgcctaatatataggccccaaaatattcacagctaattaaattcagttgataattcaactgcaaatcataaatatacatgctacttgagattctgcctagaatttaattttcatcctaattctagcaataactaaccatttttccactatatcaagttttgggttttaaacactaggtcaaacaaacacaatcttgaggtttcagtct

SEQ ID NO: 764679 - DNA, 659 bp, Homo sapiens
agctgtctgtcttagttcctttatgctgctgtagcaaaatacctgagactcagtaatttgtaaacaacagaaatttatttattatagttctggaggctgcaaagtccaagaactgggcactggtagatttagtgtctggtgagggcctgttccactgatggtgggtgtcttctcatggtagcgtcttcaaatggaagaagacagaagggcaaaaaaaagcytaaggttgttccttccagcccttttataaggcactaatccattcatgagggcagaaccatcacaacttaatcacttcctaaagggcctctctcttaacaccaccataataggggttagttaagtttcaacatgaattttgaaggggacatattcaaaccatagctttgtcctagtagttgtgaggtagtatctcactgttgttttaatttgcatttccttaatggctaatgagggtgagcaccttttcatatatttattggccactcatttgtcttctttgcagatatgtttgttcaaatcttttcttcctttttaagttggattatttgtctttctattattgagctgtaacagtttgtcatgtattctggataccactcccttatcagatttatgatttgctaatgttttctctctctgtgagatgtcttcacttt

SEQ ID NO: 764680 - DNA, 659 bp, Homo sapiens
agctgtctgtcttagttcctttatgctgctgtagcaaaatacctgagactcagtaatttgtaaacaacagaaatttatttattatagttctggaggctgcaaagtccaagaactgggcactggtagatttagtgtctggtgagggcctgttccactgatggtgggtgtcttctcatggtagcgtcttcaaatggaagaagacagaagggcaaaaaaaagcctaaggttgttccttccagcccttttataaggcactaatccattcatgagggcagaaccatcacaacttaatcacttcytaaagggcctctctcttaacaccaccataataggggttagttaagtttcaacatgaattttgaaggggacatattcaaaccatagctttgtcctagtagttgtgaggtagtatctcactgttgttttaatttgcatttccttaatggctaatgagggtgagcaccttttcatatatttattggccactcatttgtcttctttgcagatatgtttgttcaaatcttttcttcctttttaagttggattatttgtctttctattattgagctgtaacagtttgtcatgtattctggataccactcccttatcagatttatgatttgctaatgttttctctctctgtgagatgtcttcacttt

SEQ ID NO: 764681 - DNA, 654 bp, Homo sapiens
gcaccagcagcagaatcttgggaatttgttacaaatgcattctggggtcttgtcccagacctactttgaaactcttggggtgatgcacagccgtttgtgttgcactaagctctcaaggtgattctggtacttgataaagtttgggatcatggctttagttattgccactttgcaacaatccaaaacaataagctggggtaagaaatttccattaaaatcctctctttttgtgggctgtatgtgagcagcttactcttgagagaaatgattagcctttttctttcttataaataggagataattacagaggcctgtwttaaggtaagagagtagcagcatgctcctaactaatagtcatatcttaagttgtcatccctttcctctattaggattcttgtttgcggttaataactacctttccagtatttcaagattcctgactcttaagtcaactgaatagaagtcaaacttagagtttctctaagcaatgtcttattttcttccctcatgtttttagatgctagtataaactctgttttctctctctcaagcaggaatttattgaatataaattcaataaagtcaacacactctaacattctattttttttctcctaagtcctttaaatgctaacatttcaatgtacatgatct

SEQ ID NO: 764682 - DNA, 629 bp, Homo sapiens
gtttgcttatgagccataaaaataagagtaaagccaacatgtaatttttctttacattgttaagagtgcagtttttctctctattcattatacttttggcaaacattgctgtttgccttcccaactccataaatcattttttccgtaacaataacaaaatttatctacccaactccataaactactttttctccactaacagcaagaaaattgggatacttttgttcccagttaaaaatactcaaccttttatactccattggygctaaagttggctctattatcctgttctggtaaatgtcacataactagaaatatactagctaggatttcgaagaaatccattgtttccctgactattttaaagtgaaaaactcaaatagaatgtatcttttgcttttctaacttccacctttttctgcctggaacaatgatgatatacctgaagatacagctgccatcttgcaatcatgaggagaaatttgcatataaagaagtctaaagcagaaagttagaaggagcttcagtttttgtttcttttaacacctgcaccaactcttggcttacctctagctgtcttgttatgtataaaattaattccctgattaattcactgtaatagattattc

SEQ ID NO: 764683 - DNA, 544 bp, Homo sapiens
tggttggcttaagcagaagagaaacataattcacatatattttgaatgatcactctagctgctatgttagaaacagaatcgatggggaaagagtaggggcagggagcctatttaggtagctattacaatagtcctgcaaagtatgactgtgactgcccaggggtkgtagaagggctgatgaatgcctggagtctgaatttactttgaagatagagccaacataatttgttaatatgaggtgggagaagtgtcaagaattattccaattctttggtctgagcaactatacataatatggaatagagtggtcctatactacaaagaagaaaactgagagaagctcttggaagggtgggatgtagaaaggggctgctgctgctgatggtgatgaaataaagaattccccttagaacatgctgagttcaagataactactggggaaccaaacagagagatctaactgagagtcagatacaaaaatccagagtttagcagagaggttccaggctagaggtatacgtttttgagtcatctgaaaatagat

SEQ ID NO: 764684 - DNA, 654 bp, Homo sapiens
gtctattatatccttcccctattatgtgaattttcaggttccccactggagttgtgtgtttggaggcaggtttttccctctcatgctttgggaactcactttttcagctgtctcacagagttttcagtggtaagttgcttcttccgcaggacccgtgaactttttcagtcttcctggcatgttcctgtggtggttcttggagcaaaagttcatggcgtgagtctccacacgctgttccgtccatccaagtrggagctgaatgttagtcatgactcctatccaccattttccagagaaatgcaaattaataccacaataagttattacctcacacttattagattggctatcacaaaaaaaagaaagataacaagtattggtgaggatgtggagaaaagggaacccttgtacattgttgtagcattgtaaattagtacattttagaaaacagtatggagattccttaaaaaactaaaaatagcattatcacataactcagaaatcccactcctgggtatatatccaatatagtgtatagtatattcaatatagtgtatccaatatagagtataatatatccaatatagtatatagtgaatatagtggtagccaggaagtggttaatgtgggccttgggcaaaacccagtaccttg

SEQ ID NO: 764685 - DNA, 559 bp, Homo sapiens
taaaagaactagaatcatcttggtccattccaaaatttctaaataattcagaagacagaaagaagtgaggcctaacatacacacaaggatagacaggattttgaacagccttatgtgccttttcttagagatttaaaaaaaaaagggcaggcaatccaaagacatacttaggatcttgaattgacaagatgtggtggtaattcccaggtttctggcttggagaacagatagggaaactagaaagaagagtaaggggtcaatactttggaagtgagtaaagcaaaacaaaattaaacaacggaaaaaacacacaaaaattataggtgaaattttgttttatacattatacacagtgctytacataaatataatccttattattgcccctgtaaatatgatcactttcattttctgatgaggagattcatgtgaaagtttaaaaagcctacctaaaataataccgacagaaaagtgctcttgatcccacctattctatgctaccaaactgctctcccaaaaggcagttagaaaaatttcaatgcaagtagtatagtgtagt

SEQ ID NO: 764686 - DNA, 632 bp, Homo sapiens
ttatgcaggtacaaatgtctaaaattcttctccataaattttctgtggctgttaaggtagaaaatagctggagcttgtgagttaggaaaataaaattgtgggaaatcaggtactgtttccaattatggcatagtcagtggaaagaacagtaaaacataattgaagaaatctgtttgtcaatccttatgccagtatcacacaatcttagttcattttgtgctgctgtaacagagtcccacagactgggtaatttataatgaacagatatttattggctcacagttctagaggctgggatgtccaatatcaaggtgctggcatctggcaggagccttgttcctgcttcatagcatagtggaaggcatatgccagcagggtgagagacagcaaaaagggttaaccattctcagtgatamtggcattagtcagtttgtgaggcaccctcataacttaaacacctcttaaaggtctcatctcacaatacaatcacagtgacatttacatttcaacatgagttttggaggaaatacattcagacctagcttatactatcctgattaccataattggttttgtcttcttccaactttctattttttttaaaagaatgctttggctaatctgggatattt

SEQ ID NO: 764687 - DNA, 546 bp, Homo sapiens
aaaataaaatcaaaacaacctttattctgcagtgaaaaaaagataacttcacagaaaacagtcaatgtaacatctgcatagtttcaaaaaggaaaagaatgacttgcacttttcaaattaaacattatgatgttgtttaaaagattctcctgattttaagagtttcataatgtgagaaaaaaggaagtaagcctgcaaacatagtaaaaaattattcttttaaaagatattatttttccttactattgggcaaaagccttttaaaactggtaatgcttaatggactttcaggttagtatcaaactggaacacaggaaggagaattcaatgtgttctttagatacatcaaaactatactgaaatgtaaatascattatatattcaactacaggatttaggaaaacaataatttctgtaagattaaaaggaattctcttgggaaccattccattcaacctcctcattttatgaacctgggaacttggcaaagaggttaaagagaccaaaggctacatgaccaacagcttatgaaactattactttgaa

SEQ ID NO: 764688 - DNA, 538 bp, Homo sapiens
aatgccacttatttcaaattgtttcactttggcttgctggaaagtagatgtattttagagcaaggtcatttggtatatttgtaaaaatataccagactttcttgattattttctttaaattaagcttactttttgaaatattatttattttaaagtaagattttatataagttctctaaatagaataccactatcacttcccataaatagaagataaacccatttcccgttttgggaaatcgcttagaagaatgwatttggaatttggaatcagaagaccggagtagtcatctcagctctgctacttctgtgttttctggttctgggaaaatcacttgacttctctgagtcccagtctcttcataaaaaaaaaaaaaaaaaaaaaaaagggacgggataacaatgtcttctttctttctcaaaatgacattaactaaatcaagctgcaaagggaaatatgtggttctttttatttgtaagcttaaagtccaagcagttatgacaaatgggtttcacctgaagtgcaaatgcccattta

SEQ ID NO: 764689 - DNA, 656 bp, Homo sapiens
agatgttatttaaataagtacactatgtttcaaaaatatttttgagtcatttcaggcaaataaacaacctccctttctcaaaaaaaaaaaaaaaacttacttgttataggttaatgcttgaattaaaatgtttgttgtttgacgtatggaatgctgcactcttaattgttaatatacaggctcttccccattaataagtcaaaaggaaaaatcatttaracactttaaaaagaccagacactacaaaaagcacctaataaaacagattaggactcaattcttaattctatcattttataaatgttaaaatatatataaaaaatatattacactctatcatagagtatatgttatatattttacatatcatatataacatatactctacataacataatagggttttaagtttataacttttttttaatatataaacatatatatatcctacaatgctggtaatatgtatatatgctcgtactatatatatatacacacacaaacatatatatatacttgtactacatatatagtacaagcattgcaggatatatatatgtatatattatatctgtaaaagctaagtcagatttcactttgatacatgtaaaccaggaattctatgtttcaaaaaacagtagttgtggtcaacttta

SEQ ID NO: 764690 - DNA, 656 bp, Homo sapiens
agatgttatttaaataagtacactatgtttcaaaaatatttttgagtcatttcaggcaaataaacaacctccctttctcaaaaaaaaaaaaaaaacttacttgttataggttaatgcttgaattaaaatgtttgttgtttgacgtatggaatgctgcactcttaattgttaatatacaggctcttccccattaataagtcaaaaggaaaaatcatttaaacactttaraaagaccagacactacaaaaagcacctaataaaacagattaggactcaattcttaattctatcattttataaatgttaaaatatatataaaaaatatattacactctatcatagagtatatgttatatattttacatatcatatataacatatactctacataacataatagggttttaagtttataacttttttttaatatataaacatatatatatcctacaatgctggtaatatgtatatatgctcgtactatatatatatacacacacaaacatatatatatacttgtactacatatatagtacaagcattgcaggatatatatatgtatatattatatctgtaaaagctaagtcagatttcactttgatacatgtaaaccaggaattctatgtttcaaaaaacagtagttgtggtcaacttta

SEQ ID NO: 764691 - DNA, 656 bp, Homo sapiens
agatgttatttaaataagtacactatgtttcaaaaatatttttgagtcatttcaggcaaataaacaacctccctttctcaaaaaaaaaaaaaaaacttacttgttataggttaatgcttgaattaaaatgtttgttgtttgacgtatggaatgctgcactcttaattgttaatatacaggctcttccccattaataagtcaaaaggaaaaatcatttaaacactttaaaaagaccagacactacaaaaagcacctaataaaacagattaggactcaattcttaattctatcattttataaatgttaaaatatatataaaaaatatattacactctatcatagagtatatgttatatattttacatatcatatataacrtatactctacataacataatagggttttaagtttataacttttttttaatatataaacatatatatatcctacaatgctggtaatatgtatatatgctcgtactatatatatatacacacacaaacatatatatatacttgtactacatatatagtacaagcattgcaggatatatatatgtatatattatatctgtaaaagctaagtcagatttcactttgatacatgtaaaccaggaattctatgtttcaaaaaacagtagttgtggtcaacttta

SEQ ID NO: 764692 - DNA, 627 bp, Homo sapiens
taagatacaaaatagaatattaagattaaagattgatgattatatgaaataaaaaatcatcaaataagagaaagataaaccaaaatcatttattttaaaaattatttttgaatgactaaatagaaactcattttttataatgtaatgagtattgtattttaggatcattttcccaaagagcttccactgtaggtatttttgtcaacaattcatgttaattatctgtcacaattaggtagttagattcatccatccattcattcaatgaatacaaatggaatttctacaatattcccaggaacattgctgcacatagaaaacacagcagtgactaaaataggtattgggcgctgccccraaagggttcaagctctggccgaccttcccacttaacccacatatttgaagcattacaaatacttatgtcaatattgatatttttcagtatagaaagaaattgtgtaaggtctagattacaaatgacatgagaaatatttaagtattaaaaatattctggtaatggattctgttttcccattttaaagaggcaaattgaaaattcagagttttttaggaaaatgccttattatgagtgacaatatttacacactgtttaatttcatcggt

SEQ ID NO: 764693 - DNA, 627 bp, Homo sapiens
taagatacaaaatagaatattaagattaaagattgatgattatatgaaataaaaaatcatcaaataagagaaagataaaccaaaatcatttattttaaaaattatttttgaatgactaaatagaaactcattttttataatgtaatgagtattgtattttaggatcattttcccaaagagcttccactgtaggtatttttgtcaacaattcatgttaattatctgtcacaattaggtagttagattcatccatccattcattcaatgaatacaaatggaatttctacaatattcccaggaacattgctgcacatagaaaacacagcagtgactaaaataggtattgggcgctgccccaaaagggttcaagctctggccgaccttcccacttaacccacatatytgaagcattacaaatacttatgtcaatattgatatttttcagtatagaaagaaattgtgtaaggtctagattacaaatgacatgagaaatatttaagtattaaaaatattctggtaatggattctgttttcccattttaaagaggcaaattgaaaattcagagttttttaggaaaatgccttattatgagtgacaatatttacacactgtttaatttcatcggt

SEQ ID NO: 764694 - DNA, 622 bp, Homo sapiens
ttttttaaggaatctcagggtttgctgaatttattttcaaagcttccatgctcaggataagctatttattttagaggcctaaattaaaaatgcactgttattttggacaaacaccctttatctccacatttgggcaatgttgaacaatttttaagatttggaagtaatatttgcaattggtccatatttgccataatcatagaatttggaacttggaaaaaaaatcttagagttaatgtatcttgcaatgtttagagttttttggtatttgaaagtataagcttaaaaaaytgatagtttcaggcttttaaaaataagtctgaattcatttttataactttccttctttttaacatttttaaaatgaatttttattttattttattttattgttctatttttggagacaaggaatccctctgtcatccaggttgaagtgcagtggtgcgatcttggcttactgcaacctccacctcccagactcaaggattctcccacctcagcctctcgagtagctgggattacaggcacatgctgccatgcccagctaagtttttgtatttttgtaaagactggattttgccatgttgcccagactagtcttgaactcctgggctgaagc

SEQ ID NO: 764695 - DNA, 605 bp, Homo sapiens
tggggaaattgaactactacttctcaatggaagtaaagaagagtatatctacaacacaggagatccttcatgatgtctcctagtattaccatgttctatgattaagctcaatgcaaaactaaaacaaccaaatccaggcccatccttttagaaacgaaggtttagttgtgaccaccctgcaagttctacaaccagtggaagttcttgytaaagagaaaggaaatacagaatgggtggtagaggaaggtggttacaaataccagctatgatcatgtgactagttatagaactaaggactaaaattatcctatttcctccttattttgttttgaacatgtctgtgtgtgtgtgtgtgtgttttcatcaaatatgtttgttttctttcttttgtttacatctcagtatttatgttctggatatcaggagaggattaaacaccactcaaagaatgtcttagtgcatctgtgctcctgtaccaaaatacctaagactaagtaatttataaggaacaggaattaatttttcacagttttggaggctgggaagtcccaaatcaatgctcccaaggcatttgcaagccttcttgctgcatcgtcacaaggcgg

SEQ ID NO: 764696 - DNA, 589 bp, Homo sapiens
agagctaccagaccacagaaataaataaaaagcatccagataagaagagatgaagtcaaactatatctccctttgcagacaatatgattctatacctagaaaatcccatagtctctgcccaaaagctcatagatctgataaacaacttcagcagcatttcaggatacaaaatcaatgtacaaaaagcatccaatatctaatctgagagccaaataaacaacmaaattccattcatattagccacaaaaagaataaaatacccaggaatacagctattcagggaggtaaaacatctctacaatgagaattacaaaacactggtgaaagaaatcagtgaaaagatccctacagtgaggatttcaaaacactgctgaaagaaatcatttcatgaaatggaaaacagtccatgctcatggattagaagaatcaatatcactaaaatggccacattgcccaaagccatgtccaaattcagtgctattcctatcaaaccatgaatgacagtttttatagaattagggaaaaaaaactattctaaaactcatatggaaccaaaaagagcctgactaatcaaataaatcctaagcaa

SEQ ID NO: 764697 - DNA, 589 bp, Homo sapiens
agagctaccagaccacagaaataaataaaaagcatccagataagaagagatgaagtcaaactatatctccctttgcagacaatatgattctatacctagaaaatcccatagtctctgcccaaaagctcatagatctgataaacaacttcagcagcatttcaggatacaaaatcaatgtacaaaaagcatccaatatctaatctgagagccaaataaacaaccaaattccattcatattagccacaaaaagaataaaatacccaggaatacagctattcagggaggtaaaacatctctacaatgagaattacaaaacactggtgaaagaaatcagtgaaaagatccctacagtgaggatttcaaaacactgctgaaaraaatcatttcatgaaatggaaaacagtccatgctcatggattagaagaatcaatatcactaaaatggccacattgcccaaagccatgtccaaattcagtgctattcctatcaaaccatgaatgacagtttttatagaattagggaaaaaaaactattctaaaactcatatggaaccaaaaagagcctgactaatcaaataaatcctaagcaa

SEQ ID NO: 764698 - DNA, 624 bp, Homo sapiens
aaggagaaatatttagctgaattcctttttaaaattttttggattttgacacagattaatatatttgaaattcaaaaagttaaatgaaaaaatcacacttagaaagtcctcgaaatgatagcacctctatcccaacaaaacaaattatcatacattgtatttttatatagaactattttatcttatataatgacaaataatgagagttgaaaaatcaagcaggtgaatttatgtcaacatgccacaaatttaaaaatagagtaatcaaatatatgttattttattacagtcttggaaaatcctcaaaagtttgttgaagggaacaaacttttgctgctggccatgaaggagtaaatggaactggacttgtttgtacaccataaaaactagaaaacyaaacaaaaaatacacgaaacaattttcaaacattgggcaacagggcaaaggaggacatgtttgagaggtaataaaaaattaccaggcataacgtaatggagtactatgcagctgtcacttttttttttaatgagaaagactgctttgaacttatacagaatgttttccagggcatgtttctaagtaaaaaaatgtaaggcccaaagaaattgtctatattagatgata

SEQ ID NO: 764699 - DNA, 624 bp, Homo sapiens
aaggagaaatatttagctgaattcctttttaaaattttttggattttgacacagattaatatatttgaaattcaaaaagttaaatgaaaaaatcacacttagaaagtcctcgaaatgatagcacctctatcccaacaaaacaaattatcatacattgtatttttatatagaactattttatcttatataatgacaaataatgagagttgaaaaatcaagcaggtgaatttatgtcaacatgccacaaatttaaaaatagagtaatcaaatatatgttattttattacagtcttggaaaatcctcaaaagtttgttgaagggaacaaacttttgctgctggccatgaaggagtaaatggaactggacttgtttgtacaccataaaaactagaaaactaaacaaaaaatacacgaaacaattttcaaacattgggcaacagggcaaaggaggacatgtttgagaggtaataaaaaattaccaggcataacrtaatggagtactatgcagctgtcacttttttttttaatgagaaagactgctttgaacttatacagaatgttttccagggcatgtttctaagtaaaaaaatgtaaggcccaaagaaattgtctatattagatgata

SEQ ID NO: 764700 - DNA, 614 bp, Homo sapiens
tggtaattagcacatagtaatttctcaataaaaatatgttggaaagtaaatgtttaagtactgttttatgtgtaattgactcagaacggtaattaattcaaaagtttatatcatagattgctgtaatttgtttttttctttattttctcttttcttgggaaggaaaaaaaattcttacctaaaaggtggcatcttttctggtaatattttagtcaatgtggcacctgagaggagagaatttaggcaaatagmtttccataaaatttctcaaatccaacaatgtagacctcctgtgcctaacttattagtgtctcggggttaaatatttaaaatggccatttctgctacattttcaagtctattctggagttccacggttttcagataaagagaagagagaagatagcaaagaatgggtactcttgaaatcaccataaaaaactgtaggcctatccagctttgggattgtgggaactggacatatttaacagttcgtaccactgatctggtctagtaccaactgtttgagaaacttttagaacatgtctgcaatttaccattgtagctctgttctcctattctttcaaaggtttaggttagtgatacttcactag

SEQ ID NO: 764701 - DNA, 614 bp, Homo sapiens
tggtaattagcacatagtaatttctcaataaaaatatgttggaaagtaaatgtttaagtactgttttatgtgtaattgactcagaacggtaattaattcaaaagtttatatcatagattgctgtaatttgtttttttctttattttctcttttcttgggaaggaaaaaaaattcttacctaaaaggtggcatcttttctggtaatattttagtcaatgtggcacctgagaggagagaatttaggcaaatagatttccataaaatttctcaaatccaacaatgtagacctcctgtgcctaacttattastgtctcggggttaaatatttaaaatggccatttctgctacattttcaagtctattctggagttccacggttttcagataaagagaagagagaagatagcaaagaatgggtactcttgaaatcaccataaaaaactgtaggcctatccagctttgggattgtgggaactggacatatttaacagttcgtaccactgatctggtctagtaccaactgtttgagaaacttttagaacatgtctgcaatttaccattgtagctctgttctcctattctttcaaaggtttaggttagtgatacttcactag

SEQ ID NO: 764702 - DNA, 601 bp, Homo sapiens
tgtacaactaaattgagtagttgagaacttccttgcatctcttaagaaaattctttacttcccattgtgctcagaataaaatcaaagttcattttcatcacctgtaaagccacagctacttctccattaaatgaatgaaaacaaacaaatacaaagtcttttgactatgaagtctatatgtttaaaatcttyttttccaatcctggtaattgattatatggagtcaaataagccatagcaattaagctccagaattcactggggaaagaaaaagggaactgacttttactgaacatctaccatactcaattagtgtcaggaacgtttgcgtacacatcaaccttgtgaggcaggtgttatcattctcattttccggttaggctaattgggaatcatagtggttgactgatttttcaagttaactaggtgagaagtaaaagagcatgaattcaatcctagataggtttgaagagccaaaatttatgaaattgaaatgtattatcttacaggtatagccagtgtttataatacaaagtgtttgatactttttcaagaagcttatgatacagtggagaaagtaactcctatgtaaatatctctg

SEQ ID NO: 764703 - DNA, 522 bp, Homo sapiens
acaaaccaattcatgtagcaaaaaaaaaaaaaaaaacctaactggtagtatgcattgaaacttaacacaaagattctttttcctgttactgtaggagcaaaacataaactgactatacctatcttaatcagtttcacatacaagatccctgaaaaatagtgggtatggatgggcaccaggtgagccaccatgaagtttctctaccacaaccaccacccctgcccctggtaaaaaaagaggaagttaaaaggctttggtgattccttactccagtctcagcagtggtgaaagttctcttttgaaggttgacttattttaaaaagctatatagaygattgtagttgatttatagctctgaatcctaggctttaggcctttaacatatacacagtttgacctttcagtagttgcagtttaataatagtaaaattgaagagtaggtgtttattcccggttaaagccaatacctaccacagaatttttcttggtaaaacttcataaatactgtatatttcaacctct

SEQ ID NO: 764704 - DNA, 321 bp, Homo sapiens
ccccctggatggatgggtctttgtgttttgatgccccttggctctggcattgtgggggggccccctggggcatgaggaagagggccagtgccaaggccccgagggagcgctactaattgctactcagtttccttagaaagatttggctttttgtcatcaacagcgcyaaagtaacagcaaagatgacctacttaagcgaaagaaaaatccgagtgaacctttaaagctggtattctcacttcattttggggcttggggttgtcttgcagattcaatctgtttcctctgtgccacaataatcagaaaataggttaatttaag

SEQ ID NO: 764705 - DNA, 634 bp, Homo sapiens
ttgtgccccactgcagctaagactgaacttgggaaggcattcacgacggcctagtatcaaggtctcgagcatcccggaggaggcgaggctgcaagcatcgtgtagacgcctgagacctgcggggcagggcccgctgtcaccaggtcacagagggagcagcgctcacggggctgaggcccctgcacgtggggcgttcgggggccagggcatgccccccaacccgcctgcttcctgggaccctccttgcagcctgaggctgctcttctaccctccargccttggttggcttctgcctgcccacggcagggctcccctggaccagggaggcaaagaggagaactcccgattgcagcctgttccttctcatctgaacagtgcgcattttcacgttttctgaggactgcgttagttcagccatgcacaaccgcccactgtggggaatgcacacccaggcaaagccacagtcaggctgtgaggaccacctacagcatcctccacctgcactcctggactcaggtgatcctcccacctcagtctcctgagtagccggaccaccggtgcagactactatgactggctcattttttaaatgtttttgtagagatggagtcccactatgttccccaggctcgtc

SEQ ID NO: 764706 - DNA, 634 bp, Homo sapiens
ttgtgccccactgcagctaagactgaacttgggaaggcattcacgacggcctagtatcaaggtctcgagcatcccggaggaggcgaggctgcaagcatcgtgtagacgcctgagacctgcggggcagggcccgctgtcaccaggtcacagagggagcagcgctcacggggctgaggcccctgcacgtggggcgttcgggggccagggcatgccccccaacccgcctgcttcctgggaccctccttgcagcctgaggctgctcttctaccctccaagccttggttggcttctgcctgcccacggcagggctcccctggaccagggaggcaaagaggagaactcccgattgcagcctgttccttctcatctgaacagtgcgcattttcacgttttctgaggastgcgttagttcagccatgcacaaccgcccactgtggggaatgcacacccaggcaaagccacagtcaggctgtgaggaccacctacagcatcctccacctgcactcctggactcaggtgatcctcccacctcagtctcctgagtagccggaccaccggtgcagactactatgactggctcattttttaaatgtttttgtagagatggagtcccactatgttccccaggctcgtc

SEQ ID NO: 764707 - DNA, 634 bp, Homo sapiens
ttgtgccccactgcagctaagactgaacttgggaaggcattcacgacggcctagtatcaaggtctcgagcatcccggaggaggcgaggctgcaagcatcgtgtagacgcctgagacctgcggggcagggcccgctgtcaccaggtcacagagggagcagcgctcacggggctgaggcccctgcacgtggggcgttcgggggccagggcatgccccccaacccgcctgcttcctgggaccctccttgcagcctgaggctgctcttctaccctccaagccttggttggcttctgcctgcccacggcagggctcccctggaccagggaggcaaagaggagaactcccgattgcagcctgttccttctcatctgaacagtgcgcattttcacgttttctgaggactgcgttagttcagccatgcacaaccgcccactgtggggaatgcacacccaggcaaagccrcagtcaggctgtgaggaccacctacagcatcctccacctgcactcctggactcaggtgatcctcccacctcagtctcctgagtagccggaccaccggtgcagactactatgactggctcattttttaaatgtttttgtagagatggagtcccactatgttccccaggctcgtc

SEQ ID NO: 764708 - DNA, 518 bp, Homo sapiens
ccaaactttccctcatcttcctgtcttcttctgagccctccacactcttccaacctcggccctttacccagctccaaagcagcttccacattccagggatctttatagcaatgccccgctcctggtaccaattttctgtatcattgcattctcccattgttataaagaactgccttataagggtgacttataaggaaaataaggaaaagaggtttaattgtctcatagtttcacaggctgtacaggcttctgcttcygaggaggcctcaggaaactcacgattgggcagaaggcaaaggggaaggtgtcatgactcctgtggccagagcgggacacaagaggcagcaaagggtgaggtgccacacccctttaaataaccagcgagaactcactatcatgagaacagcaagggggaaatctgcccccgtgatccagtcccctcccgccaggccctcctcccacactggggatgacaattcaacacgagatttgggcaggacacaaatccagaccatatc

SEQ ID NO: 764709 - DNA, 639 bp, Homo sapiens
ttactgatggggtctgtgcagacccagtaggcaggggggtccactttcctgctagctgtccctagcgtcgttggccaggtgcagaggggtctgtcattctcctaccaaaaatttcacccgtgcatgtggggccttttgtaacacaggatctyaggtcccactgcaggtacaggaatcaaaaccatcattccagccaggctcaaggtaaatcctgtgcccaggaaggtgtgagaagcatttctctgcgccaggagccctcaaacttttcctgtaacagcccagaaagtgaatacttcaggccttgccggccacactactccactctgccactgtgacatgaaaaccacccgggacagtttgtgatcagaagagcagggctatattctaataaactttacttgatttggctcagttcagcccagtttgccataggtgggcagcatcttggctggcaagatgataacgaagcaccccagctctgagccacccacatctcacgtcaaatggtaagccccagtgttgcaggtggggtctggtgggaggtgattggattattgggcggatttctctcctgtgctgctctcgtgatggtgaatgagggcttgtgagatttaattgtttataaaagtgtgtggcacc

SEQ ID NO: 764710 - DNA, 597 bp, Homo sapiens
gctaagtgagagggctggttcacattccacagagcctgtgctcacagtacctgcatccatgaagctgtgtccacggatccccatgtttcagggacctatgctccagggagccggcaaattggagacccacgttccacagagcctgtgctcacggcacctgcatccatgaagctgtgtccacggatccycacgtttcagggacctgggcttcagggagccagcaaatgggaggcccacattccacagagcctgtgttcatggcacctgcatccacgaagctgtgtccacggagccccatgtttcagggacctgtgctccagggagcctgcacatgggaggcctatgttccacagagcctgtgttcacagcacctgcatccatgaagctgtgtccacggagccccaagttccaggacctgtgctccagggaacctacacatgggagacccccgttccacagagcccacattccctctctcctccatcacttcttcctggtcctcgaagcgtttctttcaggtctgcctggtactgcggctgcttctgaggactttggacctgtgggcttctctgtctcagtgggacctttgtcatccct

SEQ ID NO: 764711 - DNA, 513 bp, Homo sapiens
ccagactcccagcactgcaaagtcaggaactcgaagtgacacagaatctccggtggcatcaagtggcagaggcaggtggagtttggctgagttgttaccttggtctttgtgatgctttgtgaccagggtctgctctctggtgccttaatcccaggacagcaaaagaagaaggcaatcctagatcaacgtctcttggcttttctggcctggcacccagagttcagtttcttaaactctgcctaacacacaggkcggcagcacttcccacagaactggactcccagttatggccgggactttggcaaggacacactcattcatgagcatcaagagtgatacccatccacgaccctgagggcctgctggtgcaagacccaaactcaacattttcagtgtggcctccgcctgctcttggtcacctgaccaggtttctgttcctgagccctgtggatggttcagacgtccccatccacatgagggtcatgtgatgcggctttaatttccacctggcaa

SEQ ID NO: 764712 - DNA, 476 bp, Homo sapiens
tgtctctggtggtagtgagagggtaagggtaagaatttctggatcccacatacgatatcctaaagcaaaatgccctcacgcctcctccctgagagaagacgcagcagccacaggaagtgagcttcttggacaaggaacatcaggcgtccagtgccccaccggcttcctggtgcctagtcccctaaagaggtgagaggtgctgataaaatgagctgctgtgctgatgcctggggtgactggggtggagggatgtgggggcggcagccctgttgtcctggagctgctccttctccccrctgcatcactcctgggcctctcctggaggcatgagccatcctccccagggcagccccaggctgtgctgcctgagcaaacccagagcccagccctccctccccctgcagcctgagggcagggaccatggcaagcccttctcctacagccccagtgcctcagcagcctcattttcggggacg

SEQ ID NO: 764713 - DNA, 604 bp, Homo sapiens
ccttatacgtgctggatattagacctttgtcaatgcatagtttgcaaaaaaatttctctaattttgaagattgtcttcttattctgttgatagtttcttttactctgcagaagctgtttatgataattagatcccatttgtcaatttttgcttttgttgcaattgcttttggcatctttgtcacgagatccttgtctgttcctgtgtcccaaaatggtattgcctgagttatcttccaaagtttttacacttttgggttttagatttaagtctttaatccatcttgagttgatttttgtatatggtataaggaaggggcctagtttcaatctttgcatgtggctagccagttatcccagcaccatttattgaatagggtgcccttttcccatccacttgtttttgtcagatttgtcaaatatcagatggtcataggtgtgtggcctyatgtctgggctctctgttatgttccattggtctatatgtctttgtaccaatatcatattgtacatatttggttactctatccctgtagtttagtttgaagtcaggtaatgtgatgcttcctgcttttttagttttacttgggattgccttagctatt

SEQ ID NO: 764714 - DNA, 635 bp, Homo sapiens
attgctgggattacaggtgtgagccactgcgcctggcctattttgagctatttttaaatgaagatgttatgaatattcttgtgtaaactgtcaatttaatttttcatggataaataataacagtacaaaaaggaatatacctcaacatgaagaaaacacatgacgaagccacggctaatatcatacttaatggggaaaacttgaaakcattccctctgagaactggaacaagacaaatatgaccactttcaccattgtacaacatagtattggaaatccttgccagagcaatcaggcaagagaaaaaaataaatggcattcaaattgaaaagaaggaagtcaaattattcctgttttctgattatatgatcttatatcaagaaaaccctcaagacttcatcaaaaactcttgagatttgataaatgacttcagtaaagtttcaggatagaaaattaatgcacagaaattagtagaatttctgcatatcaataatgatgtagccaaggaccaaatcaagaaggcaacccaatttacaataactgcaaaaaaaaggtaacaaataaaatacctatgaatatattcaatgaaggcggtaaaagtcttttataagaactacaacacagtgaggaaaaag

SEQ ID NO: 764715 - DNA, 647 bp, Homo sapiens
attttccccattaccgcagggatcatccttacttatgcaaatttatgcagcaggcttgaattcctctcaagaagatggatttttcttttctaccacatggctgagctgcaaattttccaaacttttaaactcttcttcccttttaaatataagttttttgttttacacccccccccccgctcacaaacagaagtttaggctgctaaaagcatccaggctacattttgaacattttgttgctgataaatttcttccaccacataccctaacacatctgtctcaagttcaaagttttatagatccctagggcaggggcacaatgccaccagtctttttgctaaagcatagtaagagtgaacattattccagttcccagtaagttcctcatctctatctggraccacctcagcctggacttcattgtccatatcactatcagcatttcagtcacaacaatttaacaagtcttaggaagttctaaactgtccctcattttcctgtctttttctgagccctccaaactgttccaacctctgggtgttagccagttctaaagtcacttcaacattttcaggtgtctttatagtagtgccctattccttggtaccaatcttctgtattagtctgttctttcattgctatgaaga

SEQ ID NO: 764716 - DNA, 721 bp, Homo sapiens
cattttccccattaccgcagggatcatccttacttatgcaaatttatgcagcaggcttgaattcctctcaagaagatggatttttcttttctaccacatggctgagctgcaaattttccaaacttttaaactcttcttcccttttaaatataagttttttgttttacacccccccccccgctcacaaacagaagtttaggctgctaaaagcatccaggctacattttgaacattttgttgctgataaatttcttccaccacataccctaacacatctgtctcaagttcaaagttttatagatccctagggcaggggcacaatgccaccagtctttttgctaaagcatagtaagagtgaacattattccagttcccagtaagttcctcatctctatctggaaccacctcagcctggacttcattgtccatatcactatcagcatttcagtcacaacaatttaacaagtcttaggaagttctaaactgtccctcattttcctgtctttttctgagccctccaaactgttccaamctctgggtgttagccagttctaaagtcacttcaacattttcaggtgtctttatagtagtgccctattccttggtaccaatcttctgtattagtctgttctttcattgctatgaagaaatacttgagactgggtaatttataaagaaaaaaggtttaattggctcatggttccacaggctataccagaag

SEQ ID NO: 764717 - DNA, 350 bp, Homo sapiens
gcctctggcagaagctaccatcctccaagtctgatcctatccatatcctctattggcacttacttctcagaagtataattacttttaacatgtcatatccattatgagactgtgtgttattggagaggaagtgaacatatcttattcatatatctgtcttcgttgactgagccttaggctarttgcattaaacgtacttaatagttaatgagtaaatgaatgattaccaatacaagaaaagcatttgtcatcccaactatgagtaacacttatgccaaattatatctaagagcttcgtctcatagcatattctgtctgaatttttttttttactaaaaatgtatttggtt

SEQ ID NO: 764718 - DNA, 612 bp, Homo sapiens
atatcttaaaaaaaaaaaaaaaaaaaacctgaatgaacaactacacagaactgtctgagtaataatcttcattttagcattttgtgtagtagcaacagaaacaaaaaccaaccaaccaaccctaaataacttgctctttgggcgtggttaaataattggggaagagccacatgatagagcatttcaccataaaaggaaasttcttagatctgcatttataacataaaaatacttataatatgttatggagaaaatagcttataaaagaatatgtataatatgccacagttttattaaaatagcaaactacttgtacatgtgaattagcatggaaaaacatccagaaaatataaattaaaacattattatggtgatcactcagtgctgagattacaggcaatttttattttctttttatacctttctctcttgtctgtattatctacaattatgaaaaattacttttattactaagcaaaccaattaagcaagttttactgaggatgagaaagcctgagcaactggggcaaattcccatgaaaatccctaactacatcttccacagtgtttcctaatctgaaagtacaatttcctgcttcagtttatagtact

SEQ ID NO: 764719 - DNA, 624 bp, Homo sapiens
caaaagacaagttgtccatggaggtatttcaggtgactgcagttatgaagctggggtcacacgattatcaatcatagtggtatgtgtttatatatttagctttgtgacttattatttcattatgagtatggctcatctgctcatcattgttctgcccatgtgagtgtcrttagtgtacttgagtgtttatgcttgcaaaatatgtattgcatattttattgtgtaaattgtcctatgaaatgtcctgttgtgtttttacatgtttctcaaatatatcctcattaaaaatgtaaatgaatgtctttaaaataatttttaaattattttttctagaattatattttcaggattttagactttagatccaaattttcatatttgggatttcagcattcaggtttatagcatttgggattgtatattttgggattataatcagttacctttgaaaccaaactctgcctctttctaaagtctggatgattttgggtgaatgactcaacatttctgaacttcacttttctcaccttttaagatgggaatatgatgctctgatgagtatcaaaaaacatactgtaggaaaagtgctgaacacagtttttgtgtggcagttactgttattat

SEQ ID NO: 764720 - DNA, 633 bp, Homo sapiens
ttggcttacaattctgatgtctcaaaaagttcaagattgggcatctggtgagggcctcaggctgcttccactcatggtggaaagtgaaggggagccagcgtgtgcagagatcacatggggagagaggaagtgctttaggggtggcaagtgaggggttggccggagggaggaggtgccaggctcttttcagcaaccagctctggcagagctcatagtgagaactcactcaccatcaggggagggcattaacctatttatgaagaatccgcccccatgaccctgacacctcccactaggccccacgtccccactgccacactggggatcaaatttcaacataacaccagactggaggaagttataggtgtcaaagtttgaatcttttgtaaaaggaacaaagccttttcaccattgtctttcatagttgttctyctcactagcaaatctgtctctcagacctggcattacctagacttgaggcttacagcatctactggaaggacaggtaggtagtaagtggtaatagtcatgttgtatatactgcaagagcagaatgaagaaggtgcctgggagcacagaaggagctccttcaactgtgcagaggtgaaggagggcttcttgtttgatgtcagt

SEQ ID NO: 764721 - DNA, 507 bp, Homo sapiens
agccctgaattcctacccagggtgattctgtctctcgcagagggcccccacgggtgacagtgtggccgcagtgtggcctgtatgggtggggagaaactcaggggtatgttgaggcaggcagaggggagaagaggtgatgcctgagccagtgctgggtcatcccaggatgcctctccattcccagaagcccccagtgtgccccaactgtgggttagagctccgggctctggaccagggtgtctttgtctctcgcggarggcccccaagggcagtggcagggcatcacttgggaccatgtgggccagcagaaactcagtgagacattgaggctggcagaggggagaagcaccgaagcctgagcgggtgctggttcttcccagtgaggtctctcccttcccagaagtccctgggcagccccagggtgggggctagagccttgggctctggcccagggtgtctgtgtctgtcgcagagggccccatgggtggtggtggggccgtagacggg

SEQ ID NO: 764722 - DNA, 636 bp, Homo sapiens
aattgaaagaaaggttttgctctttgaggtaatccacacttctcaaagcatttttgctcatatcttctttctagttttcatcttgggattttcatttttcactatagtaatcagtgggctccaatatgtccctttccagattgtatgaaaagagtgttttcatcctcctgaatcaaaagaaaggtttaattccttgaactaaatgcacacatcacaaagcagtttcacatatatcttcttactcgtttttgtcactggatgttttatttttcactatgggtctcagtggactctgaaatgcccctttgcagattcttcaaaaagggtatttccaaccagctgaaatgaaagaaaggtttaaytttgttaactgaatggacacatcacgaagcagtttcacaaatagcttctttctagtttttatcatgggatttttggtttttcactataaacatcagtggactcggaaatgtcccttggcagattctacaaaaaaagtgttttcaacctccttaatcaataggaatgttaaaatatataaggtgaattcacacatcacaatgcagtttcacagagtgcgtctttctagttttttattgtgagataatcagtttatcactaaaggcctcagtgggc

SEQ ID NO: 764723 - DNA, 552 bp, Homo sapiens
ctttcacatatagcttgtttctagtttttttcgctggatatttggtttttgactacaggcctcagtctgctacgaaatgtcctttcactgattctacaaaaggtgtgtttccaccagctgaatcaacaagaaaggtttaactctgtgagctgaatgcacagatcacaagtagtttcacagatagcttccttctagtttttactgtgggatattcggtttattactatagtcctcaatgtgctctgaaaagtccctttgcagattctaaataaagagtatttccaaccagctgaatcaaaataatagtttacctctgtgagatgaatgyacacttcacaaagcagcttcacagatagcttctctctagtttttatggcaggatattttgtttttcactaaaggcctctgtgggctttaaaatgtctcttcgcacatactacaaagacagtgtttccaatctgctgaatcaaaggaaacatttaactctgtgaggtgaatgcactcttcaccaaacagttttacagatgccatttttctagtttttatcacaag

SEQ ID NO: 764724 - DNA, 545 bp, Homo sapiens
tctccaggtccctaagggctgggctcgtatgaagaaaatcctagtgtcagacatagagaacactaaagacaccaaatgcccatctagaaaccgcattgcaggtcagtggggaggagacaggagaatcatttcagggatgttccacagtccagacactgtgctagagattagggataaragggtgatgagagataggtaaggtctctgccttcatggaacccatagtgaggtgcaagacacaagacagaggtaagcacactaactagttacaaattgtgtctgcagggatcaagaggaaaccaccactttagatgggggagtggggctcagagagacctctctgaccaggggctttttaaactgagacctgagaaccaaaaagaaggaacatgaaaaacagagaaagaagttactaagacaaaaagatagcatgtgaataaacctctaggtaaggaaggactttgaagcctggtgttttctaggaactgagaggaagccacagtgaatggagtttggggagcaaggagaaggtggtaagaactcat

SEQ ID NO: 764725 - DNA, 600 bp, Homo sapiens
gtcaaaaaataattggaacttgtccctcccttcatgaagtttatggtcaggtgggctatcccccagctaccagccctccccacaaagcttcacactggaggcagggacccagcaaagctggttatttaagtctggaatctgcaactcaagttttctttcttccctgttgtctctagagattaagtgtgctgtaggcttccatctgcttctgtaataaaacataaattattaaagccataaaatattgatgaactgttttataaaacagagagactttaatgtattgattatgaattgagaaagccttaatgagtttcaggaggagaaataattgggcaatgatgctgtgttgattcattctgtgccsctgaatgagaggcagttatgaaaataagttcctcttgtaccattttgcatcactgtcatcttgcatttgtgccatggtacgtttaaaacctatgcttccatgaacgttaaaagctaaccagagagaaagagagagagggagagagagagaaagggagaggaaaattccttgttaaaaatcaatgaagtattttaagtggaaacttccttgcttttatttagctccctatgtgg

SEQ ID NO: 764726 - DNA, 658 bp, Homo sapiens
aaactagtgctttctttggggcattgtccccattaactttttgtaaagcattaatgatttcaccattctttcacccaagtgtcaccacaaatttggtgtttgttcttgttttactttagcagaattcatgttgctgtgacagggattcttttccaacagacgtcttatccttcagaatgcctcagactagatcctgctcagacatgttataataagttagtacaaatttatgttggtgcaaaaaaatttgaaattcatgaatttttttcataatatgcatttccatgaatgtttgaagacctctagtatttcatatcaaattctaagcagaaagatttagcaattctaagtctggttagactgggaagtcaygtcagctgctggccacagtagaacttggaatgacaacctctcttccatcccgtccaatagatttgggatgagcatcctaattaaatggacaatatctaatcaaaattgaaagtctgtcacaaacttgcccaacgattatttacatatgtgagattgctgttgtacagtggacttttctggggaacactttcaagttgaaccagacttaatgtttattagaaaagcattctggctgagttgctggctctgtgagccaatcacaaatgccaaaattgctggctaattg

SEQ ID NO: 764727 - DNA, 676 bp, Homo sapiens
ttccattttaatgatacatgcctgccagtgttttctctttgaagagcaatttaataaacaatcactggcgtttcatgttgagggtaagatttgtaatggcattcatctccccgggagttcttcctcagcaagtgattggatcaaggccgttgcggtgaacacaggctagcccagcctggggccttcaaatgtaccatgggttcccccatgcagggcatgaagatasgctgggggttggggtcggcgacaattttcagaatgattccgaactccgcttagatttctctgattttaaagacatttcccaaggaagtcaaacctgagcctgcaattacactgaggacccttgcaggggaggccaaggggcagtgggcacagaaagctctggaatgtgatcttcagccgggatctctgctttggggtaagaaggaagctgaacagccaaaggcttttattgttaaagaggaaagtgggggctctgagccttgaaggaagatcatcatcaaatggtgctttattcaacatccacactgggaacgcattgttctgggcgccatacaaagcaagcctgggcaaggagtggggcttgtgcatctattttttattaaaatcacatgtaaatttatacagccacagtaagggtgggactcaggttctagccaaggtgctgtatgag

SEQ ID NO: 764728 - DNA, 627 bp, Homo sapiens
ttctatatcctgtttatcttttataaatcccaacaatgaaaaagatattctaagctgtagccagtgagatgcttattggaagtaataatacaaaacttataatatgccaaagtgactacagaataattagtatggccccttggtgatggtggaaatgagttttgacaggtgagtatgaaagtagacgtggccagcatatgttaaggatagaattggagctgccaaagatctcctgcaatagctctttagagtcagccttgaggtcatgcttttacttaggctgccatataacctagaggctgggactttctctggcttagccagacacaatattagatgtagaataaggaattagggtcagggaaatctaattattctccaacctctatccactcacccattttcgctgacaaatacacattgagattgtcctccaagactctagttatgtggaagaagaagagtgrttttccttctctatatttctgggaaagaattaattctaattctggtgggtttttctgtagcaagattgtatgatgagtttataagctactcatgacaaatgggagactgaggatggttgaatgaaaaagttcttactagagtcataaagggctgattttt

SEQ ID NO: 764729 - DNA, 608 bp, Homo sapiens
cttcatctctataattatatgatttcactattgtataaatgggacgatgcagtatgtattcttttgagattggctttttcactcagcataatctcctctgaaattgatccaacttgttgcatcagtcaatagtgtattccttcttattgctgagtagtattccatagtataaaagtatcacagtttgttctaccattcacctattgaaggccatttaggtagtttttagttttttacttgcatgaataaaactgctgcaaatcttcctgtagaagctcttcatgaaaataagtttttatttttctgggataaatgcccagtaatgcaattgctgggttgtatggtaagtccatttttagcttcaaaagaaagtgcaaacyaattttcaaagtggttgtgccatttgcagtctcatcagtaatgtacgagtaatccagtttctccacatccttgccagcactgagtgttgtatttattattttatccatcttaataggtatatagagacaattattgtgactttaatttgcatttccctaatggttaatgatgttgagcatgttttcataggcctatttgctatctatatatcctcctcagtgaaaaat

SEQ ID NO: 764730 - DNA, 461 bp, Homo sapiens
gctgagcgcttaggaaacaggagagcttttgtagtagtatttatctccacccatctcatttttctgtcactctagggtggttgaaccatggcattatgttctctatctcattcctactatgggatgaggcaatgcttgacagagaaaaactgggatttggacaagatctattcaatgtccctgcacattgtgtagaagctagaattgatggtgcaaatattacatcttgaagataatgcayctgatctcatccaaactcagaagctaagcaggtttgggcctggttagtatttggatgggagaccacctggaaatactgggtgctgtaggcttggccgggcacagtggctgatatggtttggctgtgtccctacccaaatcccatcttcaattgtagttctcatcatccccacatgtcatgggagggacctgatgggaggtaattgaataatggggatggg

SEQ ID NO: 764731 - DNA, 625 bp, Homo sapiens
gcaagcatatatttaaaagaatattttcatggaaaagaaattcaaaggcaaacagtggtccacttattttaagcaaagcaaggaaactccattagagaattaagaataggattaaaaaaactcatcataatgtgattttattttgcaaagttcgttatttaagatgtatatcaataaataatataaacacacgcgtgcgtgcacacacacacacacacacagatgcctgaataagtttaccttttagtagcaacagaaaagtaagcaaagggcaggaaaatgaaaacgacaagcccagaggcaaataaaacaaactttcagggagtgtcttattattgcatagcttgaaaaaaagtcattgcctgggattaaaaaacaaacaaactttttttaacgtaaacacttgttaccttgtgatattattttactttaatgaggcagygaagacaactttggatatatatttagatgaaaagtcacaaagaagcttaggtgtcccagtaaatgaagattattaggcacaaaaggagatgcagagatttccctagaaaacacagtctgatctttttaatttctgttttctttttctgctggggaaagtttaatgtaaatccttccctttatg

SEQ ID NO: 764732 - DNA, 564 bp, Homo sapiens
atcaagatccctgtggtaggtatcagtcattggtttctagttactcaacccttttacaagtcttaaggaccctataaactttgaaagttgtagtaaaatatttatagagcaagtcaaagaaaagtataaaacagtgggtctaggtgaaatttagacgtggctaaarttccttttcacctcttttgctgtttgattcataagggtataggtacctggcctagtgaaatagcaactcatttcaccctgtagaccggacatagtacaatttccacagttgcaaagccatttcattccttttcctcctggtgtttactttagaagttcaagagacgattttgatgagaaatgacagtccggtgcctcatgagaaactcaggccggtgccacaggtgaaaactctgaggtcattaccccttctgaattttcctgggaaagggccttggagccactctccactgtgactgagaaactcaagaggagccattggtgtttcaggcttttaggggagatataaatggaggcctgactagtaaaacctgccacccaaagccccaaggcactctt

SEQ ID NO: 764733 - DNA, 617 bp, Homo sapiens
tttgaacctccaggacatcttgtgacagacaggcttaacataacaggaaggacaagtgtggctggccaagccaggcctgccctgcttggaccctcctaggctttgcagagaatagattgcgtatgcctccagataagtgatccctctggaattccagagggttaacccagagtgccatggtcacaggctgaaccacccccaggtctacaatatcaccaccctgtacaaggctaaaatgtggagcctgggggaagatgatggcctcaagtagcatcccagcagtggagtgggcctctggatttaatgccctaaatgtgcactgtccaggaaaataaatattacttaaaaaataaaattgttgatttgttacaacayaaattctttacttattaaggttcaaaataaattagtgcttttacttcttcctgaacaattcaaagccctgagaacattttagttccatttgtcttcctccaaatttataagtgatttgttttcatgtattttaaattctcactatatttaaaaccccacagactttattataactatatatacaatcaacatttatttagataaacacatataacttcccttttcttgacatttattctttc

SEQ ID NO: 764734 - DNA, 571 bp, Homo sapiens
taccatatataccactgctggatatatatccaaaagaaagaaaatcagcatatcaaggagatatctgcacctctgtatttgttgcagtgctgtttacaatatccaagatttagaagcaacttaagtgtccatcaacattcaaatggataaagaaaatgtgatacatatacacaatggagtattattcagccataaaaaagaatgagatcctgtcatttgcaaccacatggacagaactggatatcattatgttaagtgaaataagcgaggcacagaaaaacaaacattgcatgttctcacttatttgtaggatataaaaatcaaaacarttgaactcatggacatagagaatagaaggacagtcatcagaagctaggaagggtagtggggtgcttggaggaagagggtgatggctaatgggtacaagaaaataggatcaaatttacctagtatttgatagcacaacagggtaactatagttaataataacttaattgtgtactttaaaataatgaaaagggtagaattagattgtttataatataaaggataaacgcttgaggggatggat

SEQ ID NO: 764735 - DNA, 605 bp, Homo sapiens
atggtccaggtataccatatataccactgctggatatatatccaaaagaaagaaaatcagcatatcaaggagatatctgcacctctgtatttgttgcagtgctgtttacaatatccaagatttagaagcaacttaagtgtccatcaacattcaaatggataaagaaaatgtgatacatatacacaatggagtattattcagccataaaaaagaatgagatcctgtcatttgcaaccacatggacagaactggatatcattatgttaagtgaaataagcgaggcacagaaaaacaaacattgcatgttctcacttatttgtaggatataaaaatcaaaacagttgaactcatggacatagagaatagaaggacagtcatcagargctaggaagggtagtggggtgcttggaggaagagggtgatggctaatgggtacaagaaaataggatcaaatttacctagtatttgatagcacaacagggtaactatagttaataataacttaattgtgtactttaaaataatgaaaagggtagaattagattgtttataatataaaggataaacgcttgaggggatggataccctgtgttccatgatgtgat

SEQ ID NO: 764736 - DNA, 571 bp, Homo sapiens
taccatatataccactgctggatatatatccaaaagaaagaaaatcagcatatcaaggagatatctgcacctctgtatttgttgcagtgctgtttacaatatccaagatttagaagcaacttaagtgtccatcaacattcaaatggataaagaaaatgtgatacatatacacaatggagtattattcagccataaaaaagaatgagatcctgtcatttgcaaccacatggacagaactggatatcattatgttaagtgaaataagcgaggcacagaaaaacaaacattgcatgttctcacttatttgtaggatataaaaatcaaaacagttgaactcatggacatagagaatagaaggacagtcatcagaagctaggaagggtagtggggtgcttggaggaagagggtgatggctaaygggtacaagaaaataggatcaaatttacctagtatttgatagcacaacagggtaactatagttaataataacttaattgtgtactttaaaataatgaaaagggtagaattagattgtttataatataaaggataaacgcttgaggggatggat

SEQ ID NO: 764737 - DNA, 563 bp, Homo sapiens
tttcagctggtgaataaattgtaaaatttcaatggttaagctcttgactaaataatactttgtgatgacttccgttttcattaaactttcttcctgtgtgatctctaggcaaaacacgtttgtctgacatttaggaaacactgaatgaataaatagaatgactaactaccttttaaaaaattatatttgtttttagttacatattacactttagtcattttaaattaacaaatagaaattgtatgtatttatggtatcaacatgttttgatgtgtggatacattttggaataattaaatgaggctaattaacatgttcatcgccttaatacttatcaattttggggggtgagaacaattamaatgtattccttaaggaatttttaagtacccactacactatcattagctatagtcaccatgcagtacagtatatctccagaatatgttcctgctatccaactaaaactttgtatcttttgaccagcaaacatctcccatcctgtctccacctgcaacccctggaaaccaccattctaccctttacttcaatgagtttgactt

SEQ ID NO: 764738 - DNA, 643 bp, Homo sapiens
gtgtctcacattcagaatttcatatattccctctcccaccccatctcttgaaagccataaatatcattacctaagagctttcacaaaaaagaagtttgattctaaagttgaaaacaaaagtaagacttattgatgaatgtttctaaagtgcagaggctcagagggttcttaagaatgcatctagttatccctttgccttcaggcatatctacaactaaatcatatttgtagacaataatagaatcagtaatagtactaaccttttatgttttgtagcacttgagaaataggagtagttaagaatccacacactttaaaaacttccagaaaatatttcccctggtttattgtaactagggagagggtgctggcctttccaaccagagaggtagagcctagttattttggttcagtttgaaatcaatgcccagargccaacagggccgtgtgaaagcagaaagcaaggtgatgaaggcctcctcagagatgagttgaagagctccaggaagctggcagcataggctctatggggctgaccatgaggctgacgtacctctgcttctgcttgctctatgcagacataatataggtgatatctctgatttataatgacagtgtatttctagtttgtttttaatccccc

SEQ ID NO: 764739 - DNA, 384 bp, Homo sapiens
taaattaaaaaatgactgaaataagtccttacctatcaataataaccttgaatataaatggattaaactccccacttaaaaggtatagactagctgagtgaattttaaaaaccatgaagcatcttgctgcctacaagaaatrtatttcacctctaaacatacacataaacttaaaggtatggaaaaatatatctcacgtgaacaaaaaccaaaagcaagcaaaagtagctacatttatataagataaaatacactcaaaaacattacagtcaaaacacgaaaaagaaacaagatcattacataacaataaaggaatcaattcagcaagaggatataacaattctaaatgtttatgtacccaatgccacagaacccaggtatata

SEQ ID NO: 764740 - DNA, 622 bp, Homo sapiens
ccccagccttgctagagatctagacatccaaatataagaagctcaaagaacaactgggaaactcatcacaggaagatcatcaccttggcacacagtcttcaggttatctaaagtcaggacaaagaaaaggatcttwagagctgtgaggtaaaagcatcaggtaacccatgaaagaaaaactattacagtaacaacagatttatcagtagaaactctacaagccagacaggattggtgtcctatttttagcctcctttaacaaaataattttcagccaagaattttgtatctggcgaaactaagcttcataaatgaaggaaagacacagtcttttccagacaaacaaattctgagaaaactcagcactaccaagccggcattatgagaactgctaaaaagagctctaaatcaaaacaaatccttgaaatacaccaaaatagaacctttttaatgcataaatttcacaggatctatataacaataatacaatgaaaaaagaaacaaggcattcaggcaacaaatagcaagatgaatagaatagtaccttcacatctcagtactaacgttgaatgtgaaatggcctaaaggcaccacttaaaagacaaagaatggcagaatgaat

SEQ ID NO: 764741 - DNA, 622 bp, Homo sapiens
ccccagccttgctagagatctagacatccaaatataagaagctcaaagaacaactgggaaactcatcacaggaagatcatcaccttggcacacagtcttcaggttatctaaagtcaggacaaagaaaaggatcttaagagctgtgaggtaaaagcatcaggtaacccatgaaagaaaaactattacagtaacaacagatttatcagtagaaactctacaagccagacaggattggtgtcctatttttagcctcctttaacaaaataattttcagccaagaattttgtatctggcgaaactaagcttcataaatgaaggaaagacacagtcttttccagacaaacaaattctgagaaaactcrgcactaccaagccggcattatgagaactgctaaaaagagctctaaatcaaaacaaatccttgaaatacaccaaaatagaacctttttaatgcataaatttcacaggatctatataacaataatacaatgaaaaaagaaacaaggcattcaggcaacaaatagcaagatgaatagaatagtaccttcacatctcagtactaacgttgaatgtgaaatggcctaaaggcaccacttaaaagacaaagaatggcagaatgaat

SEQ ID NO: 764742 - DNA, 622 bp, Homo sapiens
ccccagccttgctagagatctagacatccaaatataagaagctcaaagaacaactgggaaactcatcacaggaagatcatcaccttggcacacagtcttcaggttatctaaagtcaggacaaagaaaaggatcttaagagctgtgaggtaaaagcatcaggtaacccatgaaagaaaaactattacagtaacaacagatttatcagtagaaactctacaagccagacaggattggtgtcctatttttagcctcctttaacaaaataattttcagccaagaattttgtatctggcgaaactaagcttcataaatgaaggaaagacacagtcttttccagacaaacaaattctgagaaaactcagcactaccaagccggcattatgagaactgctaaaaagagctctaaatcaaaacaaatccttgaaayacaccaaaatagaacctttttaatgcataaatttcacaggatctatataacaataatacaatgaaaaaagaaacaaggcattcaggcaacaaatagcaagatgaatagaatagtaccttcacatctcagtactaacgttgaatgtgaaatggcctaaaggcaccacttaaaagacaaagaatggcagaatgaat

SEQ ID NO: 764743 - DNA, 587 bp, Homo sapiens
ctttcaaataggttttgacaaaaatgcacctgtgtactccgaccgcatcaacaagctctgctgatttttcttactgctcttcccagcatttaatctactgcaaccacacattctacaggctattccactgatatgccaggtgtgcgcccactctgagcttttgcacttgctgttctcttcccctgggtatctgcatggcttgctgcttcactgtctcaagcttttatttaacaatcaccttcaccatgaggctacccagtgaaggacttcaacctctactcccatccagatacgtcatatcccctttcttcattttatttattctcagtatttattaactawcatctagcatcatctaacaaacttatcatcttaattttgtttgttttttattttttccacaaaaatgtaagctccatgaaggcagggattttggtcagttttattcattgctgtattctttgcacatggaacaatacctacaaatatctgttcaatgacttaatgaactagatctggggtggcaaactctagatctgggataaagttttactggaacacagtcacacattcatttatatattgtc

SEQ ID NO: 764744 - DNA, 638 bp, Homo sapiens
cagttatcaccctcccttcactacatgggaaattgtattctttggcatttatattctaattcttctttatattccagcaaattatttgccccctcatattttaaactaacagcctccttaatggtcttccaaattctgctttctttactttccaacccagcatgcacacaattttgacatatttttctagaaatcctatttccatttttagtgtatgaatcaactaaaatacaagttactttgtaaggacctatgttaatgtccaacaatttgatcatggtgtgccttctccatcaagcatcarcctttaggtactccatcatctactgttcccttagcaatggtaccccaacacataccaacgcaccaggtaggtccaatcttcataaagggagagagcattttctcctcagagttttacttatgtcaattactccaactagaaaaatctatgctccaatctatcaattcacttgttcctaattcacctattaaaagtattaccaaatcactatttttcaacatatcttaataagtaaatatttcaatgacttcttagtcctaatcccttcccatgccctgctaattcccactaaaacactgagtgaactgtggttgaaaataatgactattggcta

SEQ ID NO: 764745 - DNA, 635 bp, Homo sapiens
gaaatatggaaacactgtcacagcttgtaggaaactaacgcaacaatagtttcttggattgtatcctagaacattaagtgacattagcagataattagtaggtaacattagcaaatccaagtaaagtctgtagttaattggagattattatatctatgttaatgtattaattttgattaatgtatgatggttatgtaaacattcagaggaagctggtttaagtgtataatccaagtttctgtactatctttgcaatgcttttgtaaatgtaaaattatttcaaaattaaacaattgaaggagaaattcatctcatgagtaaataaaataatgaatgtgaattmtaatgaactcgtcaaaaacaaattatgatgattatagtcaatatcatcattagcatcatgacctctaaatatgctaagtgtgtgtgtgtatgtgtgtgtgtgtgtttgtgtaatcatatatgagaatgaacagtattgctagaggctgaggcaatacttggttgtgattaaagacacaaactcttgggagcaaattctctaagtactagtactggccattgcacttatccactatcaaattaagttaatagcctctgtataaatcaattgcctcaatcctagtaagaaaagt

SEQ ID NO: 764746 - DNA, 617 bp, Homo sapiens
taacccaaactaggattatatgtacgaagatggtgacaaaagtgggaatatgtaagagagaccaaacatctgaaggtgagtgattgcaggaaatgaaagaagagtgagtaaacttttctcccctttcaagtttagatgtcaaaaaaatgacaaaaataagcaaatcaagaagggcaggaaacggagtgacaaagatgatgaattctattcaggacaggcataatttgaggtcattttaacacawcaaactgatgttttatgctaagctgtggctatatctatacagattttgaaagctaaacaagtagatgataccatgcagaaacagggaagttcacacagcaaaggaatacagaaaagagagagaagtttggaaatgctcccagccaggagtaggaaaaagaaataaaaataaacaagtaaacaaattgagtttattttttattaactttatatgaaattttggggaataagtaaagtttttaatttgataaggacaaaaaagttcctcaaagccaatttttaaacatgtttaaatatttgtattcaatatacaaggaagatgagaaatactcttttatgtaaagtagtaagatttgatttatataccacttctg

SEQ ID NO: 764747 - DNA, 617 bp, Homo sapiens
taacccaaactaggattatatgtacgaagatggtgacaaaagtgggaatatgtaagagagaccaaacatctgaaggtgagtgattgcaggaaatgaaagaagagtgagtaaacttttctcccctttcaagtttagatgtcaaaaaaatgacaaaaataagcaaatcaagaagggcaggaaacggagtgacaaagatgatgaattctattcaggacaggcataatttgaggtcattttaacacaacaaactgatgttttatgctaagctgtggctatatctatacagattttgaaagctaaacaagtagatgataccatgcagaaacagggaagttcacacagcraaggaatacagaaaagagagagaagtttggaaatgctcccagccaggagtaggaaaaagaaataaaaataaacaagtaaacaaattgagtttattttttattaactttatatgaaattttggggaataagtaaagtttttaatttgataaggacaaaaaagttcctcaaagccaatttttaaacatgtttaaatatttgtattcaatatacaaggaagatgagaaatactcttttatgtaaagtagtaagatttgatttatataccacttctg

SEQ ID NO: 764748 - DNA, 627 bp, Homo sapiens
attgtcctggacaaaatgcaaagctgttttcggcatttactattgcaaatattaaggtagatgtgatttatttcctctctctgacttcctgaatttcaatatcatttgtctgtagctcatatttgccagatatcatacattttttatttttaatatttcagtatgtctgatatccatttcccctgcctgtcattgkggtcagaaaccacgagctacacttgtttctcccttaccattcataaagtgagactgacgttgaacctattgcgaggtgcccagctttccagggactaggttcagctcttcttattcagtaatatttaacaaatatttgtgtggtatccactgtatgctaggcacatatttttttcttattatttacaaccctgagagtaagtggtatttctattttacagggtataagtctgaaatttagacaagcaaatgattttcacaagttctacaactacgaggaagcaaaatttgaatataaaagtctctcaaaagttcactgtttccaatacattaaatgactcagtaaacaaaaagtaaacagatgttgactaatcaattcctgcaaaagtgatgtaaatatatcttcaaaagatgtctttatttaagtcttaa

SEQ ID NO: 764749 - DNA, 627 bp, Homo sapiens
attgtcctggacaaaatgcaaagctgttttcggcatttactattgcaaatattaaggtagatgtgatttatttcctctctctgacttcctgaatttcaatatcatttgtctgtagctcatatttgccagatatcatacattttttatttttaatatttcagtatgtctgatatccatttcccctgcctgtcattgtggtcaraaaccacgagctacacttgtttctcccttaccattcataaagtgagactgacgttgaacctattgcgaggtgcccagctttccagggactaggttcagctcttcttattcagtaatatttaacaaatatttgtgtggtatccactgtatgctaggcacatatttttttcttattatttacaaccctgagagtaagtggtatttctattttacagggtataagtctgaaatttagacaagcaaatgattttcacaagttctacaactacgaggaagcaaaatttgaatataaaagtctctcaaaagttcactgtttccaatacattaaatgactcagtaaacaaaaagtaaacagatgttgactaatcaattcctgcaaaagtgatgtaaatatatcttcaaaagatgtctttatttaagtcttaa

SEQ ID NO: 764750 - DNA, 627 bp, Homo sapiens
attgtcctggacaaaatgcaaagctgttttcggcatttactattgcaaatattaaggtagatgtgatttatttcctctctctgacttcctgaatttcaatatcatttgtctgtagctcatatttgccagatatcatacattttttatttttaatatttcagtatgtctgatatccatttcccctgcctgtcattgtggtcagaaaccacgagctacacttgtttctcccttaccattcataaagtgagactgacgttgaacctattgcgaggtgcccagctttccagggactaggttcagctcttcttattcagtaatatttaacaamtatttgtgtggtatccactgtatgctaggcacatatttttttcttattatttacaaccctgagagtaagtggtatttctattttacagggtataagtctgaaatttagacaagcaaatgattttcacaagttctacaactacgaggaagcaaaatttgaatataaaagtctctcaaaagttcactgtttccaatacattaaatgactcagtaaacaaaaagtaaacagatgttgactaatcaattcctgcaaaagtgatgtaaatatatcttcaaaagatgtctttatttaagtcttaa

SEQ ID NO: 764751 - DNA, 646 bp, Homo sapiens
agacttgagttgtgtatattttaatagagtgactgtgtgaaagagtatggggaggctgatagaggcaccagatcacaatgcagttctacctcagacacaagaagagagaaacaggagggtggagaaagcatgctagactgkcatgcagtctaagaaagacttggcagggtatctggaagccttaagaccaagtcagctttcaaaagacacctatgtgtctcaggaaagccttagtatccagctaccctcagcccttggttgagaggagcctgatggaatcatgtcatggctatggattttaaagcacagcacctggggctcttggtccgtaatactccctgagttggaggtctacaagctgcatttttaatggcatcacaataaaaaggggtacagaacaaattaaagatttttagcatttatcaaatgtttacaataaggatttcaagtaaattcttatacttaatgtacacaataattaagaaaagtattatgtcacaattatcaaaattaggattcagcgtatgaagaggtaaaataattagcccaaggccataagttagttagtgggggataagcgggagttaaagcaggtctgtgtaacttccaaacccatacttttaacttttaaagttagctgcttgaa

SEQ ID NO: 764752 - DNA, 646 bp, Homo sapiens
agacttgagttgtgtatattttaatagagtgactgtgtgaaagagtatggggaggctgatagaggcaccagatcacaatgcagttctacctcagacacaagaagagagaaacaggagggtggagaaagcatgctagactgtcatgcagtctaagaaagacttggcagggtatctggaagycttaagaccaagtcagctttcaaaagacacctatgtgtctcaggaaagccttagtatccagctaccctcagcccttggttgagaggagcctgatggaatcatgtcatggctatggattttaaagcacagcacctggggctcttggtccgtaatactccctgagttggaggtctacaagctgcatttttaatggcatcacaataaaaaggggtacagaacaaattaaagatttttagcatttatcaaatgtttacaataaggatttcaagtaaattcttatacttaatgtacacaataattaagaaaagtattatgtcacaattatcaaaattaggattcagcgtatgaagaggtaaaataattagcccaaggccataagttagttagtgggggataagcgggagttaaagcaggtctgtgtaacttccaaacccatacttttaacttttaaagttagctgcttgaa

SEQ ID NO: 764753 - DNA, 568 bp, Homo sapiens
aatgtgtgctagatttcacacttttccccttttagttactttcctaaagacatgctctgacatctacaattccttttttttttttttttttttctgaggcaaagtcttgctctgtcaccaggctggagtacagtggtgccatctcagatcactgcaacatccacctcccgggttcaagtgattctcctgcctcagcttcccaaggagctgggactacaggcggccaccaccatgccaggctaattttttatattttagtagagacagggtttcaccacattggccaggatggtctcgatctcctgaccttgtgatccgcccgccttggcctcccaaattgtgtgagccaccatgcctagccttcttttcatttaatatataatattaaactatcygtatttttcctttcacatcacacttttcacccctttatgctatattagtacacaagtttgcattgtatagtttaacagttaccatggacaagaagtcactgacttcatagacaagctgagcagattgaatttcactttccagacaaaatgatgggcacctataccaaagcaaa

SEQ ID NO: 764754 - DNA, 543 bp, Homo sapiens
acaagtcaatattgaacttctcttttttctcttacatgtctaatcacattaagctttaagaacttacttgactagagttgaagaatctaggtaaagaggaaattacctgaggcaaaataaacattttatgtaaaattcttgtacttccaaacaagtaaaakagtcatccctcaacatgaggagtctttttagaaaatagattttaatactttgaacacatttcttcctcccagagcaggaatttttgtccttcacatcttttctaatgatatccaaatcaatttttaatcctaaacattctcctattttttgtactttcatcttttcttaaaagagttttttttaaagtgagctaaagtatcactcccattaaatcactccagtgttaccttgccattgtcttttcctcttaatctagtgtatgatgaatcctatgacaattttaatacaaaagtacgttaaaccacgcttctattaggaaatagtttcttttgcttctgtttttcaatgaagaagcaaactggaattttatacaaaaagttt

SEQ ID NO: 764755 - DNA, 623 bp, Homo sapiens
caggtgtgagaaggactctctgactttctcctttgcccctgaagcaggtcgtagaaagagtgcgtgctagaaagacgctttgatctttaccttctctgaaagtagatcagaagaccctcatgtgagagctgtcctccctacacagagaaaaagaacagctttatctccaaagacagaaggatgtaaaaaggaatctgaacaaacaggccttgctaagtttcctctagtttactacctttagctcataccttttgtcctatcacatttttctatggctttccactcgtcattaaacccagtataaacacatttagtttaatcacctcttcatgtgtcttcatttccttatgaaagctccaatgtcatgtaaaacatattacataaatgtatacgtttttatattgttaatccatcttttgtaaatctaatttacagctggagaatataggarggtagagagaaaatagatttttttttcttatcaactgtctatttttcttttatctaacaggatttaagcataccctgaatgctttgaaaagggaagccagacatgaaaaccacttctaactgacgtatacttgtttggaaccaatttgttttatggtatgcatcatatacag

SEQ ID NO: 764756 - DNA, 608 bp, Homo sapiens
tccacagatgtggtaggaagatggtttggggatgaaactgttccgtctcagataccaggaatgagattctcataaggagcatgcaacctagatcccttgcctgtgcagttcacagtagggttcacactcctgtaagaatctaatgccgctgctggaggcggagctcaggtagtaatgcgcattcacccactgctcacctcctgctccactgccaagttcctaccaggccacagaccagtactggtaggcagcctagggctgggaacccctactttagtggacacactttgagtaatcatctgagtactgatcagcgcatggatgtgaggaaactactcaagactggggaaaatcacccaaggattagagrgcacaatatctgaagattttgtaggtctgggaatattttctgttcctaccaggcagagggtaaaccctcataatttatagcacattacttatctcactcggaagagtctttcctcagtagcagagaaaaaggacacagagtaaatctttatcttgtccccctcgaaaaattttaaaaacctcctcaagttacaaaagcatcaaactctttctaagtaacttaaacacatcccagaaga

SEQ ID NO: 764757 - DNA, 629 bp, Homo sapiens
agtcattttagaaattttatagatggtagtatatattataacagagctgaggggtttgaggaaatttttaaattatattttattaaacttagtttataaaatgaatgaaatacatatttgatatatatagagaaggtaaaatcaatgagaattgctaaaagagctcgctatctcatagaagttttttcattagctttactcataatttatatgtaatataaataaaatgcataaaatagtaattttagcccaaracttactaaaataattcatatgtcacaaatatcttggaatatgctagctgtattttcttccatgacactgttttctatcttttgagatatttaagtgatatttattgtcacattggttattttattgcattataaatttaatataaatatattctgcaaaatttagaaaatattcagttggttcttaaaaagtcaatttaaaaaaaacaaaccatgttttggttaaaattaatgaaatatatatttctattcagtgcatttatatgaacgttcacgtgcagtcataaaaaactgttgcaactttctgcagtctaggacatcatcatgttgacattcataaaatatacatttattcctctaaatttattgaattca

SEQ ID NO: 764758 - DNA, 622 bp, Homo sapiens
tatcagtcataacattcttcccaaaatgtttaaaattatcagtctgacaggtttttctttgtatgtcggtttcctggtgatatgtatcctgaagttatctaccctcctgactcaaacaatatcaaaagctgggtaggtctgtttcacagatgtctttctagggttttgtttttccattgttcaagaaaattcctttgtcctcttttctactggaattactgaatctatttcctgaatctattatgttcctatttctcatttgtactgttttaatggagtatatcccctgggagcttctggggaaaaggtacccgaagtgggtacctcctttctgcaggcaggtcagcctgacgagtgtcccactctcagcagagaggagacctgaagtgagtagcttcttcccacagctggttgtccctgtgtctgtgactggcagattccagggtttttatgggctcaaaagggaggaagtgtatgctrattgggccatgggtggtcatgggtgaggccggaaaaagcactctaatatctcactcctagctgcagactccactggtacctggcagcccagcccccagggttcaggctgtccccagcttgaaggtgaggtttcaccagtgac

SEQ ID NO: 764759 - DNA, 567 bp, Homo sapiens
ttagaatatatttgcaaattcaatatgttctgataagggacttgtatccacagtatataaaaaacaattacaatgaaataactgaaaaccaaagaaaagtaaaaagtggcaaagaatttaagtagttatttatccaaaaaagayacaaaaataattaacaagtgcatgagaaatgtgttcaattatgtttaatcattagggagctacaaatcgaaaccaaaaaagcgatgccacgtgatatccaaaagatgactcatactgaaacaaaacagacaatagtaagttttatggagaaaatgaaaaccccatgattggtcatggcattgtaaaatgatacagattctttgggaaacagtttggctgttcctttaaaagttaaatatggagtgaccatatgattcagcaattctattcatagatatatactcaagagaaatgaaaacatatgtttacacaatatacacatattctatagcaacacacttgtcccatgttggaaacaacctaaaagaccatcaactaaatagtggataaacaaatgtggttttcaaacattaataaaattaa

SEQ ID NO: 764760 - DNA, 645 bp, Homo sapiens
cagaaggtaacccattgtcttgaaggaaaatacccagtcctggtaggattcattgccttctgactaaagatctcttaggccttgaataaataccagcacttgccatggggtttgggtgagacccagtgccacagtggcttcaggtgtgacccakcacattctcagctgtggtggccatgaggagagactccttctgcttgaagaaaggagagggaagggtaaaggaagctctgtcttgcagctggggtaccacctagaccatagtgaagtagagcaccaaacaggctccaggagctccattccagacaatggctcttagatggtatttttgggcctgccctgggccaggagggagccttctgccctcaatggcaagacctagggctagcagcattcaccacaagctgactgaagagcccttggatcttgagtgaatgctggtgacagccaggtagtacacaacatggactcagggaaagggaggctgtcatgaaagactccatctgcttgaccaaaaaagagagaagagtgagaagaactttcttttgcagcttgggtgccagctcagcaacaatagaacagagcacaaagtacattcctaaggtttctaattccaggccctggatcccagatggcatctctgga

SEQ ID NO: 764761 - DNA, 594 bp, Homo sapiens
gtggttttgagttgatttcttagtcttgagttctaatttgattgtgctgtagtctgagagactgttatgacttcagttcttttgcatttgctgagtagtgttttacttctgattatgtgatcaatttcagagtaagtgtcatgtaggaatgagaagaatgtacattctgttgaatctgggttgagagtcctgtatatatctatcagatccattttatccagagytgagttcaggtcctcaatatctttgtaaattttttgtcttaatgatttctctaatatgtcagtggggtgttaaagtctcccactgttattctttgggagtctaagtctctttgtaggtgtctttctttataaattcataaagcaagttctttaaagaaagaacttacgaatctgggtgctcgtgtattgggtgcctatatatttaggatagttagctcttcttgttagctcttcttatcaccctttaccattatgtaatgcctttctttgtcttttttgaccgttattggtttaaggcctactttagtagaaactaggattgcaacccctaccagaggtacaaagaagagctggcaccatttctattgaa

SEQ ID NO: 764762 - DNA, 571 bp, Homo sapiens
ttgtaatgagtcctgagtactgtggactcaaaagacacaatgtaaatgtaaaatattgtttgtatttattattgcttcattcctctcagataccatttctgtcattaacgtgtgtcagtttcattttgagaaacttatctctttttttccatattcttaaatgtggggaagtagctttccccggtgttgtggctgctatttttacaaaacaaatcatcgtgaaatctaatcttaaatcaattttatattttgttaacaaattctgtaggccaggaatttggacaagtcacaatggggacagcatgtctctgctccatgacgtctgatcatttgtgaaaaaactcraaggccaggagagagactcagttgctgagggcttaagtcgtgttcactcctttgtctggttctggggctggaagaattcggattaggacgccttataggagcgcctctccatgtggcatccttgtagaatggtggctatagagtagttggatttcttactgggtaacccagggctctaagtgcaagtgttcaggcaaacaaagttgaggctgcattgctcttgctg

SEQ ID NO: 764763 - DNA, 591 bp, Homo sapiens
ttaaaatattttattgctaaaagatgctaatgattattagagccttgaatgagttacagtctttttgctgatgaagagtcttacctcagtgcggatagctgctgattgatcaagttggtggctgctgaaaggtggggtggctttggcatctcttaaaataaaataacaataaagtttgctgtattgattgactcttcctttcacaaaagatttctgtgtagcacacaatgctgtgtgatagcattttactcacagtagaacttcttttaaaattggagtcaatcctcttaaaccctgctactgctttatcaatgagtttatgtactattctaaatcctttcttgtcattttcacaatgctcatggcatcttcaccaggagtatattctattcaaraaatcattttctttgctcatctgtaaaaagcaactcatccgttcaagttttatcatgagattgcagcaattcagccacatcttcagaccccacttctaattctagttctctggctatttctaccactactgaagttacttcctccactgaagttttgaacccctcaaagtcatccataagggttggaatcaactcc

SEQ ID NO: 764764 - DNA, 363 bp, Homo sapiens
ccacatcaacttacatgtcgggtctcagcttaagtacatttcctccacaaggcctttctgaattctcggacaaaattaaaggcctcttccccatatgttccaatagttctctctacttcccctttcataatattacctctcctgtaattaactgtttaatcctctgactttatcstttacattgtaaatcccatcaaattcactgttgacatttagcagctggaatatttctggacatgtggttttaaagaattgacacataaactctctttgttctgttttgttcactggagataatacacaccactcagtgtaagattattttagtaatagtgctatgagaaacaagaagctgcatacaat

SEQ ID NO: 764765 - DNA, 644 bp, Homo sapiens
gataaagaacaattatttggcaactcaataagaacacaaggcaatttttttttaacgggcaaaggatgtaaagacacctcacaatagaagttacatgaaaagacactcaatatcattagtcactagagatacgcaaattaaaaccacaatgagatacctggtaggatggctaaaactaacaaaacggacaatactatgtgctgaccaggatgtaaagcaggtggaaattttatatattgctgtcaggattgcacaatggtacagccactttggaaaacattttggcagtcaaaacatagtatatttagggctcagtattatctaggttttaggcatccactgcgggtcttatcaaaggtaagtgggtaaacaaactgtgggatattcatacaattycatactacttagcaactcagaggagcaaactatggacacatgcaacaacacagatgaatctcaaaagcattatataagtgaaagaagacacacaggaatgacaacatactgtatgattacatttatatgcaagtctagaaaaggcaaaactatgctgacagttcagtggttgccaaaggccaggcagtggggtctacactgaccacaaatgggcaagagaaaacttttagtggtgatggaaatgttct

SEQ ID NO: 764766 - DNA, 610 bp, Homo sapiens
ggatgctgaattttatcaaaagccttttctgcatctactgagataatcatctggtttttgttttcagttctgtttatgtgattaatcacatttattgatttgcatatgttgaagaaacgttgcatccctggaataaagcctatttgattgctgtagattagctttttgatgtgttgctggatttggtttgctagtattttagtgagratttttgcatctgttttcatcaaggatattggtataatgttttctttatgggtgtcattgcacatgagatgggtctcttgaagacagcatacggttgggtcgtgctcttttatccaagttgccattctgtgccttttaactggggacagttagcccatttacattcaaggttaatattgacatgtgtggatttgatcctgttgttgtgttgttagctggttattattcagacttgattgtgtggttgctttatagtgtcagtggtctatgtacttaactgtttttatgtggctggtaatggtctttcctttccatatttatcactccccgtaggacctcttgtaaagcaggtgtgaaggtaatgaatttccttagcattagcttgtctgaaaagtatcttatt

SEQ ID NO: 764767 - DNA, 564 bp, Homo sapiens
ttgtcctcaatcttagggaataaagctcaggattagaaaaccacagttgaagccagtatttttgggaacatgtaacttaattcatgaaaacctgaggctcagtgtagacaagcttgagagtttaaaagtcttaggggttcagtctcaggggggtctttacacttttgtgttttacctccaggagccctgccaagttctcactgtgaaaattggagtataatctcttcatscttctggcagagggaggataaaaataaccactgtaatgtaagcccagagcagcctgcccttaccctctccttcaaggggaattacaagagcctaactaatgtgaggtaagaaaaacattcaatccattcaactcatcctcctctagctttcctgcttcacttaagtggggagaagctgagaagccctttcaaaggtcacagcccaggacacaggctcagtggaagatagcaacccaatcataagactatagaatgctgttttccccataccttacaaccacatcaacaggactactgtaaataatggagaattacaattgaaaaattgaaagtt

SEQ ID NO: 764768 - DNA, 485 bp, Homo sapiens
atgcctgtaatctcaacatttttgggaacctgaggcaggaggattgcttgaagccacgagtttaagactagcttgggcaacagagagagaacccatctctacaaaaaattttaaaagttagctgaacttggttgcacacacctgtcgtcccagctacttgggaggccggagtgggaggatcacttgagcacaggaagtcgaggctgcagtgagctatgattgcaccactgcactccagcctgagccacagagcaagaccctgtctctaaaaargataaataaataaataaagataggaaaacgtcctttgaaaattaaagaaccctatttaagtataatttacagacaacattgtttatatttttaataaaaatccagataaacctttgcagaaacaggcctcaggtgaatcacttccttgagaaactgtgagtaacccaagggcactgtggaagccctgggccttggggatagaggatcaacca

SEQ ID NO: 764769 - DNA, 646 bp, Homo sapiens
gtaggatacttcaacaccccactttcattgtctggatgacagatcatccagacagaaatcaacaaggaaacactggaattaaactacactctgtacaaatggacctaactgacatttactgcacatttcatccaactgytgcagaattcacattcttatcatcagcacacggaacattcttcactttagaacatgttaggacacaaaacaaatctcaataaattgaaaaaagtaaaatcctatcaaatatcttttctaaccacaatggaataaaactagaaatcaataacaggaagaactttggaaactgcaaaaatacatattaattaaacaaatcactccggaatgaccaatgagtcaatgagcaaatttttttaatgttgtaaaaatttcttaaagcaaaaacagaaacataacatacctttaaggcatagcaaacacagccttaagagggaagcttataacaataaatatttacataaaaagtggaaagactttaaataaaaaacaaaactaggtacctcaaagaactagaaaagcagaaataaaccaaagaatagaaagaaataattaacatcagagaagaaataaatgaaactgaaaataaataacaatacaaagggatcaataagtctgaaaagaccaa

SEQ ID NO: 764770 - DNA, 580 bp, Homo sapiens
attcaggtcatttacctccttggttaaatttacaactaagtatttaaattttttgttgctattgtaaatgggattattttatttttctttcagatagtctgttattagtatatagaaatgctatttagttttctatgttgattctatgtcctgtaactttactgatttcatttaccrgttctaacagttttgtgatagagtctttaggattttttatatgtaaggttatgtaatcttacatataaaatatagagacaatttcacttcctctattgctatgagtatgacttttatttctttcttttgcctaattcttctggctaggacttccagtactaagttgaaaagaagtgttgaagagagtatcattatcttgtctctgatcttcgaggaaaagctttcaaattttcaccattgggaatgatgtcagctacaggtttgttatatatggcctaacggtgttgaggtgcattccctttatagctaatctgctgagaggttttatcatgaatagttgttaaattttatcaaatgttttttctgcatctactgagatgatcataggatagttatctctaac

SEQ ID NO: 764771 - DNA, 580 bp, Homo sapiens
attcaggtcatttacctccttggttaaatttacaactaagtatttaaattttttgttgctattgtaaatgggattattttatttttctttcagatagtctgttattagtatatagaaatgctatttagttttctatgttgattctatgtcctgtaactttactgatttcatttaccagttctaacagttttgtgatagagtctttaggattttttatatgtaaggttatgtaatcttacatataaaatatagagacaatttcacttcctctattgctatgagtatgacttttatttctttcttttgcctaattcttctggctaggacttccagtactaagttgaaaagaagtgttgaagagagtatcattatcttgtctctgatcttcgaggaaaagctttcaaattttcaccaytgggaatgatgtcagctacaggtttgttatatatggcctaacggtgttgaggtgcattccctttatagctaatctgctgagaggttttatcatgaatagttgttaaattttatcaaatgttttttctgcatctactgagatgatcataggatagttatctctaac

SEQ ID NO: 764772 - DNA, 643 bp, Homo sapiens
cgacagacttatgtgagaagaaaattaaattgctcacttttaagtgaaaaagtattgtgcttcttattttagcactttaatcaattttccttagttaatgatgaaaaggcaataagaataacatgctaatgatagagacaggagacagacaagggtcccctgcgaaaccccactttcaagcctaaaatagcctgaagtctgaaaaaccggactgctggccctggatgaagcctgccctttccccgactagttctctctgaataatgcccacctgcacgctgggagaatggggtggaaccaggggaagtttgccccatttgcagagaggagaagcctggcttcttcagttcctgtgtggtgtcctgggcttcaatctgtaagacgggagcctgttagcargactctctctccctttgctgagagttcctctttcctttttcccttttcacccaataaaccctgccctaatcaccctacaatatgtctgtgtgcctaaattttccttgtcatgtgacaagaacccacttttttctacaacactaacatgtgaaagtctctcttctagaaatatccaagaatatctagtcctttggagcttattatttagtccttaccctgtcattaggaaaaaaaaaaaaaaaac

SEQ ID NO: 764773 - DNA, 643 bp, Homo sapiens
cgacagacttatgtgagaagaaaattaaattgctcacttttaagtgaaaaagtattgtgcttcttattttagcactttaatcaattttccttagttaatgatgaaaaggcaataagaataacatgctaatgatagagacaggagacagacaagggtcccctgcgaaaccccactttcaagcctaaaatagcctgaagtctgaaaaaccggactgctggccctggatgaagcctgccctttccccgactagttctctctgaataatgcccacctgcacgctgggagaatggggtggaaccaggggaagtttgccccatttgcagagaggagaagcctggcttcttcagttcctgtgtggtgtcctgggcttcaatctgtaagacgggagcctgttagcaagactctctctccctttgctgagagttcctctttcctttttcccttttcacccaataaaccctgccctaatcaccctacaatakgtctgtgtgcctaaattttccttgtcatgtgacaagaacccacttttttctacaacactaacatgtgaaagtctctcttctagaaatatccaagaatatctagtcctttggagcttattatttagtccttaccctgtcattaggaaaaaaaaaaaaaaaac

SEQ ID NO: 764774 - DNA, 506 bp, Homo sapiens
gttttgtattcccctcagtgcatagtacatcagcatataacagttaatagtagtggtcccctgcttgtggaatttatacacagcagcttcccaggccatggaagaaattccacctggatctgtttatttccttcttgaatagaagatgagattttcccttcatgttctcatctccgtctaaagtgtttaagttcaaaactctcarttcctgaagttggaggttacagtgcgctatgatcactccactgcactccagcgtgggcaacagagtaaggctctgtctctaaaaaataaaaataaataaaaaatagaaaataaaaataaaactctcagtttagggtttaaaaatatttgatgttggtgatcaataaactttatccattctaatatacttcctgaaaagtcagtctttcttccctttcccacttcctctgcgtgtttctctccagttctcattagtttccccatttcccctctttctaccagctttcagtgtgagttaatct

SEQ ID NO: 764775 - DNA, 611 bp, Homo sapiens
tatcaataattgcattaaatgcagatagtctaaaacgatcaagacggaggctgtcagggtgattaaaaacatgaaccaactgtatgctatctacaagaaacatcagatataatgacatatgcacattgaaaataaaagggcagaaaagatatacaaacattaatcartggaattcaagagtggctatgttaatatcagataaagtagactttagaacaaagaaaattgtcagagacagagctggacataatataatgatgcaaaggtcaatctactaggaagatattgcaattctaaatgttaatgcacgagacaacagctacaaaatacgtgaagtgaaaactgatagaatagaaaggagaaacaggcaaatctacaattatatgtggagagttcaacacccctttctcaaaagttgataggacagttatacagaaaatcagtaaggatatagaatatctcacaaaaccatcaactaataggatcaaatttacatttataaaacagtccacccaataacagcagaatatatatattttttcaaatgcctgtggactatatcccaaaaaagataatagcttgagtgattttaaaaacccttaatataaggc

SEQ ID NO: 764776 - DNA, 611 bp, Homo sapiens
tatcaataattgcattaaatgcagatagtctaaaacgatcaagacggaggctgtcagggtgattaaaaacatgaaccaactgtatgctatctacaagaaacatcagatataatgacatatgcacattgaaaataaaagggcagaaaagatatacaaacattaatcaatggaattcaagagtggctatgttaatatcagataaagtagactttagaacaaagaaaattgtcagagacagagctggacataatataatgatgcaaaggtcaatctactaggaagatattgcaattctaaatgttaatgcacgagacaacagctacaaaatacgtgaagtgaaaactgatagaayagaaaggagaaacaggcaaatctacaattatatgtggagagttcaacacccctttctcaaaagttgataggacagttatacagaaaatcagtaaggatatagaatatctcacaaaaccatcaactaataggatcaaatttacatttataaaacagtccacccaataacagcagaatatatatattttttcaaatgcctgtggactatatcccaaaaaagataatagcttgagtgattttaaaaacccttaatataaggc

SEQ ID NO: 764777 - DNA, 636 bp, Homo sapiens
aagcattcaaagaaacttctttgtgatgagtgcattcatcagaaacagttgaacgtttcttttgattcagcagttttgaatctctcgttttgcagatctgaaagtggatatctgtagcgctttgaggcctacaatgcaaaagcacatatcttcaaataaaaactatgcagatgcattctgagaaacttcyttctgaggtgtgcattcaactcacacagtcaaacctatactttgattgagcagttttgaatctctttttttgcagaatctgcaagtggacctttggagagctttgaggcctattgtggaaaaggaaatatcttcacataaaaaatacacagaagcattctgagaaacttctttgtgatgtgtgcattcaactcacagagttgaaccgatcttttgattgagcagttttgaatctttctttttgtagaatctgcaagtggatatttggagcgcttggaggcctactgtggaaaagcaaatatcttcacatgaaaactgcacagaagcattttgagagacttatttgctatgtgtgcattcatctcatagagttgaaactttcttttgatttagtagtttcgaaacactctttttgtacaatctgcaattggatatttgaagcgattt

SEQ ID NO: 764778 - DNA, 639 bp, Homo sapiens
ctcattgcagcctcaaactccccagggttaggcgattcctcaagggatcctacggcctcggcctcccaaagtgttggggttacaggcgtgagccaccatcacccggcctgagtaaatacatctggtctcactacgtgttaaccacacacccatgaagaactcaagtcaagagagagtcggtaaaagactctcagcattctctcccgaaagcagtgaggtggatggcggccgtgtgtcccgagctcctgtggtttcaggtgatttccaatgtttccagagaggcgcgagccgcagtcattcggggcatccgagcacgagatggggtttctgacgcgacttaagggccaggaagggccagaatctgccaaggcctgtgtcccagtgtggggtcgatggaacccaaggtagagggagtctgtggtccrcacggagagagctccagccctaggccccactgtgcagactgaatcagaaggaagagagtccttcgtcctacatgccacattcctccacagaacttgggagcaaatccattttccaaacatgaggtgactctcgctttgcaatggataacaaggggacgggctttccagagtctgcagggtaaagaagtcattctggctcggcctcccccatccc

SEQ ID NO: 764779 - DNA, 636 bp, Homo sapiens
agtgagttgctcaagatggtcagaggctgtcttattccatttgggctgccgtaacaaaataccttagcctagggggcttataagcagcagaaattttgtctcataggtctggatgctggcaagtggaaggtcaaagtagtggcagattaggtgtctgttgaggacctgtatcttacagagggcacctcctagctgtgtcctcacatggtggaaggagagaacaagctcccttggctcccttttacaaggcctcttatccyattcatgggctctttgctttcatggtgaaatcacttcctaaagtctttgcctcctaattcaaacctaacctatcagggattagttttaacacacggattttagggacacacaaacattgactatagcagagacgtagctggacctgggtctgggaccttctgggtccagctccattatgacactcacactgcacatggcctcccacatgatgtaattctgttctgtgacattgtgcccatgaggcagggatgcagtagaggcctctgcagacatggcttgttcttgggacgtccgcctggctttatgctgcaggcctggaagaatccaccagctgcccactctcatgcctgactcaggttcgtgggtccctccagg

SEQ ID NO: 764780 - DNA, 636 bp, Homo sapiens
agtgagttgctcaagatggtcagaggctgtcttattccatttgggctgccgtaacaaaataccttagcctagggggcttataagcagcagaaattttgtctcataggtctggatgctggcaagtggaaggtcaaagtagtggcagattaggtgtctgttgaggacctgtatcttacagagggcacctcctagctgtgtcctcacatggtggaaggagagaacaagctcccttggctcccttttacaaggcctcttatcccattcatgggctctttgctttcatggtgaaatcacttcctaaagtctttgcctcctaattcaaacctaacctatcagggattagttttaacacacggattttagggacacacaaacattgactatagcagagacstagctggacctgggtctgggaccttctgggtccagctccattatgacactcacactgcacatggcctcccacatgatgtaattctgttctgtgacattgtgcccatgaggcagggatgcagtagaggcctctgcagacatggcttgttcttgggacgtccgcctggctttatgctgcaggcctggaagaatccaccagctgcccactctcatgcctgactcaggttcgtgggtccctccagg

SEQ ID NO: 764781 - DNA, 629 bp, Homo sapiens
tatgtgagggtttccatccttatttggtataagaggactggactgagtcagctcagcctgtcacatccccactgtcagaacctgggtaaccctgagtgctcagcatgagtggggtcccccagtgtctccctccacagcacgttctgaaggcataggagctggactgacattcgggacacctaaacctttgttccacttctgccatgacagcttcattggtccaggcaaatcatggcagctctctatgcctcatttttttattcctcacacaatggaatgacattaccctcagtgcttacgtaagggaagagaaatgattcccctgccttctccccatttttgcatttgccagagcatcagatttttgtgtgtggccaagaatatagggaaggaagagcaggtaagctttgggtgcaaagaggrcatttaggggtttcaattaaggaaagaaagtcgggggcagagaggggtggtggagcatgatctttggccaatagtgaggaactaatgaagtgcaatgtgcatgggttagggtgtgtagcagcctgggtcccatcaaaagatagaaaccacacagtgggtctaacagggaagtgtaggataaaggattgcaactatgataaaagagt

SEQ ID NO: 764782 - DNA, 629 bp, Homo sapiens
tatgtgagggtttccatccttatttggtataagaggactggactgagtcagctcagcctgtcacatccccactgtcagaacctgggtaaccctgagtgctcagcatgagtggggtcccccagtgtctccctccacagcacgttctgaaggcataggagctggactgacattcgggacacctaaacctttgttccacttctgccatgacagcttcattggtccaggcaaatcatggcagctctctatgcctcatttttttattcctcacacaatggaatgacattaccctcagtgcttacgtaagggaagagaaatgattcccctgccttctccccatttttgcatttgccagagcatcagatttttgtgtgtggccaagaatatagggaaggaagagcaggtaagctttgggtgcaaagagggcatttaggggtttcaattaaggaaagaaagtcgggggcagagargggtggtggagcatgatctttggccaatagtgaggaactaatgaagtgcaatgtgcatgggttagggtgtgtagcagcctgggtcccatcaaaagatagaaaccacacagtgggtctaacagggaagtgtaggataaaggattgcaactatgataaaagagt

SEQ ID NO: 764783 - DNA, 571 bp, Homo sapiens
agttgactctcacttcatgcaatttgtgttataaatgtttcctgtgtttccaactcctacaaaaccctcaaatccatgtgtatcttcttcactttcagccaataggaatctcgcctcctatatacttgaaaaagtaaaggccatatgatatgaattgtctccatttgaccacaacatatctgcgataaccctcttgctttcctcttacctcagagttttctcctctctctctcggagatgtcattcatttacacaatgcgacaacacatagrtctcacttctgcatcttcccctacattgtcattcaactaactactgaatgtcctcaactagatttcctgcaaatgctttaaacatagtacctttaaattctttaggatttccttcaatcctataaaattttgtggatctataaaattatctggatagttgtctttattctccaattcatttattcaggtcaagataggtgaatgattgattttttttctctctctagcactaaaattccataatctttttactatgtcaagtttaacaccctatcaaattcttcctccaggatttaatc

SEQ ID NO: 764784 - DNA, 550 bp, Homo sapiens
agagtgcagtggcacgatctttgctcactaccacctccacctcctgggttcaaacgatcctcgtgcctcagcttcccaagtagctgggattacaagcatgtgccaacatgctcagctaattttcttttattttcttttttctttcttttttttsggggggtgggggcggtatttttagtagagagactgggtttcatcatgttggctaggctggtctcaaactcctggcctcaagtgatctacctgcctcggcctcccaaagtgctgggattacaggtgtaagccactgcctggccaggagatttcatattaaagtacttttttctgtcccctctttaaacgtcaagagatacagacacagttggcccatatctctatgttgcaataatcagcctgggatgaatagccacttcctgttctcccagttcattacaatcctcagaagcacctacttctctgtttcactgatttctagtacatggttgacttctgtaggcattagagcttgtgattcatggtggtcggccctcaaataaatgaatgttgaccc

SEQ ID NO: 764785 - DNA, 593 bp, Homo sapiens
aagggagcccaatcaagtgaaaagagaggaaataaaaatggaaaaaaaaggcattttaaattagaaataactgcagatatcaggattaaataaatttataaagtttttaaattgcatttatgataatatttcaaaacttagatgaattggatgaatatctaggaaaacataaataacaaaaaataataataccatgacagaaattatcagtggtccagaagattctcttttaaattgtgccttagtgtccatacagtttcaaagtgaagtcttttaaacctttaaggaatgaattgttcttacactatggtatgcaatattgtaaaaatttaatcttttcactattccatgaaacygacattaggacacatcgtatagcatataatggacacatttaatgtgttattatttcaatatttctttaaaatcttctgttaaattaataatgcactttataatacataaagtcatagatgttgaatatattattcaacagagattaatgtcagaaaataattctgtccccttcccccatgacatgcccattgcatgtctatggcctataaacttatctgcacaaaagaaatttaaat

SEQ ID NO: 764786 - DNA, 593 bp, Homo sapiens
aagggagcccaatcaagtgaaaagagaggaaataaaaatggaaaaaaaaggcattttaaattagaaataactgcagatatcaggattaaataaatttataaagtttttaaattgcatttatgataatatttcaaaacttagatgaattggatgaatatctaggaaaacataaataacaaaaaataataataccatgacagaaattatcagtggtccagaagattctcttttaaattgtgccttagtgtccatacagtttcaaagtgaagtcttttaaacctttaaggaatgaattgttcttacactatggtatgcaatattgtaaaaatttaatcttttcactattccatgaaactgacattaggacacatcgtatagcatataatggacayatttaatgtgttattatttcaatatttctttaaaatcttctgttaaattaataatgcactttataatacataaagtcatagatgttgaatatattattcaacagagattaatgtcagaaaataattctgtccccttcccccatgacatgcccattgcatgtctatggcctataaacttatctgcacaaaagaaatttaaat

SEQ ID NO: 764787 - DNA, 624 bp, Homo sapiens
cttaagtgctcagttctttccagatctaatgcctgtcattattgtttctcctcttgacacaactaggttgaaatattcattgcctttgaattactccaatagataatcttcattaggaaccaacatgtagatttttccagaagaaacatgtacacatctcacagtatgcagtttccaaaattaccagtttaattttatttttattaaggcccaatgtgcttgccaattgtttaaaaatgtgatgttggtgtctttcatgtctgtgtttatatagttctacaagttgagaaatgtctctttttaaaaaatcagtgaaaatataaaaagtgtcatgctttatctttctacatgacatatctttgtgctaaacttttttcacataaatgaataataaatctgttgctcggcaaagaaaaataattggttatatgcgggatattttattccagttcagaagaaatacgtgaatgtaaagaggagaratattttacttgggcttatgaaatttcatatttattattgctttttatactcaagatgtgacagaaattggtgttaggatctgaagaaggaaaatgacaacaggttaatcaaagaatctaaaatggagccaggaggccattt

SEQ ID NO: 764788 - DNA, 605 bp, Homo sapiens
gttcaaacccttctctgttcagtctctcctgccaacagctgccagatcactcttcagaaatgttgcccgcttcacgtaaatccctgtcgagatccacaatggctccccactgccagcagagtaaatactccattctcaccctttcatcgagtagttgtagctttcagtttcaattttatcatcctctgcaccatatcatttcttctctacatcagccaggaaagtatcttccccatcaatgaactgtgtcacacgcctttagtttttagttctgtgttttgaataatatttgttatcctgttgtgtttagtcctaattattgaacatcacctagtactgtaatattttaaatttcatttgaaatattaggtaaaggytttctagttaaacagttgatctttctttttctttctttctttctttcttttttttttttttttttgcctgggtaaaaaaagaaagacagctggtctgcagatcaaactctttctggacttagagccatttatcagccttatatgcgaatggccctttcatttcatgtaatcacagtgcatatagatacgattgattagagctgccacaaattatctctatgcttaatt

SEQ ID NO: 764789 - DNA, 604 bp, Homo sapiens
ttcaaacccttctctgttcagtctctcctgccaacagctgccagatcactcttcagaaatgttgcccgcttcacgtaaatccctgtcgagatccacaatggctccccactgccagcagagtaaatactccattctcaccctttcatcgagtagttgtagctttcagtttcaattttatcatcctctgcaccatatcatttcttctctacatcagccaggaaagtatcttccccatcaatgaactgtgtcacacgcctttagtttttagttctgtgttttgaataatatttgttatcctgttgtgtttagtcctaattattgaacatcacctagtactgtaatattttaaatttcatttgaaatattaggtaaaggttttctagttaaacagttgatctttctttttctttctttctttctttyttttttttttttttttttgcctgggtaaaaaaagaaagacagctggtctgcagatcaaactctttctggacttagagccatttatcagccttatatgcgaatggccctttcatttcatgtaatcacagtgcatatagatacgattgattagagctgccacaaattatctctatgcttaatt

SEQ ID NO: 764790 - DNA, 585 bp, Homo sapiens
ccagatggtcttcagtgcattctttgggtagcagctccccaggagccctctcccaacccagccccagtggtgtccctccctggctatttctcttgtatggtgtcttgatgatatgtatttttgcctcttgcattcctgttcctcagtcggagcccccaggtgtttctgttcttcagagatccccaaatmttttaggtagagggaaaatttctaagaacagggtcctcttaacagtcattgcaactaaaagtataaaaggaagctggactagaatgggggcacacactagccacgaacactacattttagtgctgttgcttcactcactggtaaaacatggcgcagtgcatgtttgagtatgggcagaaggttgtctgccacaaaaaatgccttctactccacatacatgaaactcccaagaaaatcagtagtttgtcctcatcaagacagtggaaagacagcatagtgtaagggcctgagtgaagcttttaggaagcaactgatcacagttccacaacttgggtgctatgcagctttggcaaactcactaatgtctttcaaccacctggcatctacactgaaaga

SEQ ID NO: 764791 - DNA, 526 bp, Homo sapiens
taatttaagtaacctgcaactttgcctttaatgggttatcaatagcatatttagagctctttcttgcaattagttgttgcataagaatttcaaaataacgtcaagaataacaaatagtttttacttacaaagagacttgcaaattgaatttccttcatctgtaaaacctctccacataaaattagtcatcctattttatactttatttttaggctgctttatgttctcttaacattcagtgtcgttgaatatcaaaaattgcagcawttctatctatatgtgaagactttactcacttcccagaggttcctgctcaaaaattaaagtccatgctaattttaggaattaatgtatttttaaataacatgcaccttacccagcttttaagagatttgttatgaataaggagtaatcatcatgcatatgtatcatgctgagtgtacatgtgaatttaacagtgaatatatttcatatgatttttttctgctatttactttatgctttgatgaagcgccaaaactaaagt

SEQ ID NO: 764792 - DNA, 632 bp, Homo sapiens
ggaagtgttttggtcatgagggtggatccctcatgaatgccttggtgccttccccacagtaataagtgagttctcactgtattagttcatgtgagagctggttgtttaagaacctgtctgtttttggccggccgcagtggctcaygcctgtaatcccagcactttgggaggccgaggcgggcagatcacgaggtcaggagatcaagaccatcctggctaacatggtgaaaccctgtctctactaaaaatacaaaaaactagccggccgtggtggcgggcacctgtagtcccagctacttgggaggctgaggcaggagaatggagtgaacccgggaggtggagcttgcagtgagccaagattgcaccactgcactccaacctgggcaacagagcgagactccgtctggcaaaaagaaaaaaaaaaaaaagaaagaaaaaaaaagaacctgtccattttttttttgctccctctcctgctgtgtaacatacctgctccctctttgccttacgctgtgatcgtagacttcttgatgcctttgcagaagcagatgccagcagtatccttcttgtatagtttgcagaaccatgagtcaaaacaaacctcttttctttataagttacccagtctgagg

SEQ ID NO: 764793 - DNA, 623 bp, Homo sapiens
cctctgggtccctggcttgcttgccaccccaggtggctggacatggcacgaagtacgctgatcctacttgagaaagcggaatagccagtggtcacaggagcagagacttggtgccacaaagcgagctgtgagaaactgctgtttcaactcrgtaacatagacacttgccagtaaattatggcctgagacatctcagagggctgcgggtcgggatacactgctctcaaggcaacacaatgccagctacagtgtgcatcctgcaacagcagctcaacacaaagggatggggaggatgggccccagcttggggattctggcaccgggaccaatgacaccatgcgcaggaggtgagagccaagggggtgatagggagagcaagggaagactccatcaggaatgaactcagcactgggggcactgcgaagagaatggctttgtaaatctagccactgtgcaaactatctgaggagagggggaaggggaggtgggggagccagggaagaggccaactgcattatgaaggtcctggtgacaataaccttttgtcctcaaaacaatttgagcctgccaagctgctccacagtctccgtgaaagcatgagggtgggaaaaaaaaggatcccc

SEQ ID NO: 764794 - DNA, 623 bp, Homo sapiens
cctctgggtccctggcttgcttgccaccccaggtggctggacatggcacgaagtacgctgatcctacttgagaaagcggaatagccagtggtcacaggagcagagacttggtgccacaaagcgagctgtgagaaactgctgtttcaactcggtaacatagacacttgccagtaaattatggcctgagacatctcagagggctgcgggtcgggatacactgctctcaaggcaacacaatgccagctacagtgtgcatcctgcaacagcagctcaacacaaagggatggggaggatgggccccagcttggggattctggcaccgggaccaatgacaccatgcgcagraggtgagagccaagggggtgatagggagagcaagggaagactccatcaggaatgaactcagcactgggggcactgcgaagagaatggctttgtaaatctagccactgtgcaaactatctgaggagagggggaaggggaggtgggggagccagggaagaggccaactgcattatgaaggtcctggtgacaataaccttttgtcctcaaaacaatttgagcctgccaagctgctccacagtctccgtgaaagcatgagggtgggaaaaaaaaggatcccc

SEQ ID NO: 764795 - DNA, 630 bp, Homo sapiens
gcagcagcgattcaaaggattgattccaattttgaaagaagttctactgtgaataaaatgctatcaaacagcatcatatactacagagaaatcttttgtgaaaagaaaggtcaatcaatgctgcaaacttcattgttgtcttattgtaagaaattgccacagcccaaacttcagcacttcagcaactaccacctgtcagttagcagccatcagcacagagacaagaccctccttcatcagccaaaaggttacaattccttgaaagctcagataattgttggcattttttagcaatattttaaaactacggtaaaaacattttttagacataatgctattacacatttaatagacttcagtatagtgtaaacataacttktatatatacttagaaaccaaaaaatttgtatgatttgctttatttcaatatttgctttattgtggtggtctcatactgaaccctcaatatctctgaggtatgcctgtacttagaaccagaattttatataacaataatgcactatttgtaaaatatcctcattttctataaaaccacatatttgcttacagttataaaaagaaaacaagctggcatgcacatggaaaaagctgcacaagaaatatcttctg

SEQ ID NO: 764796 - DNA, 520 bp, Homo sapiens
gtccagcactccccagtgagatgaacctggtacctcagttggaaatgcagaaatcacccgtcttctgtgtcactcacactgggagctgtagactggagctgttcctatttggccatcttggctcctgaatttgatcttgtcattatgttgctagctggttattttgcccactagttgatgcagtttcttcataatgtcgatggtctttacaatttggtatgtttttgcagtggctggtaccagtttttcctttccacatttagtgcttccttcaggagttctcgtaasgcaggcctggtggtgacaaaatctctcagaatttgcttgtctgtaaaggcttttatttctcctttgcttgtgaagcttagtttggctggatatgaaattctgggttgaaaattcttttctttaagaatattgaatattggcccccactgtcttctggcttgtagggtttctgcagagagatatgctgttagtctgatgggcttccctttgtgggtaacctgccctttctctc

SEQ ID NO: 764797 - DNA, 626 bp, Homo sapiens
tcacttatactctgaaaatcttcatgaaataatatacagttttgtgactgaccaaactgggcttccttgtttagagttcttgctgagttaaaagttgatagaatgagttgacagagatatgcctgactaaatcagtgttaagtttcgttttgctttgtttttttgccatttcttaaaagctgggtgctgtttgtaagattatctgcagagggaaaaataattagtctaaggcttatttttccacctgtatttaatttcttttacaggcttggatcatggtatacttccacaggtattcggagagatgmatattatattatcataattagaatcttaggatctacagtggatatggaatagggtgaattttttcagaatattatgaagaaaacatttcagagatatgtcttcagagaatacacagcatcagagaaaaagcagggccattatattagttttacttgctctgaacagttttagcaaagggttgcaaacgtattattgattacaatgttgaattcgtttgattttcattatggtcatggtaggaagtgcaagtcaggaataccttcctcagagacttaagagtggttaagtgcgtagcagcacagggaaatggaggtgct

SEQ ID NO: 764798 - DNA, 605 bp, Homo sapiens
actaattttccatttaaaaaagtgttawcacaattgcagtgaatgtgaagtggtatctcattatggttttgatttacacttccctaatggcttatggtattgatcatcttctcatgtacctgttagccatttgtatatcttctttagggaaacgtctgttcaagtccttgctatttttaaatgagttgttcatttttccattgatgagttttaagtgccctttatatattctggatactagacccttatcaaatatataatttgcaaatatttcttccattctataggttgtcattttactttcttgatagtgtcctctcatgcacaaaagtttttaatttctatgaagtccaacttatctattttttcttttggtgcttgtacttttgatgtcgtatctaagaaaccactggcaaatccaaggtcatgaagatttacccgtattttattcctaagattttttatggttttagctcttagatttaggactctgatctattttaatttttatataactggactttcttatagatttatagacattctttctgtattttcaatattaatggtttggttttggctacatggatggcaaacatctttta

SEQ ID NO: 764799 - DNA, 605 bp, Homo sapiens
actaattttccatttaaaaaagtgttaacacaattgcagtgaatgtgaagtggtatctcattatggttttgatttacacttccctaatggcttatggtattgatcatcttctcatgtacctgttagccatttgtatatcttctttagggaaacgtctgttcaagtccttgctatttttaaatgagttgttcatttttccattgatgagttttaagtgccctttatatattctggatactagacccttatcaaatatataatttgcaaatatttcttccattctataggttgtcattttactttcttgatagtgtcctctcatgcacaaaagtttttaatttctatgaagtccaacttatctattttttcttttggtgcttgtacttttgatgtcgtatctaagaaaccactggcaaatccaaggtcatgaagatttacccstattttattcctaagattttttatggttttagctcttagatttaggactctgatctattttaatttttatataactggactttcttatagatttatagacattctttctgtattttcaatattaatggtttggttttggctacatggatggcaaacatctttta

SEQ ID NO: 764800 - DNA, 453 bp, Homo sapiens
ccaacagaacggcccttctggagtctcactgggtaagcaagcctcttcaggtggtacctggttcatgaaaaaaactgaaattctggcctcatcagaggaattccctgaatcatttatttcagatttcaaattccagttttgaaatgaaaataaccaataaaaagaaaggactaaaaaagtaaaaatcctgcagaactataggctcgtcacttgggggttaaagccaactggttagcacctggagactaaagatgtagcagytctgtcaaccatatttgtttgcattttgatcctggaatcatctgtgttttgcagtgttgtttctctcaggcattccttggctgtatcagagatctattgctatatcagagatctgttgctattttgttccttgaaatgtctaaaaatctttacagtctcagcctttatcaagtttaaggaaggtgcccaagg

SEQ ID NO: 764801 - DNA, 521 bp, Homo sapiens
taatttaagtaacctgcaactttgcctttaatgggttatcaatagcatatttagagctctttcttgcaattagttgttgcataagaatttcaaaataacgtcaagaataacaaatagtttttacttacaaagagacttgcaaattgaatttccttcatctgtaaaacctctccacataaaattagtcatcctattttatactttatttttaggctgctttatgttctcttaacattcagtgtcgttgaatatcaaaaattgcagcawttctatctatatgtgaagactttactcacttcccagaggttcctgctcaaaaattaaagtccatgctaattttaggaattaatgtatttttaaataacatgcaccttacccagcttttaagagatttgttatgaataaggagtaatcatcatgcatatgtatcatgctgagtgtacatgtgaatttaacagtgaatatatttcatatgatttttttctgctatttactttatgctttgatgaagcgccaaaact

SEQ ID NO: 764802 - DNA, 520 bp, Homo sapiens
acagtgagtgagtttaatttctcttagtatgaaatctgacttccttaggatcttacttgacttcctttcgtgctggtttcatctcttttgggttcaaagcatttgggctcttactcattttcccgtgtcagctattgtagagaacacgtaaaacatttttaaaggaacttgccgtgcttctcttcttactttcttaagaattggcaaactcttttaggatgttccctttacatgagaggaaatgttttaaaagtgtgcaccttttgtaaaaaggctagagaagccctttatactaaggcatacaatagactcattttcttatttctctcttcctgtctgaaattactttataatcccagatgcacctytaagtcataccacagatggacataagaattaggaattgattttacctgtttgcgccctaatatattcatcgtatattctcataagcctcatctataatcccacagtttttcaaggtaatttagcattgtataaaggaaaaattaatagataa

SEQ ID NO: 764803 - DNA, 521 bp, Homo sapiens
attgtggtatagaaatacaaggatcctgaattaccagatgaactgtcttatttcccatgcctgacacccacatgcctaagagtttcacccagcagaaagtccttgcagagtagggcagtgttcattttttttaagagttcacataaccaaggataggtgaaacagacaaccctgtcaaattgttgcaggagaaattgttgcagatagtctttgagagagtcgtctcattgctcagtggtatttgctccccatgactgatagtgagttaaaccaccaaatgccatgctgagaggcctagggcagtggcaggcataagcagaatcccactgacaaattttattaggttgggaaatttccatgcctgaacgayattttcaatagctatatgtgcattatctactccagaaagaacacggcagctccattgcccacaaatatgtctatggcaatcaggtcccatttttgtctccttggttgggtcaggaatatttgccagatgcaagttgatccatgtacatgtg

SEQ ID NO: 764804 - DNA, 632 bp, Homo sapiens
ccaacccccaacaatttgtagaagatgaagatgatgatacattctcctatactgttagaatagcagctcaagacttgttgctggtaagtttaccttgatacttcagccacataatttctatcagtcacttgagcatttcttcttttttgtagacaactaatccaaggtgagcagtgttgttgggtggctttatctcagactttattggggatgcaagagagtttctgaaatgaaattcgagaytcagaaattctaaaatcattgctactggttctaacttaaaactaaatattagataaaagaattgtgcagaccatagggccggggtgcgggggagaattgtatagaggataaagtgttccatggagtaagggtagttgaatcaagaacatttcagtttatggctgggcgtggtgactcacacctgtaatcccagcacttggggaggccgaggcgggcagatcacctgaggtccagagttcaagactagcctgaccaacatggagaaaccccatctctactaaacatacaaaattagccgggcgtgatggcgcatgcctgtaatcccagctactcgggaggctgacgcaggagaattgcttgaacccgggaggcggaggttgtggtgagcc

SEQ ID NO: 764805 - DNA, 605 bp, Homo sapiens
acctctgtcatggatttatttcatttatacacctttctccatccttgggttatacgctcattctggatagccacttattttgaatgcccatagcaactgataccatgcattataaatactaggagcttgggccgggcacagtggctcatgcctataatcccagcactttgggaggccaaggcgggtggatcacgaggtcaggagatcgagaccatcctggctaacacggtgaaaccccgtctctactaaaaatacaaaaaattggccgggcgtggtggcgggtgcttgtagtcctagctacttgggaggctgaggcaggagaatggcatgaacctgggaggcggagcttgcagtgagccgagatcrtgccactgtactccagcctgggcgacagagcaagattccatctcaaaaaaaaaaaaaaaaatactaggagcttgatgactgtttgctcaattgaagttgaatttaaccctaggcagagtttatagggattaaactcaggtagtctggctccaacatctgtgctcttaatcactatactacattaatgatggctcatgaataatcttgataaatgggctgtagaatgttttttaaaaaat

SEQ ID NO: 764806 - DNA, 592 bp, Homo sapiens
ttatcatgtcagtaacagagagctaatgaaggttttgctaagtgccacacttttgggtgattaggcttctgattatattcagtgcatgttagagggagggaggagtagaactgataagaagtctttcacagtggctcaagtgagaggacattaggctctgaaccagagcaaaggcaggggaaagttaaaggaagagacagatttgaaaggaaagtggtaatacaatcaatgatgtgttacagtcttgatgaggagggggargaaaaaggagttgaagacatacctaagtttttgatagagcaatgaggggaaaaggtgatgctttttagtggaaatagggaatgagacgtgtaaattttggagggtagactacatgatatgaggagaatagtaagtgggaaaataagtatcccatggagaaagttctttaatttacctctataatctgttatagctcccttgaaatatccgttgacaaggttcttcatcttcattgtcctgttatatctgactcaatctctcatatgctcattcagactcatttcctctctgttctgggggtagatgaaaatgacaaagtgccattgttctt

SEQ ID NO: 764807 - DNA, 497 bp, Homo sapiens
caatatgtttgcctttgaatggactgatccagatactcattcaacctcaaaactaacctggatggtcctctctgaagggttctaggatagcccccacttatttgaaaatgccctagctaaggacttaagaaatttacagttgcaaacaggcaccattattcagtatctaggtgacttactcattgctagcccaactaaagaagactcggataataatactgttaaactgataaatttcctgggaactagcagatatagggtatcaccatacagagctcagattttgactcaayggctccaatatttggaatctgtattcacctctggaactgatcaacatccctagaagtaaaaaagctcttttagtcattcaagagtcgcagtccaacaaatgactgtgggcctttttaggggatggctgggtactgctgcttacgggtgcccagatttggacgtgtagccaagcatttacgggatgcactaaaagggaaagattt

SEQ ID NO: 764808 - DNA, 631 bp, Homo sapiens
catttataaaaccatcagctgtaatcccagcacattgggaggccgaggcgggtggatcgcctgaggtcaggagttggagaccagcctggccaacatggtgaaaccccgtctctactaaaaatacaaaaattagccaggcttggtggtgggcgcctctaatcccagctactcgggaggctgagacaggaggatcgcttgaacccaggagacagaggttgcagtgagccgagatcacgccactgcagtgcagcctgggcaacagagcaagattatgtctcaaaaaataaaaaataaaaataaaaataaaaccatcagatctcatgggcttattcaccgtcacaagaacagcatgggaaagacccgccccstgattcaattacctcccactgggtccctcccacgacacacgggaattatgggagctacaattcaagataagatttaacagccaaaccgcatcacgggttatgaaacaaagttattctagcaggccagacttaagagagatgagccccttgaccatcccaaggaagagtggttaagagatgcaggttgtcttatgcatcaggaaaacaggaagggtaggtatgctattattagtcggcacaagataatcaaggcacaagccttg

SEQ ID NO: 764809 - DNA, 600 bp, Homo sapiens
tcacattctaattccgttggtatcatgtcataattttggcagtaccacgcggttgtcccacttccccatggtgctgggctgagtgcacagtcgcacgctgagggaaaccaggccagagagaaggccgaagcaggcccactgcaggtcctcctgccgcctcccytataattttcttttaaatactgtatgtaattaggtgaaattttatctttgaaagcaacagatatctaaattcagaatgactgagttatacttttttttaagtttggaggcactttagtgtatttataatattttaagactgattaaaattatgtcataaaatatgagattattttacattttgtattaattagattttagattactatgaagaccatttagttttattatgccatagtagttgctattagagaatttttttttcctggctaccatataatatctgaaaatagaactttctgttgtttatcaaatctttgaagaattaataaacaccgtacatgaatgttgctttaatattcagcgtgattgtatacaccttcttaaaaataaattcagctttattattttttctttatttttttatttcaagcacgg

SEQ ID NO: 764810 - DNA, 614 bp, Homo sapiens
actaataccatgtcaccaggttggaataattcctttccctcctctcagggacaggttccctgtgatgttttaagaacttgttgatatttggctaaggagggatatctgcaactaagttggccatctctaggtcaagcacaaggtcattggttaggaagggccgtccatacagcatttcgtatgggctgagtcccgctttttggggagagtttcggattcttactaaggctataggcaacagagcaaaccatgmgaggtgggtttcttaggttagcttttttagatgtcatttgagcgtttcattcattttctcaactttcctgaggattgtggcctccgggctcagtgtaagtgatattgtatgtctaatgtctgggatactccctgggttactgtagccttgaaagtggggccgttatcactctgtaagccttggggaagtccaaatctgggaattatttcatgaattagtgcctttattacctcatgggcctgttctgtcctacaagggaaggcctccgcccaaccagtgaaagtatctacccagactagtagatactgaaatccctgagatttgggcatgtgggtaaaatctagttgccagtcttctcctg

SEQ ID NO: 764811 - DNA, 586 bp, Homo sapiens
agacactgggacttatctgatggtagaagtgggaggagggagagaatcagaaaaaataactaatgaatactaggcttaatacctggatgatgaaataatctgtacaacaagctcccatgacacaagcttacctatgtaacaaacctgcacaygtacccctgaacttaaaagttacaaataaaaaataaaaataaaaagcagtactgagtgctaacatttgtattaagaatatggtttactgggaaaaaatagacatttactaaaactgtggaccatttgtgtgagtcaaaaacccttatatatgttaggtataatgtaaagagcaatgctaaaatagctgcattttaagagaaactgtttaattttttaaattcatatttttattaacaagcacacattatgcatgacctgaaatcatatcatgaataaattagtgtatgcattatgagctcaatctgtcaatgggcttttattcgtaagtgctgccgcactcttcccaatataataatagtgctactttcattatttgaggagagcactatgtttgtacatggaattaaaacagacatgacacacttgtggggtc

SEQ ID NO: 764812 - DNA, 457 bp, Homo sapiens
catgaggttggttctcaaagtgagggcccttcttatctcttcctcttggttatcttttcatcctcctggctgttgagcagtctgccatgcaaggccagtctgaaacccacatcttcaccaattctggggccatcamtaatgggtaatcagtggtggtcacaaactggaaaaatcatggtcaggtactgtggggtgcctccctttggtggaacggtgctgatttctgtgccacatggtctatttttattcaccgtgtctagactcacaccagtaagatcctgcctctcaatatgacaaggcaaattaccttacctacatccttactctcatagaccagactttggtacctgggatagctttctactcctgggcacacctgactttgagacatcttatcaacttggattttattgtggggcttctctgttttattcaactcagttgcttaagccatcca

SEQ ID NO: 764813 - DNA, 601 bp, Homo sapiens
ctggaaatgtcttccactagttacataggctagttacataactcacttcattttatagatttaatgttttcatggatatatcagtttacaaaattatctgagagtatcatttttaaaggtctaccagaaaaaataaaacaacctaccacaaaggcctatgatttaaataaacattttccaaaaaacccrtttttgttaaaaatgccttgagataccatcactactataaacgtgaatgcttatgatagaataatatgtttgctttgatcagtcttagagcaaaacgtgtttcttaagttgtattgggtatattttctaccaaaattctcaaagcccatgctcatgcaaatagttctgttcaggcaaatgatcattatacccagtttccatatcattcatacacagctagacacattttctggtggggatttaaacaatggtatggaattctgcagtctctcctatctatatattctttcactctgaatatgtaccctaaataataattcttaaacttcatttctttatacaaatattatttttcttatgttggtgtttgtaaactaatacctgcatacaggaaataaaaaagtgatacaaa

SEQ ID NO: 764814 - DNA, 601 bp, Homo sapiens
ctggaaatgtcttccactagttacataggctagttacataactcacttcattttatagatttaatgttttcatggatatatcagtttacaaaattatctgagagtatcatttttaaaggtctaccagaaaaaataaaacaacctaccacaaaggcctatgatttaaataaacattttccaaaaaacccgtttttgttaaaaatgccttgagataccatcactactataaacgtgaatgcttatgatagaataatatgtttgctttgatcastcttagagcaaaacgtgtttcttaagttgtattgggtatattttctaccaaaattctcaaagcccatgctcatgcaaatagttctgttcaggcaaatgatcattatacccagtttccatatcattcatacacagctagacacattttctggtggggatttaaacaatggtatggaattctgcagtctctcctatctatatattctttcactctgaatatgtaccctaaataataattcttaaacttcatttctttatacaaatattatttttcttatgttggtgtttgtaaactaatacctgcatacaggaaataaaaaagtgatacaaa

SEQ ID NO: 764815 - DNA, 605 bp, Homo sapiens
attcatcatgatggcacataatatcccatccagagaatcatcaaatgaactgtttattattgcacacttgtgcttttattttcatcttgtgctaatatttgtcaatcattatctgtagttccagacattatactaacagcttctaggctttaacttccataaggattatttccaatgattcctagaataatgccatggtgacaacagaatgcacatattattttgcatcttctctattatattttgagattgatgtaccagaagcagaattactatgtcaaaagttataaatgcttcttggttagatattgtacaaaagagttgtactaagttccacataccaaacaacttgtaccaagttagaatgctactaggtttataagagagcatctctttcagcctttcytttttaatctaaaatgtttagcaagttcaaaaataaagctctgtaaacatacaaataattcagattaaatatctaaaggaaatttatagctaccagaagaaaagatatacattttataaaattgttgtataattagcttctttcttttttcttttcttcctaatctcaagctgttcattgatcatgatcatgagtaggc

SEQ ID NO: 764816 - DNA, 603 bp, Homo sapiens
tgataaatgagaagcagtaaaatgtcctagcactaatatttacacacatacaatatgtaatgctgtgtagagcagcattttaattaacactttatgaatttaataggaattataatttatgttgatatcaatatccactcagaggaatacattagttttkatttgtttctttccatgcctctatctaggggttcctgtgctgtcactttgaattatactaatttattgtgtttattttttctacacattcaatttaacatttttaaacactctgtaacagtgtgagatgagtagaaatagtattatagactccattcattaactcgtttttacatcctaatactttttcttacaggtttctatcacttttttttgctgatcatttaatttgtcctagcaggaagaatttaatttcctgaaagataacaagatccaggagttactctgtgatttttctgttgccacattttatatagctcacattgtcataagtaggttgtgagcttttctaaggcacaaccttgagttacagttcatatttactccagccagactctggtatgaagttgtttattcacacattgcgtgctatgtggatgtgct

SEQ ID NO: 764817 - DNA, 603 bp, Homo sapiens
tgataaatgagaagcagtaaaatgtcctagcactaatatttacacacatacaatatgtaatgctgtgtagagcagcattttaattaacactttatgaatttaataggaattataatttatgttgatatcaatatccactcagaggaatacattagttttgwtttgtttctttccatgcctctatctaggggttcctgtgctgtcactttgaattatactaatttattgtgtttattttttctacacattcaatttaacatttttaaacactctgtaacagtgtgagatgagtagaaatagtattatagactccattcattaactcgtttttacatcctaatactttttcttacaggtttctatcacttttttttgctgatcatttaatttgtcctagcaggaagaatttaatttcctgaaagataacaagatccaggagttactctgtgatttttctgttgccacattttatatagctcacattgtcataagtaggttgtgagcttttctaaggcacaaccttgagttacagttcatatttactccagccagactctggtatgaagttgtttattcacacattgcgtgctatgtggatgtgct

SEQ ID NO: 764818 - DNA, 603 bp, Homo sapiens
tgataaatgagaagcagtaaaatgtcctagcactaatatttacacacatacaatatgtaatgctgtgtagagcagcattttaattaacactttatgaatttaataggaattataatttatgttgatatcaatatccactcagaggaatacattagttttgatttgtttctttccatgcctctatctaggggttcctgtgctgtcactttgaattatactaatttattgtgtttattttttctacamattcaatttaacatttttaaacactctgtaacagtgtgagatgagtagaaatagtattatagactccattcattaactcgtttttacatcctaatactttttcttacaggtttctatcacttttttttgctgatcatttaatttgtcctagcaggaagaatttaatttcctgaaagataacaagatccaggagttactctgtgatttttctgttgccacattttatatagctcacattgtcataagtaggttgtgagcttttctaaggcacaaccttgagttacagttcatatttactccagccagactctggtatgaagttgtttattcacacattgcgtgctatgtggatgtgct

SEQ ID NO: 764819 - DNA, 564 bp, Homo sapiens
ctaccaggagagaaatataaaaaccacagtatgtgactaaatctgtcataatgactaaataaaaagctgcgagcaaaacaaaagtaacttcattaaaaaatgggcaaaggacatgaacagatacttgtcgaaataagacatacaagtgactaacaaacatatgaaaaactgctcagcatcactaatcagagaaatacaaatcaaaaccacaatgagataccatctcacaccagtcagaatggctacactaaaaaataaaaatagggcctgggtggtggctcacgcctgtaatcccagcactttgggaggctgaggcgggtggataacgaggtcaggagattgagaccatcctggctaacacgatgaaaccccatctctactaaaaatacaaaaaaattagctgggtgtggtggcgggygcctgtagtcccagctactagggaggctgaggcaggagaatggcgtgaacccaggaggcggagcatgcagtgagccgagatcgggccactgtactctagcctgggcgccagagcgagactctgcctcaagaaaataaaaaaataaa

SEQ ID NO: 764820 - DNA, 573 bp, Homo sapiens
gcaaatcaaagccaaaatgcaatactaccttactactgcaagaatggccataattaaaaaaatcaaaaaacagtagatgttggcgtggatgtggtgatcaaagaacacttccacactgctggtgggaatgtaaagtagtacagccatagtatggaaagcagtgtggagattccctaaagaactaaaagtagaactatcatttgatccagcattcccactgctgggtatctacccagaagaaaataagtcattatacacaaaagataactgcacatgcatgtttatagtactacaattcgcaattgcaaaattatggatccaagctaaatgcccattaatcaataagtggataaaaaaaactatggtgtgtgtrtatatatatatatatatatatatatatatatagtgtatatatatatggtgtatatatatatggtgtgtatatatatatatggtgtatatatatatatggtgtatatatatatatatatagtctccaatatcatctaggtcactgtgaatgccattaattcattcctttttgtggctgagtagtatttcatcatatatatc

SEQ ID NO: 764821 - DNA, 551 bp, Homo sapiens
tcagtggaatttagagtgataaatgtcctgttgaaaataactagagaagggagggttctaggggagggaggaaagcgccctkcagttgggagctcaggtcctggagtcatttggaatggaagttaaactctagcattaactagctgtatgaccttgagcaagtttacttagcttccctgaggtctaattttctcatctataaaatgtgggcaattgtcagcagtctccttactaaactgtgattgtgagggtttaataaaataatccatgtaaagcctttggcacagtgcctggcacatgtatcatttaaacgcgtattagtaacaattatagtgaggaataagggaagtgggctgacattatctggcattgactctgtccatctatatgataacaataatgcttataggtattactgttgccattgctcaagtgaaagcctgaggcctgggagccgaatcaaatctgctaacgtcagaaaagggtaaatgttacaccaaattcatccccatgtttatatatccacatgtttttccccctcactaatctgc

SEQ ID NO: 764822 - DNA, 588 bp, Homo sapiens
catttgtctactcaattaaatgttcccatcagtgcctttaatatttttcagccaatagtaggctgggttcattgtcacatctaccccccatgatttctctttattgttctgatttatgatatgatcaaaattgagaaattagccaatcatagaatttgacgtttaagggacaaccattgggagattccttcacttgtctctacttgctcagaatcagtagagtaattgactaacatgtccagactagaaaggttgtattagtctgttttcaccctgctgataaagacatacccaagactgggaaatttacaaaagaaagaggtttaatggacttacagttccacatggctgaggagatctcacaatcatggcagaaggcaaggaggaacaagtcgcatcttacatggatggtagcaggtaaaaagaragcttgtgcagggcaactcccatttttaaaccatcggatcttgtgagacccatttagtatcatgagaacagcataggaaagaccagaccccacgattcaattacctcccattggctccctcccatgacatgtgggaattgcaggagttacaattcaagatg

SEQ ID NO: 764823 - DNA, 556 bp, Homo sapiens
gagctgtcacattacgttacttaaattgttcagctttcaataaaaattatgggatacacaaagaaacataaaagtaaacccatgtgggggcaggaaggggaaaaggaaagcacagcagtaagttaaagtctctccaaggatgcccatacatatattgatgttaataaaaaaaaactttaagtyagttaaacatactttaacgtatcataatatgttgaacaaactacaggacttcatatctaaataattaaataaaatatgagaataataccttaaacagagaatattaataattatatagaaattatttttaaaataaataaataaaatgtgtcattgaaatgggcaataattgaaataagttcactagaggggttcaaaaacagatttaagcaggcagaaggaaaaaaacagtgaatttatgatagctaaattgagattttatggtttgagaaacagaaataaaaaaagataaataaaagggaacaaagcctcaaaaagactatgtggtaccatcaatcacactgacatatgcataatggaagtcctagaagga

SEQ ID NO: 764824 - DNA, 613 bp, Homo sapiens
ataaaattaaaagtagttactgttcctctagatgcacagatatcaacacagggacacaagaaacatgaaaaagcaagggaacatgacaccaccaaagaaacacaacagttcctcagtagctaaccccatataaatgaaaattacaaattgcctgaagatgaatacataatcatataaagggaattcatgatatacaagagratacagatagacaattcagtaagatcaagaaaataattcataatctgattgtgaaatttaagaaagagatagatataagaaaggaccaaacagaaatacgcgagttgaagaaggtggtgaatgaaataagaagtacatgtaagagtcaacagcagactagatcaagcagcaaaaagtctgtctgaacttgaaaacagatcttttaaaataacccggagagaaaaaaaatgaaaaagagtgaagaaaaagaaagtctatgggacttattaaacaccattaagtgaataaatattcagattatgagagtttcagagggtaaagagatggaaaaaggcacataaagcttatttgacaaaataatagctaaagacttcccaagttgggtgagagatatgaacatacagatccatga

SEQ ID NO: 764825 - DNA, 598 bp, Homo sapiens
atgaaatctaggcactatctgctgccatgccaagtcctccatgatttggctctgcctggcaccctgaccactcctaccacgttattattctcatttctctacctaccccagggcctttgtcctgcctttccctcagcactagctattgtacttatctgcacgtggttgattccttctcataataaataattcaattaaatacattctgtaagagacttagcctctctattttatgtacttcctattttattcatattaacttcttttgtttctccactgcatttattaaaatctaactaatttatgtgttcacctttttctyatcagcctcttcactagaaaataagttctgtgatagtagaacttgcttgttgtggatctccagcccaatgcttagcataattataaaagctcaatgaatacttatggaaataacacttttaaaaataaatgtaaatagtatatgtttttcttaactcttaagttgcttaaatgtctaaaacgtataagcaaacccacccatgaaacacaagaccatgcaatttagttctagattaattctcaatcagcgatcttctttcttgagatttcctctgct

SEQ ID NO: 764826 - DNA, 605 bp, Homo sapiens
tatatcacattcctttaggtaccaccaagccaaatattttcagatggtaattttcagaaaaatgtgtatatcatgaatacttcagtcagatgtattttgatggtggagactacatttcctcacctgagactgaaaatttatttagggcaccgaccatgtcttcaacacttttgcattcccagtgcgtagtccagggttgtatcagtagaaaccttgagatgctggctaaatgtggattaagaaattgtattttaagctcacagaattygacaagattttaaaattttatttattctaatatcctcacaaggttcacagagcatgttatagagtaggcattgagtaaatatttgctaactttaaataagtaattaaaatttgattttattgcgagatatcagagaaacatatatgcagagaaaaaagcatgacagtaaaaggagtagtttgtattagagtcatgagtttgacacaaagctcacagggagctggaaatgtatgaatggataaattggcctttgctgcacttcaatatgatgaatttcattgagtcactaaaaaatatttgttgagcacctactttatatcagacattgtgttggatg

SEQ ID NO: 764827 - DNA, 624 bp, Homo sapiens
gtattaaagcatttctctagtctttttaatgtgcaccaaaaaaaatgtttttgatcgtgtagttgcaaagaactggaaggaaagaacaacacaaaactgaatgaaagcaagggaagactctagttatttcattatttacctattctctaaygagaaaccacaaaaacgattaaaagaagggtcaccttttatttagcagtagggaatgtatgctaagagttgatgttctgaaccacttaacaagatgaactcaaatctgaaatcatcaacacttagaaatagctagtttttttacaataagtagacagcagccaataggcagcagaggatacttaactgatggcatatcttctcctggacattaataatataattcggaagttttaaagggctttgatttaaatggaaaagtagtttcaattgattaataaaaagttgagggctgcatttatctgcttatctagctgtcttgctagagatgctctgagtataatcatttccgggcccagactatgtagggagcagatgatataaacataagagatatctaagtcataaaatgtgataagagaaaaccataaggtgtttccactctaaattaagggccagaaaccccactgccaa

SEQ ID NO: 764828 - DNA, 647 bp, Homo sapiens
ttgattttattgcgagatatcagagaaacatatatgcagagaaaaaagcatgacagtaaaaggagtagtttgtattagagtcatgagtttgacacaaagctcacagggagctggaaatgtatgaatggataaattggcctttgctgcacttcaatatgatgaatttcattgagtcactaaaaaatatttgttgagcacctactttatatcwgacattgtgttggatgtcatagatacaatgaataaaacaacacaaacacgtccttgtggcttaaattttgtcttctaaagatgtatatgttatgtcctgcccaagactataggaatccaactcttgcatcaaggtaacccagatgtgaggacatggattcaaatgagatcattttggagctttatgatttgactgccctgctggatttcagacttgcatggggcctgtagtcccttcattttggtcaatttctccaatttggaatgggtgtatttacccaatgcctttacccacattgtatctaggaagtaactaacttgctttgattttacaggctcataggtggaaggtacttgccttgtctcacatcggactttggactgtggacttttgagttaaggctgaaatgagtaaagactttgggagactgtcagaa

SEQ ID NO: 764829 - DNA, 620 bp, Homo sapiens
gtatccgaaggctggaggggttgcttttcttcccaggtgtcttttgaagaggcagtcaagtcagcagctcgcggtgaccttctggtaacatcgtatgggctgggttacagcacatgccgactgctaagccggtcactggggaaaaccatgtgattgctgtgatgagcttagaatgatcattcctccttcgggagctggggtgggttgagggagtgataaagatcccgataaccttgcatttctccagcgagaaagaagaaagaaattccgtggatagggagccagccaggtttcctgcagaaaatcatgggaagcttttgagcaggggagtcagaagatgagcggtgagtattagggytttccggtcacggtgtgacacagggattggccagctcttcctgtaaagggccaggtgggaagcactcgtaggccctgtggtctctgtcgtgtctgctgaagcctgccatagtagcgtggaagcagtcagagatgacgtgtaagcaaatggtcccgactgacctccggtaaagcattgattccggaagcatttaacagacctaacaacctttcaaaccgcatggcgtttctttcccggatcccgtttcaggaacgtttctgtt

SEQ ID NO: 764830 - DNA, 588 bp, Homo sapiens
gagccatgtgacgggatccgtggtttggcagaggagacatgcgagaagacggaacgttttgtccgaatagacatctggcagggtggaacggagagaacaggtatggtggagagaacgtctgagaaggtcgcaggattcgcaggagcatcgggaaaagattgcctgcttgcccgaaggaatggcaagttccaaaggtcagaggctcgcgtgaactctgtcgggttcgagagcagctcagtgttgctggtggcaagagtgtggtacgggaatggttgggtgtggtttgaatgtctagaaaaggcgagctgagggtagatttttgagcrgtccagagcagaaggggtagaggatatattctgtgggccacggccacattctcaggatgctcgtggctgtaaatagtagatgacccaagtaagagcggctgaagccataggcaccaaaattgtgtcagcatcgtcgtgtcatgctcatgttttcccttccagctgtgctgtgggcagtgtttagttcatgtctgctttgctggcgggccgagtagcaacagctgcagttggtgtgttctctgaaggcagtatccgaaggctg

SEQ ID NO: 764831 - DNA, 669 bp, Homo sapiens
accaatgctgtgtatatgaaaggatgactttcatcctttctgtaacctatcttgtgtatatgaaaggatgcctatattctacttgtgatttaattattttcagatttgtgttggtatctaatttcactatataaatttttgatgmaacttttttataggcatatatgtattgactttttttctataaggccttttttgtattttgtcataaaacattttttcgtattttgcccagtatttgaaaaaattttttattttgtttaatttaaattcatacttatcactatcatatccattaccaaagtagaatatatttccagaagatgataatgacgaatttatattcatgcagttcatatataatctgaacagaactgtgtccacaaatttaccgagacgatagcaactgtattcatttctcttgtatgattttagtcacttcttttaggccatcaaatttgtcacacatggttaatttagctttaacttcactacaaaatagtattagtggaatagacatggtataatgtattttaagctcctcatgccttacttacactaactgacacattaacattcattcattttattcaatttgtacaaatgcttttgtggccacagaaaggctgaggaagaaatccgatatgtttaatacctattatctgtact

SEQ ID NO: 764832 - DNA, 642 bp, Homo sapiens
accacacatctataactgtttcctttctaaaggacattagactatacaactagaagatctagggtgtctctctaatataattctgtacagatcttaagttacataatttcaaaagattttctgttagccaccatgagactgtaaatgtttaatatttgaatattaccacaaaatgtatgattgatagttcctatcaattaaataataaattgtttttcttaaaatgtgtttaatcatataattgagagtataacataagcttttaagtaacagagcaattgtaatacattttggcacttttttaatgctttattaargttgttagtccattttgcactgctctaaaggaatacctgagactggaaaatttataaggaaaagatgtttatttggctcactattctgcaggtcacacaagcatgacactagtatctggtcagcttttggtgaggcttcttgtagcttctaccatggcagatgacaaagggagcacagatgtgtcacatggcaagagaggaagcaagggaaacaggtggaggaggagccaggctcttttaaacaatcacttctcttgcaaacaaatagagcaagaactcactcattaccatgaggagggcaccaagccatacatgagagatctgc

SEQ ID NO: 764833 - DNA, 607 bp, Homo sapiens
caagaattgagtatcatgtatataaattgaatttaaatactggcctgatcagtgttcattgtacccaggaatgtctaatattgaagaagccaataaaacatttaatataataacacgcaacaatctagttatcaaagtaagacatctcatgcttattatttcatgatgcktttttaaaattatagatctctattagttccaaaataaaatagattaacaagacaataggactgctttaaactgacacatttattaagaccatctttttcaacctcataagttgtatgattaaaaggtaattcttgcttttcatggaactcagttcaagtgttcaggaagggcactgagctgtgtgtttacagtcttgttgctgcacttcccacttgaatatgttttgggtgtgcaaatgtggtataataatctcttttccccacaatcccagacctcttgtttatgactggattctaccattaactgtggcaataatgtgccaattattccacacccctaactgtccccatagccattttaagggtctttcaaaagcaatgtctctgacatctgtcaaaactttcccatactccttggaaatacttgtgtaaatcaa

SEQ ID NO: 764834 - DNA, 592 bp, Homo sapiens
ttattttttttttcattctctggctttttgttcttagctttttattaaaaggaaccagtttcacttccaaattaacttattgatctattaatgcaggaatccatgaataaattaatccatttatgagggcagacccctcatgatcaaatcactttttaaagaccatgttggggattacattaccaatggatatgagggtggtctggctatgacatcgtcacctgatcaatcatcatgattgaattggccaatgtggctggctaggcaggtgtcccttccctcactcactgctccatgttcattcctccaraagctgtgcgctcagttaaagaggatgaccttccctgatagaagatgaccttccttgatagaggaggaccttctttggtcaagggtatataaacagctgtactcccctgctacaacctccaagcaaactctcaaggtccataagtttccaacacatgaaatctggggatattaaaaccacagcatccaccaactatccaagctgtccaagtcagatccttctgtgtcatctccaattattttctctcagaactacttggctctctgaccttgcctctccacc

SEQ ID NO: 764835 - DNA, 603 bp, Homo sapiens
tattgtgaatatggccaaagctgtgccttatgaaaagtgacgtcagagactacatactatagggaaaataaactttactaaaatagtccagccaagcaattaaacaagtaaataagcaaacaatagtaacaaaaaatcccgaagaggaaggatgtgtcagtatccagatttaccataatatattgtgtaaaatattcagctttcaactcagtaacaaaaaatatgagacaaacaaagaaataggaaagtgtgacccatacagagagagtagtgaggaagtggaaaccgggtgatagaaactgcttttgagaggggctgaatggcaaattagaagagaaagactttacccgggcctgggggctcaygcctgtaatcccagcactttgggaggctgaggcaggtggatcacctgagatcaggagttcgagaccagcctggccaacatggtgaaaccccatctctactaaatatacaaacaattagcctggcatggtgccatgtgtctgtaatcccagctactcgggagggaggctgaggcagaagaattgcttgaacctggaaggcagaggtgagcagagatagtgtcactgctctccagcctgg

SEQ ID NO: 764836 - DNA, 628 bp, Homo sapiens
ttaccacttttcctgactatgtcattggtgagggcacacccaagtttgcctaagactgggagttgtcctaaagattactcaaaatgacatttattttaaaccagattattctctctaataggaactatgtgccaataatgtcactagttttacccyatgatggtcttcataaataaagctactcttaggacaaaatacaatcaggttataatcaaaagccagagatactctataagtcaaaatgatagatcaaataaaaaatagaaacaaactatatacctattaaaaacagatagatgtaatcagaaaaatgaactgaaaatatttccttgtaacactaatgatatggtagttttacaaataagcacttgctcaatatatttaacttatcttgggtaaatagtaagaatgaagattttagtttcctgccatgcacctgggagaatggagacagagtgaaatgattgtgggtggtactcacttgcaaaactgcctctgtcaagtttttctgaagagctttattattttccttagtttgccaatagcaatagtctttgagactattttgaacaaaatttcctttgagaatcactttgtttaccatcattggcagacaatttgaagcaaa

SEQ ID NO: 764837 - DNA, 628 bp, Homo sapiens
ttaccacttttcctgactatgtcattggtgagggcacacccaagtttgcctaagactgggagttgtcctaaagattactcaaaatgacatttattttaaaccagattattctctctaataggaactatgtgccaataatgtcactagttttaccctatgatggtcttcataaataaagctactcttaggacaaaatacaatcaggttataatcaaaagccagagatactctataagtcaaaatgatagatcaaataaaaaatagaaacaaactatatacctattaaaaacagatagatgtaatcagaaaratgaactgaaaatatttccttgtaacactaatgatatggtagttttacaaataagcacttgctcaatatatttaacttatcttgggtaaatagtaagaatgaagattttagtttcctgccatgcacctgggagaatggagacagagtgaaatgattgtgggtggtactcacttgcaaaactgcctctgtcaagtttttctgaagagctttattattttccttagtttgccaatagcaatagtctttgagactattttgaacaaaatttcctttgagaatcactttgtttaccatcattggcagacaatttgaagcaaa

SEQ ID NO: 764838 - DNA, 555 bp, Homo sapiens
cttgagcaaaaaactcaattgatgacattcacctgtttatagtcataaccatttggtaaataactttaatttttggcaaagtagcacctgaatttctctcattttaccagacaggtctacatttactttggggtaaagctatttatttttcatattgctagtttaaaaaaagagagaagagagaacactaataagttaaaaactcttatgtacacatccacgttttcactttgaggagctatgagaaattgaatctaaccaaaatttacttttattctattttgagagcatttgcatttaccatatctaattttttttttttttgagacagagtcttgctctattgcccaggctgtagtkcagtgatgcagtctcggctcactgcagcctccgcctcccaggttcaagcagttctcctccctcagcctcctgagtagctgggattacaggcgcatgccaccatgcccggttgatttttgtatttttagtagagacggggttttaccatgtttaggtctcgaactcttgacctcatgatctgtctgcctcggcctc

SEQ ID NO: 764839 - DNA, 555 bp, Homo sapiens
cttgagcaaaaaactcaattgatgacattcacctgtttatagtcataaccatttggtaaataactttaatttttggcaaagtagcacctgaatttctctcattttaccagacaggtctacatttactttggggtaaagctatttatttttcatattgctagtttaaaaaaagagagaagagagaacactaataagttaaaaactcttatgtacacatccacgttttcactttgaggagctatgagaaattgaatctaaccaaaatttacttttattctattttgagagcatttgcatttaccatatctaattttttttttttttgagacagagtcttgctctattgcccaggctgtagttcagtgatgcrgtctcggctcactgcagcctccgcctcccaggttcaagcagttctcctccctcagcctcctgagtagctgggattacaggcgcatgccaccatgcccggttgatttttgtatttttagtagagacggggttttaccatgtttaggtctcgaactcttgacctcatgatctgtctgcctcggcctc

SEQ ID NO: 764840 - DNA, 555 bp, Homo sapiens
cttgagcaaaaaactcaattgatgacattcacctgtttatagtcataaccatttggtaaataactttaatttttggcaaagtagcacctgaatttctctcattttaccagacaggtctacatttactttggggtaaagctatttatttttcatattgctagtttaaaaaaagagagaagagagaacactaataagttaaaaactcttatgtacacatccacgttttcactttgaggagctatgagaaattgaatctaaccaaaatttacttttattctattttgagagcatttgcatttaccatatctaattttttttttttttgagacagagtcttgctctattgcccaggctgtagttcagtgatgcagtctcggctcactgcagcctccgcctcmcaggttcaagcagttctcctccctcagcctcctgagtagctgggattacaggcgcatgccaccatgcccggttgatttttgtatttttagtagagacggggttttaccatgtttaggtctcgaactcttgacctcatgatctgtctgcctcggcctc

SEQ ID NO: 764841 - DNA, 595 bp, Homo sapiens
ctaacaaaacggcatatgcctcaacagcagcacatcagtgttaaaaagtctggagtcaaggggaaaaagtaaaattggaccatttccagaatctcaccaaaaacaacaaacggatgttgcaagtggcctacatgagcaaattagaaccttaaataaaggtcactcttaatgcctatcccagcatagatgcagcaccaagtacagtgtcattttactggkttacctttttcattcttgaaagtaggagctatgaaaaaaaaaacactaaaatttcttgaagagaaccttctacttacaacctaacttacgtaatcgaaacactctattgagggtgaaaattgagtattataagaaaataatcacctgttttgtgagaagttcaatacgtaatgctcctccacacaatacataccttagaaagaaaaaaggaaacatacaaaactatctcgagaattattcctgcttaaacaatttctacatgccattactaagaaagtatgcacacagtaaacatgagaagagaacatgcaagcatgaacatacttgttagggatacaggactatgggtaacttaaaaactctgttggtattactc

SEQ ID NO: 764842 - DNA, 595 bp, Homo sapiens
ctaacaaaacggcatatgcctcaacagcagcacatcagtgttaaaaagtctggagtcaaggggaaaaagtaaaattggaccatttccagaatctcaccaaaaacaacaaacggatgttgcaagtggcctacatgagcaaattagaaccttaaataaaggtcactcttaatgcctatcccagcatagatgcagcaccaagtacagtgtcattttactgggttacctttttcattcttgaaagtaggagctatgaaaaaaaaaacactaaaatttcttgaagagaaccttctacttacaacctaacttacgtaatcgaaacactctattgagggtgaaaattgagtattataagaaaataatcacctgttttgtgagaagttcartacgtaatgctcctccacacaatacataccttagaaagaaaaaaggaaacatacaaaactatctcgagaattattcctgcttaaacaatttctacatgccattactaagaaagtatgcacacagtaaacatgagaagagaacatgcaagcatgaacatacttgttagggatacaggactatgggtaacttaaaaactctgttggtattactc

SEQ ID NO: 764843 - DNA, 647 bp, Homo sapiens
acagcacagagagaccactctaactctcctatacgctgcgatgaacgttgcaggcggccggccagatccttggactcttctgtaatgacagagttgacatggggctcaaaggactccgccttacagacctgtcaaagtgccaggttgaaggatgacagggtgcccagattcccaccttcaaagtatctgagagaatgtttcatgtgatacaggtccgtatttagtttctttttctctgtgttcaatctctggatttgaccctttgggagaaaagccaagcaagtgctgaaatagaaggaaagaaacattctccggaggacaggaggaaacttcacaccctccactcacctctagctccctttcagctttctgtttctcattgtttgctttcttttcctataggaagaggaagacagagctcttaccagggggaggcagagaaggcacagcaagagatatgcccccagaatgccaccaatgccccaggacaggcccacccatgggaccmggttatcagggaccctgtggggatggggtggaatctgaggggtgagcctccttccccaggctgggagtgggtgagacgagactggggcctctacatctgagtgtcccccaaacccagcagtcatgtcgccagcaaacaa

SEQ ID NO: 764844 - DNA, 629 bp, Homo sapiens
ccatacctagtctgtcagagttatctgagatgttttcctatttctcttcataggttgtattccctggcaatttcgaataacttgttttagcctatcataccttgttttagaacaagaaagttagaattacagaatattgggaagcaagaacataagttctcaaagcatcaagactataacctttttctttgggcagtagtatgatgtgtctttagccactgattaacccaggcattagttttttagaactataaacattaaaatatgaggttctcaacttttctgttcctgcacacctgagagatacaaggtattcatattagtgactatggctgggaatcagaatcttgaaggagaggtgttggtatgatttaaagagaaaaataaatgatgtgrtaacacttcctcagcttttcctctagagtcactggagtaggtttagatgatgaccaaggttcttctagttctaaaattctgttatgctttctctactcttcttttcatgccagctacatgcttgtttctccataatgatagggcccaattttccctaagagagagagtgactacagaactgttattcctattttgtcttatgtgcaagaacattcctactttgtcttatgtgc

SEQ ID NO: 764845 - DNA, 676 bp, Homo sapiens
acatcctaggcactcagtatatatttgttaagtaaatggtttgacataaatatacaaatctgatcaccaaggtcctgaccgtgtgatgttagaggttttttgtttttttggtttttggtttttttgagatggagtcttgatctgtcacccaggctggagtgcrgtggcacgatcttggctcactgcaacctccacctctcagattcaagcagttctctggcctcagcctcctgagtagctgggactacaggcgcacgccacagcgcctggctcatttttgtatttttagtagagtcaaggtttcgccctattggtcaggctggtctcgaactactgacctcaggtgacccacccactgtggcctctcaaagtgctgggattacaggcatgagccaccactcccggccacttttttatacttttatattggatagtttctatacattgctcaaaattagtcttctgtatataaaaattttatatttggatcaggaacgattaaactttcattgaaaaattttgccagaccatgaaaagaacatctttcctctaaactatgaaagtgtttctgtccctgatacatacatgacaggcagagatgtttgagaatagttcattatcaggaacacatgtacaatggaggcagcttagctagtgaaatggacagtcaaaagtt

SEQ ID NO: 764846 - DNA, 586 bp, Homo sapiens
gtaaggaaagaaaaattaaaaattaaaatttaaaattattaccatgaattttaccattcatctttatattatgaagtgtcagtttagaatgcaaatataagagcctttaacttgtaggcagaatcagccaaattacctaaatcatattttgtagctcccatatgcacgtgtattttgttcttaccaaaacagcagaaacagtacgaaaccgactgcactgtttttacatcacttcttggggtgtgtgcattctaccaacactctgcctttaacttactaaagagtaagaaagggctgaaagaaaaaggatctaggagctgccctatcttttcctttctttatgttgtcatttcagcataagttgttgtctaacatgggaaggtaacagggtaagaaaggatatgagargctccatgggttgtcttctgtctgcactcaaatccatcttgaagggaaacatggcccccagggctgtcagtgcccctgcctgcccagttgtaggtgtaacatacttaccttgtactcacttccagtcccgcagaactcctgcctatcaccagtctaccagaatctgtgcacatgagca

SEQ ID NO: 764847 - DNA, 581 bp, Homo sapiens
aagattggagtgttataactgggcacggtggcttatgcctgtaatccaggcactttgggattccaaggctggtggatcacttgagcccaggagtttgaaaccagcctggatagcagaaggagaccctatctctacagaaaaaaaaaaaaaatagcttggtgtggtggcatgtgtctgyggtcccagctactcaggaggctgagatgggaggatcatttgagcctgggtggataaggctgcagtgagccatgatggcaccactgctccaacgtgggtgacagcgtgagaccgtgtctcaactaaaagaagatttgagtgtttaataatgtgatgttgctttttacttattttatttaattatgtgatgttgctttttacttatacttgctttttacttattttatgagaaacattttacaagttaggacatagctttggtaaatgactgtgtacgctgagttctaggaccatgacaggtatttgtgttttagttattattttggtatattaaataatgcttcagtgaacacctttgcttccttttttattttgtttaaacttagagctatttccttagaata

SEQ ID NO: 764848 - DNA, 546 bp, Homo sapiens
aacctcgaagcaagtagtgagatctaagggcttgaaagtcaatgtgcccatgacatttggcttcagactagagcatcaattcacactgcctcacagcgctgaccccgctgagggtggagttggctccatctgccctaagctgccccctgggaaggtcctgcatcctggccctgtgtcctgccgccttcaggggcaggttggagctgggctctgtgctcctgagtggcatccttgtggggacgaaggacatatgagagtgtgggtgaggagaggccaagctcctggcagcaccaggccggcctgttcctaggtgcgcattcccaggttcgaggcactgacttgagtggaaagtttytccttcccatctctctccaaggccatggtgcacatcaccacagccgagactcacaggagagccaccaaaggcagaaaagggttttatttttcctcttttttgaaaagtaaaaccaaaaaaattcttgtttttctgtgaggtagatttgtcacaggttaaaccatctcattttatatttttagtagagaagg

SEQ ID NO: 764849 - DNA, 558 bp, Homo sapiens
tagaattgaaataagggctataggatgctaaaagagattatcacctgatcggagttcaaaggtcagaaaagctttactgacattctataaaaagcaaaaaaaaaaaaattggtccatggatgccagggatatgggtgggaaatggggctgtccacaaatggcacaaggggagttttttattttattttattttattttattttattttattttgagacagagttttgctcttgttgcccagrctggagtgcaatggcacgatctcagcttactgcaacctcgatctcccaggttcaagtgattctcctgcctcagcctcctgagtagctgggattacaggcgtgtgccacgatgccaggctaattttttttgtatttttagtggagacggggtttcgccatgtcggccaggctggtctcgaactcctgacctcaggtgatccgcccacagcctcccaaagtgctgggattacaggcttgagccaccaagtctggccaaggggacttttaagggggctggaaatggtctccattttgattgtgaggtggtggctacaag

SEQ ID NO: 764850 - DNA, 611 bp, Homo sapiens
cttggtcacccaaagtcctgctctctatagctctgttttgcactgggtgggtgacagtgccctcttttccatgggaaatggaaccagtcttcgatctagtcaagccagagatccaattccagattccaccctgagcattcccatccctgggcccctctcgagcaccaatactgtgtccagctgggttggggagagtgtggccagacacggagtgagcttgctacaggaatgggccttctgcgactgtgggaggtggtgaaraagggagggcctgggagggcgagccgggaaacagtctgggaggccctgtctgaaaatgcacagcccagcatcggcggtgggcctaggacctccgtgtctagcagggaaggtgggagctagatgcagaggggaggagggtgagggtgggccgggccctgccgcagcctctgaccgtgatggggccgccagagaggatgggcctatcatccttctgttaataaccgcatgtctgaagatgatgtgaaaatacgcctatggcgttaggaaagatgagatatgatagcatgtaccatatctttataatgactgaataaaagactatacgtggaaaaactctagaagtagtaagc

SEQ ID NO: 764851 - DNA, 613 bp, Homo sapiens
cttgccctagaaatgttcacagaaaaaaaaatcagcaaacccttttcagtgaaaaaatcagtgaaccattattgactatgccaaaactgtagaggccatggagaagcttcccccttgccctagaaaggttcactgaaaaaaaaaaaatcagcaaattcttttcaatgaaaaaatwagcgaaccattattgcctcacaataaggctgactaataagagaaaaggcgtacaaatttatttaaccgtgtgcatggggagaatcacagagattacccaatttcccagtggggcccaaacacttatataatcttctttcagaggggagggggaagatagggaatatagtaactgtggagagacagtaaatgattaccaaaggaaaaagaatgggtacttgggagaatgaatgaaagggggaacagagatggactttcaaatggttctctttcgaagttgaacgaactgagagacaggaattattttgcaaaatggttgggccaggtctggttacattctttcctttcctgaaatattaatagataatgagataacaatgaaggaaaggaaaagcaattgttcttgatggatccatctgatctttatggagataggaga

SEQ ID NO: 764852 - DNA, 544 bp, Homo sapiens
tctatcaggaactcctaataaatcatttttgtaactctataaatcttgttcactcttcaaactgtaaatatttacccatgccccaagtaggtcatagtccttcatacatacctcaataaacataggagaggaagaaggagaaattgaaactgaaataagatagaaaagagagaggcagacaagtaggaaggaagaagacaaaaagaattatcagttcatacaaacactgcagtttcagataagcaactgatatctacagaaaatgccatatgattaattccttatctcattaggtcaacacacacacacacacacacacacacacacacacttcagagaattacaatctctccctcaaatacarccatttccagtcctaaaaacacaaagccctgaatctatatgaaaaaaaaaagtgttgctaaaattgatttatttcattgcatagccattttgaattctatagtcaaatattctataaatatagttatgaaatttctagctatcaaaactgaccatgtttttgaactgcacacaaacataa

SEQ ID NO: 764853 - DNA, 507 bp, Homo sapiens
tccagaggaacgatcaggcagcaacatttgctgttcagcaatattcactgttctgcagcctccactgctgataaacaggcaaacagggtctggagtggacctccagcaaactccaacagacctgcagctaagggtcctgactgttagaaggaaaactaacaaacaggacatccacaccaaaaccacatctgtacatcaccatcaycaaagaccaaaggtagataaaaccacaaagatggggaaaaagcagagcagaaaagctgaaaattctaaaaatcagagcgcccctccccttcaaaaggagtgcagctcctcaccagcaacagaacaaagctggatggagaatggctttgatgaattgagagaagaaggcttcagatgatcaagcttctccgagctaaaggaggaagatcgaaaccattgcaaagaagacaaaaaccttgaaaaaagattagacgaatggctaactagaataaccagtgtagagaagtccttaaaagaagctga

SEQ ID NO: 764854 - DNA, 446 bp, Homo sapiens
attcattcatttgttcattcattcaatgcttttaggaatcagcatgacccatttacctatgtgaatcatctctgcctttccaggcctagctcacagcaacagagcaagactaaaatgtgtgcctggcctggtcatatgtacagtcttcaaccagcactgggtacagctgttactcctagatctgggacaatgggtgtcttgtctgactcctcccaagaatttctaatccagttgcacatagtggtatcaggagaagaatggaggagagacaaacagactgaggcttakagagcttgtcagactttcaccttgacatcatgttcaaattgtccctgctaccaagaaggaactacagatggctctgaagcatatgaaaagatgctcaaccacgctcataattagggaaatgcaaattaaaactgcactgagataccgtttgtcacctg

SEQ ID NO: 764855 - DNA, 539 bp, Homo sapiens
ggagatgagcctagattattcgggtggggccagtgtcatcacagggtccttataagaggaaggcaggagggcgagaatcaggagatgcgacaatgaaggcagaggtgtagggggagggagagggagagaggagagaacgctcaacctgccatcactgactcrgaagacggaggaagaacacagccctgccaaaacttctgttttcaccgcagtaaaacccactttggactcctaacctccagaacgataagataataaattaatgttgctttaaaccactaagtttgtagcaatttgtcacagcagccacaggagactaacatgctgggggaataaatacctctgcctctctctcctcttgggcttcccatcagctgaacccaactggaagctgatgggcacaggagcccattgatatagttcgcgcaggtcagccccctgggcagagagcagggtgagaaagatggagggtgtagctgaaagggccagaggaagtcatttagctggaaaactattaccccattttacagatgagggca

SEQ ID NO: 764856 - DNA, 561 bp, Homo sapiens
gaaaacaagtgattgtaataagaacaggtataataatgaaattttatacccaccatgagattttaattttaatatatctgtctgagttttgctagaaaatgaatcaactgtctaaagaccagtctccaggatggtttagagacatccttaagacatcctgcacaaagaatgaaagttctctgtatcaaaattaaacttcattttcacaagtcccttctccctctactgtttaacaccttaatgttaagcataccctctgggcaatttatgtttttaatattgctcttgtaaatagagttgatcagaactcactgctgctgggaattctacacaataytgcaaagttctgggttgaatctagagagagggtgcctggtgagactgacagaatgcctagcccagcaggcgtgtcgctggccaattagccaagcttggcccctctccctgaacttgccacgagccaagatcagagcacaacaagagacacacacactttccgtgttgtatctgaaccctgagaaaacagggctgtccaaaaactgggatggggccctatacaga

SEQ ID NO: 764857 - DNA, 743 bp, Homo sapiens
tggtggctcatgcctgtaatcctagcactatggaagtctgaggtgggcggatcacctgaggtcaggagttcgagaccagcctggccaacatggtgaaaccctgtctctcctaaaactacaaaaattagccaggcgcggtggtgggcgcctgtaattccagctacctgggaagctgaggcaggagaatcgctggaacctgggagatggaggttgcagckagccaagattgtgccactgcactccagcctgggcaacagagtgagacgccatctcaaaaaaaaaaaaaaaaaaaagaaaaaagaaaaagaaagaaaatctgcaggctgactacagccagagatgaggtggccccacacttgctcctagaggtggggcccggagaccatggcggccacaaggcagatggacacaggtagttgtgatggtgattcagaccccacaggcggtgctgttgccagtgacatgaaatgggcaacgagtcttggccaaattccaagcaaaaaaagggcaatcttctctttgtatacacaatagtcatgttcctagaaaattctgtgtatctcgaacgcacgcaaaagttatttattttgtgtctatctaaaaacaggtctctgtctcccatctttgacacagaaaaatgcccttgccgatttcccggagtcctctgagggggcgtcttggcctcattgggtgtcattgtcttagagccttttctgtaattacagcagctgagaccagaatgc

SEQ ID NO: 764858 - DNA, 553 bp, Homo sapiens
ttaattttgccctatcaaccaagacccatatctctaagaattctgtcaggtacttcccattcctgtgttcattctcttatttcctattcctgtgaataaaatcagatgatgcctctgataatcctggaaactgatcactgaaagcatggatggcagaaaagtaaagaaaaaaatctgtgtgtttattccaatggctagaaagtaaatttaaaaggttactctattgggtagatgatgtccaaagtaaaycattctccctaatgcttgcaattactcacatacaacctccatgttaaaaagaaataaaaagcaatactggtctttcctgttctcattctcacttgaaaattgtgtgtctggtttctgttggtttctcattggaagagaaattttaagaatacctcaattcaattgatgtgtactcacatgctgaagtctggggtatgcacaagctaacaagagctatgctagggtggggtgtggtggttcacacctgtaatgtcagcactttgagaggctgaggtgggagcactgcttgagcccaggagtttga

SEQ ID NO: 764859 - DNA, 553 bp, Homo sapiens
ttaattttgccctatcaaccaagacccatatctctaagaattctgtcaggtacttcccattcctgtgttcattctcttatttcctattcctgtgaataaaatcagatgatgcctctgataatcctggaaactgatcactgaaagcatggatggcagaaaagtaaagaaaaaaatctgtgtgtttattccaatggctagaaagtaaatttaaaaggttactctattgggtagatgatgtccaaagtaaaccattctccctaatscttgcaattactcacatacaacctccatgttaaaaagaaataaaaagcaatactggtctttcctgttctcattctcacttgaaaattgtgtgtctggtttctgttggtttctcattggaagagaaattttaagaatacctcaattcaattgatgtgtactcacatgctgaagtctggggtatgcacaagctaacaagagctatgctagggtggggtgtggtggttcacacctgtaatgtcagcactttgagaggctgaggtgggagcactgcttgagcccaggagtttga

SEQ ID NO: 764860 - DNA, 486 bp, Homo sapiens
aattcatgtctagaacatctactatctgggaaacaataatgtttgctaaaataatgtgcctgacaataccagctgatagcagccaatattcagagaacgtatatgcagcaccaggcacagtgcttagttcttcacgtgccttctcattcaagcctcataacatctctgagaactagacatcatatcttcaaaggaagatatgaggtaaaggaatctgcctggtgtgacaccactaggatatgggagaaatrgacttgaatgcatccaaacctgactccaaagcccttgttctttatacgttaaacaatgccccactttattcactgtatttattatgtaaattctgctgtataaatattgctgattacaacagggaaaatgcctatacattaatttttgttgtgaccttgtattgtactgagacagtcttattttttcttttgtcccaatgaataaaaattaaataaatcagctagcacttagtgt

SEQ ID NO: 764861 - DNA, 486 bp, Homo sapiens
aattcatgtctagaacatctactatctgggaaacaataatgtttgctaaaataatgtgcctgacaataccagctgatagcagccaatattcagagaacgtatatgcagcaccaggcacagtgcttagttcttcacgtgccttctcattcaagcctcataacatctctgagaactagacatcatatcttcaaaggaagatatgaggtaaaggaatctgcctggtgtgacaccactaggatatgggagaaatagacttgaatgcatccaarcctgactccaaagcccttgttctttatacgttaaacaatgccccactttattcactgtatttattatgtaaattctgctgtataaatattgctgattacaacagggaaaatgcctatacattaatttttgttgtgaccttgtattgtactgagacagtcttattttttcttttgtcccaatgaataaaaattaaataaatcagctagcacttagtgt

SEQ ID NO: 764862 - DNA, 443 bp, Homo sapiens
gctcaagcaatcctcctgctacaacccttcaagtaactgggactacaggtgtgagccactgtgcctggatcgagtttttgagaatgacaatggattctcttaagtttagttatgtggcgcgtgtcaattgcaattactttttcaaatatgttctctttactagagtaaatcaacacagccttggcacttggaatgcaattacggatctgataaatgctttgttctctatcccaataagcagaaaatrccagaagagttcactttcatctggcaggaaagcagttcacctgcactgttttacctgaggaccacagcaactctggctctgtaaacatttagccaacaggccattgatcgcctcccaatcccatgggacatcatggcagttcagtacattgatggtatcgtatccttaaaacactgtaaataagaagcagctgtaa

SEQ ID NO: 764863 - DNA, 443 bp, Homo sapiens
gctcaagcaatcctcctgctacaacccttcaagtaactgggactacaggtgtgagccactgtgcctggatcgagtttttgagaatgacaatggattctcttaagtttagttatgtggcgcgtgtcaattgcaattactttttcaaatatgttctctttactagagtaaatcaacacagccttggcacttggaatgcaattacggatctgataaatgctttgttctctatcccaataagcagaaaataccagaagagttcactttcatctggcaggaaagcagttcacctgcactgttttacctgmggaccacagcaactctggctctgtaaacatttagccaacaggccattgatcgcctcccaatcccatgggacatcatggcagttcagtacattgatggtatcgtatccttaaaacactgtaaataagaagcagctgtaa

SEQ ID NO: 764864 - DNA, 630 bp, Homo sapiens
ttcagttgtggtgtctggtctaggagcatcacagggtcacaggagagaacttgctagaaatgcagattttcagggcccacctcagacctactgaatcagtaactctgagagcgggactctgcaatttgtgttttaacaagccctacaggtgattctgatgcatgctaaagtttgagaaccactaacctagggtagccttatatattgctaaaaccaggacacttttttttttttttttttttttttggttctgggagacagaatctgtttctgttgcccaggctggagtgcagtggcatgatctcggctcactgcaacctctgcctcccgggttcaagtgattctctctccttagccttccaagtaactgggacaacaggcrtgcgccaccacgcccggataattttttatatttttagtagagatgaggtttcatcatattggccaggctggtcttgaactcctgaccttgtgatccacctgcctcccaaaatgctgggattataggcatgaaccaccatgcctggcctgttttttaaatttgcaatgagagttttctgttgtgttctcattccagtattcctaaactttgtaggtaggattagtcactctttatgatttctcttagca

SEQ ID NO: 764865 - DNA, 623 bp, Homo sapiens
acctgtctgtattctgtaggcttttgagtctggatccctgaaatatggtcacatggtatctgcttcagaaatgctgggatgatagattctggcttagtgagcttgagacaagatgggtaaaaggctatgaggcaaccccaattccgatttaagggtttctatggagaaatggggatgaaagaagagtcacccatagctgctggggttggaggagcggggtagtcctatgagactggggaactttagtgggtcgatgggtttatcttggtagcccttatgctggatgygggaaagactgtttcctagagttgcctggagtgcactgccctgctgcagtgcctgtccaaccagaggctggtgggaggacaggagacagaagattcagatcatgttggcaccttttcctttcatcttgccctacgtaagcttgggcgtttttttttttttctttggcgtcacttcatacggttagatcgtctgacctggctcggctgctggctttgcttagcctgctcaggggtctggcatcatctgttgtcagctctggacagagtgaaggtgtcttctcagctggcagcccttgctttgacaccttctccgactgcggctcttctttttcaccc

SEQ ID NO: 764866 - DNA, 600 bp, Homo sapiens
aggtcaccaggggctgggaaattggaactccttcagccacagagcagctgttagagaagcactagcagtgttgggagaggaggacctcgggatgggggcaaaggctccggctgtcccagagagacagtgcagaaggatggctgtttgactgcccaggctccagggacagcaggcttgcttytaagaatcattttgactgtgatcttcgaggcctggggttggagggcctaaatctgcccaggctgtactaaaggcaagtgtcctaccagggatgacctctgccagaaggccagagggcggaggtggatctcaatctgaaactgggagggaaaccacttgaatcttaaaaaaatcgcttcttacttcattttccttctgagcgggtccctagacatccaaacaatgcctctccaggcagcctggcacggctgtcataaaatgcaactgaaatctgtatctatggaaacaggctggctcctcgtttttgcctctctcactccctgcttctgtgttggccaggatggggctagactccaagctctgcactctgatgtaggggcagcttcatccatgctctgatggacctcctgtgtccccctt

SEQ ID NO: 764867 - DNA, 610 bp, Homo sapiens
gtggctaataagcacataaaaagataccttcaaatcattagtcattagggacatgcacatcaaaaccacaatgagatactacacacccaataggatggttgtagtaataaaaaaaaacagataataacaagtgttgaaaaggttgaggagtaatagaaatcttcatacattgctggtgagaatggaaaatcgtgtggctgctttggaaagtagtttagcagtccctcaaattgttcaacatagagttatcatataatctagcaatttcactyctaggtataaaaccaagtgaaatacaagcatatgtgcacacaaaaacttctgcatgaatgtttatagtagcattattcacaataatccccaaataaaaataatctaaatgtctatcaacattgatagataaataaaatgtggtatatccataaaaatattactcagctataaaagagtataaagtacaaatacatgatacaacattatatcttgaaaacatttgctaagtcacaaaagacttagtgactcatgattatgaatcagtcactaagtcttttgtgaatgtgaatgattccactaatataactaaacaggaaaaaatttatagagataaaaa

SEQ ID NO: 764868 - DNA, 538 bp, Homo sapiens
aaggatcttttcttgcagtacattcattgtagttatctgttcccttgtcttcctcactagactgtgagctccgtgctgtcagaaactatgtcctttaatgtcaaatgctgtgcttgattcatagaaggcacttgaagccatgtcttaggataaatcaaatataaaatatatgctaaaagtatttcctttgtgatcaggactgatgtttatggtaaacatttaatgtttagaggtaggcacagaagaattataaatttcaagtttctcttctttcaatttttttgtacttagccaatcaattgattataaagtgcttatcttactatatgtctttaaaacccagtatgaaagtaaaaggttaaattattgaaaagtaagtgacttataaaattctttttaaaaacccagaatgttgtttaaaaagacctctcagttgatgtggagaaataggagygcttttacactgttggtgggagtgtaaattagttcaacaattgtggaagacagtatggtgatttctcaaggatctagaaccaga

SEQ ID NO: 764869 - DNA, 628 bp, Homo sapiens
acgttttaaacagtctattctggaatttgtgttgagaaaagctacagagggataaagaggatcagtaggagattattgcaatcatccttgtgtgagagatggtggcttagactagagaattaagagtaacagtgggcyaggcgcagtggctgacacctgtaatcccagcactttgggaggccaaggcgtgcagatcacgaggtcaggagatcgagaccattctggctaacacagtgaaaccccttctctactaaaaatacaaaaaattagccgagggtggtggcgggcgcctgtagtcagtcccagctacttgggaggctgaggcaggagaatggcatgaacctgggaggcggagcttgcagtgagccaagatcgcaccactgcactccagcctgggcgagaaaacgagactccgtctcaaaaaacaaaaaaaaaagagtaacagtgatataaagagtttgcatgtctctggaagattcagacaagatttgccgacgtagggtgtgagaaaaagtgaaacgttaaaggtgagcccacctttagtctgagcatgtgttaggatgtagttgcatttacagatgctcctcagtttaggatagggttaaatcctaataaacccatactaagt

SEQ ID NO: 764870 - DNA, 628 bp, Homo sapiens
acgttttaaacagtctattctggaatttgtgttgagaaaagctacagagggataaagaggatcagtaggagattattgcaatcatccttgtgtgagagatggtggcttagactagagaattaagagtaacagtgggccaggcgcagtggctgacacctgtaatcccagcactttgggaggccaaggcgkgcagatcacgaggtcaggagatcgagaccattctggctaacacagtgaaaccccttctctactaaaaatacaaaaaattagccgagggtggtggcgggcgcctgtagtcagtcccagctacttgggaggctgaggcaggagaatggcatgaacctgggaggcggagcttgcagtgagccaagatcgcaccactgcactccagcctgggcgagaaaacgagactccgtctcaaaaaacaaaaaaaaaagagtaacagtgatataaagagtttgcatgtctctggaagattcagacaagatttgccgacgtagggtgtgagaaaaagtgaaacgttaaaggtgagcccacctttagtctgagcatgtgttaggatgtagttgcatttacagatgctcctcagtttaggatagggttaaatcctaataaacccatactaagt

SEQ ID NO: 764871 - DNA, 608 bp, Homo sapiens
caaaaaacagttgctatgtttgagtatggggaggaatcaaagggagagtgaggaaggttggtgggatctgagaggtgagaaatgtctgacaaagtttcctttccagaagtttgcatatgagttgatttcttattctgatctgtgtggattgkgacagggaattatttccttctagaaaaacctctgtagagtgttggttgtctttagctttagtttgtctcattttggtgcattttttatgcttctatccataggaagttggaaagggtcacatcccaaaactgaaaagcaaaaccaaagtctgcatatgaaactatgaggttgtgtgtctgtgtctggaagaaagttggaggtggataacgtgcaaggacttaaatagagtgcactttgttcactgctgccttcttcagatttgaagatcacagatggggtttgataacgtggtgccccagcccaagaaaagacgacaataaaataatgaaggaggaacctaagagcagctaagcatgcctaaagtaggaatatatttctagctcatttcttccccactcataactattgaaaagcagctggctgtttctttaatttaatcctttgtctatcttaga

SEQ ID NO: 764872 - DNA, 574 bp, Homo sapiens
tctagttggcaattaattttgcttgtgtgtgtgtgtatgcatgcgtgcatgcacgtgtgcatttaaacgatgctttctaatagctttgattgctgcagtttcctagattttacttgccttttgctctgtagagttaattaaataccacagaaatgtatttactatctcaagttccacacactcgtgaggattttgtcattgactttggtccaaacaggacacctttaggaacatagcaacacttatctgctcttgggaaaagctaatgtgtcattgacatgtcagtattgctatttcaccccttaatgtccctggctcacctagttmttatgtatatcaaaaatatccttggaactaggagttaatttctacatacttttagactatatttcccagtgaagggtgcacagggcctccttgtacattttcttacaacttcctgtcatctgtaattgcttcaaaaataaatactttttcctacatatatataaataaatgtatattacatatgatatatgtaaatatatataaataaatatatattacatatatgtaaatatatataaataaatat

SEQ ID NO: 764873 - DNA, 574 bp, Homo sapiens
tctagttggcaattaattttgcttgtgtgtgtgtgtatgcatgcgtgcatgcacgtgtgcatttaaacgatgctttctaatagctttgattgctgcagtttcctagattttacttgccttttgctctgtagagttaattaaataccacagaaatgtatttactatctcaagttccacacactcgtgaggattttgtcattgactttggtccaaacaggacacctttaggaacatagcaacacttatctgctcttgggaaaagctaatgtgtcattgacatgtcagtattgctatttcaccccttaatgtccctggctcacctagttcttatgtatatcaaaaatatccttggaactaggagttaatttctacatacwtttagactatatttcccagtgaagggtgcacagggcctccttgtacattttcttacaacttcctgtcatctgtaattgcttcaaaaataaatactttttcctacatatatataaataaatgtatattacatatgatatatgtaaatatatataaataaatatatattacatatatgtaaatatatataaataaatat

SEQ ID NO: 764874 - DNA, 460 bp, Homo sapiens
cctccagtttccaacttctacttgatttaaatattgcccaagttggtcactctcaggagctgataaagtgctaggtacaggctgtgacaaatatttgattttaaaaaaagtacgtgccagttatctgcccacagaatatcagagaggtattgaggaattattcttatatatctttatcctgccactttaacttaaaaaaaatttttgacggacacttcatagtgagraaatagcagctgcaggcacaggaaaccagaagtatgaagattttgctagggcacagtaaagctttcagtggtctagttgaggatgagtaggggcagtcaggggcccagaactgaggattacagaggtaggatagatgttatgtgggaaatgtacccactctcttttgtccgacattccttagacttatgccagtattccttactcttaacctgttgctgttttgtccttttcc

SEQ ID NO: 764875 - DNA, 602 bp, Homo sapiens
gcaggtggctatgtctgggcacccagctgggtgattcctccagacgtgctctccctgtcttcccctctggccctcagcaggaagccagggtctatttgagctgttgctgcagcagccatgtgcatactttgcccaagagaaaaaaaaaaatccttgctcttaaacttagataaattattctaacaagagaacacaaaacagcttcttggcaggtgaggaccctgtttgcgtgagatcatgtatttttccttttgcttttctccaacagtttacttaaagggcacccacaaatagaatgtcacagtcctgggaaattgtttcaccagtatttcactgagtacttgggaactgagaaagtacaaatgaatcaaacacagtccagaccacagcgtcaataagcaaattatytaaaagaggagttacaaatgctaattctaaagtcagatagaaagttcagacagagagatcctggagttcaagagaaggagcagtgacttgtaacttggagagttcaagaagaggtgggaagaggtggccattttgagggttctggaaggccagtcctatttgtgtttgtcaacttgggcaagatgtcagagggt

SEQ ID NO: 764876 - DNA, 608 bp, Homo sapiens
aaggtatctatgaaaaatatagctaacatcatactaagtggtaaaacactgaatgctttcctcctgtgattatcaagaaggcaaggatgcctgctcttgccacttctattcaaacattatactggaggttctatccagaacaattaggcaagaaaatgaaataaaagatatcatgattcaaagaaagaagtaaaactatctttacttgataatgaaatattttatatacatacatacatatatacacatatatatacacacatatatacaactaattttgtatatacatacatatatatacacacacatacaactaattctaaggaaattttaaaaacccaaactatktgaactaataagtgagttctgtaaggatgcaaatatataatcaatacataaaaatctattgaatttctatatgtcagcaatgaacaatccaaaaatgaaactaagtaaatgattttattttaaaatgccctcaaggagaataaaatgttttgggataaattttttaaatcagatgcaaaacttgtacactgaaaacttcaaagcatcattgaaataaattaaaaatctaaataaatggaaagacattttcatgttcatga

SEQ ID NO: 764877 - DNA, 615 bp, Homo sapiens
tgcagtgttcctaacttaatgttctctctctctttttcccctgtctctttctctcttcctcttctgtttttcaggcttagactttctgtctttttcctttggtgcaaacacagttctggaaaagatcagcttggcttcacagaatatattgtcattatttcccatttttctttctcttgggacatacacaattcggattctaaaatgcatcactrtgtacctctcctcattcaaaatgtctgagaatatcagggcaagctgaactgctcatgagaccccgcttaaatgatttgatacactgactgtgacatcttattatttaatttccatgtgctcatatcttccccagtaaattgtaactttcttgagcctgcagcctattaatctttataagcacctcccacccaaagtctaacacaatgttttacacttagatgctcagtatgtctttactgaaggaatagctatcccacttagctgtaattctcttcaaatccaggtggacattttccagtttcaagacctatattctgtgtacgttttaatccatggcccttgccaaattctctccttttaaaatagtgataaatcaatgtttcccctgccaatatttca

SEQ ID NO: 764878 - DNA, 556 bp, Homo sapiens
ttcattctttcctctctgaagtctattctacacacttagattgtataatttctcttccatagtttaaaagtcctccaaaaagttcccactgatgacaaaataaaattgaaattccaacaagaccctacatttcctggcctactggcctctgacttaatctgatttcatattccacaactcagtatactctgagtgccagctgcttatggttctccaactccctgagtttattcctgcttttcagaatttaatcttcatattttctctgcctgaaatgttctttccccargtcttttgcaaagctgtgcctcccttatcattcagccccagcccaagtgacatgtccttggagaggcttgccctgctatattagtctgttttcacactgctataaagaatactacccaagactgggacatttataaaggaaagaggtttaattgactcaaaagttccacatggctggggaggcctcaggaaacttacaatcatggcagaaggggaagcaggcatgtcttacatggtagcaggcaagaggagaatgagcaaaggaaga

SEQ ID NO: 764879 - DNA, 614 bp, Homo sapiens
atgtttatagcagcacaatttgcaattgcaaaaccgtggaaccaactaaaatgcccatcccatcaatcaatgaatggataaagaaactgtgagatatatatagatacacatacacacacacatacacacacacacacgatggaatactactcagccataaaaaggaatgagttaatggcattcacagtgacctggatgagtttggaggctattattctaagtgaagtaactcaagaatggaaaaacaaacatcatatgtcctcactcatgtgtgtaggctaagctatgaggatgcaaaggcataagaaagacacaatggattttggagactcagggggaaagggttggaaggaggtgagggataaaagatcacaaattgggtgcagtgtatactgcttgggtgataggtgtgccaaaatctcacaaatcaccaccgtrgaacttattcatgtaaccaagcaccacctgttgtccaataacctgtggaaataattttttttagaaagaaagggtgcttaatgagacttttggtctacttactgatctaaagaaaacatatggtggtaaatggtttgaaaacacagctcaaattattttctccctgcatctatgcc

SEQ ID NO: 764880 - DNA, 560 bp, Homo sapiens
ctctccttctctctctttctcttgctctttcttaattttcacttcttgcttgctttcacaacataatttatcttttctctttacactgctttaatttcctcttgctaatatgcttcaagttcatttaccagtacataatctttgtacctgtcttgttaagtcataaaaaaagacctcacaggtacaccaagagttataagggcacagaaaaatttatacygttaagttgaattaagtttggcctaaaggtttctccatgcatggagaactgcagcctagcttgctgtgtaaacagactttacccattcttgtaacaaccagctcagcctcaacaaatcaccgcagccgtgttgtagccagtcacaggcagcctactgttcaaaccttgttcaagtaggccaatgctgatctgtacccagcccatactttctgtgcctcactttggttttcttgcccataattgctatgcagaaggcagccctggttcactgtgcacttactgtggtctgggggctgcctgattcacaaatcgttctttattcaatgttcaattaaaatca

SEQ ID NO: 764881 - DNA, 589 bp, Homo sapiens
ccaaagcctcctttgcgtcttcctctcatatccccccaccttaacccacaagtatgggacatctctactcctaccctggcaactgatcacatgcccattaccatcccattaaaacctaatcaccgttaccctgctcaacgccaatatcccatcccacaacacgctttaaaaggattaaagcctgttatcactcgcctgctacagcatgggcttttaaagcctataaactctccttacaattcccccattttacccgtcctaaaaccagacaagacttacaggttagttcagcatctgcrccttatcaaccaaattgttttgcctatccaccccgtggtgccaaacccatatactctcctatcctcaatacctccctctacaacccattattctgttctggatctcaaacatgctttctttactattcctttgcacccttcatcccagactctcttcgctttcacttaggctgaccctcacacccattaggctcagcaaattacctgggctgtactgctgcaagcgtcgcagacagaccccattacttcagtcaagcccaaatttcatcctcatctgttacctatctcag

SEQ ID NO: 764882 - DNA, 589 bp, Homo sapiens
ccaaagcctcctttgcgtcttcctctcatatccccccaccttaacccacaagtatgggacatctctactcctaccctggcaactgatcacatgcccattaccatcccattaaaacctaatcaccgttaccctgctcaacgccaatatcccatcccacaacacgctttaaaaggattaaagcctgttatcactcgcctgctacagcatgggcttttaaagcctataaactctccttacaattcccccattttacccgtcctaaaaccagacaagacttacaggttagttcagcatctgcaccttatcaaccaaattgttttgcctatccaccccgtggtgccaaacccatatactctcctatcctcaatacctccctctacaacccattattctgttctrgatctcaaacatgctttctttactattcctttgcacccttcatcccagactctcttcgctttcacttaggctgaccctcacacccattaggctcagcaaattacctgggctgtactgctgcaagcgtcgcagacagaccccattacttcagtcaagcccaaatttcatcctcatctgttacctatctcag

SEQ ID NO: 764883 - DNA, 615 bp, Homo sapiens
gcaaaagtccaggtctacaggggaatgcttggttcgctgtaggaggaagggtcacggagacatgaattctcaatgcaccatttttgctcttagtttgacagagtaaataaaggagaaaacactgagcagcatcaaatcaggcagccagcgatcctcaccacctgaagttactgtgtaatcacccctaactagcaaaatatggagcttgagggtgagccaggagacttcctgggacctgaatggaggcatagccttgggcagacacaaaataggaaaatgttcagagaatgctgcttaaaatcccgacaggcagctgaagtgcttagccaacacatgctctacttagcctcccttcctcccacccacccagtactccccaaaggatatttgccttagaggacyacagcatgtgataaaagatgagcgatgccttgaaagaactcttgaatgataatatgactacccaaaatcaaatagtgggaaggaagacaacatagctgaatgacttttttcagttttaaagtagggaagtaacacatattaccaaaaaaggtaagtaaacattatatgtaatgtataaatataataaaaaacaaaaattccaactgttgatat

SEQ ID NO: 764884 - DNA, 583 bp, Homo sapiens
atgtaccccataaatatgcacaaatgtttatatcaataaaaaagggagaatcacacacctgcgagcagcatttcctgcctctgaaatgggtatgaatgctattgaaagtggagtcaggggtctactgacctagagatgaggcaggaatttaaacagacaccagacaactgagaggggagtgttcgttttgcatcaaagcagcagtaaatattcagtgcaaagtcaggattttaaaagatgtttaaactagctctatttccatattcatgaagagtgcatgaagagtagagatggttgcctagtatgtggatttctaaactgcacatctgcgtgattactgccattttttaaatctcgaaaatgtcatatatatatgtgtgtgtagagcagatatacagtatgaacaaagcagtgttgcccggtgttgaaaagcggaggggctagtgcccgaatgccmgatttcaaatcctggctctaccaattactcaccatgtgatttctggttatcacttacatctctaagccacatttgtaaaatggggaaaataatagtatcaactagagaagtaaaaattagagcaaa

SEQ ID NO: 764885 - DNA, 591 bp, Homo sapiens
atcaattaaggcctaccactaacatcatacttttaattatagaagactgtattacttcccttagatcaggaataaggcaaaacaattcagctcatcactcctactaaatattgtactggagatcctagctagtgcaataaatcaaagaaagaggtggaagggagagaaaggcagattagataggaagagataaaattgtctttatttgaaggaagtctatgaaaaatatcacaaagggtgatcaaacatattacaaaagcttataatttaccatagcaaatttatgggtacaagttcaatatacagaatcaawaaccttcaaatatattagcaatgagccattaggaattaaaatttaaaagcttcatttattatagcatcaaaaacatgaagtacttttgtataaatcaaatatatggaagatccatatgttgaaaactacaaaacattattgatataattcaaagatggcttaactatcgagatataacatgttcatggattgcaaaatttaatattgttaatgaaaattcaccccaattgacctatagaatttatatcaaaattatagtaattgtatataaataaatt

SEQ ID NO: 764886 - DNA, 576 bp, Homo sapiens
tgaaaacattccaaaggttttcatttcacttgtttaaaatttaaaaatgtacagggtttttacatgacctcctgccactgacctcactgtgttcattctgcctcagccatgtgggccttctccttgttctattataaaacacatgaatagactcctgccccatggttttctttcctgctcttctctaggccaggaaggctcttcccatagacatatgcttggaccattctttttcttcaggtttctgttcaagtgtctaagatgagagaggcgtcctgtgcacagtctrctaagttccagccctctttccctgaatttcctataactctattttgtatagttaaaataagggataaatcaaagtatgatttcacaaatcacaaagagtattgccatacaaagatattttgtttctttttgaatcacctaaagaagggaagaataatgagaacaaacctagagggaatacacttgatagatgacgtacattaaccacagagtgagttccaattttgttagagcccagttattagtctagttgctcaattaggatagaagcagggcctctgtggaaag

SEQ ID NO: 764887 - DNA, 576 bp, Homo sapiens
tgaaaacattccaaaggttttcatttcacttgtttaaaatttaaaaatgtacagggtttttacatgacctcctgccactgacctcactgtgttcattctgcctcagccatgtgggccttctccttgttctattataaaacacatgaatagactcctgccccatggttttctttcctgctcttctctaggccaggaaggctcttcccatagacatatgcttggaccattctttttcttcaggtttctgttcaagtgtctaagatgagagaggcgtcctgtgcacagtctactaagytccagccctctttccctgaatttcctataactctattttgtatagttaaaataagggataaatcaaagtatgatttcacaaatcacaaagagtattgccatacaaagatattttgtttctttttgaatcacctaaagaagggaagaataatgagaacaaacctagagggaatacacttgatagatgacgtacattaaccacagagtgagttccaattttgttagagcccagttattagtctagttgctcaattaggatagaagcagggcctctgtggaaag

SEQ ID NO: 764888 - DNA, 653 bp, Homo sapiens
tctatacaaatatacacacaaacacatatatgtatacacacccatatgtgtgtgtttattaaatgggaatatattttacattttattgttcaatgtattttttcacttaacaatgtattttcaacatatttctggacacaaatatttattcaaaaaatatctgaatacctactatatgccacgcagtgaagattctaaggatatagcaatgatctagacctaaaaggttcgtagaccttcctcgttctgtttagaagcaatacaygtaactgtaggatatttcacttaaaattcctgtgttaatggagattgaagttatttccatttttcctatttctaacattgctgttgggaataaacatcttttttttttttttttttttttttttttttttgagacagcgtcttgttctgttgcccaggctggagtgcaatggcacaatcatggctcactgcagcctcgacctcctgggctcaagcaatcctcctacctcagacctgaagtagctgggactacaggcacatgctaccatgccaagctaatttttttattttctgtagagacaggtctcactatgttgcccaggctggtgtcaaactcctggacccaagcaatactccccaccgaccacccaaagtactgggataacagg

SEQ ID NO: 764889 - DNA, 631 bp, Homo sapiens
catattaagcatctctcagtttttaatattcgaaaatgctttccttacgctgaaatttcctgtttcaaaaaaacaggaaatgtaaattgagaaccctgtatttgcatagcattgaagaaaaagagaaacctgtctctcctgctacttccttccctcccctcatcaatcaataccttattcttaagccacactgaattcttttttctcactattatttggggacctaagacctccttaccacgttgtaccttctgcctcrgatcagcaaggtctttgctgctggtgtagagctaggattttgtcagttaaaaagtggaatgtggagctcttaagcgcaggggcactggagccagactgtctggatttgaattctggctctgccaattaccagctctgtgaccttgagcaaggtcactgattttttttgtgcctcagatttatctgttaagtggcagtaataagtgtacctacctcccagggaaggtgtgaggattaaataaattaatatatgtaaaatgcttcaaacagtatctggtgcatggcaagcactcataaagttcgctattattcatgcttttaaaactttactgtggccctcattcaatttgcagatgaaaaatctttctttgga

SEQ ID NO: 764890 - DNA, 675 bp, Homo sapiens
acagcgcttggcatgctgtaaactgttcatatagtaatattaatcttttgaaatgagactggatgttagggtggggttgaattaaggaagaccttgaaacctgggtggaggttgtcttagggttctccataaaaacaaaaaataggagattatatatatacatatatatataaataaataaataaaatgtattataaagattgaccacagaattatagaggctaggaagacccaggatctgcagtctataaactgaattcccaggaaagctggtgttttagttccagcttgaatccaaaggcctgggaacaagaagagctgatggggtaagttccagttccagggcagaagaccaatgtctcagctcaagtggygaggcttgaagctctctcgttctcagcctttttgttctatttgggtcttcaattgatcagatgagacccaatctgctttactgaatctgccaattcaaatatatatcttatacagaaacaccttcacagacacacccagaataatgtttggccaaatatctgggcaccctgtcacccagtgaaattgacacacaaaactaacgatcacagaggtatctggcctgagccattggatgtatttgacagatgagtgatatacacaaggctgtgtcaagaaagatactgaattagttacaaacaa

SEQ ID NO: 764891 - DNA, 675 bp, Homo sapiens
acagcgcttggcatgctgtaaactgttcatatagtaatattaatcttttgaaatgagactggatgttagggtggggttgaattaaggaagaccttgaaacctgggtggaggttgtcttagggttctccataaaaacaaaaaataggagattatatatatacatatatatataaataaataaataaaatgtattataaagattgaccacagaattatagaggctaggaagacccaggatctgcagtctataaactgaattcccaggaaagctggtgttttagttccagcttgaatccaaaggcctgggaacaagaagagctgatggggtaagttccagttccagggcagaagaccaatgtctcagctcaagtggcgaggcttgaagctctctcgttctcagcctttttgttctatttgggtcttcaattgatcagatgagacccaatctgctttactsaatctgccaattcaaatatatatcttatacagaaacaccttcacagacacacccagaataatgtttggccaaatatctgggcaccctgtcacccagtgaaattgacacacaaaactaacgatcacagaggtatctggcctgagccattggatgtatttgacagatgagtgatatacacaaggctgtgtcaagaaagatactgaattagttacaaacaa

SEQ ID NO: 764892 - DNA, 618 bp, Homo sapiens
ccaactgtccatgggctgattctatctctgtgtctccagattgtattttatggccactgacctaattgtaacttcatccttgaagtctgcttattttgggtccagaatatattaatagtgctcatctgtgaattgaccctgaaggtctagtgctgccttttgattgtctgtagtgaaccaatttcttttccttatgttgaacacagattcttcttggaagactagattgcctatgagtagatgtccatccttgatgagtttctggcttaccttttgactgtccatggctagaactatctctttttttttttctggatccagactgccyatgcctatatacaacttgaccacaggagaagggtaactgtctatcccagcctcctaactatgcttcattactggaaagagtaaatttagatctctgctgtttatgctggatgtagactgtacaggtgatgattatctatgaaaagatcatgaatgtccagagctctctccttattgactgtagctggatccatgtcttcttatattgggtccagattttccatgtgtagacccagactgtccataaatcgatgtctgtcctgagcatctaatgctatcttatgattatct

SEQ ID NO: 764893 - DNA, 617 bp, Homo sapiens
ttggtgttattataaatgctatagctttttaaatttaaagtactacttttacattactagtatttagattttgtgttttagccttacgtcctatgatcttgccatacttattagttccagattttttttgtcaattatttgggatttgtttttacaattaagagacagttttatttcttcccaatattcgtgcctttattttttcttatcttattacactgtctaggacttctattatgatattgaatagaagagtgagagagaacgtcccttcctagttsccaatcttagaaaaatagtgttgagtgttctcattgaatataatataaaatgcagattttatatagatgttcctaaccaagtagaggaaatctctctgtcttccaagtttgctgagtttttttttaatgaatgagtatttttaggattttttcaaatgctttttctgcatcaattgatataatcatataatttttcttctttaatctgttcctttgatgtatttcattggctgactttctaatgaaaaacagtatttgcatatatgtaataaatttcccttggttttggtacataattatttatctttccctattaagccagtagggtatctttat

SEQ ID NO: 764894 - DNA, 516 bp, Homo sapiens
gctatggtttcaacgtgttcttcaaaggtgaggtgttgaaaacataatattttaatgtgacagtgttgagaggtgggacctctaagaggtcaggaaggccctgccttcatgaataaattaatgccattatctcaagaatggagttgctatcgtgggaatgggttttttaaataaaagctatgtgatgaagccagtcgtggtggctcacacctggaatcctagcactttgggagcccaaggtgggtggatcacttgaggtcaggagatggagaccagcctggccaacatggcaaaaccctgtttggcgaaaccctgyttactaaaaatacaaaaattagcttggtgttgtagtgtgtgcctgtagtcccagctactcgggaggctgaggcaggagagtcgcttaaacgtgggaaatggaggttgcagtgagccaagatgatgccactgcactgtagcctggccaacagagcaagactcagtctcaaaaaaaaaaaaagtcatgtgataacttctgtc

SEQ ID NO: 764895 - DNA, 524 bp, Homo sapiens
ttaggatccatttaaattttaaaatgctgcaaggtatgatttgaagttcctttttaaatatggatgtctagttgtttcagcactctgttgaaaaggttatcatttagcattgaattgcctttgagtctttgtcaaaaatcaatgaactatatatatgcaagttctgttttgcactttgttccattgacctatgtatctattctttcaccaatattacactttttaataacttttatttcaagttcgggggtacatgtgcagatttgttacataggtaaacttatgtcatggggtttgttgtataaattatttcatcacccaggtattgtgcctartacccattagttattttttcctaattctcttcctcctcccatccttcacctttcagtaggccctgttgtgtgttgctccctgccatgggctcatgtattctatttagctcctacttataagtaagaatatgcagtatttggttttctgttcctgtgttagtttgctaaggataatgacctccagctctg

SEQ ID NO: 764896 - DNA, 572 bp, Homo sapiens
tggtgggtgcctgtagtcccagctactcaggaggctgaggcaggagaatggcatgaacccgagaggcagagctttcagtgagccgagattgcatcactgcactccagcctgggcaacagagcaagactccatctcaaaaaataagaataaataaataaataaaaataattagtgatatttttatacatcaacaacgagctagctgagaaaaaaatccagaagccaatcccatttacaatggctacagaaaataaataaaatatctgggaataaatttaactaaagaactgaaaggtctctacaaggagaactgcaaaacactgatgaaagaaattgtagataaacaagtggaaaaacatcccaaactcacggattagaaggctcaatgtcattaaaatgaccataytgtccaaagcactctgcagattcaaggcaatgcctatcaaaatgccaacgtcatttttcacagaattagaaaaaaaaaccattctaaaattcatatggaaccaaaaaagagcccgaataggaaaagcaatcctaagcaaaaagaacaaagcgggaggcataatatt

SEQ ID NO: 764897 - DNA, 641 bp, Homo sapiens
tccctcctgacctaatcacctcttaaaggccccgcctattaatatcaccctattggccaccagtttcaacacatgaattttggaggggatagattcaaatcatagcaccagtctactgtgaactatgtgacctgagtcacattcttaccattttgctggaaaaagaaacgttaattccggtcaatttaaactacattgaatcccaaactcaaattacccgagggaaactggaaacttgctgaaaggtattaacattctggcaccccctagtggccacctgaatattctgtaaaacccgattttttttcccattttgcttttctttggtgtggcacgtttttcgttttcagtttatttactattacttcaccccatttttaaaccttttagaaaataaaagggaacatcakttcatacagaagacacttctaacttgtcgattcccactaatcttacatttcttggggcagccaccacctgtatcttctgtgtatttgtcctacacacaattgaacacagtagttgctcaatgaatgactgattgataggtaatgcagtccagtgtttgaaatatttcttgttttgttttgctttgttttttgagatggagtctagctttgtcacccaggctggagtgcaat

SEQ ID NO: 764898 - DNA, 568 bp, Homo sapiens
acactcttcacatgctcctttctctggactagagcaatttgtgcatctcgttcattttcctctgctagactttgaattctgagatcattgattcatctatctctagcacctaacatattatttttaaaaaaagaattattgattactacggtctaacttttttttttttttgagacagagtctcattctgtcgcccaggctggagtgcagtggggcaatcctggctcactgcaacctctccctccctggtttgaacgattctatatctcagccacctgagtagctgggattaaagccacyatgcttggctaatttttttttgtatttttagtagagatggggttttgccatgttggccaggctggttttgaactcctggcctcaagtgatccccccagcctttagcctcccagagtgctgggattacaggcgtgagccaccatgtgtggcctactataggctaactttaaaataacacatttcatactgtaaataagggggaaattctgtttaccttgtctggaatgttcatgtgtgtatctgacatgcctcgcactcccatgcccag

SEQ ID NO: 764899 - DNA, 628 bp, Homo sapiens
atttatatttaaaatgaaagtaatataatttacattaaaaatataaactatattagatatcataccactatatgttacatatacaataaaataacttaaatataaatatataaatattccagtaatgtatgtgtacctaagaagaataaaagactrttgatttttttctacctattactcaccagaatttaaatagcccccaaagtctagaagtcttttgctctcctctggtgttgttatataacgaagtcttttttggcaactttgccccaagcaggagttcagtagtgtaagagctacccaaaaacctacaaatataaatgcaatcttatcagtatataatttaaagtgaggataataattcctattctgcctacctctgaatgttgtgatgaggatcgatgaagataaaatgtaagaaagctttcctcaagctctaaagctttttatgagtatgtgggaatacagtaaaagggtgataatgacattcctaaatattgtcaaacaccacttattaaatgcatacctgcactgtttcaagtataaactgctacactaaaacagtggcaccaacactgtggtttcaagttagaatgctacgacttactttagaaactgtgaacccctc

SEQ ID NO: 764900 - DNA, 628 bp, Homo sapiens
atttatatttaaaatgaaagtaatataatttacattaaaaatataaactatattagatatcataccactatatgttacatatacaataaaataacttaaatataaatatataaatattccagtaatgtatgtgtacctaagaagaataaaagactattgayttttttctacctattactcaccagaatttaaatagcccccaaagtctagaagtcttttgctctcctctggtgttgttatataacgaagtcttttttggcaactttgccccaagcaggagttcagtagtgtaagagctacccaaaaacctacaaatataaatgcaatcttatcagtatataatttaaagtgaggataataattcctattctgcctacctctgaatgttgtgatgaggatcgatgaagataaaatgtaagaaagctttcctcaagctctaaagctttttatgagtatgtgggaatacagtaaaagggtgataatgacattcctaaatattgtcaaacaccacttattaaatgcatacctgcactgtttcaagtataaactgctacactaaaacagtggcaccaacactgtggtttcaagttagaatgctacgacttactttagaaactgtgaacccctc

SEQ ID NO: 764901 - DNA, 609 bp, Homo sapiens
tcgatgaagataaaatgtaagaaagctttcctcaagctctaaagctttttatgagtatgtgggaatacagtaaaagggtgataatgacattcctaaatattgtcaaacaccacttattaaatgcatacctgcactgtttcaagtataaactgctacactaaaacagtggcaccaacactgtggtttcaagttagaatgctacgacttactttagaaactgtgaacccctcatggaataaaatggtacttttaccragtacccaaataaatgtttgttactaatgtaaatggatgaaaaaatatgttttgtttttacttataatgtagagctagtaaggtagcttttatcatggactagttaatttaacaatttattttttatcaaaaaaaacctctctgctatatcatagtgattttttctccatgtttctgaatgacctatgatactcttttataaaaataatttaaaatatatttctaataatttgtatttgcttttaaactttttaactaaaaatatccgtttaagaaaacgtaaatatttcctaggccagcaccaaaattttgtatcgtatgtgtaccatgttaaatactttaatgaaagtactt

SEQ ID NO: 764902 - DNA, 609 bp, Homo sapiens
tcgatgaagataaaatgtaagaaagctttcctcaagctctaaagctttttatgagtatgtgggaatacagtaaaagggtgataatgacattcctaaatattgtcaaacaccacttattaaatgcatacctgcactgtttcaagtataaactgctacactaaaacagtggcaccaacactgtggtttcaagttagaatgctacgacttactttagaaactgtgaacccctcatggaataaaatggtacttttaccgagtacccaaataaatgtttgttactaatgtaaatggatgaaaaaatatgttttgtttttacttataatgtagagctagtaaggtagcttttatcatggactagttaatttaacaatttattttttatcaaaaaaaacctctctgctatatcatagtgattttttctccatgtttctgaatgacctatgatactcttttayaaaaataatttaaaatatatttctaataatttgtatttgcttttaaactttttaactaaaaatatccgtttaagaaaacgtaaatatttcctaggccagcaccaaaattttgtatcgtatgtgtaccatgttaaatactttaatgaaagtactt

SEQ ID NO: 764903 - DNA, 604 bp, Homo sapiens
tcacagtgaaggtttagacagtaagcaaaaacaatcagaaaaaaaagttttcatgtaaatttaaagtttatggctaaaacatggaaatcaaaacacaggaaagatattaggcacagaaagcataattaaagcagcacaatgaaacactgcatatggactgaaaacatgaaaagccaaaataaaactatttccatttttctcatcgtttactattgataacttacttttttgaagagattgttggggatcagatttaacacacactgagagaaaccttaacttccaaattctttaartatctactttttaatatttggcaagtcatgaaaaattatcaaaatcaacaacacaaaattaagcttataatactaatgtaatacttcagactaattatttaccaatatcaaataaccccaccctggtagattatgcaggattttcctaaagcatcctaaaaccactgatttcatcataaattctccattaatatgaatgtaaaatatacagattgtaaattaagcagatgtcaaggagaatctttgcccaagaaattagcaaaggataattccattaggtctctcaaagaatctgcataaagcaatgt

SEQ ID NO: 764904 - DNA, 628 bp, Homo sapiens
atgagatcacgtcctttgcagggggaggaaattatccttagcaaactaacataggaacagaaaaccaaatactgcatgttctcacttataagtgggagctaaataatgaaaatatgaacacatagagaggaacaacacacactagggcctttaggagagtggagggtgggaggagggagagggtcaggaaaaataactaatgggtaccaagcttaatacctgggtaatgacataatctatacaacaaaccccaatgatgcaagtttacctatgtaacaaatctgcacttgtaaccctgaacttaaaagttaaaaacaaaaacaacacacacamaaaattgcaaactagtaagtatgctcaattttccataacatcaaacaacttttgttatttcccatttttataatgtatatgaattatttcttgagattgtagtggtctagccatagcatttctattcatttatccattatataattaattcattaattcagtcagtacttactgagcacttactgtacgccagatactgttccaggcactaaggatacaacagtaaaccagaagtaaaaaagcctttctctcacaaaacttacattgtagtggaagagataaactatgagcaagt

SEQ ID NO: 764905 - DNA, 477 bp, Homo sapiens
ctgggcaacaagagtgaaactccatctcaaaaaataaaataaaataaaaataaataaataaaaatgctagggaaacaaaggtatatccccagtctctgcctctattaagcccacctcttgtctgttccagggtgaaagagtgagctttacacgttatgctggcttrtatttcccaaacatttccccaacacgatgcaggcatattacatggctcaggacagtaataagatggattaagcattctgtacaacttaaaaagcattatcaaaccccttcaaaaacaaactaaacaatggctggttggatacctgtgaatgacccaaggctttctaagataaactatttagaactcaatagaggggtctcctaatgaaatcaagccttctggaaaggaaacaacttgtagtttgcaagaactcaaagatactttggatccactacagagcttgccaaaattatgaaatgaaattttttact

SEQ ID NO: 764906 - DNA, 564 bp, Homo sapiens
aagaagcaactcctcatctatttaagttttatcatgagattgaaacaattcagttaattcttcaggctccacttctagttctcttgctatttccaccacatctacagttacttcctcccctgaagtcttgaacccctcaaagtcatccatgagggctggaatcaacttctaccaaactctttttaatggtgatattttgacctcctcccatgaatcacgaatgttctgaatagcatttaggatgctgaatcctttgcaggtttgcaatttactttccccagatccatcagagaaatcacttctatggcagctatagcctatgaaatgtatttcttaaataaggagacctgtaggtacaaaattactccttgattccatagrctgcagaatggatgccgtgttagcagggatgaaaaaacattcatttccttgtacatcttcatcagagctcttgggtgaccaggtgccttgtgaacgaacagtaatctttggaaaggaatctgtttttctgaatagtggtctcagcagtgtgcttaaaatattctatgccataaacagatgcac

SEQ ID NO: 764907 - DNA, 591 bp, Homo sapiens
gtatatctgttctcttgtagctcactgaattttcttaaaacaatttaaatttattgtcaagcaattcatatatctcaatttctttggatttgttactgtaatattattgtgctccttaggtgatatcatgtttccattttttgttttcttgaagtcttccatttccatccttgcatttgaagaaaatcacttcctccagtctttattgactagcttcaggagagaaatgccttcatcaatctgcctggstaggaattctgaggctctctcctacctttcctgtggattcacctgctccacaacccctgttcccacttgcagcaggggattcttaaaagttatatgccttatctcaatcccacaaagccaggccaggtgctgacagcttcctgtttgtttcccctggggtggtgtcctgaagtactcaagtttgtgtaccttgcttcaattccacaatcaagccatctgtctctatatttgatgcttgcagttgccatccaatgtggcatgcttgggaagccagcctcagggagatgggggtgaggtgcacagagaatttggggtggccatgggtcatgtgggaggtccata

SEQ ID NO: 764908 - DNA, 477 bp, Homo sapiens
gttacattgtagcacaatgtattatctgttctatgtttagattacacagataccattgtgttacagttgcctacagtattcaatacagtaccatgctgtacaggtctgtagcccagaagcgacagactttgccatctagcccaggtgtgcagtaggctctaccacctaggtttgtgtaagtacacttcatgatgttcacacaatgatgaaatcacctaatgacaaatttctcagaatgtagctctgtcatgaagtcacacattactgtagaattataacattcttgcttgacatattacagacaactttcactcaaaatacagaaaaattatcaattmattttgcattgtcacatattccatcacctttctaatcaacaaggaaaaataaacataacatatatgtatatgcttttcagaaataaagtattctaaattttatgtgtaatttgttccaaacctcaggaactcaacaagt

SEQ ID NO: 764909 - DNA, 580 bp, Homo sapiens
acagaattattttacatatattgtatcatgtaatcttcataacagcttgctattgttatttacattttatcgatgagaaagctgtaaaggtgagagacaggagtttacttcctcaaagtcatacagtgagctgaggcagagccaggattcaaacatttatttgtcttataataacctaatatatgtratatatgcctgaatcacacagggacaaataacgaaattttaaaaatgttaaaatacggttttaaaatgtaaaagtagccctaaacagcaatagatttgcaacgtattcatcacaggaggaaaagtttgaatgtggtgctcgagaatattttggctactttataagactaacaccagaagtggagaataactgcttcaaataatcagttgttttattggtgcaaatttttggttgggagaagacaatagaaagctattatttttctgtttcaaaggagaaagaagaagccatatttcatcctttgaaagtagcagttaggtgtaaacaaggccatagatccatggctttttgtttctctttcttcaagtagacttaagttcgactttcctacaa

SEQ ID NO: 764910 - DNA, 610 bp, Homo sapiens
ttccttattgattgtgagctcttatgttcactaatgggttttgtaatttttcacatgaatatattggtgttaataaatgcaacatcaatgaattactgtataaaaatagataatagttaggaaacaaaagttcagagagtcacatggcagaatgcctgaaaatcatgytgggtgttattataatattactgtaagcaatagtgagacattgaatgtctttgagcagaaaaataatcatggttgtagcaattacagtagatgattgatgggctggaagggagagatttggaaaacagaaagccaccttgatggatatgtaagcaaaaaattttaatccttgaaaatacaaaagaaaaacaaattgcttcatggaaaatatttttctaaacatattcatatcagcaactgaactacccaggtaacttttatcgtctggaatgtactcttcctgtgataagcagagtggaataaatgaatgactacatgtgtgggtcacatccaggtatatttcattgtctaaaatttgcctgttaccatgttaagcacagtagaataaatagacaacggattagtaaaatgtttgtagttttttgagagtatcaaaagaggc

SEQ ID NO: 764911 - DNA, 610 bp, Homo sapiens
ttccttattgattgtgagctcttatgttcactaatgggttttgtaatttttcacatgaatatattggtgttaataaatgcaacatcaatgaattactgtataaaaatagataatagttaggaaacaaaagttcagagagtcacatggcagaatgcctgaaaatcatgctgggtgttattataatattactgtaagcaatagtgagacattgaatgtctttgagcagaaaaataatcatkgttgtagcaattacagtagatgattgatgggctggaagggagagatttggaaaacagaaagccaccttgatggatatgtaagcaaaaaattttaatccttgaaaatacaaaagaaaaacaaattgcttcatggaaaatatttttctaaacatattcatatcagcaactgaactacccaggtaacttttatcgtctggaatgtactcttcctgtgataagcagagtggaataaatgaatgactacatgtgtgggtcacatccaggtatatttcattgtctaaaatttgcctgttaccatgttaagcacagtagaataaatagacaacggattagtaaaatgtttgtagttttttgagagtatcaaaagaggc

SEQ ID NO: 764912 - DNA, 630 bp, Homo sapiens
ctgaataatgtattttccagatgaatgtagggctattttttaaaatgtatgaagatatcagctttccaggtaaaatggaaaatttataatagcttttttctcatagtgtattttcccaatttgatgttaatacctttatattttaaacattgacactggattagactattttgcacatttcttgattttagcatgaattcaacttaaaattgacttgtatatttcctataacacaatccaagttccccrtattttgatctaataattctgtaataaaaaggagttgcacttgttactcttgtctaaaaatgtgcaaaatttctcacatttacagtaatattctccacatatcgaactcacagtaacataaaaagaaagtagggaaagctttcagaaatccatcttctctcctgagagtaagcattttacccacataaacagtcttacctgtttatctcttcatcaacaaatgtaatttgactcactgcctcagagacgttgaaatcatcactgtatcctgcctcttcctactgtgcccctagaattttcaagagtttatgtccaagaatcttgtaaacttattttatatttcatccttatgaagtacatagtaagttcactaagtcagtc

SEQ ID NO: 764913 - DNA, 630 bp, Homo sapiens
ctgaataatgtattttccagatgaatgtagggctattttttaaaatgtatgaagatatcagctttccaggtaaaatggaaaatttataatagcttttttctcatagtgtattttcccaatttgatgttaatacctttatattttaaacattgacactggattagactattttgcacatttcttgattttagcatgaattcaacttaaaattgacttgtatatttcctataacacaatccaagttccccgtattttgatctaataattctgtaataaaaaggagttgcacttgttactcttgtctaaaaatgtgcaaaatttctcacatttacagtaatattctccacatatcgaactcmcagtaacataaaaagaaagtagggaaagctttcagaaatccatcttctctcctgagagtaagcattttacccacataaacagtcttacctgtttatctcttcatcaacaaatgtaatttgactcactgcctcagagacgttgaaatcatcactgtatcctgcctcttcctactgtgcccctagaattttcaagagtttatgtccaagaatcttgtaaacttattttatatttcatccttatgaagtacatagtaagttcactaagtcagtc

SEQ ID NO: 764914 - DNA, 505 bp, Homo sapiens
gtaatgaataatagaaatttgaattcaaaaacaaccatttaaaataactttaaaaataaaataaataattgaggtaaaaaatatgagtatttatattgtaaaatataaaactgtagaaaaaaaattttttaactaaataaatggagctagatactaagtgtccatgtattgaaagactaaattttcttcaaygttaattgagatatagattgatcaacttcaatgaaataccaggaaaacctcagcagcctgacttgaacatatcaacaagcaaatgctaagatctcggtataaaaaataaagaggaccccaaaaaattttgagaaaacaaaattagagaacttctatcatcagatttcaaagctatttgaatgttacaataatcaagacagtatgatattgggggtaagaatagattttagatcatttagacagaatggggagtccacaaagaaagatacagaaatagtcaattgatttttacaaatgtccaaagacagttctg

SEQ ID NO: 764915 - DNA, 505 bp, Homo sapiens
gtaatgaataatagaaatttgaattcaaaaacaaccatttaaaataactttaaaaataaaataaataattgaggtaaaaaatatgagtatttatattgtaaaatataaaactgtagaaaaaaaattttttaactaaataaatggagctagatactaagtgtccatgtattgaaagactaaattttcttcaatgttaattgagatatagattgatcaacttcaatgaaataccaggaaaacctcagcagcctgacttgaacatatcaacaagcaaatgctaagatctcggtataaaaaawaaagaggaccccaaaaaattttgagaaaacaaaattagagaacttctatcatcagatttcaaagctatttgaatgttacaataatcaagacagtatgatattgggggtaagaatagattttagatcatttagacagaatggggagtccacaaagaaagatacagaaatagtcaattgatttttacaaatgtccaaagacagttctg

SEQ ID NO: 764916 - DNA, 516 bp, Homo sapiens
aggtaatttaaaaaaaaaacgaaacatagaatcatgactcatacagattgaacatgaacatgtgttagagattttatttaactcaatctatgagagaactaggcagatattataactggatcaaaagagaatacaaagaacatgtwtagatcaagaatattgaatgcacaaaaaaagggcaaaactgacttcttccacagagggagcgggaatcaattgaacctctaccagaagggacaaaacttgaatgtttacagagaataattattttgcaatgctatcagctagctacagtttacaaagttgtgaaatagctcccatagaatccaaatcagataaaagatagcagaagggtgtgtgatggacaacacatagttttccaaatatgtgcagacattttccttacaactgttagaaaagcagaagtatcttttacaataaaacatgggcatcccaggttcctttttctgttttatatacatgcaaaaatatacaagtgtgtatgtgcatatgtat

SEQ ID NO: 764917 - DNA, 516 bp, Homo sapiens
aggtaatttaaaaaaaaaacgaaacatagaatcatgactcatacagattgaacatgaacatgtgttagagattttatttaactcaatctatgagagaactaggcagatattataactggatcaaaagagaatacaaagaacatgtatagatcaagaatattgaatgcacaaaaaaagggcaaaactgacttyttccacagagggagcgggaatcaattgaacctctaccagaagggacaaaacttgaatgtttacagagaataattattttgcaatgctatcagctagctacagtttacaaagttgtgaaatagctcccatagaatccaaatcagataaaagatagcagaagggtgtgtgatggacaacacatagttttccaaatatgtgcagacattttccttacaactgttagaaaagcagaagtatcttttacaataaaacatgggcatcccaggttcctttttctgttttatatacatgcaaaaatatacaagtgtgtatgtgcatatgtat

SEQ ID NO: 764918 - DNA, 657 bp, Homo sapiens
gctagacacagctgacatttttcaaagatggcctcacatcttactatctaacttaccatgtcttttagaaagatctgtagggagggagggaagcagataagagaaggagattgttaatagtcctcttgaatcagctctcctattttgtctaacccctttctacatttgaaaaagagaaaaaaaaaatccccctcggtaggtgtacagaaatcacaaaatattaattcttgttctgtttggatccaagtgaaatgactaagaaacttgttttttttttttcttttttgctttttctttcaacaacctttgtatttgaacagtgcccaactatgaaatttaatgatagaaggaatttaagccttcagttagaatacactgtgattccttctaactcaaaactttgtaattccataatgaagtggagcattctaggttgtatcagtcaacagggcatttattaggaagawtttgctgttagattttaaagcctctcaaggctatagaactgcatttcttaggagatgatctgaccacaatgcttccccataaagtgcttcaatcctatgacagcctattgggagaagtaacaagactaggactttcttgagaataacagggtagcttggacatttccaaaaggaagaggcattgattaca

SEQ ID NO: 764919 - DNA, 615 bp, Homo sapiens
tgctaggctaatggcaaagcctgtattcttgctgctatcctgcactgcctttctccttatgcaagggaaaaaaacatgtaaaaataacatcagtgcaatttgcatggtatttttcaaagtattcttttatattcacagccacacttgatccttatgacaaccatatgataggcgtagtagatagctcccatcataacgattaataataatgggcataataatcattaaaataacaacattcgccagcactgattgagtgctcttcatacatccrtgcactgtgctaagggctttgcatgtattatgtaacaactctataagaaaggttctacaattatccttaatttgcatatgaggaaactggggctcagagaggttaagtaacttaataaaggagctgggttcaggtaagttacaagactagttcaaggtcatgtggtgattcctgaactagaacacagatcctccaattccatatccacgcatgctcttttcatgttactattttaaccatcagtctgcagctacaggaaggaagatttgaagaaagagctacaacaggcagaagaagagagaagagagaagaagccaggagagaagccagaaaacggcaga

SEQ ID NO: 764920 - DNA, 630 bp, Homo sapiens
aggtggtatgagcagctcatgactttttaaccagcagaatcacagatatcccaaataccgcttatagtcatcactatgacattacaataattataagacctgccagtagactttttaattaacgttctaataaagaagcacatattactatatcacaaacttgacgtttttaatattcagatcattatatttcattataacctatttttgtaaacctacgtaatttattttatgtgtcttaaatcattattctgttcataggcttcaygagactgctcatgggggcccatgacacagaaaagttgaaatacccctgggctggaggaactcttccctaatccccatcaaacaccacacacacacacacacacacacacacacacacacaggcctcactacaaggcctgaaatcccaccattagagaacatttcctttgggtttttaagattcccattaaaatgcaaatgccccctaaggagaagaacttctctgagtgttattagttaaccccttaaatgaggttgtttagcagctagctgggcacaacatcctacaactcaattaaacaaacgtttattgacctcctgccatggttaaggagccagacttgggaatagggagcaaaatcc

SEQ ID NO: 764921 - DNA, 589 bp, Homo sapiens
tttaattttcacgggtacatagtaggtgtatatatttatgggatccatgaaatgttgtgatacaggcatgcaatatgtaataatcacatcatggcaagtcttctgtcttttttttcttaattagtgtgactaaatgtttgccaattgtgtttatcttttcaaaaaacyaacttttcatttcattgatcttttgtattgttttcttcatttcaaactcatttatttctgctctgatctttattgtttcttttcttctaattttaggtttggtttgctctcacgtttctagttctttaagatgtagtgttatacagtgtatttgaagttttatacttttttacttttatactttttttttttttttttttgtgagacggcttctcgctctgtcacccaggctggagcaccgtggcgcgatcttggctcactgcaagctctgcctcccgggttcacgccattctcctgcctcagcctcccgagtagctgggactacaggcgtccgccaccacgcccggctaattttttgtatttttagtagacatggggtttcaccatgttagccaggatggtctcgatctcctgacctcat

SEQ ID NO: 764922 - DNA, 606 bp, Homo sapiens
aattattatgtgccacaaaggtaacaaactttcttgccaattgtgtctttgactatggtggccctaaaacattttgtcatccacagacaattgttctcttgctttggtactgtttagacagttgttttataatcagctataactggtgcccttgaatgcaggtttctaataactttggagattgtgacatcagaacagtggaaaaaggggcacagcttggtttttatacattttagggagatacgaggcatcaatcaatatatgtaaaaagtgtattggttccatcyggaaagacggggacaactcgaagcaaggaagggggcttccaggtcacagggaggtgggagacaaagggttacatccttctgaatttctgataagcgtttccaaaggaggcaatcacatacgcatctatctcagtgagcagagggatgactttgaatagaatgggaagcaagtttgccctgaccagttcccagcttgacttttacctttagttcagtaatttgggggccccaagattttcctttcacacttcccccctattcttttttaaaatcttttagagaaagtattttagaagaaaatgagtctctgatttcaggt

SEQ ID NO: 764923 - DNA, 606 bp, Homo sapiens
aattattatgtgccacaaaggtaacaaactttcttgccaattgtgtctttgactatggtggccctaaaacattttgtcatccacagacaattgttctcttgctttggtactgtttagacagttgttttataatcagctataactggtgcccttgaatgcaggtttctaataactttggagattgtgacatcagaacagtggaaaaaggggcacagcttggtttttatacattttagggagatacgaggcatcaatcaatatatgtaaaaagtgtattggttccatccggaaagacggggacaactcgaagcaagraagggggcttccaggtcacagggaggtgggagacaaagggttacatccttctgaatttctgataagcgtttccaaaggaggcaatcacatacgcatctatctcagtgagcagagggatgactttgaatagaatgggaagcaagtttgccctgaccagttcccagcttgacttttacctttagttcagtaatttgggggccccaagattttcctttcacacttcccccctattcttttttaaaatcttttagagaaagtattttagaagaaaatgagtctctgatttcaggt

SEQ ID NO: 764924 - DNA, 606 bp, Homo sapiens
aattattatgtgccacaaaggtaacaaactttcttgccaattgtgtctttgactatggtggccctaaaacattttgtcatccacagacaattgttctcttgctttggtactgtttagacagttgttttataatcagctataactggtgcccttgaatgcaggtttctaataactttggagattgtgacatcagaacagtggaaaaaggggcacagcttggtttttatacattttagggagatacgaggcatcaatcaatatatgtaaaaagtgtattggttccatccggaaagacggggacaactcgaagcaaggaagggggcttccaggtcacagggaggtgggagacaaagggttacatccttctgaatttctgataagcgtttccaaaggaggcaatcasatacgcatctatctcagtgagcagagggatgactttgaatagaatgggaagcaagtttgccctgaccagttcccagcttgacttttacctttagttcagtaatttgggggccccaagattttcctttcacacttcccccctattcttttttaaaatcttttagagaaagtattttagaagaaaatgagtctctgatttcaggt

SEQ ID NO: 764925 - DNA, 627 bp, Homo sapiens
ataagaaaagacaatccacatcattaatcattagggaaacaaaaattgaaccatggtgaaatatcacctcacacccactaagatggctataataaaaaagataacaataaatgctggtgaagatgtagataaactggaaccctcrtacattcctgatggtaatgtaaaatgatgtagccactatggaaaaaaatttggcagtttttccaaaatgttctacatggagttgccaataacccagcaattccattcataacttgtgatattatgattatatgtttaggttttcctctatggtttctggctaataactccactagcccttgttacagtcttttactataatgttgaggtgttttagcctcagaagcaggcctcaggaaatagaatctctctctctgaccttctcctgtcctctttacaccttcccaaggcaagcctttaatctaactgtgggtcaaaagactctcattccagaagcagtcctgcctcaaaccctggggaaaggaatgctatgcagagaggccacaaaaagtctgaatagacaagcttactgggtttagatcaggcactttttgtccaatcacatttctacatggttgtcaaccgtatctatgtaataaagcc

SEQ ID NO: 764926 - DNA, 596 bp, Homo sapiens
tatcttttgtaatagcccttataataaacctgtaaacacaattgtttttctcagttctgagagctgctccagcaaactaatcaaacacaaattaatccagcaaattaatccaggggggcatgggaaccccaacttaaagatggttgatcagaagttttggaatcccagacttgtgactgggtctaaagygggggacacagtctcaggggactgatccctcaaactgtgagatctgacactatctccaagtagatagtaccagcactgaattagaggatgaccatttgggtgtcatctacagaattcattgcttgcttgctggtagagagaaatacccacatattttgaggtcatagaagtcttctgtgttcattattactgtgttgatgtgagaacagagggaaaaaaaatggtttgaaaaacatgttaaacatagttgtatacccaagagaaatgggaatacatgtccacacaaaatatgtacacaaatgttcatagcaaaattattcataataaacaaaaacacagacacaacccaaatatcaatggatgaatggctgaacaaaatgtgatgtatccaaccaatggaatattat

SEQ ID NO: 764927 - DNA, 596 bp, Homo sapiens
tatcttttgtaatagcccttataataaacctgtaaacacaattgtttttctcagttctgagagctgctccagcaaactaatcaaacacaaattaatccagcaaattaatccaggggggcatgggaaccccaacttaaagatggttgatcagaagttttggaatcccagacttgtgactgggtctaaagcgggggacacagtctcaggggactgatcmctcaaactgtgagatctgacactatctccaagtagatagtaccagcactgaattagaggatgaccatttgggtgtcatctacagaattcattgcttgcttgctggtagagagaaatacccacatattttgaggtcatagaagtcttctgtgttcattattactgtgttgatgtgagaacagagggaaaaaaaatggtttgaaaaacatgttaaacatagttgtatacccaagagaaatgggaatacatgtccacacaaaatatgtacacaaatgttcatagcaaaattattcataataaacaaaaacacagacacaacccaaatatcaatggatgaatggctgaacaaaatgtgatgtatccaaccaatggaatattat

SEQ ID NO: 764928 - DNA, 596 bp, Homo sapiens
tatcttttgtaatagcccttataataaacctgtaaacacaattgtttttctcagttctgagagctgctccagcaaactaatcaaacacaaattaatccagcaaattaatccaggggggcatgggaaccccaacttaaagatggttgatcagaagttttggaatcccagacttgtgactgggtctaaagcgggggacacagtctcaggggactgatccctcaaactgtgagatctgacactatctccaagtagatagtaccagcactgaattagaggatgaccatttgggtgtcatctacagaattcattgcttgcttgctggtagagagaaatmcccacatattttgaggtcatagaagtcttctgtgttcattattactgtgttgatgtgagaacagagggaaaaaaaatggtttgaaaaacatgttaaacatagttgtatacccaagagaaatgggaatacatgtccacacaaaatatgtacacaaatgttcatagcaaaattattcataataaacaaaaacacagacacaacccaaatatcaatggatgaatggctgaacaaaatgtgatgtatccaaccaatggaatattat

SEQ ID NO: 764929 - DNA, 664 bp, Homo sapiens
tgtcctcctgaggtctcctcagcctttccctgatggctctggtcatattttggaatgtctccctgggaggagccgcccctgcttctggaaggggctgtgctttttatcctcctcacatttggaaagcctctggctttcagacaatttttacttatcagtgcctgcattttcctcacccgctagtctgcagattctatcttctttctaaaatagtgatattgggctrggcacagtggctcatgcctataatcccagtactttgggaggctgaggcggcaggtcacttgaggccatgagttcaagaccagcccagccaacatagcgaaaccccatctctactaaaagtacaaaaattagctgggcgtggtggtacacacctgtaatcccagctacccgggaggctaaggcaagagaatcacttgaaccaaggaggtggaggttgcagtgagctagactgtaccactgcactccagcctggctgacagagtgagactctgtctcaaacgaaatgaaacaaaacaactaaacgaaacaaaacaaaatgaaactaaactgtgatattgaaatttattttccctaggagtggaagatttttttctttttggcaacacagtcttttgtgtggtacagccccaacctatatgctaggctgtaggtaaaagcc

SEQ ID NO: 764930 - DNA, 664 bp, Homo sapiens
tgtcctcctgaggtctcctcagcctttccctgatggctctggtcatattttggaatgtctccctgggaggagccgcccctgcttctggaaggggctgtgctttttatcctcctcacatttggaaagcctctggctttcagacaatttttacttatcagtgcctgcattttcctcacccgctagtctgcagattctatcttctttctaaaatagtgatattgggctaggcacagtggctcatgcctataatcccagtactttgggaggctgaggyggcaggtcacttgaggccatgagttcaagaccagcccagccaacatagcgaaaccccatctctactaaaagtacaaaaattagctgggcgtggtggtacacacctgtaatcccagctacccgggaggctaaggcaagagaatcacttgaaccaaggaggtggaggttgcagtgagctagactgtaccactgcactccagcctggctgacagagtgagactctgtctcaaacgaaatgaaacaaaacaactaaacgaaacaaaacaaaatgaaactaaactgtgatattgaaatttattttccctaggagtggaagatttttttctttttggcaacacagtcttttgtgtggtacagccccaacctatatgctaggctgtaggtaaaagcc

SEQ ID NO: 764931 - DNA, 646 bp, Homo sapiens
ctatagtaaaatcagatatagtagatttcaaagaaaataatattattggggataaagaaggttacctcataatgataaagtgttcaatttattaaaagggcataacaatcctaaacatttatggacctaatattaaagcttcaaaatacatgaagcaaattccgatagagctataaggaaaaatagacaaatccatgattatcgttggagatttctatacctgtccttcaatgattgatagaacaggtatatagaaaatcagtaagcatatagaagacttaaacaccatcaagcaacttgaaatttataggatactttacccagcaacaacaacaaaaacacatattagtttcgagtgtacataaaacatttatcaagacaaaatatattcagggccacatgacaagaccaaataaattttaaaggmttcaagttatatgaagtgtgttccctcaattagaatgaattaaataaaaaatcaataataaaaagaaggatcttttaactatttaaaaatatttggaaaataaacttttaaataattcaaggattgaagggaaatcaaaagaaatatagaaagtgtttttagctcataaaataaaaacacagcatataaaaatgtgtgtgattctactaaagcagtatt

SEQ ID NO: 764932 - DNA, 599 bp, Homo sapiens
aatgctattcatagtggtcacaaggcagaaataacttaaatgaccctcaatggagcaacagataaataaaatatggtacattcatacaaataaatagtattcagtcatacaaaaggaatgaagtcctgaaacataccataacatggatgaagcttgataacattatgcaaaatgaagaggtatacacaaaaggtcacatatatgatcccattcatatgcagtatcaggaatcagcacatccatacagattgatggctgccaggcacttggggagtggggaatgccgagtgattgctaatgggaccccagatttcattctggggtcatgaagtgctttggaactagatagtggtgatagttggataacattgckaatgtattaaatgctacagaattttacaatttaagatggttaaaattgtgaattttacgttatgtgaatttaattacaattaaaacaaagtgagtagacaaatattgcctctttggggactcaaggcatctggagacctcagggtttgtttggttcatgtgttttgttttgttttgaatcactagctaagatgttggcaacacagtaaacaaaagctgaacaataa

SEQ ID NO: 764933 - DNA, 558 bp, Homo sapiens
catcagctatcctcctaagagatgtattattgcagtatatttggagattccacaaaggagcatgggccctgaaatcaatcacactgcctaatttcaaacctaccagtaactatgtgagtgacctcggttgagctactcaaactcattaagccacagtttcttcatttgtaaaatagggaagagtcacataactcttcatgttactaacgatgattaaatcatatggaaagtgttcagcacagtgccttgcctgtttcaaatcaggcattcaaagactgtaaactttattataattataggacaacatgaaaagctttagagctaaagaataaaactttctcactttacatgttttccaaataaacacccatygtgtgtgtgtgtgtgtgtgtgtgaatttgagacacatggaacttagcagggagtgtgcttcagaggtaataaatgctcccatcaacaaccacactattgtgtcttctttgggttcttcagtatttaagtttactctttgtttatattgatgagctttttgacttaatttcagagcactgtttgcca

SEQ ID NO: 764934 - DNA, 558 bp, Homo sapiens
catcagctatcctcctaagagatgtattattgcagtatatttggagattccacaaaggagcatgggccctgaaatcaatcacactgcctaatttcaaacctaccagtaactatgtgagtgacctcggttgagctactcaaactcattaagccacagtttcttcatttgtaaaatagggaagagtcacataactcttcatgttactaacgatgattaaatcatatggaaagtgttcagcacagtgccttgcctgtttcaaatcaggcattcaaagactgtaaactttattataattataggacaacatgaaaagctttagagctaaagaataaaactttctcactttacatgttttccaaataaacacccattrtgtgtgtgtgtgtgtgtgtgtgaatttgagacacatggaacttagcagggagtgtgcttcagaggtaataaatgctcccatcaacaaccacactattgtgtcttctttgggttcttcagtatttaagtttactctttgtttatattgatgagctttttgacttaatttcagagcactgtttgcca

SEQ ID NO: 764935 - DNA, 509 bp, Homo sapiens
ttttaaaaaagctttttaaatttatttttgtctgacattgattatgtgggataaaatatctccaagtgcggtgcagagtctatatgaagaagcacagataggaagagaagtagtcacattaaagtcaaattaagagtcctattaaagtctacaatagccaggctgggcatggcaactcacaccrgtaatcccagcactttgggaggctgaggagggcagatcacttgaggccaggagtttgagaccagcccagccaacacagtgaaaccccatctctattaaaaacacaaaaattagccaggtatggtggtgcatgcctataatcctagctacttgggaggctgaggcacaagaatcgcttgagcctgggaggtggaagttgcagtgagccaagatggcaccattgcactccagcctgggtgacagagagagactctgtctcaaaaaaaaaaaaaaagtgtacagtagccattgggctagatagcctgaggcctaaccggtgcccacag

SEQ ID NO: 764936 - DNA, 520 bp, Homo sapiens
ctcttcaggctttttaaaaaagctttttaaatttatttttgtctgacattgattatgtgggataaaatatctccaagtgcggtgcagagtctatatgaagaagcacagataggaagagaagtagtcacattaaagtcaaattaagagtcctattaaagtctacaatagccaggctgggcatggcaactcacaccggtaatcccagcactttgggaggctgaggaggrcagatcacttgaggccaggagtttgagaccagcccagccaacacagtgaaaccccatctctattaaaaacacaaaaattagccaggtatggtggtgcatgcctataatcctagctacttgggaggctgaggcacaagaatcgcttgagcctgggaggtggaagttgcagtgagccaagatggcaccattgcactccagcctgggtgacagagagagactctgtctcaaaaaaaaaaaaaaagtgtacagtagccattgggctagatagcctgaggcctaaccggtgcccacag

SEQ ID NO: 764937 - DNA, 637 bp, Homo sapiens
gtgtttaccatgaagacaccttccacagccctttagttttgcggaggcaaagatagcctctggtgatctgcatggagaggatttaattgcttccatttttcttttaagagcaaagagctttctaggaaaaatagcagtatttcaaaggtcaagtctgatggcttgtgggaagagcaggagagattgatttatggggattggaacagaaaacatggtgtccgtatggcaatgagacaaataaaataccagggcttggctgactgtattcaaattcttgtctgtgtgagccctggctagggagggctccaaataatgttcaagtcatttagttggagactgagactggcatttgcaagaaggatagaaaaatttaaagctagagtggacaggaaataaaggatactttggttaggattaaaactgggactctacttaatttattcatgcagtcaacrgatctttttgagcccttgctatgtgccaggcattgtactggacagaggagaaacaacaggaattccaacttatgtggtcctagccaggctgcatggagctcacagccaagtcagggagacagatattggccaaataaacacaaattagttgtttaattacaatttagttagtgctgcaaaga

SEQ ID NO: 764938 - DNA, 518 bp, Homo sapiens
tgcaagaagtttttaattttttaattatttttaaacttttaagttcaggggtatgtgtgaaggtttgttctgtaggtaaacatatatcacaggggttttttgtacagattattttgtcacccaagtactaagctgagtaccgaatagtttttttgttgttgtttgtttgtttgtttgtttgttttttgagatggagtctcgctgtgtctcccaggctggagtgcagtggcgcgatctcagctcactgcaagctccgcctcccgggttcacgccattctcctgcctcagcctcccaagcagctgggactacaggcgcccrccaccacgcccagctatttttttttgtatttttagtagagatggggtttcaccgtgttagccaggatggtctcgatctcctgacctcatgatccgcccacctcggcctcccaaagtgctgggattacaggctgagccaccgcgcccggcccccaatagttattttttctcatcgtctccccactcccacccttcaccct

SEQ ID NO: 764939 - DNA, 564 bp, Homo sapiens
ctggaatatgagcaatggttgtaatgttacatccgtgtttttgttttttgttgttgtttgtttggtttttgagatggagtctcgctctgttgcccaggctggagtgcagtggcacgatctcagctcactgcaacctctgcctcccgggttcaagtgattctcctgcctcaacctcccaagtagctgggattgcaggtgcgtgccaccatgygcctgttgtatttttagtagagacggggtttcaccacgttagccaggatggtctcgatctcctgacctcatgatccgcccacctcagcctcccaaagtgctgggattacaggtgtgagccaccgcgcctggcacatgggtgttttaaagttagtagaatagtgggatctgcatgggaggggagaacatggcagtgggaaaggcaggaggccttgattctccatgtcttcctgatgctaggcaggcccaacgtctccatgcagaactatcctggaacagggaagcatatgcaacacaaatccattgctgagtggaaatagaatgaatctaatgctttgcacagaattcaactct

SEQ ID NO: 764940 - DNA, 607 bp, Homo sapiens
acattaatgtgcttttgtttactgtatgtaatacacgcttattaaaaaaatttcaaaaaatactaaaatgtacaaaaaaaaaaaaaaaaccaaaacatttataatcccgctgagagataaccactgttagtctttaagtgcttaaaaatgtatttgaaggtattatgggtgtatatatattaaagcttattctttaagagaaacgcacactcattaaagtataaagaaaaattgtccagaatacctaccagaaaaactgctaatattttgatatgtaattagtttaaaaaaaatatttgaggctgggcgcagtggctcacacctgtaatctcrgagctttgtgaggctgaaccaggaggatttcttgaggccaggagtttgagaccagcctgggcaacctggtgagacccaaatttttgtatctataaaaataaaaaataagacaggtgtgttggtgtatgcctgtggctccagctactcaggatgctgaggcaggagggttgctcgagcccagaagttcaaggctgtagtgagctatgactgtgccattgcactccagcctgggcaagagagtgagaccctgcctcaaaaacaataaaaaaattga

SEQ ID NO: 764941 - DNA, 529 bp, Homo sapiens
ataaaagtatataggcgaggcatggtggctcacgcctgtaattccaggactttgggaggctgaggtgggcagatcacttgagttcaggagttgaaaaccagcctggccaacatggtgaaacaccgtcttactaaaaacatgaaaattagctgggcatgrtggcaggtgcctgtaattccagctacttgggaggctgaggcagggagaattgcttgaacccgggaggcagaggttgcagtgagctggtgtgccactgcactctagcctgggtgaccgagcaagactccatctcaaaaaaaaaaagaaagagtatctatcagcacagaacctaacaaataccccaaagctaatttggaacaggcctaggcaatttatcacccagactttaagggtctatatgctctaaaaaggtgaagagaaaaaaaaagggagacatttagggattcttggaaaaatgtactgtaatttcgtaagtacaattacatcatgcaagcttcaggtattctaagtgggatgtcatatcatcact

SEQ ID NO: 764942 - DNA, 529 bp, Homo sapiens
ataaaagtatataggcgaggcatggtggctcacgcctgtaattccaggactttgggaggctgaggtgggcagatcacttgagttcaggagttgaaaaccagcctggccaacatggtgaaacaccgtcttactaaaaacatgaaaattagctgggcatgatggcaggygcctgtaattccagctacttgggaggctgaggcagggagaattgcttgaacccgggaggcagaggttgcagtgagctggtgtgccactgcactctagcctgggtgaccgagcaagactccatctcaaaaaaaaaaagaaagagtatctatcagcacagaacctaacaaataccccaaagctaatttggaacaggcctaggcaatttatcacccagactttaagggtctatatgctctaaaaaggtgaagagaaaaaaaaagggagacatttagggattcttggaaaaatgtactgtaatttcgtaagtacaattacatcatgcaagcttcaggtattctaagtgggatgtcatatcatcact

SEQ ID NO: 764943 - DNA, 529 bp, Homo sapiens
ataaaagtatataggcgaggcatggtggctcacgcctgtaattccaggactttgggaggctgaggtgggcagatcacttgagttcaggagttgaaaaccagcctggccaacatggtgaaacaccgtcttactaaaaacatgaaaattagctgggcatgatggcaggtgcctgtaattccagctacttgggaggctgaggcagggagaattgcttgaacccgggaggcagaggttgcagtgagctggtgtgccactgcactctagcctgggtgaccgagcaagactccatctcaaaaaaaaaaagaaagagtwtctatcagcacagaacctaacaaataccccaaagctaatttggaacaggcctaggcaatttatcacccagactttaagggtctatatgctctaaaaaggtgaagagaaaaaaaaagggagacatttagggattcttggaaaaatgtactgtaatttcgtaagtacaattacatcatgcaagcttcaggtattctaagtgggatgtcatatcatcact

SEQ ID NO: 764944 - DNA, 615 bp, Homo sapiens
tgttcccttgaagactttaggggcatctgttatcattgtctgcattttcagatggaaaatagaagtcactgaggctaagtgaccaatcaaaggtcaaatgacagtgagtggtggagccagcgtgaggattcctgtctgttggctttttgtattggagtgttttctctcatcagcgcctctgcagccactcatcagcaccactttgactctcacagttgggtgagctccataaagcaggccaggaaaacctcccaagggtcaggtcaccggcagtttatgggacaatgctctgctgctgctcccagtcactacccttcacactaaaacagaaaaccaggctactccagagttacagggtatctatccccttccttttggggataaactcawcctcctcctatgcccatccccaagcccagccagtagaaaataatggaatagtgtgtgacctttatgggcccctctgaggtaggaaaatgtatgtggcaaggtagtcagtctagtgtgaagcacaggggctgtggaatcagctcagtgggtttgatgccgggttccagccccacggctgctgctagcccatttagtgcctttgttcatgttagaggaaggtgtccc

SEQ ID NO: 764945 - DNA, 657 bp, Homo sapiens
ggccaactggtgggagcatgggtctggaagaggcagacattctggaactgaatcctgaatgttgccttttccttggactttgagtgctttatgcttcatttcccatggtacttaggaaagggggaaggaatagtaatgactgaacagattggtggtaagaaatacattcagcggcggctggcacagcggctcacacctataatccctgcactttgggaggccaaggtgggtgggtcacgargtcaagagatcgagaccatcctggccaacatggtgaaaccccgtctttactaaaaatacaaaaattagctgggtgtgttggtgtgcgcctgtagtcccagctactggggaggctgaggcaggagactcacttgaacctgggaggtggaggttgcaatgagccgagattgcgccactgcactccagcctggtgacagaacgagactcggtctaaaaaaagaaaagaaaagaaatacattcagcagcaagttgcaaagtccttgctttccaactgtggatattccagagagatcaatgattacctggtgactagagcataggctgtggccttagacacacatgggtttacctgcttgctccaccactcaccttgaccttgagaaagctacttaaccttgctaagcatcagtttccttg

SEQ ID NO: 764946 - DNA, 633 bp, Homo sapiens
tggaagaggcagacattctggaactgaatcctgaatgttgccttttccttggactttgagtgctttatgcttcatttcccatggtacttaggaaagggggaaggaatagtaatgactgaacagattggtggtaagaaatacattcagcggcggctggcacagcggctcacacctataatccctgcactttgggaggccaaggtgggtgggtcacgaggtcaagagatcgagaccatcctggccaacatggtgaaaccccgtctttactaaaaatacaaaaattagctgggtgtgttggtgtgcgcctgtagtcccagctactggggaggctgaggcaggagactcacttgaacctgggaggtggaggttgcaatgagccgagattgcgccactgcactccagcctggtgacagaacgagactcggtctaaaaaaagaaaakaaaagaaatacattcagcagcaagttgcaaagtccttgctttccaactgtggatattccagagagatcaatgattacctggtgactagagcataggctgtggccttagacacacatgggtttacctgcttgctccaccactcaccttgaccttgagaaagctacttaaccttgctaagcatcagtttccttg

SEQ ID NO: 764947 - DNA, 601 bp, Homo sapiens
aacatttctaataagttttagacataaaaataaattcacttgaaggtttaaatgaacaattccattcaattacggcattcaaataaaaacttttcacactgatagctctcagggattattatttttacacacttaatattacattttgtggtgctctggtttatttaccctggtgtgtttgtattttctcactactttttgtcccagaaatgactgttgcaccaaatttcttaaagagaatctctgggctgggcacrgtggtgcatgcctgtaatcccagcactttgggaggctgaggcaggcagatcacaaggtcaggagttcgagaccaacctggacaacatggtgaaaccccatctctactataaatacaaaaattagctgggcatagtggcacacccctgtaatcccagctactcgggggctgaggcaggagaatcgcttgaactcaggaagcggaggttgcagtgagctgggatcgcaccattgcactccagcctgggtgacagagcgagactcttgtctcaaaaaaaaaaaaaaaaaagagagagagagagagaatctctgttgcaatgcaaaactaactgtaaaattatcagaa

SEQ ID NO: 764948 - DNA, 668 bp, Homo sapiens
atttgtgctcattgtctcatttagtgccccaggcgaccctgttgaatgagtacaacctccattgacgaagtagaaacagcggcttccaggtggacagcttgataaaggcagtgaaagtctggctctcctctgcacatagtacttttgaatgcagatatgtgtagacgtccataaacagcagacctcaattgaaaacgggaagccaagatttggagccaggtctgtttgagcataaagtgtattgtttctgtcactcctttcaaaaatgaggcctttctgagcttcctctagtctgcaaagtactgcatgattgaagaaagagggagagaggcttctttgtctagaggcccaccaaattgaactaaacagacagccgaatttacacacggagtactagagacttctgaggaatagagatgggtcagagagctcccttcatgactgagcacygtctgtgtgtcaggtgctgttccatgcactggaaactacagatgcacagccacactttggatccagagcctcagcctttttatgcctttatttttgcagctgtgatatgtatttttaggattatttaatgtatttctagaccccagacaagtcaatctgattttaatgcttctcactcgtgatttccttataatttggtggataattgaggtaccatg

SEQ ID NO: 764949 - DNA, 657 bp, Homo sapiens
gatttgagctccttcagggaaaaacactatctgtttctctacatctgccctgagcctaacaatgcctgaaacataggatctactcaacaaatgtatgttggtcagtgttattgaagatcaataacttgctgagcagcacawtctttcctgaacagaagcaaagcacccaataccaggcttagctgtctcggttccaagaccaaccatgcagttacccaggaggatatgaagataatgacacagaatcaagtgaattttgatgtgcagtttgctatgatcttatgccttcgttggagaacctgggttttggccttgatcctggaacaattctctcaactcatcactagacccacattttaatcttgtgtgtccaagtttctattttggtaatatgctggtccaaggattaccaaaagtaaggtttctctccttttctaggcaagactatattttgattccttttctggcaatgtaatggaaatttcaaaacattaggaagctagtcaaaaagtttcacccttaagaggtggagcttgcagtgagcggagatcgcgccactgcactccagcctgggtgacagagcgagactccgtctcaaaaaaaaaaaagtttcgcccttaattctctattaaacacaatgttaggagcatcagtacc

SEQ ID NO: 764950 - DNA, 620 bp, Homo sapiens
gaccattaacaaatacacggataataaatacggtaaattcaggtggtagtaagagttgtgaaggaatttgagcagagtgatgtggccgagagtgactgatgggtgggaaagtcttatgacacgggcagggttgtgaatggggagagttagccagcacatgaggatcagggaggttataggtrgaaggaagagcaagcccaaaggccataagggaggaaaaaatttgcacgttgctatcattgctattgttagcagaatctgcacttgagaccccagatccaaggattccactcatccctttctttcccagtctgtagctgggcagttgctcagggtcacgatctatttggccctgaaagaaacacctggggttcctgacttcctccacaacgtttcagacactatcagagttctgtatggtttagattataaatgttctatgtattcctttcttgtttctcttctttggtggaatttgaagccatggaacctatatttttccattttccttgttcctaaactatctttcttacccaggtctaaactagattccattggatgtctgaggtccacctccaaattttctcccatggtagagttgtgtaacccaaaaataaaat

SEQ ID NO: 764951 - DNA, 611 bp, Homo sapiens
cttctacctgcccctgtataagggaagtctgtaatcacaggggctctaagagggtgagagtcaatggagcagagtagctctgatggcaagtcagggaagggcaaatgttggattgtcctttcaacaactgattcctttcaaagaagttattcccaactctaaacatgtcatcagaatcccctgaggttttttcattaatttcttatttagactcaggggcgcatgcacaggtttgttacatgggtatattgcatgatgctarggcttgggcttctactgaccctgtcacccaaagagagaacacagtacccagaatgtaatttttcaaccctgaccccctccctcccttcctgcttttggagacctcagagtttattgtgcccatctttatggccatgtgtacccaatctttagctccaacttataagtgagaatatgtgatatttggttttctgtttatgtgttcatttacttaggataatggcctctggctgcatccatgttgctgcaaaggacatgattttgttctttcttttggctgtgttgtattccatggtatatacataccatattttctttatccaatccactgctgatggactcataggttg

SEQ ID NO: 764952 - DNA, 611 bp, Homo sapiens
cttctacctgcccctgtataagggaagtctgtaatcacaggggctctaagagggtgagagtcaatggagcagagtagctctgatggcaagtcagggaagggcaaatgttggattgtcctttcaacaactgattcctttcaaagaagttattcccaactctaaacatgtcatcagaatcccctgaggttttttcattaatttcttatttagactcaggggcgcatgcacaggtttgttacatgggtatattgcatgatgctaaggcttgggcttctaytgaccctgtcacccaaagagagaacacagtacccagaatgtaatttttcaaccctgaccccctccctcccttcctgcttttggagacctcagagtttattgtgcccatctttatggccatgtgtacccaatctttagctccaacttataagtgagaatatgtgatatttggttttctgtttatgtgttcatttacttaggataatggcctctggctgcatccatgttgctgcaaaggacatgattttgttctttcttttggctgtgttgtattccatggtatatacataccatattttctttatccaatccactgctgatggactcataggttg

SEQ ID NO: 764953 - DNA, 611 bp, Homo sapiens
cttctacctgcccctgtataagggaagtctgtaatcacaggggctctaagagggtgagagtcaatggagcagagtagctctgatggcaagtcagggaagggcaaatgttggattgtcctttcaacaactgattcctttcaaagaagttattcccaactctaaacatgtcatcagaatcccctgaggttttttcattaatttcttatttagactcaggggcgcatgcacaggtttgttacatgggtatattgcatgatgctaaggcttgggcttctactgaccctgtcacccaaagagagaacacagtacccaraatgtaatttttcaaccctgaccccctccctcccttcctgcttttggagacctcagagtttattgtgcccatctttatggccatgtgtacccaatctttagctccaacttataagtgagaatatgtgatatttggttttctgtttatgtgttcatttacttaggataatggcctctggctgcatccatgttgctgcaaaggacatgattttgttctttcttttggctgtgttgtattccatggtatatacataccatattttctttatccaatccactgctgatggactcataggttg

SEQ ID NO: 764954 - DNA, 490 bp, Homo sapiens
tgctgtctgtgagctggagacctaggaaagcttagctggtggtacaaaccagcccaagtgcaaaggcccaagaactaagagcaccattgtcagagagcaggaaaagacagatgtcccagctcaaaaagagagagcaaattcaccttccttccaccattttattccatcctgttccattcctcaacaggttggatgatgagggagatctttatccatctcaagttttttgtgcaaatatggaatacaaatgaaaaatacttaaagcacatcatcattgatttccaacttagactagtttaacttccctttttcttctatyctgtcagttccttgagggatcctctctccttgttcatctctgcatctctagtaattagcacagtgccaggcacatggtaatatggctaaaacagtggattattggtctccaacataattaagcccatccaaaagaaaaaccaacctcataaatctgctttgcaaagttcat

SEQ ID NO: 764955 - DNA, 588 bp, Homo sapiens
ggctttctctggtctcaccatttgctttcatattccccaaattttggtgcaattgtcttctcttccattctccttgtcttttaagttaatgcctttaaaaattccctttactgatacttcagtggaattagcagagattaatagatgccatgttttcttggctttttaaaagattaaatgtaattccatgttttatatatgattttcaaaaaatgaattaccaatcgtaaattacaacagtatgcaatacacttagggtgaataagattagaagcttaaataaggttgatgttttgtactggkgatattttaaaatccaatttggtattagatgattaatatagcacttttacctaatttattagagaattagtttaatttcattaaactagacaatcctgttttattctcaacaatggaaaagtaggattatatagaagaatatattctttctttccttcctaccctatccctatggcattcagccacacatacattacacagacactttgttctcaagcataacttgggcttcaagcataacggaatattcttctgaaagagaagacagatgacagcaaagtagaa

SEQ ID NO: 764956 - DNA, 457 bp, Homo sapiens
cccaaactgatctacaaattcaacacaattcccatcaaaattctggaccaataatctgatcctaaaatttatatgagagcgcaagaaacagaagagctaaaacaaccttgaaaacaaacaacaaagttggaggattcacgcttccccatttcaaaacttactacaaaatctacagtaatcaagacagtgtggtattggcataagayaagacatacagattaatagaatgaaattaaaaatctataagtaaactcacacttactgtcaattgatttccaacaagggaaattttttcccattgaattgatttccaacaagggaaatcaattcaatgggaaaataaaagtctttccataaatggtgctgacacaatctgaaaaaaaagaagttagatcctacctcacatctgtataaaaatcaactcaaataggatccaataactaagtgtaaaagctaa

SEQ ID NO: 764957 - DNA, 546 bp, Homo sapiens
tggctgaagtcaaaaagttgaggaaattcccaactagaaacctcaacttcctcactgaaatagaaggcaaatccatctgccaagtaggagtttataatcagataatggtacatcagaggtaaagactgcagaggtggtacagttccaggtgatgasaggttccaaggtgtgtcatgaaagtgagtggctaagctggagaagagggagagggggtggaggcccaggaagtgacaaagcttaatacacctcacaagtacttgttgaattgaatgaaagaattacttcccctgccagcactgtatgatacattaaggcctcagtgttactttaatcatcttggaaattgtcaccatgtttgccctaagtaagtttctttctttttctactaaatttagggataggcgtatgagtttcaatggagaccatactcaagttacctctcacctatggatgaaaaaaggaaagaaaaagaaattggggttttctaagtgtactatgattacactgagagtataaaaactacttaggagaataagcttctagaaa

SEQ ID NO: 764958 - DNA, 642 bp, Homo sapiens
tattttcacatgttctgaaaggaaatttctaatggtctttttggtttttccattttgaaaaataggagccaggaacaatggctcatgactgtaatctcagcactgcgggaggccaaggcagcaggattgcttgagcccagagtttgagactagcttgggcaacatagtgagatcccatctctacaaaaaacaaaaaacaatttgctgggtgtagtggtgcatgcctgtagtctcagctgcttggaggactcaggcggatcacttgagtccaggagttcaaggctgtaatgagctatgatctagccactgcagttcagcatggacaaaagaggaagactttgtctcaaaaaaaaaaaaaygccccgtgaagtggctcatgcctgtaatcccagcaccttgggaggccgaggcaggtggatcacaaggttaggagattgagaccatcctgtctaatagggtgaaaccccatctctactaaaaatacaaaaaattagccgggcgtggtggcaggtgcctgtaatcccagctacttgggaggctgaggcagggcaatcgcttgaacccgggaggcggaggttgcagtgagccaagattgctccattgaactccagcttgggtgacagagcaagactccatctcaaa

SEQ ID NO: 764959 - DNA, 577 bp, Homo sapiens
aaatatttcaagtaattacttaacaattttataaaagacattaatccttaaaccaataagctcaatgaactctaagtagaataagtgcagagagattcatacccacatacatcatagtaaaaatacttcaagacaatgacagagaacaaatctttaaagcagcaagaaaaaacatttcatcacattcaaaaaagccccagtatgagaaacagctaatttctgaccagtaacaattgaggagaggaagtgagaagacatactcaaagcactgagagaaaaaaatatcaaccaagaatcttatactgagagcacatgttttcaaatataaaggtgaaataaagaaatgcccaaataaaccatagaagttatttgcaagcaaaactgtttgacaagaaataataatggaagttytttatggtgaaagcaagtgaccccataatgtaattagaatccacatgaaaaaaacagagcacaggtaaaaataattatgtaagtatgaatgatagtaaaaatgcatatttcttcttcttatacacttagccaacttaattagtaactctataaaacaatagttata

SEQ ID NO: 764960 - DNA, 548 bp, Homo sapiens
catttttgagatgttgagattaagttgcatgttaaatatgcaagtaaaaattacacatatgcaagtctggtgttgacaagagtggtagaggaaggtgaggaagtggaagcactgaatgtcgatgcctctttgaagaggagacttgatatatagtatcaagtagtagatatatatgaatcaagcagtagatatatatgaatgaaagtataaccactcgacaggttcttacccactgcctagactgagctggtttatcaagacaggcaaattgcaatggagaaagagtgtaatgtatgcaaagccaactgtacaggaggstggagttttattattactcaaatcagtcttcccgaaaacgtggggatcacgtaggggatcagaaagtggggagtgctgattagtctggttggagatgaaaccatagggagttgatactatcctcttgcactgagtcagttcctgggtgggagccacaagaccagataagccagtttatctatctgggttctgccagctgatccatcaagtggaaggtctaaaaaatatct

SEQ ID NO: 764961 - DNA, 591 bp, Homo sapiens
tctattttattcactgatacatgcaaacacaaatacctaaaacaatacttggtcccaagactgcgcttaacatagcaataaaaccctgaaaataatcacttgataacattttatttttctatagactccatgcaattagaaattcagtccatctcactcactctacgtttctcttttcaccataaagtctctcagcttttggtctattcaagacacgtatttcaagaaaccagatgtcaatcatgcactaccaatacatgaccttcttatgctaatggaaacctcttttgcaagaaagtgatgttattcttttgaaaatttaggggtctggcttattctaaaacatttctggagatacattaatttgaattcgttgggctactgtatccaagtaaagacaaagacaagttgctttttagagtacttgctrtattccattgttctgtgtgctgggatataaacattgcaggaaaacagacagaaatgcctgtctttatgaaggcatgaagtttggaagagaggtagtgtacatgattggtatgaaataatataacctattagatgataattattgcaaagaagaaatataaa

SEQ ID NO: 764962 - DNA, 604 bp, Homo sapiens
atgatgggactggtgactttataagaagaggaagagagacctgagctgacatacaatcttgccctcttaccatgtgatgcccttcccccatattataacatagcaaaatggccctcaccagatgcttgcaggcaccattctcttgacttcctagcctgtagaactatgaaaaatmatttttttctttataaattacccagtcttttgtattttataatagcaatgcaaaatggactaagatagatatctagggtatgttcttttcatggtgatggcagaagcacaaaagcccaaaagccaaccacgtaaacatatttcaagcgtctgcttgcaccatgtctactatagcccatttgccaaaacaaaccacatggtcaagcccagagtcatgaggcagagaagtcaacttctctccttatggcaacttctacccatggtgaaccaaccattatatcatggcaataacaagcgtttctaatactatgatagtatagtgaagaactgggagcaataattcagtcagccacagcatatatactgaggatctgattgtttgggatgagcattaactggcattaaaagacatcctttctctgtagtgtcc

SEQ ID NO: 764963 - DNA, 618 bp, Homo sapiens
tctgagaggttattcataatatcctagggatatatttctcctaatatcacagtgggtgtatatcatatgtgtacaccctgtactattatttgttatatcctgtgcagatattactcctaatatcatagtgggtgcacaccatgggtgtaaaatctgtgatgttattcatagtgtcctagggagatattactcctaatgtcatagtgggtgtacagcctgtgacattattcataatatcctggggtggtattattcctattatcacagtggtgtacaccctgtgatattatttatgatattctaggggatattatggtatacactgygatatttttgtattattttagggagatagttcttctaaagtcacagtgggtttacaccatgtgtatttgtaatattctagggagatattactcctaatatcactgtgagtgtacaccctgcgatgttatttgtaacgttttagggagatattacttctaaagtcacagtgggtgtaagatattcttcttaatattttagggagatattacctctaatatcacagtgggtgtacaccctgtgatattcctcataatatcctatggatacattactcctaatgtatcacctagt

SEQ ID NO: 764964 - DNA, 514 bp, Homo sapiens
aagagataactaagatcagagcagaactgaaggagatagagatacgaaaaacccttcaaaaaatcaatgaatccaggacctatttttttgaaaagatccacaaaatagatagaccactagccagattagtaaagaagaaaagacggaagaatcaaatagacgcgataaaaaatgataaaggggatatcaccactgatcacacagaaatacaaactaccatcagagaatactataaacacctcaatgcaaataaactagaaaatctagaagaaatgkatacattcctggacacatacacagtcccaagtctaaaccaggaagaagtcgaatccctgaataggcccataacaaaatctgaaattgaggcagtaattaatagcctaccaaccaaaaaaagtccaggaccagacggattcacagccaaattctaccagaggtacaaagaggagctggtaccattccttctcaaattattctaaataatagaaaaagagggaatcctcccaaactcaat

SEQ ID NO: 764965 - DNA, 514 bp, Homo sapiens
aagagataactaagatcagagcagaactgaaggagatagagatacgaaaaacccttcaaaaaatcaatgaatccaggacctatttttttgaaaagatccacaaaatagatagaccactagccagattagtaaagaagaaaagacggaagaatcaaatagacgcgataaaaaatgataaaggggatatcaccactgatcacacagaaatacaaactaccatcagagaatactataaacacctcaatgcaaataaactagaaaatctagaagaaatggatacwttcctggacacatacacagtcccaagtctaaaccaggaagaagtcgaatccctgaataggcccataacaaaatctgaaattgaggcagtaattaatagcctaccaaccaaaaaaagtccaggaccagacggattcacagccaaattctaccagaggtacaaagaggagctggtaccattccttctcaaattattctaaataatagaaaaagagggaatcctcccaaactcaat

SEQ ID NO: 764966 - DNA, 600 bp, Homo sapiens
attatttatgacaattccacttgttccacattctcctcaacacttagcattgtcagcttttaaaatttttagccattctactagtggtgtatttgtatctcactgtggttttgatttgcattttcctgatgactaataatcttagcatcttttgatgtgtgtattgaccatttgtgtatcttcttttgtggaatgtttgtcaaaaccttccgcctgtcttttaactgagtggatgtcttctaacattgagtcataagagttcttataaattgtragacttatacatatctgatatatatttagatatcagtttttgtcagatgtatgtattatgaatattttctcccagcctgtggcatttctttaaaaagcaggaggttttagttttatgcagtccaatgtttcatgctttttgtttcctatgtaaagaaatccttaccaactccagggtcacaaagattttctcctgcgctttcttctctaagttttatagttttagcttttatgcttaggtctatggtccttttcaagttaatgttttggtatggtgtgggatcaagatttctttttttttttaatcttacatgaatattcagttgt

SEQ ID NO: 764967 - DNA, 645 bp, Homo sapiens
aaaaggaaaaaagttctcttaattctgaaaaataaaaggattagcaatgtttaacatatcagctctccatgagagtcttagaagttttttttctctattccaatagcacaatttctaaagttatcagagacctgtattcaagagtacccatcagagttttctatcagattataaaccaccttttgaaaagaatcaaaayaagacaacaattatctgtgggtgacaaaattctcaggacgaccatagttaaaaatgcaattaaaaaagaaatctggtcatctctgtgacacacaacaatttaacataagaattgtaattgggggaggggctatcaaaatctgatggagccattagggggagaggtggcagtggtatccacgaatcaccattctcagtcttttctgcctgtgggctctggagactcaggacagtctggaagacagtctggaagagggagatccccccaagcacagcacacctgctctgccaaggggcagccagactacctatttaagcaggtccctgatcccatttcccctgactgggtgagaactcccaacaggggtctccagacacctcatacaaaagcctctagttggcatcaggtcagtgcccctctcggacagagttcccagaagaaggagc

SEQ ID NO: 764968 - DNA, 579 bp, Homo sapiens
gcaccaccatgggggatccacccccatgacccaaacatctactattaggccctaccaccaacacttgggattacatctcatcatgaaatttggaggggacatccaaactatatcattctgctcctggccccctaagtcttatgtccttctcacatttcaaaatgtaatcatcctttctyaatggtccctgaaagttttaattcattccagcataactccaaggtcccaagtccaacgaccaaagtctcatctggaaatgagttccttctacctatcagcctgtaaagtaaaaagaaattatttgctttcaagatacaatggagtagaggcattggggttaacatttctgttccaaaagggagaagttggccaaaagaaaggggatacagacccccatgcaagtttgaaatgcagcatggcagtgactacatcttaatgcttaaaaataatctcctctgactccatgtcccacattcaggacacactgctgcaaggagagggctcccaaggccttgggcagctccactcctgtggctctgtagggctcaacacatgtggttgctctcataggttggactt

SEQ ID NO: 764969 - DNA, 653 bp, Homo sapiens
tgatattatgggaaaataagtgtattgttcttattaatttatttctgtttctctactcctttaattggatatgtgttacctatataaaagaaaattgtcccattagttcataagagatatatatttgtagctttcaatacatgatatctgtttaaactctcaattaractccacactatgtataatttcttaaaaagtgactacttcttataaaatattttatttattttaagaggatattttcttatttaatcagcatgctgccaaatatgttacatgaactttgaaaaaaataaagacatgtatttttgttaggcttgaggttatttattaattagaataagttaattcatactcataaagataacttgtcattcaagattttacattatctggtttgtctatttataaaagaccaataattttatcaataaattaattcctatagatatggcttataagttgcagcatcttcaggagagtagataaattgtctgtaataaaatacaatggacattaaaacacataataaattttaaaagtgataaaattaattataatagcattgtgacagaaacagtattatctagtagttattcaaaaactaccatttgtgacttggctaaaattcagtcatatataaaattgaagct

SEQ ID NO: 764970 - DNA, 599 bp, Homo sapiens
aacatagtgaaaccccatctctactaaaaatacaaaaaaatagatgggcgtaatggcgggcacctgtagtcccagctacttgggaggctgaggcaggagaatcccttgaagctgggaggtggaggttgcagtgagccgagattgcgccactgcactccagcctgggcaagagtgcgaggctctgctctaaaaaaaaaaaaaaaaaaaaaaaaaaaaaaaccmtttagcttacacgatactatagcctattgtgtgcaagaacattatgtctaaaaaaagtacatattttaattttaaaatgctttatttctaaaaaataccaacgatcatcagatccttcagcaaatcataatctatttgctggtagaagttcttgcctaaatgttgattgctgctgatcagggtggtgtgcctgtggcaactttataaaataagataacaattgccacaaaaaagaatagaatacctaggaatacagctgactagacaggtgaaaggtctctacaaagagaactacaaaacactgctcaaagaaatcagagatgagaccaaaaaaaaatggaaaaacattccatgctcatagatcagaaaaaacaata

SEQ ID NO: 764971 - DNA, 599 bp, Homo sapiens
aacatagtgaaaccccatctctactaaaaatacaaaaaaatagatgggcgtaatggcgggcacctgtagtcccagctacttgggaggctgaggcaggagaatcccttgaagctgggaggtggaggttgcagtgagccgagattgcgccactgcactccagcctgggcaagagtgcgaggctctgctctaaaaaaaaaaaaaaaaaaaaaaaaaaaaaaacccttwagcttacacgatactatagcctattgtgtgcaagaacattatgtctaaaaaaagtacatattttaattttaaaatgctttatttctaaaaaataccaacgatcatcagatccttcagcaaatcataatctatttgctggtagaagttcttgcctaaatgttgattgctgctgatcagggtggtgtgcctgtggcaactttataaaataagataacaattgccacaaaaaagaatagaatacctaggaatacagctgactagacaggtgaaaggtctctacaaagagaactacaaaacactgctcaaagaaatcagagatgagaccaaaaaaaaatggaaaaacattccatgctcatagatcagaaaaaacaata

SEQ ID NO: 764972 - DNA, 678 bp, Homo sapiens
ctaacatccaatcttgttaaaaaccctcagcagactaggcactgaaaaaatatacctcaaaataataagagccatccatgccatacatacccacagccaacaccatagtaaatggaaaaagctagaagcattcttgttgagatctggagaaatgaaaggatgtccactctttccactcctgtataacacagtgctgaaagtcctagccagagcaatccataaagagaaaaaaaataaaaggcatcctaataggaagagaagaagccaaactatctttctttacttacagtgtggttgtattcatagaaaatccwaaagattctgccaaaaagttcctaaaattgataaatgactttattaaagtttcaggaacaaagtaaatgtacaaaaatcattaacatttctatgcaccagcaatatccaggctgagagtgaaatcaagaacacaatcccacttaaaatagacacagagaaaatgaagtgccagaaatacagctaaccaaggacatgaaagatctacaaaacacccctgaaaaaaaatcagagatgacacaaataaattgaaaaacatttgatgctcatggatttgaagaatcaatatcagaaaaatcgccatactgcccagagcaacttacaaattcggtgacatttctatagaactaccaatgccatttttag

SEQ ID NO: 764973 - DNA, 638 bp, Homo sapiens
aaatgaagtgccagaaatacagctaaccaaggacatgaaagatctacaaaacacccctgaaaaaaaatcagagatgacacaaataaattgaaaaacatttgatgctcatggatttgaagaatcaatatcagaaaaatcgccatactgcccagagcaacttacaaattcggtgacatttctatagaactaccaatgccatttttagagacttagagaaacactrttttaaactttatatgtgataagaaagagcccaaatagccaaagcaatcttaagaaaaaggaacaaagctaaagacatcacaatacccttcaaactatactataaagccatagtaacaaaaacagctgattattgatacaaaacagccacatagaccaatgaaacaaaatagaaaactcagaaataaagccacacatctacaaacatctggtcttctagaaggctcacaaaaccaacaaatggggaaagaattatataattaatagatggtgttgggatacctggctagccacatggaaagtattgaatctggagtgtaaccttccaacatatataaaaatttactcatatggagctttttcacagtaaaagaaactgtcaatagagaaaactgataatgtaaagaatgggataa

SEQ ID NO: 764974 - DNA, 612 bp, Homo sapiens
ataaaagattggggtggggcctgccagagatttatgccctatgcagatggcacacctggtcctaaccagtttttttcaccctatgtagatcagataccaccttcccactagctcctctataaaaaaaaaaaccttgcatttcactacgcatcagtaaccaatttttctggaaactctctctgcagcagatagctattacctttcttttgcctattaaaattctgctttaaacctcaacctctgtgtgtgttctcktccttgatctccgtagccatgagatcaagaacctcaggtgtcaccccagaaaatgaggccatattaccaggtagtaggatgctgctttaaagatactcaaaaatgtgaaagcaactttggaactgggtaacaggcagaggttggaacagtttggagggatcagaaaaagataggaaaatgtgggaaagtatgaaacttcctagacttgttgaatggctttgaccaaaatgctgatagcaatataaacaatgaaatccaggctgatgtgggtacagatggagatgaggaactttttgggaactggagcaaaggtgactcttgttatgctttagcaaagagactggtggcattttgtct

SEQ ID NO: 764975 - DNA, 619 bp, Homo sapiens
agttctaatttcattcttctgcatagctatagatatagatagataaatagatctctttatatacatatatataagatatatccatatagacatagatatatttcctcaatgcatgttcttgacatctttgttgaaaatgagtcccctgtaggtgtgtggattactttctgggttctctattctgtttcattggactatttgtctgttttttatgccagtaccatgccaatttcgttactatatttctgtagtataattgaaagttatgtagtataatttctcgagttttgtaaatttttctcgtgatagctttgactattctaggtcttttgtggttccatataattttttggattttttttttagtttctgtgaagaatgtcattkgtattttgataggaacatcattgaatttctagattactttgtgcagtatggacattttaacaatatttattcttccaatttataaatatgaaatatcttttcaagttgtgtgtctttttcaattatttaattaatgttttatggtttgcattctagaaatctcttacttttgtggttaattcccatgtgttttattttatttgtagctattgtaaatgggattaatttctta

SEQ ID NO: 764976 - DNA, 630 bp, Homo sapiens
catatgcattacattttcaaattgttggacagcctctgtaatatagtcacattctcccttagacagggttttccctagtattactgagagacccctcaaagtgagttcaaatgttaggcccagtttataaaacccttcagtgtatttgtcagggtcctccataaacttccctagtttcattttaatttggttcaggtcttgcatagtaaatggaatatggactatagtggatccactaaggccactaacctctcaaaaggggcatagcttaagggagtggtgttcrgaggatggccctgggtagggaggggaaggctccgggactgacagacttagatataatggggtagaaggggcagtgaagtttaatctaagctccgcccttggttccttcagggttgagccctgggtaaacccaatcatgaggtcttctgaaccaaatatagggggctgccacagctattatcactggatccattttacaagtatgacataggtcaggattctttcttaggtccatgagggcctgtacatagggtatttacagccattttccctgctggcagcaaaataaatgtagttaacagatcatattaaaattatgtttccattttccagccaagatttctg

SEQ ID NO: 764977 - DNA, 544 bp, Homo sapiens
ttcatgttgtgtacatactttttgcctgaagccacagaaattatccagtcatatttattgaatgtgtaatttcttctaaaatgataaaattgcattttgttcatccaatatttttcttatatactgtggtgatatgaaacagwaaaactattaaacatgttagttctcccaatttgaaagtcctatattgagcaaatggagaacaatatgtgaatttcataagcccaaacccttttggcatatgtgttagttctagcaaagcctattttattgtggctattataatagtttagaggtaagagagggcagtaaataacagcccagttggggtgcctgtacaactttccagatttagaggttatggtgttagcaaaaaacaacttagggataatgcagtcaagataatcaaatattgcatggctatatttttgttatttctcccagatcctggggtattaatagcatgttgtcttagttttgaatgtgtaaaaataaaaattatgaacaagaaaagacagatataattctaaggacaatctgattt

SEQ ID NO: 764978 - DNA, 625 bp, Homo sapiens
gtttttctggaaaaaggtgtttttctgtcaactgaattatttttccccattttgtcttgccactatttatgcatgcaggagaggccctaaggtaacttctgagggcatgggacttggcggtaaaaacagagaaggtgctgtggaccccattttcggaagaaaactgttttcctcacagaatcccaggaattgaaagctgatggatacctctcaaaatctgtttttgtcttctggctatgcctgtttattaggctgtagaaattgcatgctctcctagcggtgcttttgaaagcctccaycctgaggccaataatccaattatgagattggcaaatgaaaaatcttacaattactgtatcttcttctatctgtctgtatagttatatatgtgttatatgtgtgatatttataaaaaagagctctaattgattagcctaaagaaaaacaagtgcttagaccaaatattttgaaggaaaaataaaagctgtaatgccttttagttcacgtgactttaatctttgagaaataaaaacagttttaaagataattggtaaaatacaaatgtcttcagaatgtaaacaagtggtctaaattatgtgggttagatactaggtttgcgaaatgt

SEQ ID NO: 764979 - DNA, 613 bp, Homo sapiens
ccaaagcctctttccatcagggaaacatttcctatttgtctccaagaatccttctcttaccaaacattcccttgccctctacacttcattggttgatgctttcccctctgcactagcagaatatcccctagaattttatttatgacactatattacagtaataatactaatgtcagcatctcccactagactatgggttcttcaaaggcaggatagacctcactcacttttaactatgtatagatcttggatgatgaaraaagaaggccagtgctgagagctaggagaatgatcgagttattagccctacctttggatggttctccattaccatgtatcactttaggtgcttttggtttgctaccaagaaaaccaaggagtagaaagagggaagcgcagtggctccacttctcacctgagcctagtttgaggtctgcaattcctgagacattaccaaggttcttttgtgttttcagctcctgaacagtttgctgtaggtgggacagatcctaaaagaatcgtgttaagtgtattaatgttccatctagtctcaaaatagaaccaggagttaggaaacatgttgatcgaggcagtgaatcagtgttactaaaaa

SEQ ID NO: 764980 - DNA, 635 bp, Homo sapiens
ttttatatctttcctgctttctcttgtgggcatttagtgctataaatttccctctacatactgctttaaatgtgtcccagagattctggtacattgtgtctttgttctcattcgtttcaaagaacatctttatttctgccttcatttccttatttacccagtagtcgtacaggagcaggtttttcagtttccatgtacttgtgtggttttgagcaagtttcttaatcctgagtactaagttgattgcactgtggtctgagagacagttagttgtgatttgtgttcttttacatttgctgaggagtactttacttccaactatgtggtcagttttggaataagtgcgatgtggtgctgagaataatgtgtattctgttgatttggggtggagagttctgtagatgtctattagatctgcttggtgcagagctgagttcaagtcctggatatcctygttacacttctgtctcgttgatctgtctaatattgacagtggggtgttaaagtctcccattattattgtgtgggagtctaagtctctttgtaggtctctaaggacttgctttatgaatctgggtcctcctatattgggtgcatatatatttaggatagttagctcttcttgttgaattgat

SEQ ID NO: 764981 - DNA, 631 bp, Homo sapiens
attcaggtatgtttgccataggttcaggagaggatagtgggtccattccccctctaaacagtgcaccccatgattcttccctacattctctttacaccacgttcttcattcctgtctccaccctccaaaccctcttgtccttcaaatccagtcacattctacgtcacccatgaagtcatcccatggcgtctccacttcatccatccctgcccttcctctgaacttggaaagyatattatctataaaatagtataggttttcttctgtaaaattcttgtcttgtcttttcatatcaagtgtaagctccttcaaggaaaggtaacttcatatatcccccacagcacatagaaatgtttcctgaatatcagtcatttacaaactatcttatgaatttctgccatagttcagtctcatctctacaatttgtctttaaacttaccgtattttaattgtgtattttagttgcattctaagaaattaccattgaaaattatgagtttaatatagttatacatctttccaatacagtctataccctgttaataaataatgttcaaccttgcgatatgttgagagagagaaagattaaaaaccatgtatcttgaatgattgaccgagtactttgcaaagc

SEQ ID NO: 764982 - DNA, 575 bp, Homo sapiens
tcctttccttaccactacatgccggcacctgacatagtatagcaggcagccctcgaaaaatactgaatgagcttatgcctgtaatcccagcactttgggagccaaggcgggcagatcacgaggtcaggagatcgagaccatcctggccaacctggtgaaacctcgtctctactacaaaaaaattacagaaaattagccgggcgtagtggcaggcgcctgtaatcccagctactcaggaggctgaggcaggggaattgcttaaacccaggaggcggagattgcagtgagcccagattgtgcattgcactccagcccgggtgacagagtgagattccgtctcaaaaaaaaaaaaaaaaaaaamcaaacgaataaacatatagataaactaatgaaggggaagtgtcagagacagaaagaaaaagagagacaaacagacacacgaaaaggagaaacagagaacatcagtttgctacctgatagaatggttcacgtgccagtgaaatgctggaggcacaccctccaccccggatcccaggatagcggcacagcatctctcctccatgtcccactagttg

SEQ ID NO: 764983 - DNA, 583 bp, Homo sapiens
cgaaggtgcacactttcacaaaactacaaatggttgttcctacaaacatccaccattcttcctctgatataagaagtgaggcaatggaagacacacttcttcatgaccatttgatgaggggattgctgccactgtccgcagtmtcagtgcagctctgtctgcagctaagataggaaaagctcatggactcatccgacaggagagttgtggtgggacatctcacccactcaccaaaactgagagtagcagggtctcccatcacattaagccctgacacattttaatgaagtaaagcactggattatccctggtaacgtttctgacttgtcactttatagaggcagcaaaagagggcaaatagtatagcaagcgaagcgaaagaaacctgaacttccaaaatctaacaagaagatccccaaccccacctacacccagaaagaaggaacccttttgtctaccttaataataggttttgatttatttatctttgctttctttttttttttttttttttttccagaaaacagtcacacagggctccgggggtatttttaaagtggtgaccttcctgccccctccacca

SEQ ID NO: 764984 - DNA, 609 bp, Homo sapiens
gaatcctggatcatttgagaaacatatatatatgtaatagtcagggattacaatttcaggattattgcttggattggatctcatgtcttgaatgtatacccaaatgctcttcctcatactcccttgaaacccttgctgaagctggatgttgggatctgcatttgggaagggtcacatctagggccagttgagtagagaaacatggctgcctcataccaggtgcatgcggggagccagggagaggaaggtcctcaaggcaagagagctgtagaattttacccctccagaataaagagaggtggatgactgaatgtttgcctcttactttttcacctgctggatgaatcattcttgctcctgtgaggagaagccaatgaaactgtagagaacaacagattctgccaattacacccaagtggtgttytattggctgacaaaatcatagggagagagagcatatggctttcactacagtctctgatcttgcttttttaaaatttattgccctctcttgatttgacatgtggagaattacaatttgaggttcagagaagttaatgatttgaaagtcacacttcagtgactaacccaggcctagactccagcctg

SEQ ID NO: 764985 - DNA, 616 bp, Homo sapiens
ccgatgctatattgggagcaatagcatcctatcagtccctggatattaggaacaatatcactggggagtgtacacctcctgtgatattgagactaatatcatcctctcaccccatggatattaggaacaatatcactggggtggtctacaccccctgcgaaattgggagaaatatcatcctctcyaccttaggatattagggataatatcacaggggaggtctatgccccctgcgatattgggagaaatatcctctccacctttggatgttagggacaatatcacaagggaggtctacgccccctgtgatattgggagtaatatcatcctctccccatgaaggatattaggaacaagatcacagaagaaatgtatatccactgcaacattttgagtaatgtcgtcctctaccccctggctattaggaataacatcataggggggtgtacaccttctgtgaatttgggagtattatcatcttctaccccccggatatcaggaataataatattagttattaatatgaataaatataataatagtaatctctgatattaaccagaatgacaaaattaatattaattattaacattaatgatcattataaataatagta

SEQ ID NO: 764986 - DNA, 616 bp, Homo sapiens
ccgatgctatattgggagcaatagcatcctatcagtccctggatattaggaacaatatcactggggagtgtacacctcctgtgatattgagactaatatcatcctctcaccccatggatattaggaacaatatcactggggtggtctacaccccctgcgaaattgggagaaatatcatcctctccaccttaggatattagggataatatcacaggggaggtctatgccccctgcgatattgggagaaatatcctctccacctttggatgttagggacaatatcacaagggaggtctacgccccctgtgatattgggagtaatatcatcctctccccatgaaggatattaggaacaagatcacagaagaaatgtatatccactgcaacattttgagtaatgtcrtcctctaccccctggctattaggaataacatcataggggggtgtacaccttctgtgaatttgggagtattatcatcttctaccccccggatatcaggaataataatattagttattaatatgaataaatataataatagtaatctctgatattaaccagaatgacaaaattaatattaattattaacattaatgatcattataaataatagta

SEQ ID NO: 764987 - DNA, 587 bp, Homo sapiens
ttaatattaataattaatgttttataattaatattattgcttcgaatactcctaatactgcagggggtgtacacctacccttaatattgttcctaatatccagggacaggaagcatgatattagttttaatattccactaggtgtacactcaccctgtgacactgatcctactatccaggggatagagtatgacattactcccaatatagcagtgggtstacatccaccctgtgatattgctcctaatattcacggaagaaatgtatgatattactcccaatattgcagggagtgtacccatcttctgtaatattgttcctagtatcccgagggggagaggatgataatactttcagtatcgcaggctgtgttcactcaccctgtgatatcctgggaggaagaggatgatattactccccatatagcagttggtgtacacccacccttggatattctttctaatatctatggaggggagaggctgatattactcttaatatcgcaggagatgtacatccaccctgcgatattgttcttaatattcaaaggctgagaggttgatattactcccaatgtcatagaaagg

SEQ ID NO: 764988 - DNA, 610 bp, Homo sapiens
agtgcctgtctcataggaggcccttattattagagaattaactcttcagccccacagtacaattttaaagcattaccattttaatatttactacattttaagtcctgcaggaagctgcttctaaaaaagagaagatttataatctgaatagattagagtktcataaagcacaatgaagcatgcaacaggctctataaaaaaccataaataaggtaccatgcatgcattatgccgtcaactgtcgattattctgtaaggaaggaaagcagatggggtcagtccaaaagagtaagtaatcaaaaaaaaaaaaggcaactcttagatttgtctcgacatttgcattgaactcagatgtatgtgatgtgatgttcagggaaagtttttaatgtgttttccataagaaatcctgacttcggacaatcggcctggtcacagcactttcctacatctgctcccacacaggcaccaggcagctcctcaagcaggctgatccaaaaaaaaagcagtgtgagccgaggtttcactcactcaaacctccccagccatggagacagctccattccttggataatatctgcatgtgcaataagtacacatggaatgaatatgg

SEQ ID NO: 764989 - DNA, 632 bp, Homo sapiens
aattttgagtggatacttccatctacccagctaatgcttcagtggttttctggacagttccattattatattggctatattgatgatggccaattgaagcaatgatttctccctacttccctaagaatctctattaaagttttatcgggtctttcaacaaagcacccactctgtccagctcttttgaaatactgsttctgtcaccaaacataagtatttttttctggctttgtggcatctgaaaatttaatgagaatgagcagctttcaataagaagcttccctattctgccttctcagtgttcatagatgctctaattctcagtcactcaccctgcttttctggaataagccttttgtccaagcaagtgaaagctgctgacagccaactgatgtttccaaatctgttccttttgaatacagtagtataaaagcttataccaggtcactatttaaacagctcagttttctcaacatttacaattcaactaccaggaagatttcaaaggacatgactaaattctggtggtaacatagaaactaagactgactgtagtttaggctgtgtgtacagagccaggctgcaagccccacttggctgctggggaggagacagagttagagcttcaagtt

SEQ ID NO: 764990 - DNA, 632 bp, Homo sapiens
acaacaaaagaacagaaaaataagtaaacaaatacctactgttttgaaatttagaaacattcttctttttttttctttttgagacagaggctcattcttgcccaggctggagtgcagtggtgcgatctcggctcactgcaagctctgcctcccaggttcacgccattctcctgcgtcagcctcccgagtagctgggactacaggcacctgctaccatgcccggctaatttttttttttttttttttgtatttttagtagagacagggtttcaccatgttagccaggatggtcttgatctcctgaccttatgatccacccgcctcggcctcccaaagtgctgggattgcaggcgtgagccaccgcaccagcctagaaacattcttctaaggaattcttacatgcaacaatgtaattaaaatcatactagagactacttagaaggaactacactaaaaacactgaacccaaagcwatctttaaggaatcagaataatttggcataatggaagtcaagagaatagaggatcaagaaaagaattatcagcaacaatgactaaaaaaataaagactaaaactgttcattggatttggcaataaaaaaatcattggtgactttactagaataatttca

SEQ ID NO: 764991 - DNA, 619 bp, Homo sapiens
gttctacctaataactaggtagtggccatccagtctacctcttccccttctaacctgtcattttcaggtgagacctatactaactgaatcccattcttcccctcccaatcctcagtaatttggcttctgctttcactttcaattgaatatattctcagaaaatgtcactcaggagctcctaaatgtcaaatgtaatgggcgttttaagatcctaatctgattgggttttgatgctacatgtgatgtaattaatcattccttccttcttgaggcttccatkacaccatgttccctggctctccttgcaccttggatgatttctctctggccccttcgtgggctcatcttcctccatctgctctgtaaaggctgtcgtttcacagggttctgtcctccacccgctggttttctcactccacatgctccctggataaccacagtcattcacatgattttaattatcatctatatgatgacgactcctaaatctatatttctagccctggcctcatcccctgagcttcagacacatatatcatatatcccacaggcaactacagctcaacatgttgaaaatgaaaaatcattagttttctccctaagaagtcaccttctccta

SEQ ID NO: 764992 - DNA, 619 bp, Homo sapiens
gttctacctaataactaggtagtggccatccagtctacctcttccccttctaacctgtcattttcaggtgagacctatactaactgaatcccattcttcccctcccaatcctcagtaatttggcttctgctttcactttcaattgaatatattctcagaaaatgtcactcaggagctcctaaatgtcaaatgtaatgggcgttttaagatcctaatctgattgggttttgatgctacatgtgatgtaattaatcattccttccttcttgaggcttccattacaccatgttccctggctctccttgcaccttggatgatttctctctggccccttcgtgggctcatcttcctccatctgctctgtaaaggctgtcgtttcacagggttctgtcctccacccgctggttttctcactccacatgctccctggataaccacagtyattcacatgattttaattatcatctatatgatgacgactcctaaatctatatttctagccctggcctcatcccctgagcttcagacacatatatcatatatcccacaggcaactacagctcaacatgttgaaaatgaaaaatcattagttttctccctaagaagtcaccttctccta

SEQ ID NO: 764993 - DNA, 472 bp, Homo sapiens
tatttctgaagcgtcactgcacattgtaaaaatctccacctcacccttgctgcccatgtctcttgtcactgaacgttgtcctgacttcctaatcctgcatcaattatatcatgcactattgaataatttagacactaaaactagactggactcagcagcatacgttacagaaaagggggcgatgccgttccacagaaatacggaaaaggtagtaatcgatcagtcatttctcyccctaatctgtcaaggttgccgtccataacaactgggctcagtgctacactgaaaatacagagatcctaatacaaagagaggagctgatagcacacttgtccccagctgtttttttggaggtttatttttaaataaataattccaaaactcttaaaaagggcatgttttcaaaaaagatttaaaaattttccctaatattcctacatttcaactagcaaatcatcgagatcaggtatca

SEQ ID NO: 764994 - DNA, 625 bp, Homo sapiens
cctggccagacggcaaagccacgtttgttctcattgcagctctccaagagccagcgacctgccaggcaccagctttatttgtaggtgagggtcattaatttgaattaatagtaccgcactggtcggcgcttcgttttgctttgtttccctcctgtggacgccacagacttctttgttgcctggttctgtgagtgggaagacactgtgaacaagcatccaattagccagaaaaacaaaatctgcctggattcccrcttcagccagaggcctctccctcaaaagcctggagaccacactccacacacaggctgcttctgtttaatttgcccctcctggcagcattcccactcttccctgcccttctaacccatatagtcatcatccctaccccagggacattattatctcccagttacccccacctgctgtgccccccgctcaggctaccgtggaaataatacccatcccatagggacagagtgaggatcaaagataatgtatgccgaggcttagtgtctggccgacgtagacctcgataattgtgaggtcgtccctcaggaaggggcgtggtgtgtctcattgcccctgccctctggaactgtaaatgggtttaggtgcatacagc

SEQ ID NO: 764995 - DNA, 568 bp, Homo sapiens
atgggtgtatatatgtgtagaacactctggaagaataaataagaacatggggagctgtgtcttctgaagggcctgggggagaggtatgggacaggaatgtatttttcctatacagctttttgtactgtttggatatttttaaaccacatactttacgtgtattctttaaaaagttaaaacagagggggcgcggtggctcacgcctgtaatcccagcactttgagaggccaaggtgggtggatcacctgaggtcaggagttcgagaccagcctggccaacatggtgaaaccccatctctactaaaaatacaaaaaaattagctgggcktgggggcacatgcctgtaattccatctacttgggaggctgaggcaggagaattgcttgaacctgggaggtggagattgcagtgagccgagattgcaccactgcactccagcctgggtgacatagtgagaccccgtctcagaaaaaataaaaaataaataaaaaataaataaataaaaagttgaaatataaaaagtatagacattcagccagattcacccacattcattgcttgtccgcttc

SEQ ID NO: 764996 - DNA, 568 bp, Homo sapiens
atgggtgtatatatgtgtagaacactctggaagaataaataagaacatggggagctgtgtcttctgaagggcctgggggagaggtatgggacaggaatgtatttttcctatacagctttttgtactgtttggatatttttaaaccacatactttacgtgtattctttaaaaagttaaaacagagggggcgcggtggctcacgcctgtaatcccagcactttgagaggccaaggtgggtggatcacctgaggtcaggagttcgagaccagcctggccaacatggtgaaaccccatctctactaaaaatacaaaaaaattagctgggcgtgggggcacaygcctgtaattccatctacttgggaggctgaggcaggagaattgcttgaacctgggaggtggagattgcagtgagccgagattgcaccactgcactccagcctgggtgacatagtgagaccccgtctcagaaaaaataaaaaataaataaaaaataaataaataaaaagttgaaatataaaaagtatagacattcagccagattcacccacattcattgcttgtccgcttc

SEQ ID NO: 764997 - DNA, 568 bp, Homo sapiens
atgggtgtatatatgtgtagaacactctggaagaataaataagaacatggggagctgtgtcttctgaagggcctgggggagaggtatgggacaggaatgtatttttcctatacagctttttgtactgtttggatatttttaaaccacatactttacgtgtattctttaaaaagttaaaacagagggggcgcggtggctcacgcctgtaatcccagcactttgagaggccaaggtgggtggatcacctgaggtcaggagttcgagaccagcctggccaacatggtgaaaccccatctctactaaaaatacaaaaaaattagctgggcgtgggggcacatgcctgtaattccatctactygggaggctgaggcaggagaattgcttgaacctgggaggtggagattgcagtgagccgagattgcaccactgcactccagcctgggtgacatagtgagaccccgtctcagaaaaaataaaaaataaataaaaaataaataaataaaaagttgaaatataaaaagtatagacattcagccagattcacccacattcattgcttgtccgcttc

SEQ ID NO: 764998 - DNA, 600 bp, Homo sapiens
attgcactccaccctgaggacaaggcaagaccccatctctaaaataaataagcttatgagatatagaagtgttcatagcagcattattcacaatagccaaaaggtgcaaacaacccaaacacctatcaacagatgaatggtgatatggtttggatttgtgtcccagcccaaatcttatgttgaattgtaatccccaatgttggaagagggacctggggggaggtgattggattacgggggcggatttccctcttgctgttctcatgataacaagtgagttctcactggttgttcaaaagtgtgtaacacttccctcttctctgtcttcctccttctctggccaygtaagacgtgcctgcttccccttcaccttccaccatgactgtaagtttcctgagtcctcctcagccatgttacctctacctcctgaagaaccgtaagccagttaagcctcttttctttataaattacccagtttcaggtagttctttatagcaatggaagaacaaactgatacaaatggataaacagaatgtggtctatccatacaacagaatattattcagccttaaaaaagaatgaagttctgatgcatgccac

SEQ ID NO: 764999 - DNA, 600 bp, Homo sapiens
attgcactccaccctgaggacaaggcaagaccccatctctaaaataaataagcttatgagatatagaagtgttcatagcagcattattcacaatagccaaaaggtgcaaacaacccaaacacctatcaacagatgaatggtgatatggtttggatttgtgtcccagcccaaatcttatgttgaattgtaatccccaatgttggaagagggacctggggggaggtgattggattacgggggcggatttccctcttgctgttctcatgataacaagtgagttctcactggttgttcaaaagtgtgtaacacttccctcttctctgtcttcctccttctctggccacgtaagacgtgcctgcttccccttcaccttccaccatgaytgtaagtttcctgagtcctcctcagccatgttacctctacctcctgaagaaccgtaagccagttaagcctcttttctttataaattacccagtttcaggtagttctttatagcaatggaagaacaaactgatacaaatggataaacagaatgtggtctatccatacaacagaatattattcagccttaaaaaagaatgaagttctgatgcatgccac

SEQ ID NO: 765000 - DNA, 569 bp, Homo sapiens
cggcttaaagtactccaggggcctccaccttgtgttttggcaaagggatcttcgaggatgctgtgtcaaacctttttgaaaatgtctccttgacacggagggtgaggaacggcgtctgcgaatctcattacacagggtcccacgcctccctctgctgttctccggctcccgtttyttggctgccgccagtgggagtcgcacgggggtcacctgcccccacttttaatcaggacggggaaaaatgcaccaaaggagtgccgcgggttacctgagcagacccgggagcccgtctcctgagtcctgggggaggatcatttatttgtctgcagatcggcaagcgggcaggtttgcagagtccctgggggctagtagttcttataaaggagaatgcaccaccaagcaattagtttcattgtattgtgcatgggatggcatcgcccgctctggaacggaagaggagaggggacatcccggcactgggagtggggagggctgagagggaccccatggacacagctgacgcccagttccataggccaggggagggaagcgaaccgtgcaagtgctgg

SEQ ID NO: 765001 - DNA, 455 bp, Homo sapiens
tttaaagcagaacaaacttttgaaatatcttctggtcagtaaagtaattaagttgtaagaattacaatttatctccttgtgggacacagagggttttttttttctttttaaatttttaatgagaaaagacagcttctaaacattttttttttytgaatgagttcttataaaaagtaatattgttcatcactatctccaaatcccgcccgcctcggcctcccaacatcctgggattacaggcgtgagccactgcgcccggccaaaatattccttttctttacaacaaatataccttctccatttgtctggaggcttgctcaactagatgttctcacatttggtggaggcctagctgcaaaatatgcttctccaccattagtaaaacgatgtgaatggtgaatgacagctgagcctggcttcagaaccagggagagagtgattgctccacctcagag

SEQ ID NO: 765002 - DNA, 687 bp, Homo sapiens
ttaattgaatattttctcattccactgtctcatatattttctggtatatttccacactaagcaaattacagtaatgaccccaaatttaaaagtcccatattcttttgaatttctgaacctcgatttaaggatcccaacactgtctccaaagtattcagctgcagatggtcccttgtcagaagttttctgacattaactgcacaaaaagaaaacaaattctaggctttgactaarggaactcaagagagtttatagaccagaagcacccaggattttaggcaggatcccccacaatgagtaatgagtagaagatccaaggaacagggtaaatatgtgtaagccttttgggttttacctcaaactcttttttaattttcctttttcatgcatttttaaaatattttacccagacagttttattttgaaaatcctgtttcctaagcattgaataaatacagataatctttgcatattagttcaaattttcaaaagcctactaaggttatcagctagtacaatcaaactattattaaaactcaaaagagatttaaaaaatgtgctagaggaacaacctctgcaaggtcatattttcccagtattatttgcattttgtaagactccattcaaaaaagatactattacatttgggccataacacatttcagtttcaattttgcattcacatta

SEQ ID NO: 765003 - DNA, 642 bp, Homo sapiens
gcaaatattttctctaattctctagggtgtctgtttactttgtcgatagtttcttttgctgtgcagaacctctttagtttaattaggtctcatttgttaaattttgtttctgttgcaattgcttttgtcctctttgtcatgaagtatttgcccagtcctatgtccagaatggtgtttcctaggtttrcttcaaggtcattaaagttttaggttttacatttaagtctttcactgatcttgagttgatttttgtatatggtgtaagggaggggtccagtttcagtcttctgcatatagctagccagttaccccaacactatttattgaatagagaatcccttttccattgcttgtttttgtcaactttgttgaagatcggaggattgtaggtgtgtgatattatttctgagctctctattctttccattggtctacgtgcctatttttgtaccagtaccatgttgttttgattactgtagccttgtagtatggtttgaagttgggtaatgtgatgccttcagctttgttattcttacttaagattgccttggctatttgagctctttttttgttccatatgaattttgaaacagttttttttctaattctgtgaaaaatgtcattggtagttcaatagaaaga

SEQ ID NO: 765004 - DNA, 605 bp, Homo sapiens
tttagcagaattcagacctttcccataatcctcatcttgaggcctgtcattagttttatgaaggcaacttcagcctccaagcaaggaggggatcagttttagggaggaacaattaccattcttgcttcaaagttaaaatataaattcctcccatcgttagcttgacttacacccaagaatgaatgaagacagccagactgtgaggccaggagcaagatggagtcagtcaygttagatttctctcactgtcattatctttgcaaaggcggtcttaacaaaacataagtgattatctgggtataaaataactttataacacaaatgttttctgctaggtgaaccactaacccacataccttattagagattgcatgcataattgttggctgtagagtgtgtctgatgtgataaagaaaaacctgggaaatagtatacaatgtcctaggcctctcttttcttcacttgcgcctcttcattacttgaatacttgaaattattcagattgaacctggttgggcatggtggcttatgcctgtaatcctagctacccaggaggctgaggctgaggaccacttgaggccaagagttcaagaccagcctgggca

SEQ ID NO: 765005 - DNA, 632 bp, Homo sapiens
gtagtcattctgaatgttaacactaaagaatcagaaaccaaaggtgaattttctatataaatgcatggagcataatatgaaaggtaggatatgtgtttaaaaacatcacatttcatgtgttttgtgttttaaaagatgagacttaaagttctgaatgatgaacctctctttattgctatcaacatgatagtttattttaaatgaatgatagtctgggttatttctgctgttagcgcaccgatgcttttccyaataatcagatagaaataacttctaaattattagtacatattataaattagagaacatgtttatacacaatgcacagttatctttttaaatttcacaaatactttggtaaaataaccattgtgtatacacttcaattcacaatgtaaattgaaaattggtaatagataaataattcagctacctgtaattatttagtgaattaaatcagagactatgtttaaaattttactctttgatactccaaattgttcatgataaattttttttgatggttcagtgtatatctcagcatttttaggtttttggtgttttctcataatgtaggaaattttattttactttcattctgccttctgcacatagtccctcaaatcttagaa

SEQ ID NO: 765006 - DNA, 615 bp, Homo sapiens
atttcatattcattcacacaatttataaatggggacaaagcaggaaataactgtttttctaacatagcagtcttgaaacagaatgagagctcaagtacatatatttttttttactttaaatgatagaattttagagtatatttgtctgtactagtaattgccaaattagtcagtgcctccatagcattggaagagaacaaagggaaaaatagtaacttagggtatactctcattcaaaaataagtcccattcaatcagggctacatctgtatacaaacagagaaatttcaaataaaagaatttaaaatgtgatttcctttctagaatggcttctggcttgatttgaattgctgaatgamgaattttcactcctaactttcccagcatatgtagaattgactttttgctgcacatttaaatttgcaagctttcaaattggggctcataaataagaaaactatagttaaaataggaaacacgatgtcctattttcctcattctttcttttgttctaaactcaggaaattttaagcaaaagattctcagggttacagttttctctaaagcaataatggtagagctgataaaactaggctattcttcaaatcattttag

SEQ ID NO: 765007 - DNA, 571 bp, Homo sapiens
actcttactctcagaaagtttatattgtaatgtgagtacccagacaattaacaatagatacactaaatcactaaactacacagaatgttagagagtggaaaggaagccgaacagatgaaagggatttgcatatgataaaatagaaggcagtttgcattttaaatagggtagtgtgataggtttcatttaaaaggtgacaagagcgatatttgagtaaaatttatggtattgagagacttgagagatgtagctatgtggctatataaggataaatatttttttccaatttgattgaaagaatatatcaaaataataatgaggatatatttctttgagctgagatataatcttytgttttaaaaagtcagtctcatatcaaataggatcaacaggaggaaaacaaagcccatacccaattccacattgatgatacagaaaaaaatgaataaaaaacaaaattctgataaccatgaaagaaaaatatcagttcacttataaaggaatatgaatcagatttgcatcacaattctgcagcattggtttctaggagatatatgcataataaaatcag

SEQ ID NO: 765008 - DNA, 513 bp, Homo sapiens
catctggcagctaccaatgttctaattcattccctatctagtctagttctttattattctttctgaaatatgaccagtggtattcaaaatagccctgttattattccttttttgttacgctcttctagttaattagatgattttccaattttctcagtaatactaaaatgataarattgctttagggtttctaagatttttttagaaggactaaaaccatgtaaattaataagactagtaagatgatactttaggcacaatgtccaatatatgtgagccatatatgtaaattttctagtgttcatatttgaaaagtaaaaagaattatgtgatagcaatattaataatatattttatttaatcctatatgtaaatttattataatttaaccataaaatccatactaagtctattaaaaggattactttaccctattctttgaaatccagtattttaccattgtaatagctttcagttgagactagccatatttctgatactcaaaaaacacct

SEQ ID NO: 765009 - DNA, 513 bp, Homo sapiens
catctggcagctaccaatgttctaattcattccctatctagtctagttctttattattctttctgaaatatgaccagtggtattcaaaatagccctgttattattccttttttgttacgctcttctagttaattagatgattttccaattttctcagtaatactaaaatgataagattgctttagggtttctaaratttttttagaaggactaaaaccatgtaaattaataagactagtaagatgatactttaggcacaatgtccaatatatgtgagccatatatgtaaattttctagtgttcatatttgaaaagtaaaaagaattatgtgatagcaatattaataatatattttatttaatcctatatgtaaatttattataatttaaccataaaatccatactaagtctattaaaaggattactttaccctattctttgaaatccagtattttaccattgtaatagctttcagttgagactagccatatttctgatactcaaaaaacacct

SEQ ID NO: 765010 - DNA, 513 bp, Homo sapiens
catctggcagctaccaatgttctaattcattccctatctagtctagttctttattattctttctgaaatatgaccagtggtattcaaaatagccctgttattattccttttttgttacgctcttctagttaattagatgattttccaattttctcagtaatactaaaatgataagattgctttagggtttctaagatttttttaraaggactaaaaccatgtaaattaataagactagtaagatgatactttaggcacaatgtccaatatatgtgagccatatatgtaaattttctagtgttcatatttgaaaagtaaaaagaattatgtgatagcaatattaataatatattttatttaatcctatatgtaaatttattataatttaaccataaaatccatactaagtctattaaaaggattactttaccctattctttgaaatccagtattttaccattgtaatagctttcagttgagactagccatatttctgatactcaaaaaacacct

SEQ ID NO: 765011 - DNA, 597 bp, Homo sapiens
tttaaaggagatgagaaagaaaacactttctgaatctacaaagtattcttatttctgatgttactgtctttattccattctgttaatcatagtataatctctctttgaagtataaaatagttgaggatcagttttacgccagaatttataagctatcatgctgaaatcctccaaaccagtaagcacatcataaacacacaatggataatggtagtttcaatggtctctgaagttggtttggatgttaacatagctccatcatctactgtgttacctaaggtagttcttaatagctctgagtcttggtatagccatttgtaaattataaaaagaaaatcaatagygctactataattgaggctattgtgagaattaaaataaaatgtaatataaaaataaaatactaaaacagtttttaactttagtagatgctgtctaaacatgtaggtgcaatcttattattcttgctagattaaaattagcaacagaaactgaaaatcaaatagaagatattattttataacactattttcagttaccttacatgctctgaacatgtaacaccagctctagttctgtaaaatcttaaggatttaa

SEQ ID NO: 765012 - DNA, 613 bp, Homo sapiens
tttgtttggtttttgttttagagtgtgtgtgtgtatgtaaccagttgttttaccagcaaatcactgaactaattttatttctttctattatctcaggaatcagtgttcagctccacctgatttctaataagtttttcttcatatatcttgtcctgtttgccaattgtttatggcactaaggcaaattttgcaccactttcttcataatagctaggcaaaattaaaaagataaatcaattcttattaatgttaaattagtcaagttcaccagtcaaaaaataaatattaaatatattctatatgatacgtgtatattcacccaaaaagaaagggcgtctgtgtattctaccttcttaatttaaacataatattaactttttaaatgaactgactctttttaacaaccaatgttatgtatataatatccatatacatatgtacttatgtgcatacaygtatacttatatctatatatacattttttcataattaagctgtttattttaatttttagcactccaaaaatatgtgcaatcacttgaacactagatctttgcaaacctgtattgaggtcatagattccatttgtaagtcctaagttagctaacccatt

SEQ ID NO: 765013 - DNA, 571 bp, Homo sapiens
aaataacaaaataaataccacttggctatgatatattggccttttcatacatatcaatgttccatttatttatattttgcaaactttttaatcttgcttcttgagaaagattggtctaaaattttgctgtcttgaatgcgcttataaagtttttgaattaaggctattatggcctcaagaagaagccaatagcttttttttttctttactaaatatgtcatctgtgccttgatttgttttttttgttttttttktttttttttttttttgctaggagctttttgtactgaatttaattaatagatactagatagatactagattattcttctatcagatggatacattataatttttttagaaatatgcctcttttattattttagtagcatattttattgtttccctttccgtagccttggagagctgtgtccagatttcctctgaaggcttttcttagcattccctcgctgccctcagccctcttcatgcctctgcacctgtgccgcagtgtggctctccttcagatctacttctgctccagccttatgtactctctccaggtttctcc

SEQ ID NO: 765014 - DNA, 571 bp, Homo sapiens
aaataacaaaataaataccacttggctatgatatattggccttttcatacatatcaatgttccatttatttatattttgcaaactttttaatcttgcttcttgagaaagattggtctaaaattttgctgtcttgaatgcgcttataaagtttttgaattaaggctattatggcctcaagaagaagccaatagcttttttttttctttactaaatatgtcatctgtgccttgatttgttttttttgttttttttgtttttttttttttttgctaggagctttttgtactgaatttaattaatagatactagatagatactagattattcttctatcagatggatacattataatttttttaraaatatgcctcttttattattttagtagcatattttattgtttccctttccgtagccttggagagctgtgtccagatttcctctgaaggcttttcttagcattccctcgctgccctcagccctcttcatgcctctgcacctgtgccgcagtgtggctctccttcagatctacttctgctccagccttatgtactctctccaggtttctcc

SEQ ID NO: 765015 - DNA, 571 bp, Homo sapiens
aaataacaaaataaataccacttggctatgatatattggccttttcatacatatcaatgttccatttatttatattttgcaaactttttaatcttgcttcttgagaaagattggtctaaaattttgctgtcttgaatgcgcttataaagtttttgaattaaggctattatggcctcaagaagaagccaatagcttttttttttctttactaaatatgtcatctgtgccttgatttgttttttttgttttttttgtttttttttttttttgctaggagctttttgtactgaatttaattaatagatactagatagatactagattattcttctatcagatggatacattataatttttttagaaatatgcctcttttattattttagtagcatattttattgkttccctttccgtagccttggagagctgtgtccagatttcctctgaaggcttttcttagcattccctcgctgccctcagccctcttcatgcctctgcacctgtgccgcagtgtggctctccttcagatctacttctgctccagccttatgtactctctccaggtttctcc

SEQ ID NO: 765016 - DNA, 543 bp, Homo sapiens
ccaggctggagtgcagtggtgccatcttggctcactgcaacctcctcttccagtgttcaaacgattctcctgcctcagcctcccaagtagctgggattacaggcgcccgccaccatgcccagtctctgttttttgatctatgcttttttttttgagacagggtctcgctctgtcacccaggctggagtgcagtggtatgatcacagctcactgcaacctctgcctcccaggctcaagcagattctcccacctccacctcctgagtagctgggactayaggcgtgcgctaccacacccagctaactttaaaattttttgtaaagacggtgttttgccttgttgcacaggctggtctcaaactcctgggctcaagtgatcctcctgcctcagcctcccaaagtgctgggattccaggcgtgagccaggacacccagcctctgctacaagttctatacatatgggctcacttagtacccacgacaaccctttgaggtattattatccccattttccagatagaacactgaggttcagagaggctaa

SEQ ID NO: 765017 - DNA, 636 bp, Homo sapiens
caaaaacagcgagaaacacacatcaacagtcccctagtacagttaccatgtcagaagctgtaaacccactttacaagaaaaatctcagcccaatttccaagtaatctttttttgggggggcgggggagggttatctccaagagaattaattagactcgtaaacaaagatggagaaaaacatccctccttgcccgacccaacctatcttgttccctttcctgcagcctctggctcttcagaagggttagcgaattacctgtgaatttaggtgattgcttcttgcaatattttaggattgtgargagaagtgatgtctcaatacctattttttttttttttttaaacagagtctcactcggtcactcaagctggagtgcactggagtgatctcagctcactgcaagctccgcctcccgagttcaagtgattctcctgcctcagcctccctagtagctgggattacaggtgcccgccaccacgccaggctaatttttgtatttttagtagagatggggtttcaccatgttggccaggctggtcttgaactcctgacctcaggtgatcctcccgccttggcctcccaaagtcctgacattataggcgtgaaaacactgtgcctggtctgaaatacagtaa

SEQ ID NO: 765018 - DNA, 636 bp, Homo sapiens
caaaaacagcgagaaacacacatcaacagtcccctagtacagttaccatgtcagaagctgtaaacccactttacaagaaaaatctcagcccaatttccaagtaatctttttttgggggggcgggggagggttatctccaagagaattaattagactcgtaaacaaagatggagaaaaacatccctccttgcccgacccaacctatcttgttccctttcctgcagcctctggctcttcagaagggttagcgaattacctgtgaatttaggtgattgcttcttgcaatattttaggattgtgaggagaagtgatgtctcaatacctattttttttttttttttaaacagagtctcactcggtcactcaagctggagtgcactggagtgatctcmgctcactgcaagctccgcctcccgagttcaagtgattctcctgcctcagcctccctagtagctgggattacaggtgcccgccaccacgccaggctaatttttgtatttttagtagagatggggtttcaccatgttggccaggctggtcttgaactcctgacctcaggtgatcctcccgccttggcctcccaaagtcctgacattataggcgtgaaaacactgtgcctggtctgaaatacagtaa

SEQ ID NO: 765019 - DNA, 631 bp, Homo sapiens
agcaacctggtaccaagagtgtagtttaagtctcaattgttgccaggcccctgataggtgattctctcttcattgtccttgctgattccttgcaggccaccttcctcttcacaccctctgtgtgctagaattcctcaggctgggaactaggcccttctcttgtcactctccattctctccctaggttatctaatctaatttaatcccatagttttaaaattcatctttatgccaatagctctcagacytatttctccaggttagaaactgtcttctaaattacagatctgtaatttagactatctgaaatctgcatctggctgtcgcagagacagtacaaactacaaacaacacatgtgaaatccaactagtggtctacccttgcccaaatgtgctcctccactaatctttcctattttaggaaatgacacatcattcacccagttgttcatgccagaaactggacgtccttcttgacactactttttcagtgaccccggcctatatccaatacattggcaagtcctagtgactaaggtatcaacagatgattgatagacagatagatagatgataatcttaaatccatccacttctctccacctccactgtcttaaacctattcctattt

SEQ ID NO: 765020 - DNA, 593 bp, Homo sapiens
tcatccccagttgagaaccactaccttaggccagaggaaaagattatctggactggtgtagatcaatcatgattcatcccccgggcctggggaaggggggaagggaactttccttcctaaactcaaaagattttcacaggctacaaaatctggattctgttagcaggatgttaccaacccaaatggctgttgggtaatccaccagtatcagtcacacgaagaaaacagctcggatcaataaaaccaaaggtggtagaggccaggcatggtggctctcacctataatcccaacactttgggagatcaaagtgggaggattgtttgagcccaggaggtcaaggctgcagtgagctgtgttcrtgccagtgtactccatcctgggcaacacagtgagatcctgtctgaaaaaaataaaaattaatataaataaataaaaacaaaggtggctctttgtgggagaagtaggggcagggactaataaagtagatgagataagtctcaagcaagaactgaacaagaaaataaaaaggggaaaaaagtgacacacaaaaaaattaaggattaaaagagagatttaattacaaatgcaatat

SEQ ID NO: 765021 - DNA, 593 bp, Homo sapiens
tcatccccagttgagaaccactaccttaggccagaggaaaagattatctggactggtgtagatcaatcatgattcatcccccgggcctggggaaggggggaagggaactttccttcctaaactcaaaagattttcacaggctacaaaatctggattctgttagcaggatgttaccaacccaaatggctgttgggtaatccaccagtatcagtcacacgaagaaaacagctcggatcaataaaaccaaaggtggtagaggccaggcatggtggctctcacctataatcccaacactttgggagatcaaagtgggaggattgtttgagcccaggaggtcaaggctgcagtgagctgtgttcatgccagtgtactccatcctgggcaacacagtgagatcctgtctgaaaaaaataaaaattaatataaataaayaaaaacaaaggtggctctttgtgggagaagtaggggcagggactaataaagtagatgagataagtctcaagcaagaactgaacaagaaaataaaaaggggaaaaaagtgacacacaaaaaaattaaggattaaaagagagatttaattacaaatgcaatat

SEQ ID NO: 765022 - DNA, 666 bp, Homo sapiens
agccccgtcggcgcggacgcttgtcgagaatgcagattcctgggtactgccagatacggttggtgatcttgtagggctggagtggaagccatgaatctgcattttcatcatttctggccctctgcccgggctggggtgattcacggggattcgtagtggccccaaaggagcacgcagaacctcggctgctgtgcatttatcacctcttttgttcccggaggccgcaccccaggtccagtttacacagctgccaactccttttcttggttcccactggaatctaggaagaaaactcgccctttacttctccgccccacacccgacgacggagtgtctagaggtctggtcggccttggctgtgcggagggctaggcctgacgagcgggcgctgatgcggcgcagaccccgccggacctcttggtcggcccggggtaggctggggagccgcgggaacaggactggatagggaaagcggcaccgcagcgtccacgggcaagctgaaagtccgcttgatgwctttgcatcacagtggcgccctccccgcaggaacgcccggccgcctgcaccgaacgtttgcctgcagggaacggccaacccgccctgaaatactctttttgtgggctgcagctttcgggtattttaagccatggttctgtgcccttcctt

SEQ ID NO: 765023 - DNA, 594 bp, Homo sapiens
atttggcccgggccctcttcaagtgtggcaagttacaggaatgcaaacagactttgctgaaggtaaaaaggagagatgttattcccatccatttctgtgctacattgtattttttaattcttcgtgatgcgtgttcacatacctactacttaataatactctgctgtctaaratccttttcatgtcatttgaacatatgaaatatttattttttattcacaggctagacatgtggcacccagtgatacagttcttatgtttaatgtggccttggtcctgcaaagattagctacctctgtcctgaaagatgaaaaaagtaatctgaaggaagtacttaatgctgtgaaagaactggagcttgcacataggtaaagattttgtagaaacaacctatgaaatgctttatttggtctatgaccataccatcttgaactctcccgattttgtctgaaatgctttgtttaaagctatttgtctcaagctgctgaaaatcacttccttctaaaggtggtctattagaatcattccagcaatagttaagccaaagcagatagcagctgccaccaggtggtgccaaactatagtcaggatcct

SEQ ID NO: 765024 - DNA, 617 bp, Homo sapiens
atgagggaggggcagtagaacttcaggagaggcgtcactcctgggacaggaagctggggtgccccactccagggcccaggtgtctcagccatggagtggaagccccatgcacgcgaccttgtctctccagggcatgttgttatggatgctgcctttttagagcaatgtggtcagacaatgctgtccccacgcactggtgacttggtggttacagctcagcatttccaaagataaagcaatagttgtgggtttttttktttgtttgttttttgagacagagtctcactctgttgcccaggctggagtgcaatggcatgctcttggctcactcaacctctgcctcctgggttcaagcgatcctcctgcctcagcctcctgagtagctgggattacaggcacacgccacaatgcccagctaattttttgtatttttagtagaaacgggatttcaccatgttggccaggctagtctcagactcctgacctcaggtgatccacctgcctcggcctcccaaagtgctgggattacaggtgtgagccaccacgcctggccaatagctgtgtcttgagcttcaaatatcatagatgcctgagtataaggtgtcctgaatataacg

SEQ ID NO: 765025 - DNA, 617 bp, Homo sapiens
atgagggaggggcagtagaacttcaggagaggcgtcactcctgggacaggaagctggggtgccccactccagggcccaggtgtctcagccatggagtggaagccccatgcacgcgaccttgtctctccagggcatgttgttatggatgctgcctttttagagcaatgtggtcagacaatgctgtccccacgcactggtgacttggtggttacagctcagcatttccaaagataaagcaatagttgtgggtttttttgtttgtttgttttttgagacrgagtctcactctgttgcccaggctggagtgcaatggcatgctcttggctcactcaacctctgcctcctgggttcaagcgatcctcctgcctcagcctcctgagtagctgggattacaggcacacgccacaatgcccagctaattttttgtatttttagtagaaacgggatttcaccatgttggccaggctagtctcagactcctgacctcaggtgatccacctgcctcggcctcccaaagtgctgggattacaggtgtgagccaccacgcctggccaatagctgtgtcttgagcttcaaatatcatagatgcctgagtataaggtgtcctgaatataacg

SEQ ID NO: 765026 - DNA, 476 bp, Homo sapiens
ctaaacagtgaatggacttcttcaatgaagagcaaactagcaaaactggaacagtaagctaaagagttactccaaaagaacaaagataatggtggagggtgatttcagagacatgtaaaataaatgcagggattccagtaactcatagttccaaagagagacacatgaaataattttacggaggaaatattaaagaagtgatagaagaaaagtccatgtctgggtgcagcggyttacacctgtaatcccagcactttgggaagctgaggcagcaggatcgcttgagcccaggagtttaagactagcttgggcaacacagtgagaccctgtctctatttttaaatatatatgtatttttaaaatgttataaagaaaaattcctggcattactttagtgtaatttataagatttatttaatgtcatttgcatctaaaaaaggagcaaacattattttagtgcatcttattttttattc

SEQ ID NO: 765027 - DNA, 571 bp, Homo sapiens
ttggcacccttcatcctagctgtggctgaaagggtccaaggtacagcttgggtcatggcttcagaggatgcaagccccaagtcttggcagcttccatgtggtgttgggcctgcgggtgcacagaaaaacaagaagtgaggtttgggcacctctgcctagatttcagaggatacatggaaatgcccaggtgtccaggcagaagtcttctgcaggggcagagctctcacagagaacctctgctagtgcagtgtggaagggaaatgtgaagttggatttctcatgcagagtccccactggggcactgcctaattggagctatgagaagagggccaccatcctccaaacaggttgcaycattagcctggaaaagccgcagatactcaatgccagccatgaaagcagccagggcgggggctataccctgcaaagccacaggggcagggctgcccaaggccatgggagcccacctttttcatcagcatgacctggatatgagacatggagtcacaggagatccttttggagcttaaagatttaatgactgccctgctggatttcagacttgcgtggg

SEQ ID NO: 765028 - DNA, 585 bp, Homo sapiens
ggacctggtgggaggtgagtggatcataggggtcgttcccccgatgctgttcttgtgatagtgaatgagttctcacaagatctgatggttctataagcatctggcatttcccctgctcacccttctctctcttattgccatgtgaagaaggtccttgttttttcttcaccttccaccatgattgtaagtctcctgaagactcgccagccatgtagaactgtgagtcaattaacctcttttctttataaattacttagtctcaggtagtatctttatagcagtgtgagaatggatgaatacacgaagatcccccttctagacaccagaatgtataatcttggtgtmaactgtttatctcatcatagctatagatgaacccatctttggctactgaatctcccctgtatttctgaaccttcctctgccatcagccaggccaaacagggaggcagtttctaatgcctaattttagacctaagtcttgtacacttaggcctatcttagaatgtcataattcaccaataagttctaaaataggacatctctagcaagacatcattacttattatttgtgcccatagaaac

SEQ ID NO: 765029 - DNA, 554 bp, Homo sapiens
aagactcttagatgttctagaataagaaacgtttacctacgtctaaatatttttcttaaacttattggaacctaaaatcttctcctttttctaagaactagaagatcatggaacgtattttgggaaactctaccttggcacaatatagcattagctagataacaaaccctcatagactttgtggccaaacatccataccatttgagattatcacacttaaaaatactttctccctctttatgcctgtaaggtgctgaattttagagttaagaaacatatcaraactaaaaataaaataagattcctaaaaaatttagtgaggaggccttcaaacaggtattaagtacattcataactcttcacattgtgtgattcttaaacctgtgcggtgtttcagagacttctgaccactgttgacaaataacaaaagaaggaagctaaaaacaaacctgatccttaggcctattatagtttctcatagttattttttatcttttaattattgtgtgcaatagggtaaaaagagagagttttctttaagtaattcatgaaac

SEQ ID NO: 765030 - DNA, 606 bp, Homo sapiens
ctgatattctttttctttctggaaaatttctccctgctctctctgcttcattttagcttttattgctatgctttcaagttcttctgcatttcctttgtaatgtataatttgttgttaaacccatccaatgtaatttttatcttacacattgtagtgttcacctctgggatttaagttggtatatatatgtgtgtgttggtgtatatatatatttagatagatatagatagataatatatgtgtgtgtatatatatgtgtgtatacacacacacacacacacacacacayagctcaaaataagagccatctatgacaaacccacagccaacatcatattgaatggggaaaagttgaaagccttcaccccaagaagtagaaaaagacaaagatttccactctcaccacttctattcaatactgtactagaagtcctagacagagcaattaagcaggagaaagaaataaaacgtatccaaattggaaaaaaagaagtcaagtactctctcttcattaatgacatactgtatacctagaaaaccctaaagactcctccaaaagatacctagacttgattaacaacttcagcaaaatttcaggataaaaaa

SEQ ID NO: 765031 - DNA, 606 bp, Homo sapiens
ctgatattctttttctttctggaaaatttctccctgctctctctgcttcattttagcttttattgctatgctttcaagttcttctgcatttcctttgtaatgtataatttgttgttaaacccatccaatgtaatttttatcttacacattgtagtgttcacctctgggatttaagttggtatatatatgtgtgtgttggtgtatatatatatttagatagatatagatagataatatatgtgtgtgtatatatatgtgtgtatacacacacacacacacacacacacacagctcaaaataagagccatctatgacaaacccacagccaacatcatattgaatggggaaaagttgaaagccttcaccccaagaagtagaaaaagacaaagatttcyactctcaccacttctattcaatactgtactagaagtcctagacagagcaattaagcaggagaaagaaataaaacgtatccaaattggaaaaaaagaagtcaagtactctctcttcattaatgacatactgtatacctagaaaaccctaaagactcctccaaaagatacctagacttgattaacaacttcagcaaaatttcaggataaaaaa

SEQ ID NO: 765032 - DNA, 617 bp, Homo sapiens
tatgtaaatgaacctctttagtgcctaataaaaaatgcacactaaataaatagcagtgatgataatgtcattgattaattactgttatttttgttattgtgatgaaagtgatccctaaccataatacattacattggtgggagaaaatccattatcagtaaatatcattgcactaggtatgagcattagtaacaaaagtaaaagcttttgcaaaggaaaggggtaaatttctcttaataaagccgggtccacaatggacaacaaaagagttatcacaggaaccctgttgggaaaacacaaaaacttggagggcacagaaaccttttgtttctctaaatgtagagcgatttcctgccagatggggtttagtaagtgcttacaactccaatataaatagacaaaaagacttaaaatcggtaaacacaatctagatataaatagtacaacctcatcttttatgtcacttaartaattaaaacgcttctcattgaataatgaagttatttaaggagaaacatcagaaaagcatccagccggcagatctaactgcttttgcctcgagtgacatgttcccagcagtgggttatattatgccttcataaaacgtgttctgtcat

SEQ ID NO: 765033 - DNA, 645 bp, Homo sapiens
gaatgttaagattgtgctaagtcattctgactctttacttgttcccattttagaagtaattttacaatgatgataaatgcggaatttttttctatgcagtatgatatttctctacacagtaggggtttactgacttcggtcttaggggccagtaaactattgcatttatactaaatccagcccatgacctttatttttatatgacccatgagtcaaaaataatttttacagtttaaaaaattatttaaaaagcagaaaacgaatttttttcaacagaaactgacactgtccaaaaggcataaattatttattatttggtccttttgaggaaaaatttatatctgtagatttgtgtatctttaaatctataaaaggtattcgagattattataagagaccatcttgtagtgtacggctttagatcatatagtatatatattttttctctatgtctcaatgtatgccatatcagccacttcatctgaattagcacacamataataccaatttcataaggtgtgtaagtattaagtaaaataatccatataaatactgattattgtctgacatacagtaaatgctcaatattattaaatatttgaaattatcagcatttgaacagttttgtagaggttacaaagccaa

SEQ ID NO: 765034 - DNA, 630 bp, Homo sapiens
ccaaggttgcacaatgaatcccctaaaaacactgcctaaattgtgatacagcagtcacgaaattgtaataagtttggtgtatacaatgcatttcaatggtaatcacttaacatcctacctagtaccttggcttcctacaatatttataaaaagtaataaattctaatattgaagcagtagataatatctcaaagaaaagatattgaccaaaaggacaatgaagtaggtctttaaattttttaaagagaatgataaactttgacatagattattctgacaaggataatcattatacttttttttaaacaataagtgtatcaatttagatttctgataaaacaaaaagktgttatttacttggcagaaaaaaatagtacttacaggtactgatatatttccagttgtgaaggtttttgtaaaatgatatcaatttacttatttctatttaatgccccaaatagctctgcagggaaatgtgaatcatttcaatcagctaaagctacaatataaaaccactggagtataaacctttgagaactgtttttgaaagactaaattaccttagaaatacatatttctctgttcatcatttatcttaaaagtaaaattttatttattccttgagggaca

SEQ ID NO: 765035 - DNA, 658 bp, Homo sapiens
agaatatacaacaataatgaaccctaagagtaatgcttgctgaatttttatacatggatatacttttgtagtcattactaagttacacaaatgtaatcatctaagacaaaaagcattccaacagccagaagtttatcttatgtccgtttccagtcartacacatccctgctccgtaatcactataatatcctaatcaattacgtgtgcaaaatcttacatttatttttacgagtgaagtcatacagtatgtattcctttctatcttttcctctgaataagagtctgtgctcctggtgggagccagagttacctctgacttagcacaatttcatttcttttcaaagaccttcactatattctcaaatcattcatttcctttgtttcagggtgagagcacatacaggaatactacatggaatttttcagcaacctatgccatcctcataataatctgacctatactatcagagaaatgtgctttaccaatttctcactcgtattttattgaaaaaggtatatatttgatgtttagggcagaaaaatttgaagaaatattaagatgatgggagtgaaaatcacaatgtgtatatattaatgtgtacacatactcggtattctaaactgcatctaacatacccaaaggttcagcagttggaa

SEQ ID NO: 765036 - DNA, 689 bp, Homo sapiens
cactgaggattttgcagggaacaggaacagacaataatcccttgccattgtggggtgtacaatatagtaaggggggcaaataagcaaaataagtaaaatatagagtatattagatagtgacatctgcttatgagaaaataaagcagagattgagaataagaagtatgtgtgtttgagagaggaacttgtagttttagatagggaaggcctcactaaaagataatctttgagtaaagatttgaaggaaatgaggaagcatgctgtgctaacatctgaacaaacagcattctgtgcagatagaatagtaagtgcaacagctccaaggaaccatatctggtgtcaggaacaatgacaaaaaggagagggatagtgataggagatgaggtcagagaggaaggggsagtcataaatcatatagagccttattattttttgtaaatactttggcttttattctgagcaagatgggaaactgttgtaaggttttgagcatggagttatatgatctgacttatgtttatgagtggttctttctggctgctgtgttgagaatagactggggtggggatggggagcaaggatggaagcagagaccgttggctatttcaggtatgagatcatggtggcttggattagggtggccgtgaaggtaagtgaatggttggattctggcagtatgttaaccacac

SEQ ID NO: 765037 - DNA, 689 bp, Homo sapiens
cactgaggattttgcagggaacaggaacagacaataatcccttgccattgtggggtgtacaatatagtaaggggggcaaataagcaaaataagtaaaatatagagtatattagatagtgacatctgcttatgagaaaataaagcagagattgagaataagaagtatgtgtgtttgagagaggaacttgtagttttagatagggaaggcctcactaaaagataatctttgagtaaagatttgaaggaaatgaggaagcatgctgtgctaacatctgaacaaacagcattctgtgcagatagaatagtaagtgcaacagctccaaggaaccatatctggtgtcaggaacaatgacaaaaaggagagggatagtgataggagatgaggtcagagaggaaggggcagtcataaatcatatagagccttaytattttttgtaaatactttggcttttattctgagcaagatgggaaactgttgtaaggttttgagcatggagttatatgatctgacttatgtttatgagtggttctttctggctgctgtgttgagaatagactggggtggggatggggagcaaggatggaagcagagaccgttggctatttcaggtatgagatcatggtggcttggattagggtggccgtgaaggtaagtgaatggttggattctggcagtatgttaaccacac

SEQ ID NO: 765038 - DNA, 554 bp, Homo sapiens
tgctaataaaaggttgagtgccacctactgccccattttagaatgcaatgctgagattggttcaattcctctctcagtaattgaatttaccctgaaaaataaatcaatcctaaacaagatatccaaacaatataaagcactgttggaagaagaaataaaaacaggctttgcttaaccaaaagaaaattttcaaagttaaaggtttttggagttttagattcgtatatctaataaactcctrtagtttcgagttactgctaaaacagtaaaggaaaatataatttttgactcactggcctgtgccaacagtgaaaggaaaaacggtaccactgaacaccctaaaatactgtaatgaaacaacatgcagccactctaacttcccatggtcccaagagaaaattaagtgaaataaaagcaattttcttacctcataacactgtattcaagtccagtatcaaaacagccacctgcaggacactagttggaaagttaacattccctttcaaagttactccaaaagccttttgaaatatagtctgttactatgtttaaag

SEQ ID NO: 765039 - DNA, 655 bp, Homo sapiens
aacaattatccatccactcaacagatatttattgaacatttactatgagcaagtcgctgagataaacaaacatgctctcaagtgggtatctgtttctattggttggactcttggtctctgtctgtcactttctctttgtctctttcccatgttcttccctgcccccttcacttatggatttgcctcattggaatcaagatccattcaactagtggggcttccataattgaggcttggggcatatcaaatggaacagctaatggtgacttttttttttcccaaggcagtttatcaattatgaatgatcaggcaatcgcagatcaaaagagtcccatttccccaaacgatgtagtagattttagaatgagatgaaatgaaatggagctaaaaggcatttttaaaaagaaggctaagggatttggagctggaggtatgaagctcaggatcaaggagacttcttgctttggtttcagagtcttggacagcttgtgcrtaaactggagggccggcagctggaatgaccaggacacctaggtgctgggaaggttagcaggctggttgttgcgggccactgcagtctaaagagtgatactgacttaacattagcagcgggactgcttgctttctctgcctcagctcctgttgcaatttctat

SEQ ID NO: 765040 - DNA, 585 bp, Homo sapiens
gggctctttagtcacctggtgatggatccttccaaagctgagtccttcccttcaaggcagtgtgctcccttctggtccactttatgtctagaaatgttatctgggagctagggcctggaatgagggcctctgttctctgcctggtgccttattctactgtggctaaactggtatccaagttgcaagacaaagttctcattactgtctcctcttctctctttaagaagaaaggaatctctcctggcacttgcagttgyactgcccggggttgggggagcggtgacccaatcactccctggtgtcttaccaggtcacatgcattccatgtccactggctctaagcccagaacagtacccagacatacccaggacttttagtccttatgtcctagatggccattcaagtttatttagaacccaagggcactttagcctgcagtggtagagctagccagagctcaagttctgactgttgggttggatgattcccttctggctagagctggtctaaatgttccctccatgggtgccagctgaattctgccaagtgttgctttctgctacggcaggcagcactgagtttca

SEQ ID NO: 765041 - DNA, 545 bp, Homo sapiens
agtttctgtaaatgcataggattttctcattcgtcctcaaatttattgttttacatactttattttattctttgtactgttgtgtatctctattagttttctactggtgtgcatcaaaatgccacaaaattagcagcataaaactacacccatttattaacttttatttgttagaagtctagtacagcataattggctgtctgctaagattatcacaaggttgatattatgacattagttgggctgaggtctttgaagastagggaaaaatccactttcaagctaatttttttgatggaatatttagttccttatagctgcatgactgaatttatttttttctatctggctgctagccagaagcaactctcatgtcctacaagctgcctaccaccttgtcacatagccttctccatctttaaaacattgaatacttctcatgcttagaatctcagacttcctcttctgtgaccaatcagcagaagctgttttgaaagggctcatgtgattaggtcagatccacctgaataacctccctatgtcaa

SEQ ID NO: 765042 - DNA, 619 bp, Homo sapiens
cggaaacagccaacgatctcgacccctacgggcactagaatttagcggacttgagcctagatgccgacggtttccggaaatagccgaacgcactcggagatggggctgtagccaagagtgtttgcatgccggctgagcgccccggaagtaacggattgctctagggctgggccgggttcggctagagggagttttatggcagagcgcaagctaagaccaggatagaaaggacgcgacgattgcttattttrttattattttttgagacggagtttcgctcttgttgcccaggctggagtgcaatggcgctatctcggctcgccgcaacctccacctcccgagttcaagcgattctcctgcctcagcctcccgagcagctgggattacaggcatgcgccaccacgcccggctaattttgtatttttagtagagacggggtttctccatgttggtcagggtggtttggaactcccgacctcaggagatccgcccgccttggccttccaaagtgctgggattacaggcgtgagccaccgcgccccgccgcttatttattttattaacatagcccagggcgcccaggaggtcgaggctgcaatgtgccgtgattgcgccactg

SEQ ID NO: 765043 - DNA, 576 bp, Homo sapiens
cacgcatggacaggtaatttcaaccagcccagggggtggggggtcatggggggatatagccctaagaatcattaactcactaaagaaatcattcattcattcacttaacaagagctgattgagcacctgtcatgtgccagacgcttgcatttcatttatttattcatacaacaacattcattaagcacctactgtgtgtatgctctgtgctgcgggctgagggcatggtcgcaaatgggcagctggccctgagcccctggggagtcctccgtttggtggggggtggtcaatgtgtgccccagaagctacagctcagaggttgaagctttgacaggrgacacagtggcagctggagtcacggggggcttcctggaagaggtacctaaagagagagagcatgcagtggacttggtcagcctgtgtctctgttcttggttattttcaggagatccttcctacaacagggccagaatatgctggccacagtgtctgttcttagtccccacaaaccacaggggccaggccttccttccatctgttcttgttcccctctccagggcagacggcagaagatgg

SEQ ID NO: 765044 - DNA, 590 bp, Homo sapiens
gatccttccacctcagcctctggagtagctgggactacagacatgcaccaccacacctggttaattttttatttttattttttgtagagacaggtgtctccctacgttgcccaggctggtctcgaactcctgggctcaagtgatccacccatctccacctcccaaagtgctaggattacaggcgtgagccaccgtacccagcctggtcccatatcatagtgaaatggtgcctgtaaagctctcagcattggcttggcacatgcagttggtactcaataaacggctgttgctatccccagaattgcaagcagtatccatctctctgacattcatgaagacgccctggcgggagggagtgggagagatttgcccagggactgagtgggtgtgtrctcgtgcttctgagtttggcatgagaccaccagtggcgccggtcaggccagggaggcctagtcttgcatcacactctccgcctaggctaggcaagtggtgggcagccaggtatctgccacagccggagacgcctacaaggctggaagtgggtgtaatggcagtacaggaagctctcatggtgaatatcctggcaagga

SEQ ID NO: 765045 - DNA, 581 bp, Homo sapiens
tgggaaataagcgcctttaaccaggcggcggtcccgcccctaacccggacccgcctcccgatgcccacgcccctcgggtcccgggccagcgtctctccctcctccactccttcctctgagtgtcccacccccacccctgccaggtgctgggtccccagtcacgaggccattgggccccttggcaatcagccctgcccaggcacgtgagycctggcgcaagactacctttaggggaggtgaggtggggcctttgagacagacacaggctgagaggaacggtggtgtctccacgcacccctagaccttctaggggcggctaggggacttgaggcccgagacccactctcagagtgggcctgtgacctaacaggggtgacgtcggatggaggctggggatgggatggaggccggggttttgggggagtaactgaaatattcaggcccccgagagtgggcaaggcctgtgtggccaggtctcctccctccagtctcgcccgtgacctccctcacacccaacccccacatcctgcccctcaacccttcccccctcaaactcctgaccccgacgctccagacccctc

SEQ ID NO: 765046 - DNA, 567 bp, Homo sapiens
tgaccccgacgctccagacccctcaccgtggtcccgtgggactgactcaggcttgaccacagccacgccggaaagcagaagctggcgcagggagtggcgtgtcatttctctagggtacccacccagccccacttctggcttggggtgaagagaactggccttccttcttttcatcgttcaaggcttgtggggggtggggggcaacctggccttcaaggracgcccatgggggagagaggcagcctgtgctgtctgggataggggtggggtggcttggagtccacctggctttggatttgagtgacagagcctcagctttcccttctgtgtaatggggagaaggataaggtttggggaacaagagtcaccatggagggctcagaggcaggtgggggagagttgtcccaggctggggcttctggatggcatggtcaggccttggtgcctacacaggacagtggccccaacagtgaaggcagagagaatagcctggaaaaaaggcccagatggaggctggagtgttgggggaataactgagacattccaaccctgccgggccttacattc

SEQ ID NO: 765047 - DNA, 608 bp, Homo sapiens
agacatcatctcgtctgatccctttcaagaagtctatgaaatatgtatttcccctagtatctccgctttacagatgacaaaattgaggctgaaaggttaagcacttttccaaggtcacacaactaagaagctgcaattacacaggtaatgaaacccagatctacaagattttaaagctaaaaggagcatttggaaatgcaaatgattttatgacaatgtccattgttaagattaaatggggccagaagcagtggctcatgcccataatcctagcactttgggaggccaaggcaggtggatcacctgaggtcaggagttcgagaccagcctggccaacatggtgaaaccctgtctctcccaaaaatacaaaaattagctgggcatggtggcaggcgcctgtaatcccagctactcgggagactgaggcaggagaaytgcttgaacctgaaaggcagaggtcgcagtgagctgagatagtaccactgcactccagcctgggtgacagagcaagactccaactcaaaaaaaaaaaaaaaaaaaaaaaaagattaaatggtatatgtcaaccatttggtctccagggtttacattagaatagcatttttttg

SEQ ID NO: 765048 - DNA, 512 bp, Homo sapiens
ggcctcccaaagtgttgggattataggcatgagccactatgcccgatctgtaggttatatttttaaaaatcaattgcaagttggttttatggctccccattcatgtattcgttaaattcaacaaacatttattgagcaccgactatgtatttaggactgttttaggtgttggggatatagcagwgaataaaacaaagtccttgctttcaatgaccacctattctattaaataaatacataacactgtagtcccagctgtttgggaggctgaggcaggcagtttgtttgagcccaggagtttgaagccagcctgggcaacatagtgagatcccatctcaaaagaaaaaacacaatgtaagttatctttcatgggattagagaaaaacaacaacaagaaaaacccagagggcgataagtgttatgaagtaataagtcagaataaggggtgtgcagagtgtaagtgtgcgccatgattagtacaggcctctgtgataggtgatgcctgaataggg

SEQ ID NO: 765049 - DNA, 505 bp, Homo sapiens
tatgttgcacaggctggtctcaaacccccaggctcaagcaatcctcctgcctcagcctctcgagcagctgggactacaggcctgagccaccatgcctgtcttcaagtatttttaaatcattatttggattttcccatcatgttaacaactttccctacctagccaatttcacctctgatcttcccagggcctttatctagaacactcctgcgtcctctcttcccatggttccctcttcctcatcctttaggcctcaacttcaatgtcctgttccaccctacctaaaggaaatgacctgtcattctctatgtcaaggttcttgccttcttagaagttaatacaattcattactattactrttttctttatgcccatcaacttgtctttccgggtgtctccctcattagaatgtggaccctgtatgggtagagaccatgtacatcttgttcacattctatctctgagcctagcatagtgcctggtacaaaacaggtactcaataata

SEQ ID NO: 765050 - DNA, 494 bp, Homo sapiens
ggaagacaatttttccacagatgggggttggggggatgattttgggatgattcacatgcattatatttattgtgcactttatttctattattattacattgtaatatgtaataaaatgattatataactcaccatgatgtagaatcagtgggagccctgagcttgttttcccgcaactggatggtcccatgtgggggtaatgggagatagtgacagatcatcaggtattagattatcrtaaggagtgcacaacccagctgtcttgcatgcaaagttcacaataggattcatactcctatgagaatctaatgctgcagctgatctgataggaggtggagctcaggccataatgggggtgatggggaggggctgtaaatgcagataaagcttctcttgctagcctgtacgctcacctcctgttgtgtggcctggttcctaacaggccacagagtggtagtggtccagggcctggggactggggatccctgccctgg

SEQ ID NO: 765051 - DNA, 636 bp, Homo sapiens
ctttctgagcagtatcttcccctttattttttaacgctctgtttcacttttaaaataccctcatcactttatgtcagttaggtggttggttacatgagtcaaaaattctggaacaacttctggtctgggaatatacatttgggaattgtccacttaggtggaatttaaagccacgagactaaataagatcaccaagagagtgagtagaagataaggagaaaaaaagtccaaggacaaagaccaaggcatttaaactttttagagttcagatcaatgagtaagaaatgatagggaaaagaacagtgacagaaggagaaggaaacacatgagtgtgtgatatccattttctgtgacaaatgccactcatcggtcaaatgagatgagcactgagaagtgactactggctttagcaacaaagaggtcattgggtcattgktgttcttttaaaaaatgccatttaaatagaacaatgagggcaaaagcctgagtgcagcatgatcaggaatgagcagggaaatgggtattatagcagaggttgcagtcgactcattttgccatgtagtaaagcagaaatgaagctacgggggctggaatacagtgtggtgtatacagatgtttttctggaagactggctaa

SEQ ID NO: 765052 - DNA, 633 bp, Homo sapiens
aaagttattcccaatactcactattacccattaccactggtatatttttcatagtctagaataatggacccgtttctgtttgcttttttatataactccaaaatatgatagaaacaattgctatcatgcaaaacttactttaaatttaaatttaaataaaaattagatccttattaaaattaattggttaattaatcmcctgaagaataaatccatgggattatccacaaagaaacataactaaaaaatgagcaattttattctacaatatatgtatacttcaaaacatcatattgtacataatcaatagtacaattttatttgccaatttaaaatgaaataatcaatattgtccagcaaattttaaacacaaactgcaaaaatgcaattctaaaatgcatacctaccatataagcgttatgctcctttatgtcaagcaactgtagacattttaatttagtattaaaaaaaggaaattcactccagttgtgataattagcaggaaagtaaatagagttcagaaaatgttaaaagtttgatcaagataaaaacaatacagatagaagcttttgccagcaagaaaagcaaagaaaggtaaatacttatccatgcaggagatagagagttgactta

SEQ ID NO: 765053 - DNA, 637 bp, Homo sapiens
gtgtgtgtgtgtgtgtgtgtgtttgtgtgtatgtaaacttacaaattctttcccctggttaaaataaaacacacacacaaaacaatgatgacaactgtaattacatcctggcaacattgaaaaaaagagaaattgatcagtgttgcaagcttttctttcttcctaataatcatcgtttctgaatastagaaaatagaatgcctgatgtttatcactacacactaaaggacactttagggaaggctaatattttggcctttgggaccttgttatgcttgaagctttactggtggaacatcaacattctttgctttctctttgtaaaatatttgctgtaaagtgtaaactaaagaaaggagagtatttcttcacattgctatgctaaaacatctggcatctggggttgtgtttatacccttctgcactgcaggcagtgcaggaagcctccttcaaagcagtctggatttttctttcacctccttgaatgtccaaaaagtaacttttatggtttttttttttcttttggaagacgatttttgtccagcatatggagcatcttaaatacttgggccaaaaaacaagtcactagaaagggaagttctccaatttatcttacagaacacctgcttatatccta

SEQ ID NO: 765054 - DNA, 637 bp, Homo sapiens
gtgtgtgtgtgtgtgtgtgtgtttgtgtgtatgtaaacttacaaattctttcccctggttaaaataaaacacacacacaaaacaatgatgacaactgtaattacatcctggcaacattgaaaaaaagagaaattgatcagtgttgcaagcttttctttcttcctaataatcatcgtttctgaatactagaaaatagaatgcctgatgtttatcactacacactaaaggacactttagggaaggctaatattttggcctttgggaccttgttatgcttgaagctttactggtggaacatcaacattctttgctttctctttgtaaaatatttgctgtaaagtgtaaactaaagaaaggagagtatttcttcacattgctatgctaaaacatctggcatctggggttgtgtttatacccttctgcactgcaggcagtgcaggaagsctccttcaaagcagtctggatttttctttcacctccttgaatgtccaaaaagtaacttttatggtttttttttttcttttggaagacgatttttgtccagcatatggagcatcttaaatacttgggccaaaaaacaagtcactagaaagggaagttctccaatttatcttacagaacacctgcttatatccta

SEQ ID NO: 765055 - DNA, 504 bp, Homo sapiens
gaacttgagaggcggaggttgcagtgagccgagatcaccctattgcactcccgcgtgggcaacagagtgagactctgtgtctaaaaaaaaaaaaaaaaaaaaaaaatctgtttaaattgtgcaacattttactaataatcatataattctatgtttatgattttcagcttaaagtttaaccctatctggatccataatatactgatttctttcaatatcattttattacagaggatamaataagaaatgtaaatggtgtacttcagtattctagtaatgttttaaaggatatcatcagtatcgtatacctaatatagttcactgggaaaaaaaatctagactccttttccctatcaccatataaaatgcatccaagaggcctctgatatatttagctttgttttgtcaactcctatactcatcatgcaaggtagaaaaaattcagttggcttctactgaaacaatgcattagtgctataatagtgaatgttttttgtgccatga

SEQ ID NO: 765056 - DNA, 531 bp, Homo sapiens
ctgatttcatcaagtggaagaaagggtatcagtgattgaagatcaaattaatgaaataaagcaagaagagaagtttagagaaaaaggagtaaaaagaaacaaacaaagcctccaagaaatatggcactatgtgaaaagaccaaatctacgtttgattggtgtacccgaaagtgatggggagaatagaaccaacttggaagacactcttcaggttatcatcgaggagaacctccccaacctagcaaggcaggctaacattcaaattcaggaaatacagaraacaccacaaagatactcctcaagaagttcagccccaagacacataatcgtcagattcaccaaggttgaaatgaaggaaaaatgttaaggggagacagagaggaaggtcgggttacccacaaagggaagcccatcacactaacagctgatctctcggcagaaactctacaagccagaagacagtgggggccaatatacaacattcttaaagaaaagaattttcagcccagaatgtcatatccagccaagtaa

SEQ ID NO: 765057 - DNA, 619 bp, Homo sapiens
gacagaaggcactgaagagtcccacaaaacagggttaggaatatacctgactcactggcagtgacagcctttggtctggagagtgctttttgatacaaatgaaagaaatatttcaaaaccaaagtaagaaggggaggattggaaggatttaacttattgcccgggatttgtgattttataayttaggggttttttttcttccccaaactctaatttagtcttctatttatttttatttttattttttgaaaccgagttttgctcttgttgcccaggctggagtgcaatggcatgatcttggctcaccgcaacctctgcctcccaggttcaagtgattctcctgcctcagcctcccgtgtagctggaattacaagcatgagccaccatgcccagttaattttgtatttttagtatagacagggtttctccacattggtcaggctggtcttgaactcctgatctcagatgatccgccctcctcggcctcccaaagtgctgggattacaggcgtgagccaccgcacccggccctaatttagtctttttgttttttgttttttgtttttgagagatggagtctagctagttgccaggctggagtgcagtggcgcaatcttggc

SEQ ID NO: 765058 - DNA, 573 bp, Homo sapiens
cctcccagccccacctcagaccgctggggcccatgcaggccttttcgtcagtgggggtcttaccatggtgcctttccttaaattgatattctttacttattctagtactttaaaggaatgcttttttattaccatgataaaagaaatacctctatcattgataatcacaaaaatagacacagtaatatgtattgttcttaaacttgagctaggaactgtttccagcatggaaggaaagaaagagaataaagagtgaatcacttttcactgtaattcaatgtcrgtaatgtcaggtgtatgacttggcaacactgccctagagacaaggaaatgtttctggggcaggcacgctggctctgatgtgcccaggcccgacgcctggtgctgggtggtgctccatggtgactggcgacttcacttcctgatgcactactctcccctccgcctgtcatttcctccaagaagaatcacagctgcacttttttttctaacagtttgttttgctcgtgtgcctggagaccccaaagcaagggaagaattctaaatgagtgaaatgtataaacacgataagaa

SEQ ID NO: 765059 - DNA, 660 bp, Homo sapiens
gacactcaatttacctgtataacaaacctgcacatgtacccctgaacctaaaatagaagtttttaaaaagtatatccacctatttcaagaggctttggcttcaagtaatagacaatccaaagtagtttaggggaaaaggttatcttctgaatcgtttatctgaaagttcagtgacggaactgcactagattgatttatttcatcagggcaggattcgttttacttcaagttgctaggctatattttcctctaaatactgtcttcacyttcgggctggtttctcggagtgcaaaactgatgttgctgtgctagcttcatggcatattgtgaatacattcctgagaaagaaagaacacctcttatgggtcctctagagattccctcctaaagtcagggaatctccccttggagctcctcccaggaaaccttcttgcactcatccttggcctgcccagggtgatgcccccaccaatcacccattcctggggtacaatcaatatcacgtgggtgctctgaacaatcacctcctggagcgaggctgtatcaacctgtcctgagcaacacgggttgcctggcagaggggaggccactgaatgaaaattggcatatatttgggggagtgaagagggcaatgggtactgagtgggaaaccaataatta

SEQ ID NO: 765060 - DNA, 660 bp, Homo sapiens
gacactcaatttacctgtataacaaacctgcacatgtacccctgaacctaaaatagaagtttttaaaaagtatatccacctatttcaagaggctttggcttcaagtaatagacaatccaaagtagtttaggggaaaaggttatcttctgaatcgtttatctgaaagttcagtgacggaactgcactagattgatttatttcatcagggcaggattcgttttacttcaagttgctaggctatattttcctctaaatactgtcttcaccttcgggctggtttctcrgagtgcaaaactgatgttgctgtgctagcttcatggcatattgtgaatacattcctgagaaagaaagaacacctcttatgggtcctctagagattccctcctaaagtcagggaatctccccttggagctcctcccaggaaaccttcttgcactcatccttggcctgcccagggtgatgcccccaccaatcacccattcctggggtacaatcaatatcacgtgggtgctctgaacaatcacctcctggagcgaggctgtatcaacctgtcctgagcaacacgggttgcctggcagaggggaggccactgaatgaaaattggcatatatttgggggagtgaagagggcaatgggtactgagtgggaaaccaataatta

SEQ ID NO: 765061 - DNA, 629 bp, Homo sapiens
acatgggttttaaactttatgttttgaatgccttcatttctctaaagatctttcaaggattgctatgtaggaataagtgaagaataaatgagcccaatcaaacacatacaaatctcactttacaaagaataattctgtgttttttttccctattaggttggaatttgtaatggaatttagttgaaagaataattgccagaaagaaatacctgaaaaccactggtctgtaaaaataaagaagattctcagtatgctgattaaatagtacctgagctactgtgttataatctgaatgccatacttcatggaatgtatccagcggagagtcgtctcacctaattctaaggaaatctgaattgcattatataagagactatcatttgttcagcaaatatttatttaccagattttcactaatccactgggcactgctgatataagactgaggaagaggagacaaggttttttcrctgatgaagctgacattttagtgggtaagacaggaaaaaatatgtaataaaatggtaaatacagtactggcaacaataataatccatatttttcaagttgatgagttcataaaatgtcccagaaaaaggtatacaattttaactaataaatacaattga

SEQ ID NO: 765062 - DNA, 617 bp, Homo sapiens
gtaattttagtcttgcaagaaacttttaaaatgttttattttgaactgtaaaaaataaaaccatttttaaaatcttaatttacttaataacaaggaggaaatttggcactgtatattagatttgcaaacacttgttaggaagttaaatttcgttagctatcaggtgtatatagccctgccaaaagaaaaacaacaggacagctgtcacagctaattcttacctagatagcctctgctactaacaaggtatagtccagacaaattgagagatgcattakgtaccagtttacggtaaacattacacaatgagtatttcatttgcacacatttctactcttcctctttatcccctcaataagcctaacaacttttcagtctaaatgttcatcaccattaccctcccatattctactgtcttccttcccctgtataatctatcagcggttttgtctccacagtgatactaataccactttataatgtggtaaatgtaatgatccaaagaactaagccaaaaagttgcctattgtctatttaaataaggtttaccaaatgccaatgttttatgttaaattttttttaatatccatgatgtcaagtaactgaaaaatattctg

SEQ ID NO: 765063 - DNA, 630 bp, Homo sapiens
gatagcatggtggtgtggaagatgagagagcagtgtatttaggaagactgtggtcacctgtgctgaatgatgagaagcacaataaatgacaacagagaagtgatgactggatttgacaacatggaggtcactgataacctttacaaaakcagtttcagtggattcatggggacagaaatatgactggatggttcatcaagaaatggagtttgtagtgcagtgggagcagagaaatggcagagcatttggagagaagctttttaaatggatgttatcagggtatgtttgcatgccagcaagaaggaccgagagaaaagaagaaacagattatataaaaatgagaggacaatttcagaacaacgttcctgagaaggcacaaggggatggggtctagagtacaagtggagtggtgggcctttgataattacaatggaatgatgacagatcatataggcacaaatacagtaaggttggaagatgtgctggtgagaaaataaagtcattctacactgactgtatctatgtttttccacagagcatgaggcaaaaccactgtcattaaatatactgatgtgagtaatctgcagaatgtgggtcacacagcaagatcaccctcaaatttacattagt

SEQ ID NO: 765064 - DNA, 629 bp, Homo sapiens
tagttgagtttttatgtaactctaggaatgatttaaatagaggaaacggaagagttgatgaagaactgggtgggcaggttgaagggaagagatgcatacagcctagagaatctaagaaaatccagggattcaggtgaaaagttggaggacagagaagtaaataaagggaaaataggaaatcagaatttataccatctttttcttaagaaattattttgaatgtgagaactataatacatttttttttctgaactactaccaatcatttcctctacaggatgattttgctaaaacacactcagttaaaatgtgaccttctagggatggcaggatgcaacactgattccagaagctttaaagtctaacaactagcttgttttcctgaattcaggactttttttytgaccatatccattaagcactactttaaaatttgctttattattagccaagggcttctagtaaacacgtttgccttctttaaaggaggagtatcacagacacttaagccctaagtaattgggatatttgtatagcctgagttttattcatggagatttacattcaatttccattaatcttaataggaagtcattacctaattggcatggatgattgataattcagaa

SEQ ID NO: 765065 - DNA, 629 bp, Homo sapiens
tagttgagtttttatgtaactctaggaatgatttaaatagaggaaacggaagagttgatgaagaactgggtgggcaggttgaagggaagagatgcatacagcctagagaatctaagaaaatccagggattcaggtgaaaagttggaggacagagaagtaaataaagggaaaataggaaatcagaatttataccatctttttcttaagaaattattttgaatgtgagaactataatacatttttttttctgaactactaccaatcatttcctctacaggatgattttgctaaaacacactcagttaaaatgtgaccttctagggatggcaggatgcaacactgattccagaagctttaaagtctaacaactagcttgttttcctgaattcaggactttttttctgaccatatccattaagcactactttaaaattygctttattattagccaagggcttctagtaaacacgtttgccttctttaaaggaggagtatcacagacacttaagccctaagtaattgggatatttgtatagcctgagttttattcatggagatttacattcaatttccattaatcttaataggaagtcattacctaattggcatggatgattgataattcagaa

SEQ ID NO: 765066 - DNA, 610 bp, Homo sapiens
tttgaatttaatttgtaggctaaatattaagtgaccatatatacataggaatgtgagtgtcagtgtatgttcatctgtaagtagttacagaaaagtaaacaagaatcactgcaatgatagaaccactatattctagtttaattatttaatttgtgtatttaacatttatatttatgtatttttcaaccaatttgtgcaaaattaattgttaaataataattaataaagtatatcctacytcctatttgccacatattccatgctgcaaaattagaatgctataaagaaaaagtatgttcctagaaatagttatcagatctttatataatgcatatcaaattataactagttgaaataagtactgaccaaatttccaaattttaaagccattttaatgttataatggaaatacattaattgtttgttattattctgtcttctacagacaacttcataaaagggcaataaatagaacttacatttatcattgtttttattagaagaaaccccagctatgataattattctacttttcagataagacctgtgattgggaccaagagacagagaaacagataaaagtgataaaaataaaagtgattgaagcctt

SEQ ID NO: 765067 - DNA, 621 bp, Homo sapiens
ggaatagcactctcagcagcaaagatagatgagacaaggcagtaagtatattgcctccagaagtctggaaagaaatcaggagcgacctttcttagttaatatctccattaggtataaaagatgttttgtttgtttgtatgtttgtttctttttgttttaaagcaatgtgagattcttttaaggyattttgagatatcctttatttcaaaaacataactacctgtacattttttctcttaacccaccagaggctgtgtgttgttcaaaattaaaattaaaatcggccaggcgtggtggctcaatgcccgtaatcccagcactttgggaggccgaggcaggtggattacttggggtcaggagttcaagaacagcctggccaatatggcgaaagcccatttctactaaaaatacaaaaattagccgggcatggtggctctcacctgtaatcccagctacccaggaggctgaggcaggagaattgcttgaatctgggagatggaggttgcagtgagctgaaattgtgccactgcactccagcctgggtgacagagcgagactctgtctcaaaaaaaaaaaaaaaaaaaaaaaaaatttaagtcaagaaaacaagccatgggatcc

SEQ ID NO: 765068 - DNA, 725 bp, Homo sapiens
agtggtaaggtttacacagtagtattacagccttttatttctttagggcttctttttgttctcaaggttattattattactgaccatatattactgttataataattgaatatgttaagaatctatggatatatttcagttttcatatatatatgtgtatatatatatccttataagtaatgcttagatgtttttattactattaaggtgatatattatgataaattttatttggaactaaccattgttttattatgatggtacaaaatcaaagcttcaactaataaagccaaattaaaagcattatatgacaagaatattttcacattagtgttgacattttcagtgcaacacacacacacacacacgtctaacattgaataaaaggtaaccacattgtgtattgcaacattcagaattaaaacatttaagaaaatgtaatttttaaaaattaatttatttctttacacatgatgttacagtgcataagttatttacaactgcagtaatgtgttgcaaagtaaattttctagaaggcagcaaaagtacattgcgaatgtatataaaactgtacagtgcttacgsatgcactttttatatgattattggctctgtagtcaagttatggtctcagaaagagaaaaaaatgcccaagattaaatgaaaaaattgacaaaccacgtggatttgactccattaaaaacactacggggatcctggctctg

SEQ ID NO: 765069 - DNA, 508 bp, Homo sapiens
gctcttctggatacctggatagctgttaaactattgtttgatctgcttgtatgcaatccatttgcagcaattgaaaccactactattatgtatttcctctgtgcttttataaaagattttcagtcttttaaagctaaagaaagtaagtgaataaattgtatctgggaagtatctgaaaatagtgtgaagctggagtttttaracatataccagctcaacatgaggcttgggattttatagaatggtttgtcatttatacttctttaaccactcaacattttgatttttaatgataataacatgtgtatttttatgctaaggttactagtactactaacaacattacaaaaaatagcagaaaaattctgctttctcaatttgtaagccagaagccaatatattaagtagaagaatacaatgttaaatataatgacagtacatttcaggtagccaaaacgcattattgtttctatctgttggggtgtgttacaggtgatatacatatata

SEQ ID NO: 765070 - DNA, 508 bp, Homo sapiens
gctcttctggatacctggatagctgttaaactattgtttgatctgcttgtatgcaatccatttgcagcaattgaaaccactactattatgtatttcctctgtgcttttataaaagattttcagtcttttaaagctaaagaaagtaagtgaataaattgtatctgggaagtatctgaaaatagtgtgaagctggagtttttaaacatataccagctcaacatgaggcttgggattttatagaatggtttgtcatttatacttctttaaccactcaacattttgatttttaatgataataacatgtgtattyttatgctaaggttactagtactactaacaacattacaaaaaatagcagaaaaattctgctttctcaatttgtaagccagaagccaatatattaagtagaagaatacaatgttaaatataatgacagtacatttcaggtagccaaaacgcattattgtttctatctgttggggtgtgttacaggtgatatacatatata

SEQ ID NO: 765071 - DNA, 558 bp, Homo sapiens
agccacatattagagtgctagctcattttcctggtctgccagccatgattttattttgtattttcaggagagtcacccagaggcctagcctactcctttcccagcactagccattagaggtgcctatttcctgatgatttacttaaatttgaaacatgttacttgggatcaagtttctttaatagttgtaaaagtagtcataaaatatgcattgcagtgctgggaaaacatatccaccttgatttattacagaataytggatagttattggataatgagattatttcctaccacttgaagattcagctgttgccaagtaaactctaagtatttcatcaatggatttgtaatttgtggttgatggcaatgtaatactttgtaaacttgtacttccaagttggtctgattcatacatacagatatagcattttcaggctcataaatgagtcacaactttaaaatgggccctttcaagttataaaagtcggcagtttgaaagcattcatcctgcatctgtgacttgcaaaacatcaatgctaagtataatgtttgccaaat

SEQ ID NO: 765072 - DNA, 552 bp, Homo sapiens
ttaggagctttgcatacatacttcaaatttgtcagctgcaggctttattaaagggtgatttgagtgggggacatagaacagcaatttcaatacctttacatattttgtgtcttctctgaccatctgaccagtgcatcggaagtcttttctgctcttctgccatgaaagcagaagcctgaggtgacagcgtcttgggaattgaaacacagggcaaagaagaggtctcaacagttactatgcaagcatttgcttgttctcctggtatcagtacagtagcttgctctctccagtgtctgatgccctgcagtaggtccacagaccttgtgttgtactgtctccagataatagattttcagacttctgccaggttgmgaaagaacagttagtgtttctacaaagcagaagaggacatctgtgtgtctaactgcctctatgccttttttgaacctgtcctccctttcgaaactctatggttatccccacatgcagaagtactggtgccaacagtgcctaagtcatgggtgaggggtttggttctcagtgcatgtgcgg

SEQ ID NO: 765073 - DNA, 476 bp, Homo sapiens
gttttaaagctttatattgatgctgcatagtcaaaggtgaatttgctggttattatgctattctctctacccggcaaacccatccttccatattcactttgagatattggagttgaatctgcaaatcactttgctgcttttgactggctttctttcrgcttaactgatatcaagcactagagagagactcgaggctataggagggaaaataaactgtttcatctggtttgctttgtgattgtttcctgtttgctttgtgattgtttcctatttgcttcctacttccataagcatcatcttatcaatacttctaaaatgaatttctgataagggaagttgcagtacctttcagtagcagtgtttgaatccatttcatattttttccaacacttttagaatcaaccttattatatttcccttaaaaaccctagcactgtccagattgtgccatcctgagagacatcagattcagttcc

SEQ ID NO: 765074 - DNA, 564 bp, Homo sapiens
tgcctactgtgggacaaagatcagtaaagagcagtaagactcagcagacttctaagggatgctcccctccattccactccaacccccacctcgctggggagggaaatgaagggctgccaaagggccactagggggccacacaaatctatctggggctgttgaggaggacttcacaaggcaatgaggcttgaactgactaccagacttggaatctcgccaaactgggaaagtacatcccacataaacytctgcaaaggcctggagagcctagcttgggatgtgaaactgcagcatgaggatattatcctcaacacccacagggcttcccagtgggaaaatagctccaggttctcaggcatatgcctaaaccaagtacaaaagtttctgctctagcaagatcaacagactatgtgatattagaaaatttccacttttctgattataaattacccagtctcagaactatcatattccagtgtttaatgctatctaatatttgaaaggattttttagaagttgcagcaatcctgtatgttcagcctataaatatcattcctttctgct

SEQ ID NO: 765075 - DNA, 657 bp, Homo sapiens
taaatgtctatcttaggatgaaaaatttaaattttaatcagaactgctcccttgataagaggtgttagctatagagggcatggaattgttttttcagagatcattacacatagtggttgtctactcattgtagatatcaccagtgaattgccattctggtgggggatgcccctggctgcccccttactccagtttcctcaaattcactatcttttggtttttctttttctttctttctttttttttttttttttgagacagagtctcgctctgtcacccgggctggagtgcagtggcgcgatctcagctcactgtaacctccacctcctgggttcacgtcattctcctgcctcagcctcccaagtagctgggatcacaggcgcccgccacgacgcccggctaattttttggatttttagtagagacggagtttcaccrtgtcaaccaggatggtctcgatttcctgacctcgtgatctgcctgcctcggccttctaaagtgctgggattacaggcgtgagccaccatgtccagccagtttttcttaagatacttttgtttttctgaaaaaggaattttttttttcaattttcttggttggtcactcatctcagcctttccagtcaaatactgctttcttccttagtattttcttcca

SEQ ID NO: 765076 - DNA, 520 bp, Homo sapiens
atcggatttagatttcacatgattagatatcctaccttgatagtcacccagcacaccctcagatcaaatcggggcccaatgcactaagcaaatcataaaagtggcatcagataatctgtatgacttgctagcattggaaaggtcatcttytttgtgtgtctcattttctttatccatatggtggacatatgtaatctctgattggaatgctagaaattattgacctagaataggaaaataaaagtaaatatataactagctgcacaaatgaatgagtttattgttgctgtttttgctgttacttatacttttcctactgtaaactggatccgcaaatgacttagaagagagcctcagatccaaaagtgaaattaaggtacctttcggcttctcctttgaagacttttatctagtagccccaggataggccttaaactacatctaaaatataataatatctaaaagatagatattgcatctttgttgtgtaaggactgtgacccaaggggttctcccagcc

SEQ ID NO: 765077 - DNA, 602 bp, Homo sapiens
gccttagtttattatcccattcaaatatttccttcatgtccccagtcaagcctggcacatttagatgaagtagttcctctcaggggttggctgtcagtgaacagagtcctgtcttggctacacaccacctcattccatctcctctgacagatgcctgattccctggggttctgccaatgagccgactatgggtcagctcagtcagatggacattacatctctttgtcttagctgagagaggaggtcgagcattaaacattttccctctcactgctattatcttattggatttaatcttttataaaatatgttgaaaagctatttgacttcaggctatgtctgctttctgcagggcaaatatccttgaggcaagaaatayaaaacactctggcatccattttaaaatgggagagagtggaaatgaaaatataaagcaaatcagctccaattagaattgaatgataatattctgctatatcattctggtgggggtgtcataaaaagggtcagaaaataggcccccttttacaacaaatcggttaaaaaaatctgtctacatacacacacatacatatatagttacagttataattaaaggtata

SEQ ID NO: 765078 - DNA, 602 bp, Homo sapiens
gccttagtttattatcccattcaaatatttccttcatgtccccagtcaagcctggcacatttagatgaagtagttcctctcaggggttggctgtcagtgaacagagtcctgtcttggctacacaccacctcattccatctcctctgacagatgcctgattccctggggttctgccaatgagccgactatgggtcagctcagtcagatggacattacatctctttgtcttagctgagagaggaggtcgagcattaaacattttccctctcactgctattatcttattggatttaatcttttataaaatatgttgaaaagctatttgacttcaggctatgtctgctttctgcagggcaaatatccttgaggcaagaaatacaaaacactctggcatccattttaaaatgggagagagtggaaatgaaaatataaagcaaatcagctccaattagwattgaatgataatattctgctatatcattctggtgggggtgtcataaaaagggtcagaaaataggcccccttttacaacaaatcggttaaaaaaatctgtctacatacacacacatacatatatagttacagttataattaaaggtata

SEQ ID NO: 765079 - DNA, 649 bp, Homo sapiens
ccaatgaagaggcaatgtagactcccatcgggacaccaaatcaagactcatgggcaccatttagacctgaatggtgggtgggtgagtctccctttgtccagattcaactcgctacttttatttccctttgatttgggcacatctgtcctttcctatgttctttattttggayagatgggtaagtggctttgaggcctttggcttggtagcctgatgcagtctcccattttctgggagtcctggacaggcagaagcacacctggctggccaagtcctttataacccctgttgttgccccttctctcaggccttttttgctttagtttccaatgactgaccattttacttttttctctcaatgcccaaatgcatgcttatccttatttctttgtcacatttgtagtctttgctttggctctttgggccattgtttaaggaaggtcatttggctgtatgaggtcctctgttgtgttgaccctgggacaccagagtcatgttgttctgtggccccaattgcgttaggtcttgtgcctttggggttcactgttggctgccccccgatgctctgggattttcagcgtttgctgtggggaccctcactggccagtacttgggtactctgtttttttcagcatttgatattgttggc

SEQ ID NO: 765080 - DNA, 623 bp, Homo sapiens
gtggagtgcagtggcatgatctcaactcactgcaacctctgctttcctgagttcaagtgattttcttggctcagcctcctgagtagctgggcctacaggcatgtaccaccacacctggctaatttttgtatttttagtagagatggtgtttcaccatcttggccaggctgrtcttgaactcctgacctcaagggatccatctgcctcagcctctcaaagtgctgggattacgtgggtggcatgagccaccatgcccagctgtgttcatttacttgtcatgatcactctgtaggatggttttatcagtgcccttcacagggaaggaaactatagttcagagagattgaacaactagtccaaggtcctttggcttataaatagaagagagagaatttgaaccaggtatttctgacaccagagccctattctctccccgcttcttactgctttcctctgttggggtaggaagggctcttataaagttatttcaactgactggacatgaaagtggttgggacatcttcaaacagtcctcatgactgctctgtactgccgtctctctacttttctagactctgtagtgctgccaactgcactgcctgggctttatggcccatgggctt

SEQ ID NO: 765081 - DNA, 623 bp, Homo sapiens
gtggagtgcagtggcatgatctcaactcactgcaacctctgctttcctgagttcaagtgattttcttggctcagcctcctgagtagctgggcctacaggcatgtaccaccacacctggctaatttttgtatttttagtagagatggtgtttcaccatcttggccaggctgatctygaactcctgacctcaagggatccatctgcctcagcctctcaaagtgctgggattacgtgggtggcatgagccaccatgcccagctgtgttcatttacttgtcatgatcactctgtaggatggttttatcagtgcccttcacagggaaggaaactatagttcagagagattgaacaactagtccaaggtcctttggcttataaatagaagagagagaatttgaaccaggtatttctgacaccagagccctattctctccccgcttcttactgctttcctctgttggggtaggaagggctcttataaagttatttcaactgactggacatgaaagtggttgggacatcttcaaacagtcctcatgactgctctgtactgccgtctctctacttttctagactctgtagtgctgccaactgcactgcctgggctttatggcccatgggctt

SEQ ID NO: 765082 - DNA, 614 bp, Homo sapiens
agggctgaagatgggaatgtttagggcagtgtttgctccttggaatttctgataagaacgaattcgttagtcaatccttattcactcggctgggagcggattgaatacacagtggagaagcttggagaataacttgcttgcacctcctggatttgatagcaaggcatttttttggaccataattagaaccatggaaacacgcactcaaaccctgggctgtgccttgacaaacacttgtactggaacgctgaatcaraggcctggctgggtgctttaaatttactacagtgtaattttttggcattacccttttcgtttggttccgctaatgaaaatgaaatatgtaatttcaccaaagttccactgtaatttagcaattaatgtgcaattattttaatgcattactttctttttagcaaacaaacaaattaggaggttgcatgttttgcctggctttaaattactaaaactagcctctcattttccacatgggcaaatgttgctcatgtgcctcgtaacacatttagatttacacaatttcctagaaatgcagacacaggagggtgagcaggcatgcacactttagattgagagactttcaaaatcaaggctct

SEQ ID NO: 765083 - DNA, 567 bp, Homo sapiens
acactatttacctgtgagacacaatcccctttcagctgtttaccattggcacaaggtggcacttacttttgtgctggctataggtttttgtcagccgtttcaatcccctgtctagtgtactctgctagattttaaaaggagctcctaactagtaaagagatttaagctcaaagcctccattaaacgcttactagtaaagctacactcaggaggaaggaggccctgtgtcgatggagaggctgtaaagcagccacaataagcatctggatcctttggagttggctgaaccatgcacacctttctgcctggaggaggctgtgtgarttcttgcatcatcattctcataggaaatggctcagggaatgagaagatgttgatttcacttattttcttctttgatcttctgggcagcttatagagaatttgaatggaagcattttgttcaacttttctccctgtagcttggtttgcaagtgagtctctctccaatgtgcatgaactccatggctttcctaggtattaaaggctccagaagaacacctacatttacttttctaagtttcattt

SEQ ID NO: 765084 - DNA, 593 bp, Homo sapiens
gtttcaaaatccttctaccaccacactcccagtggccattactggccaacacatgttggcacccaagatataacctgtttgccatcccttccttagtcaggaggcatatttcacctgttgccacctctgtcttgtgacagccacattgctgatgagagaattcaagctttcttgtccagattgtccaatgtctgggaggagtccaaaatcaggggcacttctcaagctattgagccaggagttgtcagttacaggggaaaaaagaaaaagactgccttttttgggcccctttatacaaraaacaaaaatgttatgtttgctttatcatcaattcttctgctaactgtttgttcttttttcctttctgttttctttctataaagaaataaagagtttaaacataggtaagatgaagaactctttcccatataatttgatatggttcgtttgcttccttgtgtttgctttttttgttttgtgcttcttgtgtaatgttgtatatttttatgtaccaaatatagtaacttttttatgtgctaattgtgtgttgtggatatgataagctttagcaattatgaaatgcagtcaaaaag

SEQ ID NO: 765085 - DNA, 596 bp, Homo sapiens
ttgtatttttagtagagacggggtttcaccatattgaccaggctggtcttgcaactcctgacctcatgatccacctgcctcggcctcccaaagtgctgggattacaggtgtgaaccaccgtgcccgggctttaatcatttatttttcattaaaatttttcattacatttttttgtttcaaacagaaatcatattgtttataagaaaggaaatagtccagatgtgtaaagaaatgccttttccaactctaccttccccaacaactaatgttaacagttatctatctatctrtctgtctgtctgtctgtctgtctgtctgtctatctatcatctatcatctatgtgtctacagagatgcataggatattcaccaacttgccatgctgctctcagaaagaattgtattatacacattattcttcagctttattttttcgctcaacaacaagtcacagtttgtagatgttaatctaacttgtttttagtgactacatatgtttcataatatagatgttctgtaatatatctattccttttttaatggtttttagttgtttgctatttctagcaatgctgcagtaaatatccttgtgagtg

SEQ ID NO: 765086 - DNA, 568 bp, Homo sapiens
aacagagcctcccactgtcgcccaggctggagtgcacctgacggtgaaaccccgtctctactaaaaaaaatacaaaaattagctgggcgtggtggtgggcgcctgtagtcccagctacttgggaggctgaggcaggagaatggcacgaacacgggagacgcagtttgcagtgagtcgagatggcgccactgcactccagtcttgggtgacagagcgagactccgtctaaaaaaaaaaaaatccctagccggtcacagtggctcacacctgtaatcctagcactttgggaggtcgaggtaggtagattgtttgcggtcagaagttcgagaccagcctggccaacatgatgaaacctcacctctactaaaaatacaaaaattagccaggcgcggtggcgggtgcctgtagtcctggctacttgggaggctraggcagcagaatcgcttgaacctgggaggtggaggttgcagtgagccaagatcgcattgctgcactccagcctgggcaacagagtgagactccatcaaaaaaaaaaaaaaaaaaaatccccatatctcaagaaactttt

SEQ ID NO: 765087 - DNA, 576 bp, Homo sapiens
gcatccatgccagcatctactgtgctttgattttttgattatagccattcttgcagagtaagatggtattgcactgtggttttgatttgcatttccttgatcattagtgatgctcagtgttttttcatatgtttgttggccatttgtatatcttcttctgagaattgtctattcatgtccttagcccactttttgatgggatttttttcttccttgctgatttgtttgagtttgttgtagattctggatattagtccttagtcctttgtcacatgtatagattgtgaagatttttttctcactctgtcagtcatctgtttactctgctgtttcttttgctgcgtaaaagctctttagtttaattaagtcccagctatttatctttgtttttattgcmtttgcttttgggttcttggccatgaaatccttgcctaagccaatgtctagaagggttttcccaatgttctcttctagaatttttatagtttcaggtcttagatttgagtccttaatccatcttgagttgatttttgtatatggtgagagatggggatccagtttcattctcctacacgt

SEQ ID NO: 765088 - DNA, 525 bp, Homo sapiens
ctttttgaagtctcctaattccttgctgtcttttttctttttgtgtgtgtgcacatgtgtacccatgtgattattaatatttaacacaattggtgtcaccatatattgtgttgcatcccaatttataaaattagaaatatttcctggtatccttgattattttaagtaaactcgaatgttcaagactgcctaagattttatcctattggtctgtcttaatgtatttaagcatgggaatttattcaagattagaaattgggtagaactttgagatttccaatggcctaagccaaggacttctgctttcytattcaaggagaaaaaattgaggatttgttagaaggctattgtctaagtgataataaatttggatcagagaggttcctagaagatttcaaacatgagtaatttaattggctctgttatcaacttatttctcctgagatgatgaaattagtggctatcttcttttatcttgaatttttaaaaaagttgcaaactttgtagtttttcttttccaaaggg

SEQ ID NO: 765089 - DNA, 616 bp, Homo sapiens
tactgtataaaattaccttcaagctatgtgtataaggtatatatgaaacataaatgaatttcatgttcagatgtggttcccatccccaagatatctcattatatatatgcaaatattcagaaaatctgaacaaaatcccaaattcgaaacacttttcatcccaaacattttggataagggatgctcaacctgtaatggaggcttaggagagcatttgatctacctgcaaagytgtctctgttaatataatttattttcattcacagtctgcaaatatttattagtgcctactagtgccaatccctgttctgatagtaaactgttatgagcatttatatgtcacctggcactgtgcctcactgatttaatagtctcattgatttaacctaatgaccttgtgagatagaaactgctaacatccctatcttagagaagagaaaactaaagcatataaaagttaagtaattggctcaacatgctcagctagttagatacgaagccagaaattaacccggatctgctgattgctgaaccctaaactcttaatcattgtaccagagtgtctcaaagtgagggcctgaatttgtgacctgctgcattagaatcacttaggttg

SEQ ID NO: 765090 - DNA, 616 bp, Homo sapiens
tactgtataaaattaccttcaagctatgtgtataaggtatatatgaaacataaatgaatttcatgttcagatgtggttcccatccccaagatatctcattatatatatgcaaatattcagaaaatctgaacaaaatcccaaattcgaaacacttttcatcccaaacattttggataagggatgctcaacctgtaatggaggcttaggagagcatttgatctacctgcaaagttgtctctgttaatataatttattttcattcacagtctgcaaatatttattagtgcctactagtgccaatccctgttctgatagtaaactgttatgagcatttatatgtcacctggcactgtgcctcactgatttaatagtctcattgatttaacctaatgaccttgtgagatagaaactgctaacrtccctatcttagagaagagaaaactaaagcatataaaagttaagtaattggctcaacatgctcagctagttagatacgaagccagaaattaacccggatctgctgattgctgaaccctaaactcttaatcattgtaccagagtgtctcaaagtgagggcctgaatttgtgacctgctgcattagaatcacttaggttg

SEQ ID NO: 765091 - DNA, 595 bp, Homo sapiens
ggagatagagacaagaaaagaagccatttaaaagatcaacaaatccaggagctggatttcaaaaaaattaaaaaaatagatagacggctagctggattaatgaagaagaaaagagggaagattacaaacacaatcagaaataacaaacacaatcaggaataataagagggacattaccactgactacacagaaataaaaacaaccrtcagagaatattataaacacctctatgtaaatgaactagaacatctagaagaaatggatacattcctggagacatacatcctctcatgactgaaccaggaaaaaattaaatccctgaacagaacaataagaagttctgaaattgaagcagtaataaatagcttaccaaccaaaaaaagcccagaaccagatggattcacaggtgtattctaccagatgtacaaacaagagctggtatcacttctactaaaactatttcaaaaaattgaaaaggaggtactccttcctaactcattctatgaggccagcatcatcctgataccaaaacctgacagagacacagcaaaaaaagaaaacttcaggccaatattctagctgaacatcagtgca

SEQ ID NO: 765092 - DNA, 596 bp, Homo sapiens
gctaattttgtatttttaatggagacagggtttcaccatgttggtcaggctggtctcgaactcctgacctcaggtaatctgcccgcctcggcctcccaaagaaagtgctgggattacaggcgtgagccaccgctcctggccaacaatactttctttatttgtttatttatttttgagatggagtcttgctctgtcacccaggctggagtgcagtggcatgatcttggctcactgcaaccactgcgtccmgggttcaagcaattctcctgtctcagcctcctgagtattacaggcacctgccaccacacctggctaatttttatatttttagtagaggcagggtttcaccatgttggccaggctggtctagatttcctgacctcgtgatccgccggcctcggcctcccaaagtgctgggattacaggcgtgagccactgcacccagcccaacaatactttttaaatgaagcttgtataacattattatgccagtatttgtataacattctatcattttctgaagaagtatatttattcatcaatgtgttttagtgtcaagtaatgtattaatccagactttcaatgttcaaatcaga

SEQ ID NO: 765093 - DNA, 634 bp, Homo sapiens
tcaccctgtcacccaggctggagtgcagtggcacaatcttggctcactgcaacctcctcctcctgggttcaagcgaatcccctgcctcagcctcccaagtagctgggactacaggcacctgccaccatgcctggctaatttttttgtatttttagtgaagatggagttttgccatgttggccaggttggttttaaactgctgaccttaagtgatccacctaccttggcctcccaaagtgctgagattacaggcatgggccactatgcctggcctgaacttctttaaagggattattctttgtctatcattctgtagatctatagctctccattcctttagggtccattgttggagctttgttaatttctttggaggtgccctgattctttgtaatctttgagtttttgcattggtctcctcatttgtggagacagccacgtcttscaggtgttctttggcagggacagaatttcactgtttagtgatcactgggagatcactgcttgtgattctgtatgggctggtaatgactccaagcaggtagagcttgctttctgttactctgtatggctgggctgctacctttgcattgattttggagaggggattgtgctggctgggctctgctgttag

SEQ ID NO: 765094 - DNA, 634 bp, Homo sapiens
tcaccctgtcacccaggctggagtgcagtggcacaatcttggctcactgcaacctcctcctcctgggttcaagcgaatcccctgcctcagcctcccaagtagctgggactacaggcacctgccaccatgcctggctaatttttttgtatttttagtgaagatggagttttgccatgttggccaggttggttttaaactgctgaccttaagtgatccacctaccttggcctcccaaagtgctgagattacaggcatgggccactatgcctggcctgaacttctttaaagggattattctttgtctatcattctgtagatctatagctctccattcctttagggtccattgttggagctttgttaatttctttggaggtgccctgattctttgtaatctttgagtttttgcattggtctcctcatttgtggagacagccacgtcttccaggtgttctttggcagggayagaatttcactgtttagtgatcactgggagatcactgcttgtgattctgtatgggctggtaatgactccaagcaggtagagcttgctttctgttactctgtatggctgggctgctacctttgcattgattttggagaggggattgtgctggctgggctctgctgttag

SEQ ID NO: 765095 - DNA, 660 bp, Homo sapiens
  misc_feature 505: n = A,T,C or G
agagtggatctatctgtaaggccctgggacaaccccccagtgggccactcctcaggcctcctgaagccacatgcaagtgcatgacgacgctggtgctgggcagggtttgaaacaccacagaaagctgtgggacagggtttctgccagtgacagaggccccaggcaggtggctctcaggatctgaggagctcctgctttggctccttttgtccccagggtggcctccctggtgctctccacctcctactccttaggatgtaggacactgtgtaggtgagagtgctggccacctagttgcattgttgactccagctggcatcatgacactgcagctctctgggtggacaggaatatcagtggggctccgggcttaggcactgttgggccacagagcaggakgtagtctggtagtgtctgggctctacctggcgccatgctgcagcctcttgggtgccagcagattatgtgggactcagcgtgtactctttctttggaataatgcctntgagtggactccaggcagctttctaaactagtctctgggccagtgaggactaaggggctctccagttgctaggattgcaggaattcatggtgggaatgtggatctgtgtagatgtctcttgtttttcccattcgtagtgggtagtttctccaggc

SEQ ID NO: 765096 - DNA, 660 bp, Homo sapiens
  misc_feature 505: n = A,T,C or G
agagtggatctatctgtaaggccctgggacaaccccccagtgggccactcctcaggcctcctgaagccacatgcaagtgcatgacgacgctggtgctgggcagggtttgaaacaccacagaaagctgtgggacagggtttctgccagtgacagaggccccaggcaggtggctctcaggatctgaggagctcctgctttggctccttttgtccccagggtggcctccctggtgctctccacctcctactccttaggatgtaggacactgtgtaggtgagagtgctggccacctagttgcattgttgactccagctggcatcatgacactgcagctctctgggtggacaggaatatcagtggggctccgggcttaggcactgttgggccacagagcaggatgtagtctggtagtgtctgggctctacctggcgccatgctgcagcctcttgggtgccagcagattatgtgggactcagcgtgtactctttctttggaataatgcctntgagtggactccaggcrgctttctaaactagtctctgggccagtgaggactaaggggctctccagttgctaggattgcaggaattcatggtgggaatgtggatctgtgtagatgtctcttgtttttcccattcgtagtgggtagtttctccaggc

SEQ ID NO: 765097 - DNA, 666 bp, Homo sapiens
gactgtttgagaccttctggggcctggctgatgggaagagaggccagaataaggccaaagaagggttaagggagtttgtgtaggaatttgtaagccttgttaaggagttagaagctattgaaacaagagagtagcatgatctcattaacttgatttaaaaagattgtcccagcttggctttctgttattagttattggtatttgctaactgttcattcattcatctgtcaaatactaaatgtttactctgtacagattaatgacctatatactgtaaggactacaagtatgaccctttccttaaagttcttacagtccacgggctaattttcttgtgttctcttgttcatctattattttttattccccttgactttgtggcctggtaatatgtcgacctgtcatattaatactttgtattccttatttctrtaagcctaccagatgtgatccttattagataaataactccatttgtaaatttcaatgtgagatcaactcttttgaactctacaagttatttttgctttgcttttgcctctgtctagagttcttacgttaagagatcaattggttgcagtacactctgtgatgatagataggctttttaatgtatataattagagattaaatgttcaaattatcttttgattcttatccttcagt

SEQ ID NO: 765098 - DNA, 632 bp, Homo sapiens
aaggcactgagagctctcacatctgccaagcccctaggatccgcgtctgcctgagagtgaggttgggacaaggctgcaactttcaactctcagcacagacaacaggacgcttaatgtcatttctcagggggcactctgggatgccttgwtgacaagaataattaggctgtttttgacttcttcacctcctcctttatctactcctcttggtgtttatggctttggtgaccaactgtctttggttcccccaggctgcctcaagccttggtcctggttctttcatgttccctcttggccctaatgggctgggcaccttgtcctcacacctgcatcactgcagcggataaactaacccaacttcctgggatgcactgagagaaaagtacaaaaactaaagcttccctgaaattcactttagctgtgcaatgcataccttttctggtttcaaagtctgctgttgttgttattaataatgggtctgtagtttcccatttgtctgttttgtgacattaattctacactcatcagaggaaaagaagggccatttgtatttaaataattcaggattccgaagctgcttgtctactctctatccttatgtccaaaatcagcaagtgtgcagtatttggtta

SEQ ID NO: 765099 - DNA, 632 bp, Homo sapiens
aaggcactgagagctctcacatctgccaagcccctaggatccgcgtctgcctgagagtgaggttgggacaaggctgcaactttcaactctcagcacagacaacaggacgcttaatgtcatttctcagggggcactctgggatgccttgttgacaagaataattaggctgtttttgacttcttcacctcctcctttatctactcctcttggtgtttatggctttggygaccaactgtctttggttcccccaggctgcctcaagccttggtcctggttctttcatgttccctcttggccctaatgggctgggcaccttgtcctcacacctgcatcactgcagcggataaactaacccaacttcctgggatgcactgagagaaaagtacaaaaactaaagcttccctgaaattcactttagctgtgcaatgcataccttttctggtttcaaagtctgctgttgttgttattaataatgggtctgtagtttcccatttgtctgttttgtgacattaattctacactcatcagaggaaaagaagggccatttgtatttaaataattcaggattccgaagctgcttgtctactctctatccttatgtccaaaatcagcaagtgtgcagtatttggtta

SEQ ID NO: 765100 - DNA, 390 bp, Homo sapiens
aaatagacttcactaaaatagttcaaccatgttatcaaacatgtcaataaacaaacaacaacaacaaaccctggagagtggggaggagtcagtattcatggctgttacaatatatcattttaaattcataatttttctacmaaaaagtgcaaaacacaaaaaagaagaaagtgtgacctatacatggaaaaaacaaaacagagaatcaaagctgcctttgagagggcacagatataatatttagaaaacaaagaatttaaagcagttattataaaaattaactcagaattacaaactgaaatttaagagctaaaattctaacactcgtagaagaaaatgtaggtgtaaatctttgttatcttgagataggcaaggtcttcttggatatga

SEQ ID NO: 765101 - DNA, 676 bp, Homo sapiens
attacctcagtgacctgggatccactatagaacataaagcctggaggtgttaatagcaccttgcctggaagaatcagaagatttacagctctaggaagtattggttgtatccattataaaggagtttattcaaactgcgaagtctaaggcactactccccacaaatttgtcttcccttcagacaccagctgcaattttagggtccccagggacagcatcacttcatatcagctggctcgaatttaggggtcaccacaaactccctcgggctggataattcactagaatgactcacagatctcagaaaagtatacttgcattaaaattttattatagcataaagatacaaaatagaacaagctaacaaaacagacacagggagaagtctgggagggttccaaacataaagcttctgtcatcctcaggtgtgcgttaccctcccatcatcaacgtgcagcaatacacataaagtgtggttaaccaggaggytcacctgagcttcagtctccagagtttttataataatgcattatgtatatgattaattaaatcattaacaacataactgaactaatttttcagcccctctcccttccaggagctcaagctaatcttgcatagctcaaagccccaaccatctaatcactcaagtggtcttcctggattagctagcctc

SEQ ID NO: 765102 - DNA, 584 bp, Homo sapiens
aaaaggatggaagtgccactcctgggagctagggctgaggttacacacactgtcagcaactttattaaattattcactctatatgcagaagaaggaaactctgttaaggatacatattcatttatttaaaactatattttggaggttctgtggttatctggaagttttcttagtctctggtgatatagcacttctaaatgaaatgatgactggcctctcctgcgtggaaacaggcatggagctgtggccttggtgccctctgactcttcttgaaaagccttggggtcctatttcattctctgaagaacttcaaagccctcttcaagtgtttcgggatttkgggatgaggagcacagtcattatttctgttttgaggctcccactcacaacacacttttttgttccctaccatctagccagaattgatgctcagtgccttccgggtttgccacaaaaacaaagagaaaaggacaaaaccaaccaaaactgatttctaacatgcacacacttacactcaatgtcccagtgagaataggagcaatcaaagagtttctatttcagaaaagtaatcaacttcgaattga

SEQ ID NO: 765103 - DNA, 530 bp, Homo sapiens
gatagatgaaagatgaaggcccaatgtaggtgagaaaatttaatggtacatatgttgcctcatagtcagaaacagagcactggttcactcttcttaacccacatcatgggttaaaaagaacattgccaggagggcttcactrttctataagggcatcatttgttaggtcctttttccatggtttggagtaaaagaggcaatgattaaaaatgtatccctcatgataggctctatagcagattctactgtaaaggctatggttacacaacagaccttaaattctcttgtgaaagttatgctaaataatagatttactctagattacttactggctaaacagaagtatctgtgcagctgctgacacttgtggcacatggagaaaacattgggtagtatagagattcggttgtaggggattagaaaagagactgcttagttaagcgagcagactctttatctagctcattgtttgatctatttcattttagatggtttggtttatggggatcctgggtaagaaccatactcca

SEQ ID NO: 765104 - DNA, 589 bp, Homo sapiens
tctagctcattgtttgatctatttcattttagatggtttggtttatggggatcctgggtaagaaccatactccaaactctcgatattatattcccaatagtcataatagtagtctccctggtgcactgtgttctctcaaaagttttcaatgyctgcatgcagccatgtctggaatgtctaatggtctctcttcaactagaatgacaagacctgaaagaaatatgtgaccatgaggacaccgtaacctatgaatgacatgctgagaccagaaagccaaaatgatggtaactcagagtggtgctagggccctaagttttggtcacattctcacctaagtgagaacctgattaaaaatggggaattttcttgtctctatctctttcagctctactctgatcttagttattttttgtcttctgctagtttttgactttgctcttgcttctctagttcttttaattgtgatgttaggatgttgcttttagatctttcccactttctaatatgcttatttagtgctatacatttgcctttaaacactgctttagctgtgtcccagagattctggtacattgtgtctttgttctca

SEQ ID NO: 765105 - DNA, 589 bp, Homo sapiens
tctagctcattgtttgatctatttcattttagatggtttggtttatggggatcctgggtaagaaccatactccaaactctcgatattatattcccaatagtcataatagtagtctccctggtgcactgtgttctctcaaaagttttcaatgtctgcatgcagccatgtctggaatgtctaatggtctctcttcaactagaatgacaagacctgaaagaaatatgtgaccatgaggacaccgtaacctatgaatgacatgctgagaccagaaagccaaaatgatggtaactcasagtggtgctagggccctaagttttggtcacattctcacctaagtgagaacctgattaaaaatggggaattttcttgtctctatctctttcagctctactctgatcttagttattttttgtcttctgctagtttttgactttgctcttgcttctctagttcttttaattgtgatgttaggatgttgcttttagatctttcccactttctaatatgcttatttagtgctatacatttgcctttaaacactgctttagctgtgtcccagagattctggtacattgtgtctttgttctca

SEQ ID NO: 765106 - DNA, 562 bp, Homo sapiens
gtcagtcagcctcctgtgcctcagtttctctatgtccacaatgagaatgttagcacctttctcctaggttcatcgtgttgactagctgggctagtgttctaaagcccttcaaacagttccagacacacagtcagttctgcttcattagtagctgctatcattatggtttccacgacaacatgccatctgaccctatttatgccatcctccctggcctgggagccaaggtcacggtaraacacctgatgagtcatgcctaagtttttggcatctttaaccaagacagagatcagtaatcaaaagtaaaagtattcagtaaaacagatgaatccacataccatttttgaatgttgaaatatgttcatcagaacaactttaaaggtaaattgggtcgagagcatgatttagtacaaaggtcagtaaagtatggcccatgggtcaaatccagctgtcacctgtttttatagaacccatgagctaagaatcattcttacactgttaaatggttgaaaaaaaaaatcaaaagaatgttaacattttgtgacatgtgaaaattatgtga

SEQ ID NO: 765107 - DNA, 610 bp, Homo sapiens
attttctaaagtagtcacaaatttttgcatttccaacagctgtatatgagagctctagttgcttcgtatgtctctagtactttgcatggttagtttaaaatttttttaaaaaaatcttagctcttctaggtgtaatggtatctcatgtggttttaatttgcttttctctaatgataaatgatgtgaacattttttcgtgtgcttattttccatccacgtatcttctttggtaaagtgtctatacaaatctttttctgttttttatttgtattgagttttgaaagtttatgccttctctttgcaagttctttatcaaatatgttcttagagagtattttcttcccagttgcagcttgcttttaaacattttactgagtgtccttcaaagaraaggagattttactttcaatgcagaccaattgtttgatttgtttcttatattgtttatgtttatgtgtttgtctaagaaagctttttaaaatttattctcgtttttaaaaatgtttattttagattctggggtacatgtgcaggtttgttctataggtaaatttgtgtcatgggggtttgttgtacagattatttctttatcctgttactaagcttagta

SEQ ID NO: 765108 - DNA, 485 bp, Homo sapiens
cccgatagtgctaaaaaggcctggaagttcagactgggcagaactcaacacagcatggcaaagcagctgtggccagactgcctctctagatttctcttcactgagcaaggcatgtctgaaagaaaggcagcggtctcagtcaggggcttacggataaaactcccatctcgctgggacagagcacattggagaaggggyggctgtgggcgcaacttcatcagacttaaacattcctgtctgctggctctgaagagagcagcggatcctgactaggagggttctaccagcacagtgcttgagctctgctaagggacagactacctcctcaagtaggtccctgactcccatgcttcctgactgggagagacctcccaacaggggttgacagacacctcatacaggaacgctctggctggcgtcaaggcagtgcccctctgggatggagcttccagaggaaggaggaggcagcaatctttgctgttctg

SEQ ID NO: 765109 - DNA, 587 bp, Homo sapiens
agggcactctattttactaaggccaccaactcaaatgctaatatcatccagaacctactgtcacagacatacccagaaacagtacataatctgggtactctctggcttacttaacacacaaagtttattgcagcactattcacaatagccaagatatgaaaccatctaagtactcatcaatggaagaatggataaagaaaatgtggtgtatatatacacaatagaatactattcagccataaaaacaacsaagtcctgttatgttcaacaacatgaatggaactagaggtaactgtattaagtagaataaatgaggtggagaaagacaaatgttacatgttatcacttcatatgtgagagatataaaagttgatatcattcaggtagagagtagaattatggttaccagaggctgagaggggtggggtgaagagtggctggttaatgggtataaacatacagtcacatagaagaagtaagtcctggtatttgatagcacagtagattgaatatagttaataataatttattgtacatgtcaaagtaggttgaagagatttgaaatgttcacaacacaaatgaatgat

SEQ ID NO: 765110 - DNA, 598 bp, Homo sapiens
gccttgcctccctcacttgccagcctctccaatcataaaggaacttcaagcagagaatgggagaagttgtggccagtgtgaccccaactctcattccaaggccctcttcatcaccagcaccttctcctttcctcaacccacctcgcctctgaacaatgagtcccagttttgcagtaccagagattgaggggcagggcagttagatgcgtctctgcaagtttcctgagatggtgatggcaggtggcagggcaggacccaggtatcctgcctcctgggyctgggctgtgcctaagaggaaaagaaggacattattaaaccccagggccaatccctgagcctaagtagccctgtgccactgcggatgtggcagcaccttttgaggcaagtagggataggatcttttaaaaataagagaacttctgatctcccttaagttggccagagagcccagaccactttccctcctcagtggacatgggacttgaaatgcaaacccgccttcggcactgggatcagcagtaacactggcgagtcttccgaagactgggtggttggctgcgttccccacattccccacactcagagaagccctctctcc

SEQ ID NO: 765111 - DNA, 612 bp, Homo sapiens
aggaggtgatataaaagcagagagagccacgtgaaggatggctagggggcttggggtcgagcagaaagaagtttaagtataaaatccctgagaggaggagaacttgaaaggtttggcaaagaggaaggtcagtgtgtcaggagaaggccgaggggtgaagaagaggggagccaggttagaaggactggcagaggacactgacctgagagctgaccaaggcgaggactttggggggtcaggggcttggcaaatatgatcgactcagtatggccgttcatactgttgccttttccaggccacttctcctgctgggggcagtgaggagcctgcyagccctgctgctttggaaagcccagaggaccaagaaactgaggctgcaggggaaaggtggggagaggagaggcaagcagcagcaaactgctggaacgcctgcaaatgggctgctccgaaggctctggggccttggttctgctctgcacagagctggctgtcctggctgacatctgttgtgacctcttccaaagtgacttcgccccatctctctcagaacgagcctggacagtgggtgtgaataagcccagtaatcctcgatgaggaagccccgtgtccacg

SEQ ID NO: 765112 - DNA, 586 bp, Homo sapiens
aaaggagcatctctcttaggtgcaagaagctagtttttcttgtaataataattaggctgtgagacacccagagagcaaacttaattgtaaagaaaagggaaaagaaagaaaaagagaggggaaaatcatgaaaacacctgttgggctccttcacattgcctgggagagaagttcagccagaatctaggaggagccttggactagctgcatgtccagtccgcagccagtggccctggtggcaggtggcaggtaacttcggggtgagcacgcaatccctttgagacaggcagtgagcagtgggcctggrgtccactctgatgaaagtttacagaatttcagtattcctccagcctactcacagtgcatgcacacacacacacacacagacctagaaggttttggaatggtcggtcctgtggggctgaaagtcactggacatctgggggagctttctaccttttggtgaccaaggagctataacatgtaggaaaacttcctaactagaaacaccctttccagcccagtcactatgctggatcccttctgaaggactcaccatttccgaatatctgagtgatgagggggc

SEQ ID NO: 765113 - DNA, 491 bp, Homo sapiens
aacaacatcaaagaaagctggacaaattaaaaatcaatgactgtctttgacctaatacatatgtgagtttgcagggcaagctgtcaccctgaaatgtgaagagacagcacatacagagagtaacaggtgagatctgcctacctgacatgcaagacactgaagccaaagatgctggaatcagaaactccttgtaatagcacatacaatatgtccaacttttaaccaaaaattataagacatgtaaaaaggcaagaaagaaattctaaagagaaaaagcaaggcagactcatatatgacacaaayattggaaatatcagacaggaaatttaaaatggctataattaatatgccaagggatttaatgaattagtaggtaacattcaagaacaggtgggtaatataagcagcaagaggaaaactccaggaataagttttaaaatgctagaaatcaacaacacagtcacaaaaagaatgccttcaataaggttatc

SEQ ID NO: 765114 - DNA, 631 bp, Homo sapiens
gaaggaacttagagttggatcaggctgaatttattgatttgggcccactaagtagggactctgcatttaatgttgcagctcagggagtttaaaaatgttctgatagtttatttgcttggttagctgaaatatggattaaaagatggcctactgtgaaagagttggaaatgcctgatctcccttggtttaatgtaaagaaagggatccaaaggcttagggagattgggagggtrgagtggattagtcactttaaacctactcatcccatatggaggggtccagaagatatacctttggccaatgccttgagaaatagatttgcaagggcagcaactgcatctttgaagagccttgtaattgctcttctctgtatgacagatctaacagtgggaactgcagtcactcaactgcaaaatttaaagacaatgggaattattggacctggaggtggcaggggccaatgacaccactcaactgtcaaaagcaaggtgggtgtagctgccatcatggacagaataggcaaagtggcaatcagaataaactgactcttgtagagttctggcactggctaattaatcacggtgttcctagaagtgaaattgataggaagtctactgcattcttacttaat

SEQ ID NO: 765115 - DNA, 454 bp, Homo sapiens
tgttttatgttgaatacataacacacacacactgtttaaaaaactaagttgcgattgatggctttctaaaatgtgactaatgtgcactacacatttctaccttactcattcctatctgattacttacacattgctaccttattttccgtgatttttggcttgcagatggtggttggtttcctacaacatttttccttgtttcttgggtmgagaagcaatctaattgcatcatgatcttttgtcctcctcctctgttgggatagaggggaggaaaagaggtgggttcagacttttcagaaaaaaaaatacatgtaaattttatgtttgccaacagagctaacatactaaaagtattcatgtctatgaataaagtaaattactaagtctatatcattaataaagacacatgaaacctttcacattatgtcaaattattagaattaagaagcttgag

SEQ ID NO: 765116 - DNA, 524 bp, Homo sapiens
acaatagcctttaaagaagtaagtactatgaacacctcagtgtttatggtttgtcctgtgagattaaaaattgcatttgtctgggattcctgggcccaggattgatttgggagatgcttggggattcagagttccgggaagggaggaggagctcgattctggagcatccaggtgttgtcttggaaacccaagcaccagaggggctcmaggtggaagcgctgagcaacaatgtgcacacctctatgaacctggatgaaatgggaagcctggagctcactctccgaagctgggaaacatgaatggacttggagactcttatagtgcagatccaccgaaaccacagagcccgacaggtggggctgagatgaagtgtccatgaaaggagcgaggaacatggcaggagctcacccaggacaggcaggggcagaagcacagaagcagttgccgaggctctttggtgatttgttctgtgttaagatgggagctacttgagcaccttggattgctggtggaaatgatctagc

SEQ ID NO: 765117 - DNA, 619 bp, Homo sapiens
gcctaccttcagtggttatggcacttatggctatttccacaaagtttaacgttcgggtgtcctctaattcttccctgaatgcatgcttatttatttccccagtttttaagccaattaaggggaggactgtttctcacacatcgtgtagtcgtacagcgaagggcagaaagggatcaagggcaactgtattcctgtgagtcaaggacagaaatgattaacttaagtataggcagatggctatgcatggctggagacccagagggattctctcaccagaagggccaggcctctgrccttccaatccccacagaactgtcccatggtcaacgattccacccaaccagggagaggatccctgaggtcctctgagacttccttaccagcagaatcataggaaacctcatcagtagccatagagcatggacactggtcagtcagaacagacatccgaatggatatcggccctgcctgagggaatggttatatcctccagacctctctggactgtctggagattaggcttggtttgtgttcttttaggtgatggtcagtcagtgtggccacaaggagaggggacacaggagaggtgagggaaaaagtttattatactctcaggtcc

SEQ ID NO: 765118 - DNA, 619 bp, Homo sapiens
gcctaccttcagtggttatggcacttatggctatttccacaaagtttaacgttcgggtgtcctctaattcttccctgaatgcatgcttatttatttccccagtttttaagccaattaaggggaggactgtttctcacacatcgtgtagtcgtacagcgaagggcagaaagggatcaagggcaactgtattcctgtgagtcaaggacagaaatgattaacttaagtataggcagatggctatgcatggctggagacccagagggattctctcaccagaagggccaggcctctggccttccaatccccacagaactgtcccatggtcaacgattccacccaaccagggagaggatccctgaggtcctctgagacttccttaccagcagaatcataggaaacctcatcagtagccatagagcatggacactggtcagtcagaacasacatccgaatggatatcggccctgcctgagggaatggttatatcctccagacctctctggactgtctggagattaggcttggtttgtgttcttttaggtgatggtcagtcagtgtggccacaaggagaggggacacaggagaggtgagggaaaaagtttattatactctcaggtcc

SEQ ID NO: 765119 - DNA, 607 bp, Homo sapiens
acagacgtatattaagaaatcattcttggccaggcgtggtggctcatgcctgtaatctcagcattttggaaggccgaggtgggcaggtcacctgaggtcaggagttcgagaccagcctggccaacatggcgaaaccccgtctctactaaaaatacaaaaatttgccaggcatggtggcgagcatctgtaatcccagctacccaggtggctgaggcagggagaattgcttgaacccaggaggcggaggttgcactgagctgagatcgcaccactgcactccagcctgggtgacagagtgagactctgtctcaaaaaaaaaaaattattcttaaccatctaaaatttaactcataatggatcaaaggcctaaatggaagagccaaaactataaaactcttaggagaaaacataggggtaaatgytgatgaccttggatttgggaatggagccttacaatatgacaccaaaagcacaagcaacaaaagaaaaaagtagataaattgaatattactaaaattaaaaacttttgtgtttcaaaggacatcatcaagaaagtgaaaaggcaatctgcacaatgggagaagtttttccaaatcacagatctgat

SEQ ID NO: 765120 - DNA, 634 bp, Homo sapiens
ctagaaatccaaattatttatcagataaggaaatattctacttatttttctattaattttagaaagtttgcttttcaaggaacttgtacatttccctaaatgtcacatttattgccacaaagatatacacttaaatccaaatatatcagtacttacagtaattgtaaatagactgagcactgaacttaaagaaaatttttaacagttattaaaaagtaaaacccaattaaatatgtttatagaagataaactttacatataaggatacagaaagactgacagtaaaaagatggaaaaagatataccatgcaaagcaaagactggtgtagctatattaatttcagaccaaaaaaagactttagtcaagaaatattactagaggtcataatattaataaaattcrtaactaactctctagattaatataataaagaaaagagaatttacccttttgtcataaatttttattatggcaaaaaggtaagtccaacagaaagatttaatggttttaagttgtataaaatgaataacagcttcaaagtatgctttttgctttagctttagcttttgttttagctttagcttttgctttagcaaaagttgatagattaaaagaaacagacaaatgtataat

SEQ ID NO: 765121 - DNA, 573 bp, Homo sapiens
aggcacttacattgcagggtcagagcacacaggcattcaatgttttcttcacttacatgaattagaattattgcaagtctgaggcaactcacaacttgtacaactagggctgcccccagtgatgtgacaccagctgaggaaggaaatgggtggatcatccaacaaacaagcatttaggtttcatgatctgatatggtttggctgtgtccccacccaaatctcatcttgaattgtaggtcccacaattcccacacgtgggagggacccggtaggaggtagccaaatcatgggggctggtctttcctgtgctattctcaygatagtgaataaatctcatgagacctgatggttttataaagtagagttttcctgtacaagttctcttcttctcttgtctgctgccatgtgagacgtgccttttgccttctgctatgactatgaggcctccctagccatgtggaactgtgagtccattaaacatctttcttttgtgaattgcccagtcttgggtatgtctttactggcagtgtgaaaatggactaatacggtaaattggtattgggagtggggtgc

SEQ ID NO: 765122 - DNA, 609 bp, Homo sapiens
ccctcatccttgatatatgattaaattcctcatctcccacctttgatacataaatctttggcctgccttaacaagaatctcctacctttgatgtctcctcttcgtgattttccatccactgattcccctcacccataaatccacccccttctccttgttgtagtyagagttgagccctccgctattgcactaggtgcaatagtcttgagtaaagttttccttaccattttaacaagtatcagaataatttttttcaacaatagaaacccatattagatggaaagtttccaactcctaagtaaacttgggttggcagattcaaaggaaacaacgaaaacttttttaaaaaatattaaattgtatcaaaccaacaactgagtgctttaaacactttcaaggtaccaaggctatagagtaaaaaatacagagactggggtctataacaaagaatgtggcctttgtccctgggagagagactcgaaaaccttacaatttcctgagtaataggagggtctttgttattcttgagccccttggttcacacctgggtttatgctaatgaatgactcaggatgggggctggtcacactaaccatgtgattaggggga

SEQ ID NO: 765123 - DNA, 656 bp, Homo sapiens
aataatcagctctcataagacttagtcactaccatgagaacagtatgggagaaaccgcccccatgattccattatctcccaccaggtccctcccacaatgcaaaggaattatgggagtgccattcaagataagaattgagtggggacacggagccaaactatatcaatgtgttatattatagctatagtttggttgtttgtcccacaaacatatgttgaaatctgataatccatgttggaggtggggcctaatggaaagcctgtgaaggggtagatccctcttgaatggcttggtgcagtccttacagtaatgaatgagttcctgctctattggttcccatgaaagccggttgttaaaaagaggctggcacctccctccagccttatattcactcacggtgtgatctctgcatacactgcctcctgtttgccttcccscatgagtgaaagcagcctgatgtctttacccaatgcagatagcagctctatgcttctcataaaacctgcagacctgtgagccaaataaacatcttttctttataaatcacccagcctcaggtattccttcgtagcaaaacaaatggacaaagacaattagcattattctttatcattacaggtcatcttcatttgttcccatgcattcaggttaccac

SEQ ID NO: 765124 - DNA, 608 bp, Homo sapiens
catggcgtgtgcctgtaatcccagctactcaggaggctgaggcagagaatcgcttgaacctgggagacagaggcttcagtgagctgacatcccagcactgcacttcaggctgagcaatgaagcaagactccatccagaaaaaaaaaagaaagaaaagaaaaaagaaaaatgggtgaatctcagtaacaacagcaagcattgtggcgttctaagtggccctctttttatctcctttttccctcttcattgtagccttaaaaaccaacagtctgcaaacaactgaataatagctacygaagaggggtaagaagttgggcctcctgaacttacctgttcccagagaaccatcattgttcaacgagtctgccatatccccacacccatcttcaaagtagtctttattatgtatgacttgaagcttacctaatgagaataaacttttccaatggtgcattttcaagaacaatcaaaggaaatagtttaagactgtgagtgcccaaggaaggaaatgatggttggagacaacaagaggttaaaggaaacacttaaaataaaaatcaaaaatctggtgaaatgagatgtctgtagagaacttcagaatgctccaa

SEQ ID NO: 765125 - DNA, 627 bp, Homo sapiens
tgcttcccacttgcattttagatctagcatggaatggacttccatctctaggcttatcctgacccagtaactcctttcaatctactgccagtgattttgaacctacagttatgaccatgtcagtcacctgcttaataaccttcaagggctttcaaccaccttcgaaataaataaagtttgtgtaggaagaagatgttaaatcaaaacatttgtgtttcaggtaattcctmgttcctaactgatttaaggctttttaactcatcagataaaaggtatgcctcatggggatggctgaatttgattgattatgaggaagttaatgcttctctgtgaacatcaaaatagtgtcggggttgtagtattaaaagtacaggtgtagtaaaattaggttccaacaaatgatcttgatgttttacgattctttggtaaagacatttctcacccaaaatggaattttcacgttaagatccaagcctaattgtctaagatcattgagagttttgttgttggttttgttgtttgttttgctttgttttgtttgctgttttagtctataaagcagctggaaaggctttagagagtgttttgctgaaaaataaaaggtaaatgcttatctatttttttttt

SEQ ID NO: 765126 - DNA, 627 bp, Homo sapiens
tgcttcccacttgcattttagatctagcatggaatggacttccatctctaggcttatcctgacccagtaactcctttcaatctactgccagtgattttgaacctacagttatgaccatgtcagtcacctgcttaataaccttcaagggctttcaaccaccttcgaaataaataaagtttgtgtaggaagaagatgttaaatcaaaacatttgtgtttcaggtaattcctcgttcctaactgatttaaggctttttaactcatcagataaaaggtatgcctcatggggatggctgaatttgattgattatgaggaagttaatgcttctctgtgaacatcaaaatagtgtcggggttgtagtattaaaagtacaggtgtagtaaaattaggttccaacaaatgatcttgatgttttacgrttctttggtaaagacatttctcacccaaaatggaattttcacgttaagatccaagcctaattgtctaagatcattgagagttttgttgttggttttgttgtttgttttgctttgttttgtttgctgttttagtctataaagcagctggaaaggctttagagagtgttttgctgaaaaataaaaggtaaatgcttatctatttttttttt

SEQ ID NO: 765127 - DNA, 570 bp, Homo sapiens
  misc_feature 511: n = A,T,C or G
ctatgtgacagaaaagaaaaatccatttttggggggagaagttcaagccaattatagaaatgtgcataagtagcatggagcttaatgttaatccccaagaccatggggaaaatgtctccaagccacgtcagagaccttcatggcagccgctcccatcacctgtccagaggcccacgaggaaaaactggcttcgtgggtcgagcccaggatcyccgtgctgtgtgcagcctagggagttggtaccctgtgtctcagctgctccagccatggctgaaaggggccagtgtacatctcgggttgtggcttcagaggggggaatccccaagccttggcagcttccatatggtgttgagcctatgggtgcacagaagtcaagaattgaggtttgggaacctccacatagatttcagaggatgtatggaaatgcctgtatgcccaggtaaaagttttctgtaggggcggggccttcatggagaacctctgctagggcaatgtggaagggaaatgtggngtttggatcccccacacagagtccctactggggcactgcctagtggagctgtgagaaga

SEQ ID NO: 765128 - DNA, 458 bp, Homo sapiens
agaaatgcttcccaggagctaagcgatgctttgtgactaagctctcaccaatggagcaagagtggaagtgacaggcagacctgctgagccacctccttaaatacaatttgtttcctctttactttctctctttcctcctcaccatgaacaggaacttggatacatagtgtgaaccattcttacctaggtaggtgasaaacacactggagggtgacagagcaccatgggagaaggaagaaggaagaagtatccacccatggatgctcgggtaatttagtggagaggagctacctacagcatgcatcacatgcctaacggatctgaggaaaaattagaagttgacctggacccagaatactgaatttttgaatcccattctttaccagccatctattatccttttaggtgcacaagaaaattgtatatgtaaatgaggatttagtttcaaactctagttc

SEQ ID NO: 765129 - DNA, 526 bp, Homo sapiens
agcttttcctgctcatgctaggtattccaccattatttacaacattgtagtgttccagtgggaggaagcagcatgaattttaaataattggcttatgtggaaagtttgtaaattgatcaataacttgtacatattactttgagatgtttaattyagcgcttgtttgttgagtaagactaatgttctgatatattgaaatatttaacagcgagtaatcagatcacattaattagtttgtatgctgtcatatatctgcagtttgttttagttctgcagacaaatatactacactattagagggttatcagtttttgattcctttacttattctgcactaatacagaccagtggcattttatttatacttctctccctgtattttaggagactctaaaggtaggcatttttggaactgtaaagagtatttcctaagttgaacttatcagtgtttatagcataaatacataactatgttaaagttttttttaactaggaaataattatttcacattctttatatagattg

SEQ ID NO: 765130 - DNA, 588 bp, Homo sapiens
tactaaaaatacaaaaaatcagccagacgtgggggcgcacgcctgtagtcccagctacttgggaggctgaagcaggagaatcgcttgaacccgggaggcggaggttgcattgagctgagaagcccccactgcactgcagcctgggagacagagcgaggctccgtcttgggggaaaaaaaaaaaatctagaatatcctaagtagaattgctggcataatcttccaaaagctcagatacaatccttttattcccctccacaaaagtcttcaaagcaaacaaacaaaaaccttcagtggctccacatttcctaaagaattacccttccacatatccratttgaatataactggggggaacccaaatgtctgtcctacagtaggtgaatggctacacaatctgggatacatccataccgtggacgactactcaacagtaaaaaggaattactggcacatgcaacaccttgaagggatctcaaggacattatattgaaagaaaaaaaaggcaatctcaaagggtccaactgagtatgattccatgtatataatttttttttttttttgagacagagtctcactctgtcaccta

SEQ ID NO: 765131 - DNA, 621 bp, Homo sapiens
tacacactatcttcctattaataaacagactaccaatcctagcaccgacctctcaaatagttacagtttcatgtgcatacactatcttcctattaataaacaggctaccaatcctagcacatggaagaaactgagaatgtcaattactcagtatgagccaagtacaggtacattatctttacatacacggtcaaagaagaggctgggcatggtggcycatgcctgtaatcccagcactctgggaggccgaggcaggcggatcacttgaggtcaggagtttgagaccaacctgacaaacatggagaaaccccatctctagtaaaaatacaaaaattagccaggcgtggtggcgcatgcctgaacccgggaggcggaggttgcagtgagctgagatcacgccattgcactccagcctgggcaacaagagcgaaactctatctcaaaaaaaaaaaaaaaaaggaagaagataccttcttttggggaaaactatttaactgaaattctaaaacaacaatcctgccattcattcatttgttcacgtatccagtgtttcctcagcatctactacgagccaagtactgagattagataggcatgagccactgtgcctggcctattttt

SEQ ID NO: 765132 - DNA, 621 bp, Homo sapiens
tacacactatcttcctattaataaacagactaccaatcctagcaccgacctctcaaatagttacagtttcatgtgcatacactatcttcctattaataaacaggctaccaatcctagcacatggaagaaactgagaatgtcaattactcagtatgagccaagtacaggtacattatctttacatacacggtcaaagaagaggctgggcatggtggctcatgcctgtaatcccagcactctgggaggccgaggcaggcggatcacytgaggtcaggagtttgagaccaacctgacaaacatggagaaaccccatctctagtaaaaatacaaaaattagccaggcgtggtggcgcatgcctgaacccgggaggcggaggttgcagtgagctgagatcacgccattgcactccagcctgggcaacaagagcgaaactctatctcaaaaaaaaaaaaaaaaaggaagaagataccttcttttggggaaaactatttaactgaaattctaaaacaacaatcctgccattcattcatttgttcacgtatccagtgtttcctcagcatctactacgagccaagtactgagattagataggcatgagccactgtgcctggcctattttt

SEQ ID NO: 765133 - DNA, 621 bp, Homo sapiens
tacacactatcttcctattaataaacagactaccaatcctagcaccgacctctcaaatagttacagtttcatgtgcatacactatcttcctattaataaacaggctaccaatcctagcacatggaagaaactgagaatgtcaattactcagtatgagccaagtacaggtacattatctttacatacacggtcaaagaagaggctgggcatggtggctcatgcctgtaatcccagcactctgggaggccgaggcaggcggatcacttgaggtcaggagtttgagaccaacctgacaaacatggagaaaccccatctctagtaaaaatacaaaaattagccrggcgtggtggcgcatgcctgaacccgggaggcggaggttgcagtgagctgagatcacgccattgcactccagcctgggcaacaagagcgaaactctatctcaaaaaaaaaaaaaaaaaggaagaagataccttcttttggggaaaactatttaactgaaattctaaaacaacaatcctgccattcattcatttgttcacgtatccagtgtttcctcagcatctactacgagccaagtactgagattagataggcatgagccactgtgcctggcctattttt

SEQ ID NO: 765134 - DNA, 614 bp, Homo sapiens
gacagaggccagctatttaggaccatacgcacctgtgacaagggctgtgttgaccacagtcacactgtggcatgactggatacccaaactacacttctacacatgaaaagtaagaactgtctttagattttctttactttgataacttgtgattgtttagcttaagacccaagaaatgctgtttgctcatggtaaacagaaacagcatcttcgctacaaccactgacaccagctggcgtcataggtagctagatcattgcatttgttttgaaatgttaatatgttaaatactaaactaatatttcaaaaatgtgtatatatgatttctatatccttgtttttcagatagcctgcttataatttaatataaattaactgatgcattcataagatttcaataatgaaatggttcccttttaaaaaataaaaatactttgtagattaaaaataaatcagaatttcaaatttmaaattgtccacacactaggaaatagaactgtgttaatatataagaaatctggggataattaagaatgaaggacttttctatcatttccattttataaattgccacctgtgaaaatggtttttgcacattatttgtatttttcttt

SEQ ID NO: 765135 - DNA, 510 bp, Homo sapiens
ctcatgcttttatcagaagccatctggtcatagacaccacaagtcacctgggtggtcttggtttcttttgattttatcattctcagtttgatcacaagctgagtggttggagatgaaaagacagcggcctgtggtttgaacttagtatrgtcttttgatgagaactgaacaaaagatagaatactgaccttagatagtcatgggtaaaattaaccaaaagcagacaatctgaaaaaactaaatattgtatgattccaactataaatatattaacaatactccagtattggagtctgtgtgctccaatactgaaatattgagagaaagagctaaaatcaacgaatcaataaatatttattgatgaagtctcagagtagggcataggtgtaccaggtaagtcttggtgtggaaaagcaaaattcactttggttttaaaatcccaaataacagaataaatattcaaagcatgatgtagtatctctgtgtactcctcacaagatctatcttcta

SEQ ID NO: 765136 - DNA, 501 bp, Homo sapiens
aaagaatctttgcctaattagtctgtttatgctactataacaaaataccataaacagggtagtttatgaacaacagaaatatctttctcacagtctggagcccagaaagcccaagatcaagttgccagcagattcagtgtctggtgaggacatttcatggtcttagatggtgccttcttgctgcatcctcacatggtggaagtgacaaggggactcttttataagggcactaatcccattcatgagggctccaccctcatgacctaatcatctctcagtggtcccacctcctaatactatcaccttgggggttaggatttcaacatgtgaattttgggagaatctaaacattcagaacatarcgctaatgtaacttttatttcaatgctactagaaatatagtacaattaagaatttttgacttatgtgaatgattctcttcccacactccagtttgttaaaaggaaaactgagacacaatgaaattttaaagagtttatt

SEQ ID NO: 765137 - DNA, 608 bp, Homo sapiens
atgggcccagaaagctgggttttaataagctctccaggtgattctgatacacacagcagttcgagagccactactttacaataacatctcactgttgcaattatgaggccatgtcattaataataatctagttaaaatgtgtgtacctcttttttttttttttttttgaaacagggttttgctcttgtcacccaggctggagtgcaatggtgcaatctcggctcactgcaacctctgcctcctgggttcaagcaattctcttgcctcagcctccaaagcatctgggattactagcatgcgccaccatgcccagctaatttttgtactattagtagagatgggkatttaccatgttggccaggctgctctctaactcctgacatcaggtgatcacccacctcggcctcccaaagtgctgggattacaggtgtgagccactgtgcctggccactgtacctcctttttaaaactgattttactttcatagaaacttctagaaatactctgtgttagctaaaacagtaactcctgtcacatcttgtctctataccttgctttattttctttataatgtgttaaatatcagacatcatctatctgtttagtat

SEQ ID NO: 765138 - DNA, 440 bp, Homo sapiens
tttgtttattataaaggtcacaactcataaatagccaaataggagaaatgcacttggcaaagtatggtgaggggggcacagcttccatgtcctctctgggcacaccaccctcccagcacctagatagctttaccaacttggaagctctctgaactttatcacttagggkattttatggaggtttcatattgattaaataaatcattggccattgggataactcaatctctagcccctcccctctgcccagaggtggggacaagaagcagaggccgaaaggctgaaagttccaaccctctaatcatgactttttttgttttttagatggagtcttgctctgtcacccaggcggctggtgtgcagtggcatgatctcagctcactgcaacctctgcctcccaggttcaagtgattctcctgcctcagcctcccaagtagctg

SEQ ID NO: 765139 - DNA, 440 bp, Homo sapiens
tttgtttattataaaggtcacaactcataaatagccaaataggagaaatgcacttggcaaagtatggtgaggggggcacagcttccatgtcctctctgggcacaccaccctcccagcacctagatagctttaccaacttggaagctctctgaactttatcacttagggtattttatggaggtttcatattgattaaataaatcattggccattgggataactcaatctctagcccctcccctctgcccagaggtggggacaagaagcagaggccgaaaggctgaaagttccaaccctstaatcatgactttttttgttttttagatggagtcttgctctgtcacccaggcggctggtgtgcagtggcatgatctcagctcactgcaacctctgcctcccaggttcaagtgattctcctgcctcagcctcccaagtagctg

SEQ ID NO: 765140 - DNA, 611 bp, Homo sapiens
cataatttctcaggacaaagagcaagatctaaaactttgaccagcatttcatatttttatccttcttctccctaaatgtaatatatattgcttaaattttgaatgtcccagtacttaaggtactaggctctaggaacattagtgagaatttatcaagctcatggttgtccaaatgaagaagagattgtcacatggcaaaaggctaagattttccaatggtcccttggctcctgtgatgaacaagtgatatggcagatatttagttttagagaatgacttgacaggtttccagggcagttgaaagtctggtaaagggctttctcaatcttgagaagagagtagataggaataatattgatgcaagtaacattgacccttctattactttaacttagaaagtatttcactgatgccatcttaaactatctttaaaacatctttctgcaatagaaagkgggagagaggcaaagtgatttgctcatgattatgtagtgaatgtcaatgctggcaaagcaagcatcccgtaatgttttccttgcaggatgaccatagctcgggcaaaccagatactctttccactatcatttaaaactatggaactgtttctatcc

SEQ ID NO: 765141 - DNA, 624 bp, Homo sapiens
gtaagcttttgattctttagattttcttcaatgagaaaagcacaacattttctatctaccatccataacatttattgactatgtcgctaatttggcccgtggcataagcagacgtggattactagctacagaaatactcatgttttatatgacccctccttgattttaggaagaaagcctttttttcctctgaaactctcataacacagaaaatatgtagtgtgctatagttgattccgtaacttgctcttttcaccytcaatatctcttggaatcaaaatcatacatcataaaaatggagtcatatataaggccaaaattccaaggaacacttttttttatggtttaattttaaaacccagaggagaaaaagttatctcttatatgaaggagttggatgggatatctatcctttgcataacaactgctttctttaatctgtggatcagaatcccactagcttactatataagtaaagtgcatatcattcataaaaattacactctcagtcaagaatgatcaaatgcttccaacaaaaagagggttataatagtgtattatcctggcatgaagatggtcagctgacagtatcatttgttttattttaatgggtgacaataatgc

SEQ ID NO: 765142 - DNA, 655 bp, Homo sapiens
aactattatgaagatgttttcatttcagttaatgtatttcaccctatagttgttattcattatcacaattctgctatgatcctacttgtgactaaaccttccttgaaggaagcctgatagttcttttatcagcatttatatcttatattgttgtcttttacctaattttgtcaagaatatatattatgcttccttgacctgtattctcagatatcttttctgcccaggaaatttttattcttttctcttttcactgttagtttgtttccattcattctgtattttattcaggagtatagatcatctggatgttaggtctctttctctgcatcccagaaaatcttcttaaatatctttcctacmtcacagatttgtgttttttaaattatggtcaatgttttcattcctatttcaaatatcattcaaaattctgttatgacatttttccacttctcttaaacttttccaacccctattttattttcattttcaagcatttcacttccttttcatagaaaacatatctgcctttacttccttaaagcaaacagattctatcttattttgcttttgtttcctgttaaatatattattaaaaaaacattgtctttatccacttttaaattactttatatttttatactgcagaatagct

SEQ ID NO: 765143 - DNA, 655 bp, Homo sapiens
aactattatgaagatgttttcatttcagttaatgtatttcaccctatagttgttattcattatcacaattctgctatgatcctacttgtgactaaaccttccttgaaggaagcctgatagttcttttatcagcatttatatcttatattgttgtcttttacctaattttgtcaagaatatatattatgcttccttgacctgtattctcagatatcttttctgcccaggaaatttttattcttttctcttttcactgttagtttgtttccattcattctgtattttattcaggagtatagatcatctggatgttaggtctctttctctgcatcccagaaaatcttcttaaatatctttcctacctyacagatttgtgttttttaaattatggtcaatgttttcattcctatttcaaatatcattcaaaattctgttatgacatttttccacttctcttaaacttttccaacccctattttattttcattttcaagcatttcacttccttttcatagaaaacatatctgcctttacttccttaaagcaaacagattctatcttattttgcttttgtttcctgttaaatatattattaaaaaaacattgtctttatccacttttaaattactttatatttttatactgcagaatagct

SEQ ID NO: 765144 - DNA, 632 bp, Homo sapiens
atttgaagggaacaaacatccaaactacatcaaccaatataaggtataaactctgaatgagatatgaataggaatttatgagtatagggaagcagaggaggtgagatacaagagaagacctggtagagaagagaaaattgttaggagtggctgagaaacgtttaatatgatttttaaaaactctattcaattttagtttattggtttctcatgcttgctttycaggtggaaaccaccaaccaattggaaggtgactagggtgaatatagcccaaggaacttgcaaaactctttggagggccaaggagtaaaggacttcattcagggtgtgacatggtgggccacacccatcaacagaatctcagccagggcttcagaactaatgtaaaaagttaccaggtttataatacttaaagagttttggtttcctatggcttttatattcatactttccattgttattttgtggttcaataaaaatgaacaaactgtgttaggatctgtttcagttaaagttttatggtattgtgttgacttgaaacattgactcttaggttaaaaatggatgatggattcacaagaattggagaaaagtgctttgggattttgagataaagattatatgtcagcttt

SEQ ID NO: 765145 - DNA, 613 bp, Homo sapiens
aattaggaaatgactccccctgtcccccgactatctccctttctgtctccagggtcctggcacaggagtaagaaactatcacatttaaatgtctgcatttagagaactcagggtgtccgttgggtttgtagaagatggactgactctgttgattcacttgtcgggtggaccstttctccatcgtccttctctcctcagtgtgtgttcctatttaaatggagccccctgcttgggagggagactgctccaaagaggagcatggtgcttcagccacaagccacatagaaggcttgctcataatgctgctagaactctgcagaggaagaaagttttttagggtctttttattttaagagatatttgactattttatatattaataatcctctcctccttcacaacccagtaattccccttattactacattacaatacattgtgctcatacaaggaaggtagggagcagagcattttcagttaatatctaatgtttcccacagtaggatttatcgtgacatcaggtagtctgtattaactggatcatggagaaggcatttctaatgatcatctgaaaaggcttcacaggattaacagatttgaaacttcattctct

SEQ ID NO: 765146 - DNA, 514 bp, Homo sapiens
agagtcaaggtctctgcgagtatttaaggaacggatgtaaacctgggggattcgttttgtttccttcaattttccaatgaaatcagagatcctgttcttgggtgtcaacgcagatactagaaggaggtgatacaagagaaaggaaacagcaagcgacgattatggcacggtttcctgtaaacaaggttgagtgtagccacagcctgagcactgtgggagaagagctcataagaaaatgacggtgctgggccttcgtcaccccggggcmctccattgttcttgtctttggtctctttttatttgtagaggtccaattatttatttatttagtacaagagggaacgaaattgatctttccattctaaaaggagagtatatatgtataaaaggaagctgtatagatatgggggaagaggtggacagggggaaaaggggagaggacgagagagagaaagggagggagagggacaaggagagacactgggcgagagatcgattaggagagacagaaatg

SEQ ID NO: 765147 - DNA, 615 bp, Homo sapiens
gaagggagggggtgcgcagacaaaactgaagaaactcgagtgccagagaaggccgacaggagttacagcgacctcagcgcgcaattgcgcccccgaactttactgaaaagtgtttagattgcagagataagctagaatcccaacgcatcgagaatacagtaatacgaagtcgccttcaaaaaatgacaatgaaaattgcctattaaaggactatttggttaattacgtttcagcagtgcccagtttattgtctttattattcttttgtcrtgggtgtaaactccatttgaaaacataatcagggagaatacccaagacaagaagaacagttgtcatttaaaatatttgaaaagccctgccttaaggacgcattcgcttgccggtccactcttaattggagacttgcggtgtagcaacacgtgagagtcttcttgcgttgagaagtaagcctggaaaggggcgaaggccccgggcgcatcttcagatgcgtatttgtgggcccctggggatataaacagcccagcgggtgtaaattaaaccccgcagtgccttggctccctgagacccaaatgtaagtcagaaatgtcccaagacttcgcctgccaacggaattaa

SEQ ID NO: 765148 - DNA, 615 bp, Homo sapiens
gaagggagggggtgcgcagacaaaactgaagaaactcgagtgccagagaaggccgacaggagttacagcgacctcagcgcgcaattgcgcccccgaactttactgaaaagtgtttagattgcagagataagctagaatcccaacgcatcgagaatacagtaatacgaagtcgccttcaaaaaatgacaatgaaaattgcctattaaaggactatttggttaattacgtttcagcagtgcccagtttattgtctttattattcttttgtcgtgggtgtaaactccatttgaaaacataatcagggagaatacccaagacaagaagaacagttgtcatttaaaatatttgaaaagccctgccttaaggacgcattcgcttgccggtccactcttaattggrgacttgcggtgtagcaacacgtgagagtcttcttgcgttgagaagtaagcctggaaaggggcgaaggccccgggcgcatcttcagatgcgtatttgtgggcccctggggatataaacagcccagcgggtgtaaattaaaccccgcagtgccttggctccctgagacccaaatgtaagtcagaaatgtcccaagacttcgcctgccaacggaattaa

SEQ ID NO: 765149 - DNA, 603 bp, Homo sapiens
accacgccctattcccctgaacctgtgaatctgttctgtcacatgggaaaagagactttgctgatggaattaagggtcagaccttaaaactgggagagtatgctggggagtcaagaggacagcagagtgtgtcctggttagaaggggtcaragggcaggagagaggggcagacagcatcagagagccatcagggtgaggccatgttgaatcttgtagaggacgaagaaaccacaatgactttcccagagggccctcttgagcacaaggaagaaaacagtaactcaaatgactaccatgacaaccctcttacctggtgaggaaccctgacctcctatagtgtaattattttctatcacaaggactgatacagaaaaatctgatgtggcaggtgctattccatttgccaatgggaaaactgaggcacagagctatcaggctacttgcccaagatcacagagctgccaaggacctagcctggaccccatctcatgtcccaaaatacagcacaaagctggccaggccacccccagggctttctgacttccaggtccccagagttgcctcctcactctagggttgccctgacctcttgacttaagggt

SEQ ID NO: 765150 - DNA, 603 bp, Homo sapiens
accacgccctattcccctgaacctgtgaatctgttctgtcacatgggaaaagagactttgctgatggaattaagggtcagaccttaaaactgggagagtatgctggggagtcaagaggacagcagagtgtgtcctggttagaaggggtcagagggcaggaragaggggcagacagcatcagagagccatcagggtgaggccatgttgaatcttgtagaggacgaagaaaccacaatgactttcccagagggccctcttgagcacaaggaagaaaacagtaactcaaatgactaccatgacaaccctcttacctggtgaggaaccctgacctcctatagtgtaattattttctatcacaaggactgatacagaaaaatctgatgtggcaggtgctattccatttgccaatgggaaaactgaggcacagagctatcaggctacttgcccaagatcacagagctgccaaggacctagcctggaccccatctcatgtcccaaaatacagcacaaagctggccaggccacccccagggctttctgacttccaggtccccagagttgcctcctcactctagggttgccctgacctcttgacttaagggt

SEQ ID NO: 765151 - DNA, 603 bp, Homo sapiens
accacgccctattcccctgaacctgtgaatctgttctgtcacatgggaaaagagactttgctgatggaattaagggtcagaccttaaaactgggagagtatgctggggagtcaagaggacagcagagtgtgtcctggttagaaggggtcagagggcaggagaraggggcagacagcatcagagagccatcagggtgaggccatgttgaatcttgtagaggacgaagaaaccacaatgactttcccagagggccctcttgagcacaaggaagaaaacagtaactcaaatgactaccatgacaaccctcttacctggtgaggaaccctgacctcctatagtgtaattattttctatcacaaggactgatacagaaaaatctgatgtggcaggtgctattccatttgccaatgggaaaactgaggcacagagctatcaggctacttgcccaagatcacagagctgccaaggacctagcctggaccccatctcatgtcccaaaatacagcacaaagctggccaggccacccccagggctttctgacttccaggtccccagagttgcctcctcactctagggttgccctgacctcttgacttaagggt

SEQ ID NO: 765152 - DNA, 603 bp, Homo sapiens
accacgccctattcccctgaacctgtgaatctgttctgtcacatgggaaaagagactttgctgatggaattaagggtcagaccttaaaactgggagagtatgctggggagtcaagaggacagcagagtgtgtcctggttagaaggggtcagagggcaggagagaggggcagacagcatcagagagccatcagggtgaggccatgttgaatcttgtagaggacgaagaaaccacaatgactttcccagagggccctcttgagcacaaggaaraaaacagtaactcaaatgactaccatgacaaccctcttacctggtgaggaaccctgacctcctatagtgtaattattttctatcacaaggactgatacagaaaaatctgatgtggcaggtgctattccatttgccaatgggaaaactgaggcacagagctatcaggctacttgcccaagatcacagagctgccaaggacctagcctggaccccatctcatgtcccaaaatacagcacaaagctggccaggccacccccagggctttctgacttccaggtccccagagttgcctcctcactctagggttgccctgacctcttgacttaagggt

SEQ ID NO: 765153 - DNA, 605 bp, Homo sapiens
gcagtgactcacacccataatcccagcactttgggaggctgaggcgggtgaatctcctgaagtcaggagttcgaggcctgcctggccaatatggtgaaaccccaaccctactacaaatacaaaaattaggcaggcgtggtggcagaggcctgtaatcccagctacttaggaggccgaggcagggagaattgcttgaactcaggaggtgagcttgccatgagctgagatcataccactgcgctctggcgtgggcgacagaacaaaacttcaacttacaaaaaaaaaaaaaaaaaaaaaaaaccagctagcaggtgacatttgctacagggagactagggatatgatcttgctgcaatccttccatttaagtaaatctaaacagtgtgaatccattcygttttgtccccactccaaagccaaaacaaaaaaatcaattatatttctatttctttaaaaacatatctaactaaatcatctaattacaagataatatgcatggttccctactctaaaagaaaacttatgtcctgcatatcatggacatttgatgaatgcttattcagttgactggtgtagacttcaataataacctgttcaatgcatta

SEQ ID NO: 765154 - DNA, 610 bp, Homo sapiens
cagcctgaccagcatggagaaaccccatctctactaaaaatacaaaattagctgggcatggtggcacatgcctgtaatcccaactactcgggaggcttgaacccggcaggtggaggttgcgctgagccgacatagcgccattgcactccagcctgggcaacaagagtgaaactccatctcgaaaaaaaaaaaaaggtattaatttttacagaggatcagcacaatgagggacacactagcasaaagtaaagacaactctagagaatatggaactagcagaggccaggcattgtggctcatgcctgtaatcccagcaatttgggaagcctaggcaggaggatcgcttgaggccaggagttggagaccaatcagcgctaaatagtgagactctgtgtctaccaaaaaaagaaacattagccaggtgtggtggtggtgcacacccgtagttccagctacttgggagtctggggtgggagaatcccttgagcctgggaagtctacactacagtgagccaagattgtgtcactgcactccagcctgggcgacagagtgagaccctgtcttagaaagaaaaaagaaaagaaagtgttaatccccctatgggaatct

SEQ ID NO: 765155 - DNA, 521 bp, Homo sapiens
aaatggtaacaaatattagatgaacgaaagagaggagtacaaccatatgctgcatctagatagataaatggggaaaatacggtctatcctacttgctagcttataataagcatctcaattcatgagaagctggttaaaagagaaaaactacgtcagtactgccccttttcattctccctgctcccttrttgttcttgggagagggagaatatggactggtgacttttttggtttttttggacaggtagaatacttatttttgttctcaaaaacaattttcttataaaattgagctgtatgattcacactagaaaatgaagttgcacactctccacacccccagccagctccctcaggccccagttagccatatcaaaaagccaaaacttaggatttcttgttaagtgagacaataaatacaccttgtaataagcaatctgccacttttgggaacatcctaactgatatagacaggatggatggaagaagcattgtgaaggtaaagttgaggatgtggcatc

SEQ ID NO: 765156 - DNA, 521 bp, Homo sapiens
aaatggtaacaaatattagatgaacgaaagagaggagtacaaccatatgctgcatctagatagataaatggggaaaatacggtctatcctacttgctagcttataataagcatctcaattcatgagaagctggttaaaagagaaaaactacgtcagtactgccccttttcattctccctgctcccttgttgttcttgggagagggagaatatggactggtgacttttttggtttttttggacaggtagaatacttatttttgttctcaaaaacaattttcttataaaattgagctgtatgattcacactagaaaatgaagttgcacactctccacacccccagccagctccctcaggscccagttagccatatcaaaaagccaaaacttaggatttcttgttaagtgagacaataaatacaccttgtaataagcaatctgccacttttgggaacatcctaactgatatagacaggatggatggaagaagcattgtgaaggtaaagttgaggatgtggcatc

SEQ ID NO: 765157 - DNA, 614 bp, Homo sapiens
ccttggagtcaggcaggcttccattcagtcttagccctaccaactctgaagcttctctgcaaagacatggagcttctctaccctgcagttatctcacctgtcacattctggacctcaaaaaaaaaaaaaaaaacactgaaagacgaggtgggacactccatgcaaagcactgggcactggatctagtaagaagtaacttcaaaccatgacagttgttttggttttgttctgttgatcatggtaacaaaaataaagctaaagaaaattacaatgcaaacttactccctatttcttgggaaactgatcagtmgttcaaaatagaaccattcccaatgagcacattatctacagtcgattgtttaaaaaaaaaattaattcccagttgagaattctcaagtagaagagaagtgagttaaactgctgtcaaaataaacagctgttcctcagagaagctacaagattttgaaacttttcccccttgttctacatggcttgaggcagcagtctggaacagatattccttctttagctattgtaacaaggctctcatagagcaaacaaaaaaatgaactcgaagggctgtatctatacatattagtcgtgagattctagaa

SEQ ID NO: 765158 - DNA, 460 bp, Homo sapiens
catgattttagtgggtagagaaaggaaattgactcacaaaaaaaaatgactagtgtttgtaatagagatattccttgcacaactgagaattacgtgcaagccaatggttgccagttctcaagaatatgtaacatatgaggtaaggctgcacatacaaacacagattaagttaaacagtcattcataatgctctggttaatcagaagcccagacttcactgaaacaatgtattatactagctagggaaggcagactggagaggagcagcctacccagcactgttctcagctccagtgaactgtcactagcaaactgatttaaaaaagaaatgaatgcatacaatcaatgcatacyttagggatatgtaaaaattattttttaaacaaagaaatattctaatagtttcacccaactactctgctctgcttgtttggcagttttcactaatattgaaaatatg

SEQ ID NO: 765159 - DNA, 667 bp, Homo sapiens
aaacatgggcaatgtgatatgtcataatcatttcttctgtaaaaccgagaattttatcaggacaggaaacattgtgatcacctttgcaactagaacatccagtcagtattctgcatgtggctggtgcttgtaaatgatggtcgaacaaataaaatgcygtaaaatatatccccattccaaagagctgtcctctgtatgtgcctgacagttatctataaaactgaatatatgaggaagattttaggcaaacacagaagaaaaaaaattagaatttttgagaagaagcttagcagaacacagttattggtagttatgtaagctagtaagcaaacattataagtccatttatttatctgccccaataactcattttcctctgcaagtattcactgactatctggcatatgtaataatccccaagtgaaagtttaaaagtatatatgtagggtggggtggaggctgctgttaaaggagcactgtaggaatttagcctaatttccatgatttttatttttctaatatttgtattctattaaaacaatccaaaagaatacaactgactaaatgcacacttggctaaattttcatactgtaaaattccacaaataacttgctaaccattacacaaatcaagaattttgatttatagtttacatatataacacat

SEQ ID NO: 765160 - DNA, 613 bp, Homo sapiens
taaaaataacatcgaggaatgaatttgaaaccatttattcttaaactgagaaatagaattcaagaattctgagacagaccagcagaaaaagtaagggagaagcttgagaaggtccaggaatggggactttagacatatttcctagggtggaaagagacggcttctacatttcctgaaagtgagccgagggcagagttctccccatcttcatctagttttgcaaattgttgctaatgtaatactctttccagaacaaagccacctgtaccatttagaatgaatactttattctactaaaatcttcaggtttagtctaattttctgagataaataggctaatatgkgatgtcctatactgaaattaatacacacacgtacacatacaaacacacatatatatacacacatatcttgattcttgcatatatatgtacatacatatatgtttatatttgtgtaaatgtacataagtatttaaatatacatgtgtatatgtatatagatctttaatatagccaatgaatttcctgctttttatgttttcttagaattgtctagtgaactttcaagtatctagtatctttctctcttgaaactgtattttccacttcat

SEQ ID NO: 765161 - DNA, 562 bp, Homo sapiens
ggtattttatatacatatgggaatatgtatacatatttataaaagttatagcttatttttttgcagtttttaaaaattatactttaacttctgggatacaatatgtagaacgtacaggcttgttacataggtatacaagtgcagtggtrgtttgctggacccatcaacccatcatctacattaggtatttctcctaatgctatcgcttccctaacccctcacccctcaacaggcccggacaggtgtgtggtgttcccctccctgtgtccatgtgctctcattgttcagctccctcttatgagtaagaaaatatggtgcttggttttatgttcctgtgttagtttgcttagaatgatggtttccagtttcattcatgttcctacaaaggacatgaactcatccttttctagggctgcatagtattccatggtgtatatgtgccacatttcctttttccagtcaatcattgatgggcatttgggttggttccaagtctttgttattgtgaatggtgctacaataaacatacgtatgcatgtgttttatagtagtaatgatttac

SEQ ID NO: 765162 - DNA, 562 bp, Homo sapiens
ggtattttatatacatatgggaatatgtatacatatttataaaagttatagcttatttttttgcagtttttaaaaattatactttaacttctgggatacaatatgtagaacgtacaggcttgttacataggtatacaagtgcagtggtggtttgctggacccatcaacccatcatctacattaggtatttctcctaatgctatcgcttccctaacccctcacccctcaacaggcccggacaggtgtgtggtgttcccctccctgtgtccatgtgctctcattgttcagctccctcttatgrgtaagaaaatatggtgcttggttttatgttcctgtgttagtttgcttagaatgatggtttccagtttcattcatgttcctacaaaggacatgaactcatccttttctagggctgcatagtattccatggtgtatatgtgccacatttcctttttccagtcaatcattgatgggcatttgggttggttccaagtctttgttattgtgaatggtgctacaataaacatacgtatgcatgtgttttatagtagtaatgatttac

SEQ ID NO: 765163 - DNA, 580 bp, Homo sapiens
ttacagtcctttgggtatgtacccagtaatgggattgctgagtcaaatagtatttctggttccagatccttgaggaatcaccacactgtcgtacacaatggtgaaactaatttacactcccacaacagtgtaaaagcatccctatttctccacatcctctccagtatctgttgtttcctgactttttaatgatcaccattctaactggcatgagatggtatctcatcatggttttgatttgcatttctctaatgatcagtgatgatgagctttttttcatgtttcttggctgcataaatgtcttcttttgacaagcgtctgttcataccctttacccacattttgatgggktttttttttacccacattttgatggggttgttttttttcttgtaaatttgtttaagttccttgtagattctggatgttagccttttgtcagatggatagattgcaaaaattttctcccattatgtaggttgcctgttcattctgatgatagtttcttttgtggggcagaagctctttagtttaattagatctcatttgtcaatttggcttttgttgccattgcttttgg

SEQ ID NO: 765164 - DNA, 517 bp, Homo sapiens
caagcaattcatccgtcaagtagggatcaactctaaacaaacttgtcgtgggtagtttgtaaactagttgtggggagaaagtgacttcaagggcctgagatacatgctgtttggttgtttgttgtttctttcctttttaaattctgaaaacatcaaatttttttcctttcacttattcaaaaaatctgaaacaaaaatcttgcctttgttatcaacagatgaggtacatatccctgaggaagaccacagcctaagaaaagttcatttattgttcaacttgtttctgtgtgtaattgtgtgcccttcatgccattctttgacagttttctccattgtcagtgactagtataatatagagcacagtgtagacatgcamcaaaatagttccttttgaaagaataaacgaatacttacttaaaaacatattctgggttgacttaaatgcaagttcaggcattaattattacttacttttctatgttccccctaatgatttgtgctttctattcttctagaa

SEQ ID NO: 765165 - DNA, 585 bp, Homo sapiens
caaatgtgatgtcctatacaaatgtatccctcgtgatactgagaaaataattcaatgttcttctctgcattctctctctctctctgtgtgtgtgtgtgtgtttatcatatatatgtggtaaaaaaaaatatggaaatttcccwgagagagagagagagattcatctaacttacggctattaccatattcctagtttttagtttacctccacatatgactttggagctttatttacaatcatctttttgatactggaaatacctagtataatgaaattaaatgaatcccttaatccttcttctggattagagtactatgtcacaacaatgagtatttttaaatgaaaaggaattgagaagtagaaggaagaaataacctggtagaatagatgtcctgtcaggaacttgatgagctggtgctggggtggggattgtaagtgagcaggttctgagcaaaaacaacgggagcacaatgaatggaagtgtatatacaggcgagagatagtatttcatgttcttggctaatggtaactctgttcctatagaaaatggttatgtagagcaactcggccaccggagaaaacaa

SEQ ID NO: 765166 - DNA, 575 bp, Homo sapiens
ggtaactctgttcctatagaaaatggttatgtagagcaactcggccaccggagaaaacaagaagactgttttcaaatgcaaaacttgacctttaaactccataaatgttgcagactgtgccctaatagcacacctttgctcacacaattgtgacactgatcctctcagaaacattcagattcctctcatgacctctttagtcaattgcaactctgtgtagtgcctgatctatgatctggcwcctttcaaagttgcctttgcctattctgatgcagatattcaaaactctagccaaactaggctgctccaatatttcacgcatgacctagttttccactgtcatacagtttctcatattctttgatctgactgaaatacacttccatctaacttgtcttcattccccacaatctccctctctatttatgtattgaaatgctactcatgcttcaagacataattaaaatatctgtttttatttgaggtcttctgagattcctagcagtatgtcacaaataagatatgatttattcttctttgtacaagcaaaataatttaaataatttgtagaaatc

SEQ ID NO: 765167 - DNA, 575 bp, Homo sapiens
ggtaactctgttcctatagaaaatggttatgtagagcaactcggccaccggagaaaacaagaagactgttttcaaatgcaaaacttgacctttaaactccataaatgttgcagactgtgccctaatagcacacctttgctcacacaattgtgacactgatcctctcagaaacattcagattcctctcatgacctctttagtcaattgcaactctgtgtagtgcctgatctatgatctggcacctttcaaagttgcctttgcctattctgatgcagatattcaaaactctagccaaactaggctgctccaatatttcacrcatgacctagttttccactgtcatacagtttctcatattctttgatctgactgaaatacacttccatctaacttgtcttcattccccacaatctccctctctatttatgtattgaaatgctactcatgcttcaagacataattaaaatatctgtttttatttgaggtcttctgagattcctagcagtatgtcacaaataagatatgatttattcttctttgtacaagcaaaataatttaaataatttgtagaaatc

SEQ ID NO: 765168 - DNA, 575 bp, Homo sapiens
ggtaactctgttcctatagaaaatggttatgtagagcaactcggccaccggagaaaacaagaagactgttttcaaatgcaaaacttgacctttaaactccataaatgttgcagactgtgccctaatagcacacctttgctcacacaattgtgacactgatcctctcagaaacattcagattcctctcatgacctctttagtcaattgcaactctgtgtagtgcctgatctatgatctggcacctttcaaagttgcctttgcctattctgatgcagatattcaaaactctagccaaactaggctgctccaatatttcacgcatgacctagttttccactgtcatacagtttctcatattctttgatctgactgaaatacacttccatctaacttgtcttcattccccacaatctccmtctctatttatgtattgaaatgctactcatgcttcaagacataattaaaatatctgtttttatttgaggtcttctgagattcctagcagtatgtcacaaataagatatgatttattcttctttgtacaagcaaaataatttaaataatttgtagaaatc

SEQ ID NO: 765169 - DNA, 533 bp, Homo sapiens
aactaaccagaaaacaaataacaaaatgacagaagtaagtcctgactcatgaatagtaacactgaatgtaaatggactaaactctctgattaaaagacatagaggagctgaatggttaaaaccacaagaaccaatgatctgttatctacaagaaaaacacttcgtctatacagacacacatagacttaaaataaagggatggaagaagatattccataccagtggaaaccacaaaaaagctggagcagctgtccttatgttagacaaaataggtttcaagacaaaaagtataagaaaaagataaataaggtgattatataataataaaggtctcaaattatcaagagaatataacagctgtaatatatatrcacccaacactgaagcactgagatatgtaaggcaaatactattggagctaaagagagagatagaccccaatgcaataatagctggagacttcatcatccactttcaacattgaacaaaccgtccatatagaaaatcaataatgaaacatcatacttaatctg

SEQ ID NO: 765170 - DNA, 676 bp, Homo sapiens
atgtagatagtcattatacccacttcagagaacgttgattatctgctcagcatccctttctggataaccactcttctccgatcaagttgtcctggttgagctgataactacagtcctcctctaaggattttccaggctagagctggtggaaaatgctgtctcttgcatttggtgtctttgtgctgggatgatataaaatcaaggctactagtggccatctcctccagcaacttggaagaagtcttcctgcaatgagagcracacacacaagaagacagaactgaacagaccagagaactctgatgcaatcatttgagtccttggattcagccatagatggaagaaagatccatcccttcatttttcaagtacctgagctaaaatattaccttctttgagcttaaactactttgggttgtttttattttattttttagtcactttaacctgaaagagtcttgactccactcctgtcctacctacttcacaggattattgtgcagagttagtgaaatataaaacatgaaagcataaagtattactaaaacaaaagaaaggatcatgttaattttctaagagccatatttacccatgttccaaatgaaccatacataaagaaaatagcttaaagatttttcatctttaaaaatacatgcaaaaattaaatttccagttt

SEQ ID NO: 765171 - DNA, 508 bp, Homo sapiens
acactctgtatctagctaatctggtggggacctggagaacctttgtgtctagctcagggattgtaaacgcaccaatcagcgccctgtcaaaatagaccactcggctctctgtaaaatggaccaatcagcaggatgtgggtggggccagataagagaagaaaagcaggctgcgggagccagcagtggcaacccactgaggtcttcttccacaccgtggaagctctgttctttccctctttgcaataaatcttgctgctgctcactctttgggtccacactgcgtttatgagctgcaacactcactgcaaaggtctgcagcttcactcctgaagccagcgagaccacgaacccaccrggaggagcgaacaactccagacatgcgcggccttaagagctgtaacactcaccgggaagctctgcagcttcactcctgagccagcgagaccatgaacccaccagaaggaggaaactctgagcacatcctagcatcagaaggaacaaactccgg

SEQ ID NO: 765172 - DNA, 641 bp, Homo sapiens
tgcttgagctttagcattctgtctttccgcattcaagtaaaatcattgcaggttttttaaacgtttcaaagtgtgttgtaaaatccttcagtatgttccacattcacttccactgcccttcttgaacttttgtcttacacttcctctttgaattgtggtcctaagaacaacagtctacattttataacaaaagattatcatccattctttgtaacttttgcttgcctcctaacacagtgcctggctcacggtaagcacccaaaaatctttagatgaatatartgagaaattttatcattatacatggttataataagtgttataatcctgacttatgtctagcttatagttaattatgattcttaattatcttctgctttgtcagcaaataaccagttttacttgaacagatgcttgcctatctaatgatccatcaaaatctttcagaataattgttcagattacaaaattctaagtaacaaagatctccaaacttgaagttttaaaacagttggctgtcataatacccttcatttttagcattgtcttctgctaaccatttgtatcactgaatattcatggattttttatttttttccccagtgaaagtaacctgacaacgccattcaaataatatttgt

SEQ ID NO: 765173 - DNA, 628 bp, Homo sapiens
agtaacataaccaaggttgcaagtcaggaggttattcatggtgaaagcaatgtaggaaggaagaactgcaagtgcaaaggccaggaggcaggaagatgccctgcatggtccaagaagataaaggaagcccttctggttagatcagagaagatgaagtygaatagggctggtgtggagggacctggagaatatctagactcttgtaagctactgaaaaaaaaaaatgttggcctttagtctgagtaggatgggaaacatttgaatatttgaatgaagaagtgaaatgatctgacttgtgtttttttaaaagctcattctaactgccacgttgaaaatggatgataggaaagcaagttgaaaaaggctgaccagttagaaaatattacaaatatccaggtcgttttattggtagggctagaaggaagtggttggactctgaatacgacgtgttaacagatggacgaaagggaacagtgacagtgagggtcatggaggacatagaggtttttggtttttgccctggagtattagaaagttcaaagttgtcataaattgagatggcaaaggttacatacagcctgcttttgggttcagtatcaggactgcaaatttaggcatgttgactttg

SEQ ID NO: 765174 - DNA, 628 bp, Homo sapiens
agtaacataaccaaggttgcaagtcaggaggttattcatggtgaaagcaatgtaggaaggaagaactgcaagtgcaaaggccaggaggcaggaagatgccctgcatggtccaagaagataaaggaagcccttctggttagatcagagaagatgaagttgaatagggctggtgtggagggacctggagaatatctagactcttgtaagctactgaaaaaaaaaaatgttggcctttagtctgagtaggatgggaaacatttgaatatttgaatgaagaagtgaaatgatctgacttgtgtttttttaaaagctcattctaactgccacgttgaaaatggatgataggaaagcaagttgaaaaaggctgaccagttagaaaatattacaaatatccaggtcgttttattggtagggctagaaggaagtggttggactctgaatacgaygtgttaacagatggacgaaagggaacagtgacagtgagggtcatggaggacatagaggtttttggtttttgccctggagtattagaaagttcaaagttgtcataaattgagatggcaaaggttacatacagcctgcttttgggttcagtatcaggactgcaaatttaggcatgttgactttg

SEQ ID NO: 765175 - DNA, 540 bp, Homo sapiens
cccttgccccgggtccaccacaccacccacatttggcaatgggttccaaagggaggaacgtgacaggcttctgtgaggtggcaagtatcatcttcagcgaagccatcattttgctaaaagaactttctccaggatctggcaggatataacttcagagccagaagaaaggagggagaagcacgctgcaaacaggcccttggtcatttgggagtstggggtcctctcgctgcccttccctggctccaggctgagggcgcccctgacccaggcccttccctctccagctgcacacacccatgcacacctgtgcacacacatgcccacggctcccttttttgttttttgtttttttaagatggagtcttgctctgttgcccaggctgaagtgcagtggcacaatctcggctcactgcaaactccgactcccaggttcaagtgattctcctgcctcagcctcccaagtagctgggaccaggtgcatgccaccacacctggctaacttttgtatttttagtagagacgagatttcaccatattggc

SEQ ID NO: 765176 - DNA, 615 bp, Homo sapiens
gattacaggcgtgagccaccgcgcccaccctgagataaattttaaaggaaaagacaaaaaagcacccccttctccttcccccatctcgacctaagaagggtgtttgggtgcatcctcagcccctcagggtgttccagcccccagcyggtccgagtaccgaggctcctgccggtcacccctgctggggtctgccctggggagcaggagctgtcctcctagtctgggtggggcccagctctccctgcccacccccggcccagctcccactagccctgaaggccaccgtcccgctggccagggctggactggtgtgggtgctcccttcctcctaggagagggactcctgggtccttcttgggagatagggagcttcttgggacatggggactcttgggagatggggaacttcttgggagatggggagctcttgggagatggggaactcaaagcaccctacccagctgcactcttggccccatggccccaggacctgggatgccgcccccacacagctttgctgggggaggtggtttcccacttagagtggcaggggacacgtccccttggggcagctggtggccagtctgagtctgttcagaggctgcgactgtgtgc

SEQ ID NO: 765177 - DNA, 604 bp, Homo sapiens
tctgttcccgagatgaagggccaaatggcctcggaagccatctcaggaagagccgtgtggcatctgcactgaacgcaggtggcaccaaatgtctccatggaggcggggtacagcctgtgtttccaggggctctttggggccagctgatgacttttactactgctgggacagtttctctgatttaagacccaaggtgcctaccacctccccctccgcctggaagaagcacagacgccagcgagcctcgggggcaggaggggcgtgggagggcgaggctcggggcgtgggagggggaggctcggggcgtggtgagaactgcctcaccggtcccagggtcagcacacataggccggggcaggggagacgggaaccagactccaacacgctaytgacagaacactaaggcctcaacagggagttttggttttgataaaaacattctacattaaggacaccatttaaaatacatggttgtatttaatttcaggggttcttggcaatcaattacaatgcaaaaataggaaccagttcaccctccattattatttttctaaagtcacaaagggcttccccgagccttggcaggaccagggcttgtgtagcc

SEQ ID NO: 765178 - DNA, 319 bp, Homo sapiens
gcttaaattaacctattttctgattattgtggcacagaggaaacagattgaatctgcaagacaaccccaagccccaaaatgaagtgagaataccagctttaaaggttcactcggatttttctttcgcttaagtaggtcatctttgctgttactttrgcgctgttgatgacaaaaagccaaatctttctaaggaaactgagtagcaattagtagcgctccctcggggccttggcactggccctcttcctcatgccccagggggcccccccacaatgccagagccaaggggcatcaaaacacaaagacccatccatccagg

SEQ ID NO: 765179 - DNA, 645 bp, Homo sapiens
aaaaaaaaaaaaaaaaagataaaaactggtacacctgtataggacacttaccatgcaggcagcttacaggactggaaggtgctctgggtaagtgaatggtcagtaaatgtgaaggcctagcacattactgtggggtttataaacggtacacatggtacaccaaatttattgtttaaaatattttttccttctacttctaaacttagctcactgtaacttttatattatraaacttctaaatttttaaaaccttggactcttttgtattaacatttagcttataacacaaacacaatgtacagctgtacaaaaatattttctttatatccttattctatatgcttttgtctattttaaaacatttttattttttgttttactttttaaactttttgttaaaaactgcaacacaaacacatacattagcctaagtcaacacagggtaaggatcatcagcatcactgtcttccacctccacaaggattttttcctactggaaggtcttcaggggtagtaacaggtatagagctatcatctccagtgacaacactgccttcttctggaatacctcccgaaggagtttcctgaggctactttacagttaactttttaaaaaaataaataccatactctaaggatagatag

SEQ ID NO: 765180 - DNA, 562 bp, Homo sapiens
gcctcaaaattcagctgtaacctacaactctttgcttttcaaaagtgactagaatcagaccacttttactctggtattctaacaggaaatgaaagcaggaaagagattagtatgtaactgcaaccactaarttgcaagttcataaggaaatattttaatttacttggtatgaaatgggaatttgttatcctcttctggaactatcatgaaactcaagtcactttcaagaaaaatgttagcattttggtttatctaccatttcaccctgcgcccagcattgttatatcactcaccttagatgtcaacacttagattcccaatgctgcaggcgatagctaattttattttgctcattccagaaagaaacaaaccacttctagattgtataaattcacttcactttttaaacatttgtaatttgtgcaattacattaatacttaaatctgaaaacacagacaaaattaaaatttaaagctccccaattactcttactctgagactaccacaattaaatttttcatgtcatcttccagctttatctcatgcaactatacacttgta

SEQ ID NO: 765181 - DNA, 616 bp, Homo sapiens
tttgaacaatgaggccagggaaagagtctactagtaggaaatgtctctaggcattgccatatgaataatgcaaattcattatttccagctttaggttaccttagctcaagatccaaattcccaggatcaagggacactaattgttcttgcctgcgtcctgtacccatcactttaccagagtgggataagtaccttgactggtagtctagacagactggtaaggcatagggcatatagcagtgcctcatggaaaattgtgctgcagttagcaaaaacatagtaaaggtatkatagcagggctgtcaaaatgacacctattttgtacatgtagaactagcatacccactctaagaaatgagctctctgatttctcagttttactttctagcttatctgcaaacatgggtttctttgctcaataagttacactgcaatttgaattttggaaggtggaatactcacatttcagtcacagagtagcaattcagcctcccaatgaaatcattcagaatataaacaggcacaaaacttcaatggtgagcaatgctatgtaaaacggaggaagtttaatattatgtacattatgtgactttatattcagaaaatttatgataag

SEQ ID NO: 765182 - DNA, 522 bp, Homo sapiens
ttgggatgcagttttctgagttttgccaaatgcacaaaatcacataactaccactgccatcaagatttggaacagtggctaggtgtggtggtggcttacacctgtaatcccagcacattgggaggctgaggcaggagcatcgcttgagcccaggacttcaagatcagcttgagcaacatagtgagaccccatctttacaaaaaactttttaaaaattagctgggcatggtggcatgtgcctgtagccccagctacttggaaggctaagrcaggaggatcacttgaacctgggaggttgaggctgcagtgtgctgtgattgcaccgctgtactccagcctgggtgacagaggaaaaccccatctcaaaaattttttttaaaagatttagagtcgttttcttttttttcttttttttttttggacagagtttggctcttgtcgccggggctggaatgcaatagtacaatcttggctcactgcaacctccacctcccaggttcaagtgattcttctgcctcagcc

SEQ ID NO: 765183 - DNA, 632 bp, Homo sapiens
ctggttgtttgctcttaccccttgcaaaagacagtgtcatcacatgcactcatcttggccaaaggcggtgcgggaggaaaggcatggagatgacgccagaatttaggttccactttttgacactgagacctcccaaggggaaccgcaggctctcagtgcggaagccccctccatagctcccctgacctgtccagcacctgcctccagaggtgaggaggggctgtgcaagttcctaaaggcagccaccatggacaggtctcaccagtcccaagtccttcctctaggcccccatccacctccttggactggcagcagtgggtctcagctctcaggccccagaagccacactgrgagtcctctgttcactgagaggcagcctgaaccacggaaaggagagacctgggtctctccagctaaatacccccattccctcctgctgtgcccatggctgtggcaccagggcctcctgccagcaggaccaccatgccctctgtgtcctctgaacacctccactcagagctgactcagttcagcaaaggcggagcatgaacttgtgaggagagacactaagcaggctggagtagctgaaacatcactttccactgctccctgggaaacggccagaaagattc

SEQ ID NO: 765184 - DNA, 604 bp, Homo sapiens
  misc_feature 587, 588, 589, 590, 591, 592, 593, 594, 595, 596, 597, 598,599, 600, 601, 602, 603, 604: n = A,T,C or G
tgtgaataaataaacccctaaatccaaagggctcaacacagcagaagttcatttttcttatcaagtccaatcagtggtaatgatggcagtgagaagtttgcttcaagcaaacttgaagcaaacttgttcagtgacttggcttctctctctgttgtgattttaccctcttctagagcagttctggccagtagaatattctatggtgatggaaatgttctatatttccttgtccaatacaatagccactaaagatgtatggctatgaagcacttgaaatgtggcctgtgcaatggcagaactgaatttttaattttatttaattttttaaagaagaaaaacattgaagaacctttattatctcatttcargacttactttatggtatttaaattagggaaagtaattaagacagtttattagcttatgaatcaatggaacaaacagaatagagtccagaagtgaaatatatgtgtatagaaatatatgaatatataaaaaataatatgtatattcaaaatgtatactgaaatatctggaatgtgtataagtatataattgaaatatatggaatttgattacattaaaannnnnnnnnnnnnnnnnn

SEQ ID NO: 765185 - DNA, 537 bp, Homo sapiens
ccttgttatggatttcttcatgtttcctgtgcttcaattttgtggaatttcttgaatccgtgggtttatagtttttatcaaatttgggaaatattttagccattacttttcaaagtttttatccatacttctctctcctctcctttgagtactctacatataagaggycacataaagttgtcccgcagttcactgatgctctgtttgtttttgttcttgttgccttttttctgtgtatttcagctcagatagattctattgctatgtcttcaagtcactaatcctttcttctgcagtatctaatataccattgatcttatgcagtgtattttttatctcacatattgtactatgagacttagaagttcaatttggatcattttttctattgcatatcactacttaacttttaaaatatgtccatactaattattaaatattaactaatgtccgctaattctaacttctgtgtcagttttggtcaattttatttgcctgatttttctccttattatgggagatattttaatgcttttt

SEQ ID NO: 765186 - DNA, 543 bp, Homo sapiens
ttgcattcccccaaaattaaaaacatgccatgaaccgaactggggctaaaataaaaagacgtatggtctcatttaagagttagggcttgttcgggtgcggtggctcaaggctgtaatcccagcactttgggaggccgaggcaggtggctcatgaggtcaggaaatcgagaccatcctggctaacacggcgaacccctgtctctactaaaagtakaaaaaaattagccgggtgtggtggcacgtgcctgtagtcccagctactcaggaggctgaggcaggagaatcgcttgaaccagggaggtggaggcagcagtgagctgagattgcgccattgcactccagcctgggcaacaagagcaaaactccgtctcaaaaaaacacgttggagtggggactgtcagaagtttgcaccttatgcaaaggacacaatgacatacctagtcctgactggtttgtcgcaccttatgtaaatgaagcacctctcccgatcagcttgtttataaaatctcttgggcttttcactttaaaatggcaatccttttt

SEQ ID NO: 765187 - DNA, 543 bp, Homo sapiens
ttgcattcccccaaaattaaaaacatgccatgaaccgaactggggctaaaataaaaagacgtatggtctcatttaagagttagggcttgttcgggtgcggtggctcaaggctgtaatcccagcactttgggaggccgaggcaggtggctcatgaggtcaggaaatcgagaccatcctggctaacacggcgaacccctgtctctactaaaagtataaaaaaattagccgggtgtggtggcacgtgcctgtagtcccagctactcaggaggctgaggcaggagaatcgcttgaaccagggaggtggaggcagcagtgagctgagattgcgccattrcactccagcctgggcaacaagagcaaaactccgtctcaaaaaaacacgttggagtggggactgtcagaagtttgcaccttatgcaaaggacacaatgacatacctagtcctgactggtttgtcgcaccttatgtaaatgaagcacctctcccgatcagcttgtttataaaatctcttgggcttttcactttaaaatggcaatccttttt

SEQ ID NO: 765188 - DNA, 645 bp, Homo sapiens
taaacaccagtgaagtggtcactgagaaaccataataactgttaatttagctgggttgcaaggtcaaatgtatttcactatataaacaaagtcagatttcaatttttcacctacaagggcttatgaaaattgtcagatgtattccattgtagatctcccattcattggctaggagataagagagcagcagagataaaagagaaaccttataaaattctgctgagaatattttttcctttttcataatgctcatgtttctcatgctgagagtacctgtgcactttgggtttttttgttggtttgttttttgagacagagtctcgctctgtcacccaggctggagtgcagtggcgtgatcttggctcactgcaacctccwcctcccaggctcaactgattctcctgcctcagcctcctgagtggctgggatcacaggcacacgccaccaagtccagctgatttttgtacttttagtagagatggggtttcaccatgttggccagattggtcttgaactcccggccacaagtgatccgcctgcctcggcctcccaaagtgctgggattacaggcatgagccaccacacccagcagcactttggggttttagagagaaattcctttaaggagaatattttctggctgat

SEQ ID NO: 765189 - DNA, 638 bp, Homo sapiens
ttatctcttgaaagcatttgctattgccaccagtagctataacctaaactaataatgccactctggacactataattcatactgtaaaccttaatgatgtacatcgaatcaataatcaatgttatttctgtaaataaataaaaatttctgataaatttgtaccagccccatctctgtccatctttttttggctttacaaatccacttgtaactgttgctaaacaaagtttagatttcaggcaacttgaatctttgctcccaggttataatcctcaagcttggcccaaataaactgtctacatatattcatgttacctcagcttatttcttttaggtaggcatattatttagaatgtactagagcagcctctatgaggggatttctcttttgactgtactccacttgctgtcacacccgagaatgcaaagccaggctgatctgacatagaatctgcaygtaagatctgacctctgcctgggattcacaaagcaaggtcaggctttggatttagaatgtacagaaaacaaacaggaaacattttctgcatggtgagatgtcaacatagatgtcttgaagttcccatttgagaatgtggctctttgagtttttcaggtcttgtctagtgacctgctgcagt

SEQ ID NO: 765190 - DNA, 597 bp, Homo sapiens
gtccttaattttcccggcatgagatgacaaatctcggatattatcccagccaatgacactgcttcactgcaatttgcaacaagaaaaatatttacgacaaggaaaaaagatgaaccaactggaaattaatgacttttttagattcagcagagaactgaggtccaaagcaaaatagtatccccaaatttggagaaacatgtaaacacaaagaatcataagatcagattacctaaagcaaaaacagaaggacctaggaactgatacgaacacgtgtatgataattttgacaaattgctkgaggctcagtgcagactagcttgagagttaaaaactcttgcagcctagtcttaggggagactatacttttgtgagttttatctccaagaaccctatcatgttctcatggggaagtctggagaaaaatctcagggaagagaaaaagtaaccattttggaagtttcccagattgttctctgtaagaaagacacgtcctttcagggaagctattttaccagagttctatctgacttgggagaagggcaattagtcccctccagactcttttagccttcctgtctaatgtcaggggacgaaaaa

SEQ ID NO: 765191 - DNA, 635 bp, Homo sapiens
gaaagatacataacccctctgtatcagttatctattgctacttgacaaattaacccctaaaattcagtggcttcaaaccaccataaatatttagtatcttatacaggttctgcaggtcatgaagtttggaagctgattagctgagtggttctgactcaaggtctctgggaaacyggagtcacaacacccaccaggttgggaataatctgcagacttggctgaagctgaagcatccacctcaggttcacttacaaggctggaagttggcgctggctgttggaaagaaactttattccttgctagaggaagctctccataaagctgtttaagtgttctcacaaaatggtgactagcttttcccaaaatgagtaagattttatgacctagactctgaagacgcacactgttgctttcactgtattctactggtcaaagaggtaacataatacaaggtaggaggagatgtcactaggaggagaattttaaaaggtaaggatcactggaagccacctggaaggctggctaccgtgccctcaaagtctctgatccagcatctataaaatgagaataataatgacttctacctcacaatgttggtggaaagattaaatgacaccatgtattcaaagtgactg

SEQ ID NO: 765192 - DNA, 635 bp, Homo sapiens
gaaagatacataacccctctgtatcagttatctattgctacttgacaaattaacccctaaaattcagtggcttcaaaccaccataaatatttagtatcttatacaggttctgcaggtcatgaagtttggaagctgattagctgagtggttctgactcaaggtctctgggaaaccggagtcacaacacccaccaggttgggaataatctgcagacttggctgaagctgaagcatccacctcaggttcacttacaaggctggaagttggcgctggctgttggaaagaaactttattccttgctagaggaagctctccataaagctgtttaagtgttctcacaaaatggtgactagcttttcccaaaatgagtaagattttatgacctagactctgaagacgcacactgttgctttcactgtattctactggtcaaagagrtaacataatacaaggtaggaggagatgtcactaggaggagaattttaaaaggtaaggatcactggaagccacctggaaggctggctaccgtgccctcaaagtctctgatccagcatctataaaatgagaataataatgacttctacctcacaatgttggtggaaagattaaatgacaccatgtattcaaagtgactg

SEQ ID NO: 765193 - DNA, 635 bp, Homo sapiens
gaaagatacataacccctctgtatcagttatctattgctacttgacaaattaacccctaaaattcagtggcttcaaaccaccataaatatttagtatcttatacaggttctgcaggtcatgaagtttggaagctgattagctgagtggttctgactcaaggtctctgggaaaccggagtcacaacacccaccaggttgggaataatctgcagacttggctgaagctgaagcatccacctcaggttcacttacaaggctggaagttggcgctggctgttggaaagaaactttattccttgctagaggaagctctccataaagctgtttaagtgttctcacaaaatggtgactagcttttcccaaaatgagtaagattttatgacctagactctgaagacgcacactgttgctttcactgtattctactggtcaaagaggtaacataatacaaggtrggaggagatgtcactaggaggagaattttaaaaggtaaggatcactggaagccacctggaaggctggctaccgtgccctcaaagtctctgatccagcatctataaaatgagaataataatgacttctacctcacaatgttggtggaaagattaaatgacaccatgtattcaaagtgactg

SEQ ID NO: 765194 - DNA, 556 bp, Homo sapiens
tttatggcatgcatttcagaactctaataccttaactctgtctacaagtgaggtgggattcccgaaggaccaccatcccacctctgaaaatattttcattacccaagtcagaggaagtgaagaaatgaaagcttcctgaatctggccagctaaatagcttgattcaagtgtgttatgttttcattatttacatttcccttggaatttgagggctgtcttcaaattttgtgacacctgtrtttttttcacctacttctgttcagtgatttcctggaagaaggaagaacacggctgaaatgaacaatcaacgaacactgatttaatctataccacatttacctccaattaggtaaatcatggatcactgtttaaaaatatttttacaaggccattggataaaaacaagtattaggtatcagtcagtgctctgatttgggaagagccatttacggtctctaagcttatgtcatctcatctgtagaatgaaagtgactgattccccacatggcttccaactccaagaacttctggaatgctgtactgacactcatacaga

SEQ ID NO: 765195 - DNA, 596 bp, Homo sapiens
tgggcagatctcttgagctcaggagttcaagaccagcctggtcaacatggtgaaaccctgtctctccaaaaaaaactacaaaaattagccaggcatggtggctcacatctacactcccagctactcaggaggctgaggcaggtgaatcgcttgaacccaggaggcagaggttgcagtgagctgagatcccgccactgcactccagcctggggaaagggagtgaaacctggtctccaaaaaataataaaataaaataaacgcccattagcatagacaaagasaaagacaagaaagtaaaaccttagcttatgttattccctattagcatctctgataatggatttgttcattaacaagttaggaactaattgaactggagattcaaaataatctaaaaatttcagttcttgatgttagtactgctgtctctatgcactatcaagtgcacggaaagtatagaggtcaatgtatggcacatctgctttccattaccatgaaattcacttcaacacatcactgtcataaaaaagtcctatactaagcattctgttgttggtattgatccttcccttccatgttatgaagatagttattca

SEQ ID NO: 765196 - DNA, 587 bp, Homo sapiens
ggggtattgagggaagctcagcatggcctgcaggcacccctcagcatagacagcctgggcaccacagatagcatgttgatggtggtgggaggcagacaggtgcctatgtgggaggtggtgggaccccagtgaaatcccaccttcaagccaggaacagcctgaagtctggggactgggctgccaatccaaggtggagtctgcaacttagagtgagaacttcattgacgccttttagccagtcgaatggtgctttttccaggcccgrccatggaccagtcagcacctacttcctccattctgagcaaataaaaaccccagactcagccagactcagatactcattggtacaacctgcctgctgaaaggagttaccactttgagtctcctgagagctgttctgtcactcaataaagcttctctctgtcttgctcaccctccagttgtctgcataacttcattcttcccagacgtgggacaagaacttgaaacctgcagtggtggggtcaggtcagctcaggagccatgggccggagcaggacggtgggactgaaagagctgcagcacaaactagctgaaacatgaccccg

SEQ ID NO: 765197 - DNA, 624 bp, Homo sapiens
aagatctgctatttaagaaccatcaacttgtagtatcccttaataattcctgtcaacgtcggctatctttgaaggatttagtggtttttgcttttggcagtgctgcaataatggaaataacttacactgcccatccccatcttacagtgtctgctaacaygttgggttgttggctgccaggcagatttaatttatccacttctcagtttgcattaacctttgaataataaagcacagctgaggctgctgtaagacacaaacagaggaatgaataattaaaaacaccttctcagccttggaaagaccaatccctaaccattaggggagctttaattgtgactgaactaagcattaaaaaggctaattgtactctttatagatggaaacaaatgcaaaggacgtagtacaactacgatatacatagtatatgaaagcaaagctctgaaggcaccaactaattagttcaaatgagaaacgatagcctgattcttaaaaagcaatttccttctaaagatggccactcattgtcttacattcagaaaaattgctacgacttgtaaaacgctattactcatctgatgcaggtggacgggatagagtagcatttgaaaggatagaaatgtt

SEQ ID NO: 765198 - DNA, 602 bp, Homo sapiens
acaggctttctcctcttccagcatttgttttcccactcttagttgttctcttttttcttcattcttcttatttcttgcttgcttttagtcaatttttcaatcctagcttattttcacatttactcacacactttaagtactggagggcataatgacatctatatctgtgtatcaccttgttatttgtaaagaacatttgtgtatatgaactcatctgttttcatctgttttcacctaattctcttaacaatcctgtaaagtattggttattattctcagattccagatgagaacatggagattcagaaaacttaagtttctactttaacttcatatagctagtgaggcttgggacaagttgtggaacaaagatttgaatccagatactttttagactctacactcagttctctgatcaytcactttgtctctcaccagcccatcaaaatgcaagagacgataggccagaaactggtcttagcaggctcattcacctgtcccccaggttcctgtgagccaggctattttctcattggaaaattattaaactgtatatcagtaatagaagaaaaataatttttccatgcctagaaaagaataat

SEQ ID NO: 765199 - DNA, 622 bp, Homo sapiens
ctgcctcctatttggcactagatggtgtagtaagctcatgtttaccttagttttagttaacaatttaggacagggagtgccacctgtcccaaatggggaaggttccaaagggaatatccaggtagtggagcaaaggtggctacaggttcatgcctagtggtcttgtacaatgaacttcccataggatggtgaaattgaacagctactctgatttagtgtctcctttggctgagttacagagcagagtccagggctggkgatggaagttccacctccccactttttatctggctgtgctcagtgatatttctcccttcaggcacttctcatgcttcctgtgggttgaaacagggacaacccaaaggaattcacctgagtttcctgccagcaaagtcaaagtggggaagctggctttccacctcagtcctactttttttcagtgtagaaactgtgtgaattttccctatcccaaattgtttactaaaactaaggtaaacatgggcttaccacaccatctagtgccaaaaaggaggcagcaacctagtgggggaaaaaaaagaaatacttaaattaaaaataatttctaagcaaaaatatccaatagaaaccaaaacttgtacct

SEQ ID NO: 765200 - DNA, 622 bp, Homo sapiens
ctgcctcctatttggcactagatggtgtagtaagctcatgtttaccttagttttagttaacaatttaggacagggagtgccacctgtcccaaatggggaaggttccaaagggaatatccaggtagtggagcaaaggtggctacaggttcatgcctagtggtcttgtacaatgaacttcccataggatggtgaaattgaacagctactctgatttagtgtctcctttggctgagttacagagcagagtccagggctggggatggaagttccacctccccactttttatctggctgtgctcagtgatatttctcccttcaggcacttctcatgcttcctrtgggttgaaacagggacaacccaaaggaattcacctgagtttcctgccagcaaagtcaaagtggggaagctggctttccacctcagtcctactttttttcagtgtagaaactgtgtgaattttccctatcccaaattgtttactaaaactaaggtaaacatgggcttaccacaccatctagtgccaaaaaggaggcagcaacctagtgggggaaaaaaaagaaatacttaaattaaaaataatttctaagcaaaaatatccaatagaaaccaaaacttgtacct

SEQ ID NO: 765201 - DNA, 622 bp, Homo sapiens
ctgcctcctatttggcactagatggtgtagtaagctcatgtttaccttagttttagttaacaatttaggacagggagtgccacctgtcccaaatggggaaggttccaaagggaatatccaggtagtggagcaaaggtggctacaggttcatgcctagtggtcttgtacaatgaacttcccataggatggtgaaattgaacagctactctgatttagtgtctcctttggctgagttacagagcagagtccagggctggggatggaagttccacctccccactttttatctggctgtgctcagtgatatttctcccttcaggcacttctcatgcttcctgtgggttgaaacagggacaacccaaaggaattcacytgagtttcctgccagcaaagtcaaagtggggaagctggctttccacctcagtcctactttttttcagtgtagaaactgtgtgaattttccctatcccaaattgtttactaaaactaaggtaaacatgggcttaccacaccatctagtgccaaaaaggaggcagcaacctagtgggggaaaaaaaagaaatacttaaattaaaaataatttctaagcaaaaatatccaatagaaaccaaaacttgtacct

SEQ ID NO: 765202 - DNA, 526 bp, Homo sapiens
taaggtgtttggtaggaatatggcaatagaaaaaactaaaatattgttagagattgattagagaagaatttgaatgcaaactagtaagttaggacattgcctttggacaagtatgctttcaataaaatttttattagcaccatgctctaaccaactgagctaacctgcatggcacatgtatacatatgtaactaacctgcacattgtgcacatgtaccctaaaacttaaagtataataataatttaaaaaaaaaccttagcagaaaaaaaragttttattttcccaagtttgaaaaatggatgagagcagagagaagcagaagcagagaggatttatagtccagactgagatgataaaaagcctgatccaggtttgtatggcatggcagaaacagctaagaagtaggatttaacgtcctattattggtagccagtcaggttatgaggattgagagtaaataattacttgaagattccagttcagggaacggttccagaaatctcactgtcttccaaccaaggtgta

SEQ ID NO: 765203 - DNA, 617 bp, Homo sapiens
tgcattacatttgctcatcatggctccttaagctcctcttggctgtgacagtttctctgacttttcttgtttttgatgaccctgatgattttaaagattacttgtcaggtattttgtaaaatgtccctctattgtgatgtgtctgattctttttcattattaaactaggaatatgggtttttgtgaggaagatcacagaaaaaaagtagtattctcatcacatcacatgaagggtgcctattatcaatataatttatatctgtcaatgttgaccttagtcacctggctgaggtagtgtttgtcaggttttgctctgtaaagtgtttcttcttttcctgcttttcatgctgacctctttaaaaggaagttattatgtgcagtacaaatttaaagactggagagttatgattcatctccttgaggaaaaaatatcgacataaattattgtgtacagggcaatttgtttattctctycaatttacgtatttatttatcaaatcatttatttacatcagtatggactcatggatatttgttttatgctttgggttatgatccaatgacattttgttgattgtttttgctcagattgttccagctttggtcactggatgctc

SEQ ID NO: 765204 - DNA, 618 bp, Homo sapiens
gcatgggtgtgttggtgggaaagatgcaggtgatacatcctactagataaatgggtaggcctcttgtgaagtcataaggcagttagtagaaaccatggccctttgttgtattccatgcctggttgctgtgaggccccaccccatttccctgctcctacctgcccccagactattcagccatgctgatcccctcagtattctgagtgcagagagaaagaagtgggcctttgggcaggaagctgcatggctagagaagcagacactcaactactctctcactttcccccgtggataaattcataaattgagaggatctgtattggcaatgaactgtgctaccttsgggaggagtgatgtgggcagggtaaaactgttcttatgctcttcagtgtgcctactcacaaatttgtttcttccaatagaatgccaggacatctctgcttaactcctgggctcttctccacggatggttgtcaaaatcagtgtttctgtcaggatacaaaggttgaaaattctgattctgccatctttctgacatcctcaaggccttatatgctgaatcatatgtcattttcacaaagaccttacggggcaaatattaatatccacatcctatgg

SEQ ID NO: 765205 - DNA, 618 bp, Homo sapiens
gcatgggtgtgttggtgggaaagatgcaggtgatacatcctactagataaatgggtaggcctcttgtgaagtcataaggcagttagtagaaaccatggccctttgttgtattccatgcctggttgctgtgaggccccaccccatttccctgctcctacctgcccccagactattcagccatgctgatcccctcagtattctgagtgcagagagaaagaagtgggcctttgggcaggaagctgcatggctagagaagcagacactcaactactctctcactttcccccgtggataaattcataaattgagaggatctgtattggcaatgaactgtgctaccttcgggaggagtgatgtgggcagggtaaaactgttcttatgctcttcagtgtgcctactcacaaatttgtttcttcyaatagaatgccaggacatctctgcttaactcctgggctcttctccacggatggttgtcaaaatcagtgtttctgtcaggatacaaaggttgaaaattctgattctgccatctttctgacatcctcaaggccttatatgctgaatcatatgtcattttcacaaagaccttacggggcaaatattaatatccacatcctatgg

SEQ ID NO: 765206 - DNA, 544 bp, Homo sapiens
atactgatgtagaaaattttaaataattacattttgatgactagttgtggtttcttttaaaagaatcatttggagtaatatggactgtgtgttattactcatccaagttctggctcgtattgacaatttgagtaataaaagtttgtgagactaggagtgaaaaatctggactggaagggaagacctctgcctactctcttgagtatgaagtttaccaggatggttgctctctagacaaaactcataagcaatgcattcaaagagaatatgtgtagactaggagataaaataggctggaaagataaggtttatcttgtaaacactgaatttattttgcttttgatatttcctaccttaaggastttttaaaaattatctcttttttatttcaactgtcttcagattgttaaggaaaaagttctatgtcaacacttgtaccaataacaaaagtgattacagaggcaatatgatgatggcattggtgttcctcaaaagaaatatggaaattgaaagatgaatatctaagcattttaatgttagagca

SEQ ID NO: 765207 - DNA, 490 bp, Homo sapiens
attgaactttcttacacaaccaaaaggaaaccttcaatttcacacgtgaaaggatggaaggataatcctcaagccaaatgtccagagtagataaaaaccttggtgcaactgtaatttacttttacagataataccccagtttcccaaaacatgtttaaaaaggctcatactattcttatttctaacttcttttaaagaagaatagaatcagacgtttactagttatatcttcggtgcttttctttctaggttaaagraaaaccactcgttatatcccatgtacaataactaatataatttattaaaatgaaaacaataattatgaaagatacttgttcttggatctattttagtttctggggaaaaaaatcttttcctcgaagagcttatattttagtattaagacagactcatcagcattaagatagaatgtgatggagctataatgatctcattcagtcccacagctttaaatccctactgtttgttg

SEQ ID NO: 765208 - DNA, 603 bp, Homo sapiens
atttccaccaatctgcagaaaggaaagtaggatatcatattcattgcatacctttgtgtgatttgtgccatagcgtatctctgttagtatagatataactaagatgcattgttcacatatattattagaaaagaatctagttctgtccaatatatgtgctatactgtagtactcattatttcaagatacrgacatattagaattttgatacttttcatctgtagtatatgcataaattcacattccaaataagtcagcactgcagaaaaataaccttgatgcaataaagctcataataatgttgggagttttattttccttaccacacttgatgcttgaaataaactagaattccctacatctggctttgagatgacaaacttgcatagttttctatgactaaaatttctagtcattgaaaacaattttattttttcatctcttctttctgaacacatactttgagtacattttccagcctctcttgcatttggtcatggccatgagactgagttctagccaatggaataagagctaaaatgatatatgtcacttccaattctggaccataaaaacctttctttgcttctctgccagttggat

SEQ ID NO: 765209 - DNA, 549 bp, Homo sapiens
cacttccagtatgtactttgaccttacaaattttgcaaaaggtccatagaatgtactacaagagtaccaaattttacaaaatagatgaatttatgagaattggctaaagagtcaatttctgtctcttggatttctagaaataagttatatttttcttttaaattttattaataaattatagttgtggccaggtgcagtggctcacgcctgtaatcccagcactttgggaggctgaggtgggagaatcgcttgggaccaggagttcaacacaaacctgggcaacatagtgagatatcatagctacaaaataaaaaataaaaaaattaggcaaacacctgtagttccagctactcaggaagytgaggtggggggatcacttgaacccaggagttcgaggctgcagtgagttatgatcaggccactccactccagcctgggcaacagagtaagaccttatctcaaaaaataattaattagttgtacttagtgatacagaaatattttaaatatttaatttaaaatggtaacaatgtagtagcgatactggtg

SEQ ID NO: 765210 - DNA, 686 bp, Homo sapiens
acataggcagaagaattaaactggatccgtttctctcaccatagacaaattaactcaaggtggattaaagacttacatgtaaggctggaaaccataaaaattctaggagaaaccctaggaaacactattctggacataggcctaggcaaagagtttatgactgagaccttgaaagaaaatgcaacaaaaacaaaaatgaataaatgagataaactaaaaagcttccgcacagcaaaataaataatcaacagagtaaatagacaatgtacagagtgagataaaatatttatgaactatacttctgaaaaaagactaatatccagaacctataaggaactcaaacaaatcagcaacaataacaacaaaaaacagataatctcmttaaaagtaggcaaacatcatgaacagacagttctcaaaagaagatgtacaaatggccaacaaacatgtgaaaaaatgctcaacatcactagttatcagggaaatgtaaattaaaaccacagtgagataccaccttaccctagtcagaatagtcatttttttaaaagtcagaaaacaaatagatgttggtgtggatgtggtgaaaaagaatacctatacactgctggtgggaatgtgaattagtacagcctctatggaaagccatgtggagatttctcaaagaactaaaagtagctctactgttc

SEQ ID NO: 765211 - DNA, 686 bp, Homo sapiens
acataggcagaagaattaaactggatccgtttctctcaccatagacaaattaactcaaggtggattaaagacttacatgtaaggctggaaaccataaaaattctaggagaaaccctaggaaacactattctggacataggcctaggcaaagagtttatgactgagaccttgaaagaaaatgcaacaaaaacaaaaatgaataaatgagataaactaaaaagcttccgcacagcaaaataaataatcaacagagtaaatagacaatgtacagagtgagataaaatatttatgaactatacttctgaaaaaagactaatatccagaacctataaggaactcaaacaaatcagcaacaataacaacaaaaaacagataatctccttaaaagtaggcaaacatcatgaacagacagttctcaaaagaagatgtacmaatggccaacaaacatgtgaaaaaatgctcaacatcactagttatcagggaaatgtaaattaaaaccacagtgagataccaccttaccctagtcagaatagtcatttttttaaaagtcagaaaacaaatagatgttggtgtggatgtggtgaaaaagaatacctatacactgctggtgggaatgtgaattagtacagcctctatggaaagccatgtggagatttctcaaagaactaaaagtagctctactgttc

SEQ ID NO: 765212 - DNA, 499 bp, Homo sapiens
ctggggcctgcctggaccaagggcatgctgtctgcatgggtggaatttagggacattgcggacacacttccatccactccactcggagtgtgaacacccgtctcagtcaggacagttctgctccattctttacagtcgaggcagagtgctgagaagggcgggttttacctgatgctcagacrcttctctcttcctcggtgtagccaacaagtaaatacagagctgattctcttttttcttcattttaaaattgtttttagaaatggagtctttcactgttgcgcaggctggagtgcagtggcaccatcacagctcactgcagccttgaactcctgggcacaagtgattctcctgccttcaccttccaagtagccaggactacaggcatacaccaccacgctcagctaattttgttttttattttttgtagagatgagatgtcactatgttgcccgggctggtttcaaactcctggctgtcttcaccacggggtggaagg

SEQ ID NO: 765213 - DNA, 600 bp, Homo sapiens
gaaggaagataaagtacatgcctagagagcaatggaaaatgttccaggctggtccagctggaaaagtcatagtagcatagtagcagtgctttatctaaagaagccagtaagctctgaaagacgacagagtaggctgcacaaaagaaagagccagcagccactagtgctggggaaatgcccttcatgagactcttacatgattattcatgaaggggcatgagggggtgtcactttacaatcctgtttcaggaggtccctttgggcgcacatgctctgtggttatacatgccagtacacacatcgtgtgtctcattagcatttaaaatctccatccaggggtgttctttttactattataatgagcaaaaagctattctagagtgagtttttggaggagtgcacgtgctcktcagtggggaaagtccttagcgtggttacctccagctagggcttgataaatccccttcagggctggaggagccccaaccacaagaccagatgtgatcttgccctttttgctgactgccagtgggcaacatctccaagacttcttttcccagggggctccctgggctgctcgtttctggctatctgctactc

SEQ ID NO: 765214 - DNA, 505 bp, Homo sapiens
agtcctaacagcaggactgacacttatgccccaatacccctcaccttgccccttacctccagtgtccagcaattgaaaggttagtatataacttctggctagcaaagctccctgggaatttgatttgaggctaaatytagtgtccattcttatgtattgggctgtaagtatgtgaataatgaaatatttcaagtcatctttgcctgtaggtgctggacaatattttcccacccacctgcataatcaggccacctgaattgtcacaaccatgtgtcctctctgtttcctgcctgtttttctgtgtttctattggaactggagccccgtccagtctggcgtgacaccctaccacattcttgcaaattatctttcttgctcattgggccctgccacaattgaaaacaattcctaattccattcccctgcctgccaacttgacacatacagccatgcacagcccatccaatgagagagccttgactgacacctgccataaccacactca

SEQ ID NO: 765215 - DNA, 583 bp, Homo sapiens
tcctgagaagtgtctgttgaatgccgagtcgtagggttggggcacatccagaggtccgaggtgagttcctaccctcttgttggagtgtgaagggctcatgttgtggagtgtgatgcatctggattcgagctctgcttgcttcctgggacaggtcactcagtgccttctggccttggtttccttgccttgataatgggagccctccttgcctcactggcgggaggctgtgatgagatcacatgtgcattagctggcactcagggttgtcgcctcacagtgcctgctggtaccgtcaccccagtgctgtggatgacgcaggaggggcctgtgtgcctggaggtcaygtgtagacagtgccccgtggcagggatgtgcctatgaagaggggctgcaggattcggaagaaggagaaaacccagcctggttgcgatgtcctgcaatggcctcaggagaagtgagaaagcctgtggccccctggagtaagtagagtgagaagtgttagaggctgtgtcatcagaacccggaccacacctggcaggaagtagaaatggatgaagaaattcgggttcatgacgagaggctt

SEQ ID NO: 765216 - DNA, 541 bp, Homo sapiens
catggggaaactgagactttctcagtcttactaaggccagcacgaatacagcatcagaacaaaatccttccaagctgattgctgccccaaaaccccctaccctagaaaaaaaaaaaattttttttttctttttttgaracggagtctcactctgtcacccaggctggagtgcagtggtgccatctcaactcactgcaacctccgcctcccgggttcaagcagttttctgcctcagcctccagagtagctgggattgcaggcgcctgccaccatgcccggctaattttttgtacttttagtagagacggggtttcaccatcttggccaggctggctttgaactactgaccgcatgatccacctgcctcagcctcccaaagtgctgggattacaggcatgagccaccaagcctggctgaaaatattgtttaagttaccattggatgcccccctaagaaggtctaagcaacttggacacttctggcctcactgctctgcaatttacaacccaatgtccgatgctactgaaatccagacacacaa

SEQ ID NO: 765217 - DNA, 616 bp, Homo sapiens
tataatttatgttaatattttatatacatatttacattgcatatatacatttgtttatatctatacattatactttatatgtttattatttgcatatttttacttgtatttttctgtatgtttttatgtgtatagaaatatatagttttttttttttaaatgaatccaggcttaataagtcatatcacatgagaaggaatcaagtttcctgggaaccacagggtttggactacgggaggtcagtgctggagggagaaaagtttccaagagaaccaaaggcaaaagttgaggccactaggaaatgctccttctctttctctctctcygtctcacctgcctgtgcctgtctgcccacccctagcctgacatcttcataggtcccgagtcattttacatctcttcctctactgttacttatcttttacttcttcatgtaatcaaccttcatttcaccagttatcgacttcattatcactggttttttagattatcagttgaaaaagttttatgtaaaatgatttgtaaatcatattttccgttgtcatttcagagatatggtccaacaggggaaaaaaattgacatatgtagtaaaaatcacagacaaaacctacatct

SEQ ID NO: 765218 - DNA, 616 bp, Homo sapiens
tataatttatgttaatattttatatacatatttacattgcatatatacatttgtttatatctatacattatactttatatgtttattatttgcatatttttacttgtatttttctgtatgtttttatgtgtatagaaatatatagttttttttttttaaatgaatccaggcttaataagtcatatcacatgagaaggaatcaagtttcctgggaaccacagggtttggactacgggaggtcagtgctggagggagaaaagtttccaagagaaccaaaggcaaaagttgaggccactaggaaatgctccttctctttctctctctccgtctcacctgcctgtgcctgtctgcccacccctagcctgacatcttcataggtcccgagtsattttacatctcttcctctactgttacttatcttttacttcttcatgtaatcaaccttcatttcaccagttatcgacttcattatcactggttttttagattatcagttgaaaaagttttatgtaaaatgatttgtaaatcatattttccgttgtcatttcagagatatggtccaacaggggaaaaaaattgacatatgtagtaaaaatcacagacaaaacctacatct

SEQ ID NO: 765219 - DNA, 616 bp, Homo sapiens
tataatttatgttaatattttatatacatatttacattgcatatatacatttgtttatatctatacattatactttatatgtttattatttgcatatttttacttgtatttttctgtatgtttttatgtgtatagaaatatatagttttttttttttaaatgaatccaggcttaataagtcatatcacatgagaaggaatcaagtttcctgggaaccacagggtttggactacgggaggtcagtgctggagggagaaaagtttccaagagaaccaaaggcaaaagttgaggccactaggaaatgctccttctctttctctctctccgtctcacctgcctgtgcctgtctgcccacccctagcctgacatcttcataggtcccgagtcattttacatctcttcctctactgttacttatcttttacttcttcatgtaatcaaccytcatttcaccagttatcgacttcattatcactggttttttagattatcagttgaaaaagttttatgtaaaatgatttgtaaatcatattttccgttgtcatttcagagatatggtccaacaggggaaaaaaattgacatatgtagtaaaaatcacagacaaaacctacatct

SEQ ID NO: 765220 - DNA, 531 bp, Homo sapiens
ttttaccctccttgtatctcttcttaactctttccaccactgaggtggccagacctttctgggtcttttgccccaggggtgtggacagggtttaaagccagataaagaggaactccctggattttagcctcccaaagctgaagcccatagtgaaagcctgctagtgaacaaagcgttttggaggaagataagaaagagtaaggcttatcctacctagtctagagaatatgtggttgggctcagggaaggaaggagagatgaagggaaatccagattgtctagggatcctgctcctgtgcccttcttcctgctgrggaagcagtatgttagccagttctcgcattgctataaagaaataacctgagactgggtgatgtataaagaaaagaggtttaattggctcattgttccatgggctgtacaagaagcatggaagcacctgcttagaaatttctttggccagacaccctaaatcatttttctcaagttcaaagtttcacaaatctctagggcaggggcaaaatgccacca

SEQ ID NO: 765221 - DNA, 531 bp, Homo sapiens
ttttaccctccttgtatctcttcttaactctttccaccactgaggtggccagacctttctgggtcttttgccccaggggtgtggacagggtttaaagccagataaagaggaactccctggattttagcctcccaaagctgaagcccatagtgaaagcctgctagtgaacaaagcgttttggaggaagataagaaagagtaaggcttatcctacctagtctagagaatatgtggttgggctcagggaaggaaggagagatgaagggaaatccagattgtctagggatcctgctcctgtgcccttcttcctgctgaggaagcagtatgttagycagttctcgcattgctataaagaaataacctgagactgggtgatgtataaagaaaagaggtttaattggctcattgttccatgggctgtacaagaagcatggaagcacctgcttagaaatttctttggccagacaccctaaatcatttttctcaagttcaaagtttcacaaatctctagggcaggggcaaaatgccacca

SEQ ID NO: 765222 - DNA, 531 bp, Homo sapiens
ttttaccctccttgtatctcttcttaactctttccaccactgaggtggccagacctttctgggtcttttgccccaggggtgtggacagggtttaaagccagataaagaggaactccctggattttagcctcccaaagctgaagcccatagtgaaagcctgctagtgaacaaagcgttttggaggaagataagaaagagtaaggcttatcctacctagtctagagaatatgtggttgggctcagggaaggaaggagagatgaagggaaatccagattgtctagggatcctgctcctgtgcccttcttcctgctgaggaagcagtatgttagccmgttctcgcattgctataaagaaataacctgagactgggtgatgtataaagaaaagaggtttaattggctcattgttccatgggctgtacaagaagcatggaagcacctgcttagaaatttctttggccagacaccctaaatcatttttctcaagttcaaagtttcacaaatctctagggcaggggcaaaatgccacca

SEQ ID NO: 765223 - DNA, 643 bp, Homo sapiens
ggtttgggctccacactgtggggaacaggagaaacagccatccacccggggccatccccaaactgaccttttctgtgtccctaaccctcagaggcccgagctctgcctgggaattaaaacacaaattcctgcaaacgtgaggtctaactccactgtcacggagaggctgacgaygccagctgtgggaattgcagtggggacaggtatggagaggatgtttctggacatgggagtgactgccacttggagctgcaggcagaagcaacagctggtgtgttttcctgagcaggttgggggatggctcaaaatcaatatttactttacaaacagccatccggagggtgaaccgccctgcctctcaccctcagcttttctggggaaagatgtctgtggcctgcttagctctgccctgctggtcttcgcctctcgatccaaagcaactttgatgtgtatgggaaaagtactgcactgtgaaagaaactgtggacagatggtccacctgagctcaaaggtggggtccctccacgtatgcacctcaggactttccgtcctgtgggaatctcctaaaaagttgctccatgggtggcactctctgagcagcacgattggcggggagggctctgtcagcaatattatgtcgtca

SEQ ID NO: 765224 - DNA, 534 bp, Homo sapiens
aaaacagcactaatattttctctgtcctatggaagcttccagtggccttgagctgggtactatttgtccctacttcagattttttttttttttttgagacagagttttgcttttgttgcccagattggagtgcaatggcgcgatcttggctcaccgcaacctctgcctcccgggttcaagcgattctcctgcctcagcctcccgaatagctgggaatacagatatgcaccaccacacccagctaatttttatttttagtagagayggggtttcaccatggtctcgaactcctgacctcaggtgatccacttaccttggcctcccaaagtgctgggattacaggcgtagccaccacgcccagcctatttcagatattaaaaacctggtattcagtggttaaatacttggccaaggccattcagtggtcaaacctttcatcctggctaagaggctcaaagcccaggacctctttgctgtatcgtgcaggaatttctgataagtacaaaaataagaggctgtgatagctgaggttta

SEQ ID NO: 765225 - DNA, 643 bp, Homo sapiens
aggcagttccttatagcagcccctgagaacaggctactacaatatctatctattgatgaatgggtaaataaaagatggtatacccattcgatggaacataacggcaataaaaagaaatgatacatgccacacatagatgaaccctgaaaacaytgtactaaataaaataagctattcacaaaagaccacacattgtatggtcccatgtatatgaaagaccagaaaagggaaatctatacacagaaagaaaattcggagacacatagagattaactactatggattcatggtttcagtctggagtgatgaatgtattctaaaattgatttcagtgatagatgcacaactctgtaaatatactaaaaaccattgagttggacactttatttgtttttttttttaagagaggtggggtctggctatgttgaccaggctggtccaaactcctggcatcaagcaatcctcccatcttggcccccaaagtgctaggattacaggcatgagccaccatgcctggctgggttggacactttaaatgagtgaatatagtatataagttatatctcaccaaagtcattataagaaatagggaaggaatgtgtgtgtgtgtgtgtgtgtgtcgtgtgtgtgtgcgcgtgcgtgt

SEQ ID NO: 765226 - DNA, 605 bp, Homo sapiens
aaggtcattgtcatggtaaaaaaaaatcagttcagcaagagaacataacaagtgtaaagatatatgtactccacactgaagtacccagatacataaaacaaatattactgaaacaaaagagaacacgatacaataatagctggagacttcaacaccccactttcagcattggacagattatccaaaaatcaccaaagtgacaaagatctaatctgcactatagatcaaatggacctaatagatatctacaaaacatttcatccaacagcagaatacacattcttttcttcaacacatggatcattatcaagtatagaccatatgttagtccacaaaacaagtcttaaaaaattaaaagtctatcaawtattttctctgaccacaacagaatgaaactagaaatgaataacaaaaatttgggaatatacaaacacataaaaattaaacaatatgctattgaatgaccagtgagtcaagtaaaaaatttaaaagaaaatgaaataatttcttaaaacaagttaaaatgaaaacataacataccaaaacctattggatacagcaaaagcagtactcaggggaaagttaatagctacaagtgcctacat

SEQ ID NO: 765227 - DNA, 633 bp, Homo sapiens
gggaccagagagagctcattccctaaggcaggattgctgagcaaagccttgccaagcagttactggccattcccccagcaggtaaatcaagatggaggtttgcagcacaaaccatacagatacacaaggcacactagattggccatagcccaagactagcccacaagtcccttttcacaattaaagctttacagacaatataaacagtgatagttgaggggccctggcctagtaagcatcttctaaaatttaaaaaaaaaaakcttgcttaaaacttattgctgatggggtagagaaggggtttaaaaatgcctggagaagaacctcttattcttatgccattggttcctccaccaagagacaagcttaattactgtctgatgcagtaaagccccttggctggagaaggggaaggctctggtggcgagtggtggaaaacgcccaccagagggacccttgggccatgcgttctagccatggcgaagaggggaaggttagtttccccccaaaaaaggaacgggccataaaaaggcccaggaatgaagtggggaggtgggggaggcacaggtattggggacctggttccctcatcctcggaagtctgaggataaaaaggtaacggtgagaggtttt

SEQ ID NO: 765228 - DNA, 538 bp, Homo sapiens
gtaaaatgtatttaatttaaatcatgatattatcattgagataagtgtgtattcatgctccaatcctaaagcaattcttttagctgtattagctctggaattttagcaagaacaaaaatagcatagtcaaagctctaagtttgtgaacttttgtaagatgaatgcccctaaatgaaaaggtgtgcawgcctaaatgagcatattgaatacaaagcaatttaacacaatgaaattgttctcagatgatgccttctctatgaattaattttttcagcagttgaattaagttattaaagataatactacagttaagatcattacatgttatttaacttttgtcagcatttcaaatttattagacatttacaaattaactatcaagggaaatataataaaataagagagagatctaataatatgtatttgagattgatatttaaaacagaattacattttaaccacattatgtattgttattgattttattattgttattttttgagatggagtctcgctctgtcacccaggctggagtgca

SEQ ID NO: 765229 - DNA, 625 bp, Homo sapiens
accttcgtggtgagtgttacagctcttaaggcagcgcgtctggagttgttcattcctcctggtgggttcgtggtctcgctggctttaggagtgaagctgcagacctttgcagtgagtgttacagctcataaaggcagtgtggacccaaagagtgagcagcagcaagatttatggcaaagagtgaaagaacaaagcttccacagtgtggaaggggaccccagcgggttgtcactgctggctsgggcagcctgcttttactctcttatctggccccacccacatcctctgattggttcattttacagagagccgagtggtctgttttgacaggttgctgattggtgcgtttacaatccctgagctagacacaaaggttctccacatccccactagattagctagatacagagtgtcgacacaaaggttctccaagtccccaccagtgtagctagatccagagtgtcgattggtgcattcacaaacccagagctagacacagggtgctgattggtgtgtttacaaaccatgagctagatatacagtgccgattggtgtatttacaatcccttaggtagacacaaaggttctccaagtccccaccagagtcaggagcccagctggcttc

SEQ ID NO: 765230 - DNA, 625 bp, Homo sapiens
accttcgtggtgagtgttacagctcttaaggcagcgcgtctggagttgttcattcctcctggtgggttcgtggtctcgctggctttaggagtgaagctgcagacctttgcagtgagtgttacagctcataaaggcagtgtggacccaaagagtgagcagcagcaagatttatggcaaagagtgaaagaacaaagcttccacagtgtggaaggggaccccagcgggttgtcactgctggctggggcagcctgcttttaytctcttatctggccccacccacatcctctgattggttcattttacagagagccgagtggtctgttttgacaggttgctgattggtgcgtttacaatccctgagctagacacaaaggttctccacatccccactagattagctagatacagagtgtcgacacaaaggttctccaagtccccaccagtgtagctagatccagagtgtcgattggtgcattcacaaacccagagctagacacagggtgctgattggtgtgtttacaaaccatgagctagatatacagtgccgattggtgtatttacaatcccttaggtagacacaaaggttctccaagtccccaccagagtcaggagcccagctggcttc

SEQ ID NO: 765231 - DNA, 538 bp, Homo sapiens
gagttaaaaaagagtctaatagtttatttgcttggttagctgaaatatggattaaaagatggctcactgtgactgagatggaaaagcctgatctcccttggtttaatgtagaggaagagagccaaagggagcttagggagattgggatggtggagtggattagtcactttagagctactcataccagctgggagggtccagaagatacacccttgaccaacactttgtgaaatagatttgagagagcagcagctgcatctttgaagagcccagmaattgctgttctctgtatgtcagctctaacagtgggaaccacagtcactcaaccacaaaatataaattccatgtgaataattggatcctgagttggcaggggccaagttgtggcactcaaccaccaatggcaaggtgggcatagctaccgtgaagggcagcagaggcaaaacagcaatcagaacagtctgattggtgtagcattctggcattggctaattattcacagtgtttctagaagaaaaattgatgggaagtctactaa

SEQ ID NO: 765232 - DNA, 511 bp, Homo sapiens
aaaaacttccatgtctagtggacagaagactaatttgaattataaaaacatagaatcactgcccctcaaccaatttccagacttgagccagtttacagatcctgaaccacttgaatgaagggaaggtcgtgtccccttgaggaaggaccccactacactaccaacaatttattctgttaatctttttcccatccttccccaagatgacctccagccttttaccaaggtaactgtgcattggggaaagggaaatatcagacattttgtggactattggacaccaactctgagctgatgttgattccagggtacccaaaacattaytgtggtcctccagttaaagtaaaggcttatgaaggtcaggtaattaatgcagttttagctcaggtctgacttacagtaggtccagtggatccctggactcatcctgtggccattttcccagtgcaagaatgcataattggcatagatatatttagcagttggcagaacccccacattgactccctga

SEQ ID NO: 765233 - DNA, 524 bp, Homo sapiens
tttaagaaaatctgagacatttccactttgtctcttgctcctactatcaccacgtgacatgctggttacccctaccttctgccatgattgtaagcttcctgaggccctcaccaaaaggggatgcttgcactatgctttgtgtatagcctgcagaactgtgagccaattaaacatcttttmtatataaattacccagtctcacgtatttatttatagcaacgcaagaatggactaagataactatcctcctacctctaatctgttgctggtgtctgccactggtcaaatccagtcagaaaacagaaggtaagggtcttattaaaatagtctataaattgccaaagagcaagagtcagaagggaggaggtgaacttggaggggcaaatggaaaattaccagtgcagcatccaaatgccatgttaagtctggggagaaatgatgaccaaagaaaggtttaggaagattatgtgccttcagttgaaccctaaagaaagattatgcatttggtgcaaataaatagttca

SEQ ID NO: 765234 - DNA, 458 bp, Homo sapiens
ataactactatggcaggaatgtggccactttaaaaagttacatgcaaagaatgtgctctgcagcacatggggaatgggatttcaagtgcaagaatttaagacccgtgtgtgttttttctaggaataatgcctttgtggtgtccacctgaaacctaaaaaggcacaggttcctctggccactgcttaaagctcttgagccttctcaraaggcatggccagctggccctgcagacttggtcttccataaagtaattttgcttccctaaacattcctccttctttttttttttttccatccattgagacagagataacattcacggattttggatccacccaaattcattttgagtctttgctcctccataactgccaaatgttaggcatgtgaaatgacattagacatgttgcttaaactaccttaaccccagtttcttcatctgtaacatctgggtaac

SEQ ID NO: 765235 - DNA, 532 bp, Homo sapiens
agcacgctcatgcctgtaatcccagcactttgggaggccgaggcaggtggatcacctgaagtcaggagttcaggaccagcttgaccaacatggtgaaaccctgtctctactaaaaatacaaaaattagctgggcgtggtggtgggcgcctataatcccagctactcgcgtggctgaggcaggagaatcgcttgaacacaggaggtggaggttgcagtgagccaagattgcgccattgcactccagcctcggtgacagagcgagattctgtctcaaaaaaaaaaaaatatatacacacacacacacacacacacacacacacacacacayatatgtgtgtgtatatatatacacacacatacatacatttatatatagacatatatgtgtatatatataaatgcacacatatatatgtgtatatataaattggataggtcttcaaacacaatgttaaatttaaacaaatcacagttaaggaagaaaacataatgtatcctatcatgtaaataaaatattaaaaacaaaatagg

SEQ ID NO: 765236 - DNA, 606 bp, Homo sapiens
accaggaagaagttgaatccctgaatagaccaataacaagctctgaaatttaggcagtaattaatagcctaccaaacaaaaaagcccaggaccggacggattcacagctgaattgtaccggaaatacaaagaggagttgttaccattccttctgaaactattccaaacagctgaaaaggagggatycctccctaactcattttatgaagctggcatcatcctgatacccaaaccgggaagagacagaataaaaaacgaaaactttaggccaataaccctgatgaacattgatgcgaaaatcctcaataaaatactggtaaactgaatccagcagcacattgaaaaccttatccactacaatcaagtcggcttcatccctgagatgcaaggctgattcaacatatgcaacatatgcaaatcaataagtgtaacccatcacataaacagaaccaaagacaaaaaccacatgattatttcaatagatgcagaaaaggcctttggtaaaattcaacatcccttcatgttaaaatctctcaataaacttaggtattgatggaacacatctcaaaataataagagctatttataacaaacctacagccaata

SEQ ID NO: 765237 - DNA, 612 bp, Homo sapiens
tcgtgcaatttcaggctgtggatttatgaacaatatctcaccagtggataatatcggttgtcaagtgtatgttttattacccctagaactcccttttgtctttgcaagttgctagtggatatctctgtttttttttttttttctcctggcttcacaaaaatttggaaggggttwatttaatttttcttcttttaccaaaaaagttaatattaatagtaaggaaaattaaaaagaataaaataaagatagcagataaaacattatgaataaccatttcatcggcactttaaatactatggaaaggattctaaatgcatattttattatctgcagctagtgtaggaggatcttgtataatatgtcaaaagcatgctttctccgtctgagttattatcagagttgggataaaattttctgctacatgtctctagcctcctgttgtccaaaagttccatgaaggaagagaccatatctatcttgatcgcctccatatctttaatgtccaaaacagtgcctggcagagttgccaaataattaatgtgttcatccatcacagttagtctctaattgctggatgactgagctcactggataggctcatatcaagtcagg

SEQ ID NO: 765238 - DNA, 612 bp, Homo sapiens
tcgtgcaatttcaggctgtggatttatgaacaatatctcaccagtggataatatcggttgtcaagtgtatgttttattacccctagaactcccttttgtctttgcaagttgctagtggatatctctgtttttttttttttttctcctggcttcacaaaaatttggaaggggttaatttwatttttcttcttttaccaaaaaagttaatattaatagtaaggaaaattaaaaagaataaaataaagatagcagataaaacattatgaataaccatttcatcggcactttaaatactatggaaaggattctaaatgcatattttattatctgcagctagtgtaggaggatcttgtataatatgtcaaaagcatgctttctccgtctgagttattatcagagttgggataaaattttctgctacatgtctctagcctcctgttgtccaaaagttccatgaaggaagagaccatatctatcttgatcgcctccatatctttaatgtccaaaacagtgcctggcagagttgccaaataattaatgtgttcatccatcacagttagtctctaattgctggatgactgagctcactggataggctcatatcaagtcagg

SEQ ID NO: 765239 - DNA, 639 bp, Homo sapiens
caagaccagcctgggcaacataaagagacctcatctctacaaataaaaaattatctgggtgtggtggcgcatctctgtagtcccagcttcttgggaggttgagggggaagaatcatctgagtccaagggttccaggttacagtgcactatgatcatgccactgcactcagcctggacagcagagtgaaatcctgtctgaaataaagaaatgaaaggaaagtcctagttttatagaattcttgggatatagtacctaagtaagagctctctatagtaacatgttctgatgacacctgttttgctatggcacgccacctcccacctggttaaaagcatgtattttgcttatattttttaatcaggattgagtgaccaagtctattggaagggaatatgttgatcccttttccaacaaagaagacagggtcatagttagacctagtcatgggaaggaaagaccgcacrggagtctaggaaagtctagccgaggaaagactgcacatttattgtaaataccatgatttggggtaaaactctatagcttccaaattttattataagcgtagacattaaaaaaaaaagatgaaaatcaccccagggtccaagaaaatcaactgagggagtgaggcatctcagtct

SEQ ID NO: 765240 - DNA, 535 bp, Homo sapiens
attgagctgtacaaccatcatcataatcaattttagaacattttcatcactctaagaaggaactccatactcattagcagtcaccttcttattttcttccccaagctttatagatttgcctattctggacatttcatataaacaaaatcatcctgcatggggtattttgtgactggcttctttcactgaacttaatctcttcaggtttcytccaagttgtactatatatcagtacttcattcctttttctgaccaaatagtcctttatatggatgtgacaaatttcgtttaactgttcctcaattgatgaatacatgggttgtttccattttttggctatatgaataatgctgctatgaccactcatgtacaagtttttacatggatatatgtttgcatttctcttgtgtagtggtattgctagtagtggtattgctgaatcatatggtaagtgtgtgttcaacattttgagggaccatcagactgttttccaaagtggctgcatgcttttccccttttctattaatatctgata

SEQ ID NO: 765241 - DNA, 602 bp, Homo sapiens
aaattactctcatttgaattttatatttagaaaatgagcatgcagtattggggattaggcagtattaagaaaatgtatgtagaaagattatctaggatggaatcaccgaaaatcctggaatatttagcagacacttgttgactgattttacctgcagcaaatatgaggcaataacaactgtgtaaattatttagagactagtcatccatatggggattccttaaaatcatttcagaaaacaatttggcagggtattttctttatacttattttttccaagttcatgtacaaaagagatatagatccacacaaagtggattatcactgattcttttaaaatgaaattaaatattttaaaacattcaagtgacgattgggtgatctttcctagctaaagctttctttggtagtttatttatcttaaatattatttttgtctttcaaagggtattatatagtgaatgtaagagatttattaaaaaccttggattgcttgaragtgctttaaaactttgccttaaaatctgcacataggcaaaattcctgatattatgagttgggatttccagtgtaagaggatttcaaatcgctgctgaaaaaag

SEQ ID NO: 765242 - DNA, 592 bp, Homo sapiens
aaggccttttctgcatctattgagataatcgtgttttttgtcattggttctgtttatgtggtggattacatttattgatttgcatatgttgaaccagccttgcatcccaggaatgaagtcaacttgatcatggtggataagctttttgatgtgctgctggattcagtttcccagtattttattgaggatttttgcattgatgttcatcagggatattggcctaaaatgtttttttgttgtgtctctgacaggctttggtatcaggatgatgctggcctcataaaatgagttagggaggattccctctttttctattgattggaatagtttcrgaaggaatggtaccagctcctctttgtacctctggtagaatttggctgtgaatcagtctggtcttggactttgcatggttgataggctattaattattgcctcaatttcagaacttgttattggtctattcaaagattcaacttcttcctggtttagtcttgggaaggtgtatgtgtctaggaatttatccatttcttctagattttctggttcatttgcgtagaggtgtttgtagcattctctgatggtagtttgtatt

SEQ ID NO: 765243 - DNA, 592 bp, Homo sapiens
aaggccttttctgcatctattgagataatcgtgttttttgtcattggttctgtttatgtggtggattacatttattgatttgcatatgttgaaccagccttgcatcccaggaatgaagtcaacttgatcatggtggataagctttttgatgtgctgctggattcagtttcccagtattttattgaggatttttgcattgatgttcatcagggatattggcctaaaatgtttttttgttgtgtctctgacaggctttggtatcaggatgatgctggcctcataaaatgagttagggaggattccctctttttctattgattggaatagtttcggaaggaatrgtaccagctcctctttgtacctctggtagaatttggctgtgaatcagtctggtcttggactttgcatggttgataggctattaattattgcctcaatttcagaacttgttattggtctattcaaagattcaacttcttcctggtttagtcttgggaaggtgtatgtgtctaggaatttatccatttcttctagattttctggttcatttgcgtagaggtgtttgtagcattctctgatggtagtttgtatt

SEQ ID NO: 765244 - DNA, 575 bp, Homo sapiens
tgtgggtgagcatctcttccaacatatttgcaatccatttccaatgctggacagagccactttctccctctgtctccattatccctctagcacataaaggatgactgctatcccaggccctgtgcaaaattattactttagtgccaactcacatactcagctgacattattttgtaaaaaatatatagcaattcagttaatttgtctgcttccagacctgaawaatgctgacacttcgggcctatgtttgaatggctcacaggtcatatttggacaaggaggagggtgggccaggaagacacactccacccacgactccaatatttgcagcactaggtggtgcttaatttctgaaaacactttcacatctgttcactcatgtgtgcaacgtttttcacatgcctacagtgtgagcagtgatgtggcagtgggcaaagatcttcctatcccaggagcacagacctgggtccaagtctcagctctgccaattacagcttgaagaccataaggatattatgtatgctttctcacctcagctcccccacctttaaatggaaattataatgccaatctta

SEQ ID NO: 765245 - DNA, 588 bp, Homo sapiens
ttcactcatgtgtgcaacgtttttcacatgcctacagtgtgagcagtgatgtggcagtgggcaaagatcttcctatcccaggagcacagacctgggtccaagtctcagctctgccaattacagcttgaagaccataaggatattatgtatgctttctcacctcagctcccccacctttaaatggaaattataatgccaatcttaacagattgtgataaggtaaataaaaagaagtatataatgctctggctggtgtcccrcctgttgtatatgctcaccttgcagctgctgtggtccttgctatttttggtggctattgttccagattttggaagctcagggataaatagggcagtctctattcttgggatgctcattatctactgaaggaaacagacaaacaaaaataattataatgccctgtgggctgcaatggaagtataggagaaatgctgcagaaagagaatctttcccttgacttctcttgtagcttgagtaatagccagtagtcatcattcattgaacacgtggtgtgtgccttgtattatgcagaattttccatatgcttacaagcactctgggaggtaa

SEQ ID NO: 765246 - DNA, 522 bp, Homo sapiens
aaatctcaaaggagtgggaaggaagtacccacaaaacaccaggaaaagtttaagaagaaagacttgtatgtttagagtataaaattgaaagataaaattggagggaaagagatttaatgacttttgcccttaagaacataggccctcaaagtgccaagtttgccatagagaaacatatctgtcaaaactgggacccaggcactggtggaatgaaattaattagaggtgatggggatcagtataggacactcagcagggctgagtaggtacaaaggccaggccaaatttgactcctctaggggcagactcaagttcacattggtttaaaattgggttccagcctgggygatcaggctgttgggtgagtttctcacacagcgtctgggtgtaatgaaagcacaaatgtgacaagtgctgccagtgaggctacaaagctagtgaaaggtgggatgtcattcaatcaaatgtgaggcagaaaccagctggcagaggtaaggcatgccagtcttacgcattttatgt

SEQ ID NO: 765247 - DNA, 547 bp, Homo sapiens
tagtggtctggaaagaaacattctgttcattcagtaagtctgctctcgtttcattttaagtctttaggattcgattaagtgttaagagctgcaaagggagaagtcagggttctggttagacaataaccaggtcattaattttccatatttacatataatgttcctcataatacaaatctagyttccgaaagctctgaaaatcatcatgtatttaagtatcacattgtgtctcttcagtttatcctttgtgatcaaataaatccggaacaaaaaacgcatgctctaatcattgaattaaataacacacatatgaagtgtgtggctgtattgtctaaataattaaccactacttagtgattatgctaaccagtgcatactggaatgcataagattaatgaagcctttggttacaatttaaaagcctccctatcaacggtttctttcaccgaactaaagaaaaaggattttgcaacttttacttactagtcttatattggaaacatctggatcatatccaatactcatgcttagaggccgcatcagagat

SEQ ID NO: 765248 - DNA, 547 bp, Homo sapiens
tagtggtctggaaagaaacattctgttcattcagtaagtctgctctcgtttcattttaagtctttaggattcgattaagtgttaagagctgcaaagggagaagtcagggttctggttagacaataaccaggtcattaattttccatatttacatataatgttcctcataatacaaatctagtttccgaaagctctgaaaatcatcatgtatttaagtatcacattgtgtctcttcagtttatcctttgtgatcaaataaatccggaacaaaaaacgcatgctctaatcattgaattaaatarcacacatatgaagtgtgtggctgtattgtctaaataattaaccactacttagtgattatgctaaccagtgcatactggaatgcataagattaatgaagcctttggttacaatttaaaagcctccctatcaacggtttctttcaccgaactaaagaaaaaggattttgcaacttttacttactagtcttatattggaaacatctggatcatatccaatactcatgcttagaggccgcatcagagat

SEQ ID NO: 765249 - DNA, 547 bp, Homo sapiens
tagtggtctggaaagaaacattctgttcattcagtaagtctgctctcgtttcattttaagtctttaggattcgattaagtgttaagagctgcaaagggagaagtcagggttctggttagacaataaccaggtcattaattttccatatttacatataatgttcctcataatacaaatctagtttccgaaagctctgaaaatcatcatgtatttaagtatcacattgtgtctcttcagtttatcctttgtgatcaaataaatccggaacaaaaaacgcatgctctaatcattgaattaaataacacacrtatgaagtgtgtggctgtattgtctaaataattaaccactacttagtgattatgctaaccagtgcatactggaatgcataagattaatgaagcctttggttacaatttaaaagcctccctatcaacggtttctttcaccgaactaaagaaaaaggattttgcaacttttacttactagtcttatattggaaacatctggatcatatccaatactcatgcttagaggccgcatcagagat

SEQ ID NO: 765250 - DNA, 626 bp, Homo sapiens
aggtttttaaattatctagcaaatatttaccaattgcttcctctataccaagcattgtgtgatataaaattgaggtaagaattttaaaaattgaataaacacaatattatcagtattttcataaaaatgtattttagtagaataggggatggggggaaggtaaacaaaaaataaataaaattcttgcaaaattaagtgccaggaagaatacaaataaggtactgagataaagtttagtagaaggtaggtagagggccagagaagggaatttttattctccaatttctccttgtcatggtagcttgctcttattttacttatgcaataacctctcaaatgtcactaaaaaactggaatgtaattttctcaaagttatttcctgtttcctacgttaaccctgttttaatggggccaaatgtgctaattgttcagcttaatygtcttccatcaaactggattctgtccatatgtctagtgaacttttcattttccattcatatttataaagcaagttgcaaattgatcggtatatttagctgatgtggattctgcaatgatcatatggttcactaactacccttggtaagtctcccctatctgggaacaagcgtatccagagggctatg

SEQ ID NO: 765251 - DNA, 501 bp, Homo sapiens
gacagcaaaattaaaaaaattaatatgtagattcaaaagtcaaatggacaatggaaaaatgagagaaaacgttttagagattcacataaaaagactagaagtctatgttgaccacagtacccaaatgcaccaaaattacggcatgactggcaaaaaccctaaagaaatcttaggtttatttgctcaaaaacatttgttacacacgtaccatgcatcaggaactatgttctcggctctagcaataagaacgtacatcacyagtaaagaattttaaaataataattacgccgacttcagtcattcttctttttattcttaacatgagttgacaactctaaacatgtcaaagaaataattcctcttcctgcccaagaggatcactccacaatcttcctcccatttccaacccggagtacatgtctggactccagatctgtatgactaaaacaagttcgtgttcttttcattagagtggtgtctttcaaacttttttgaccacag

SEQ ID NO: 765252 - DNA, 620 bp, Homo sapiens
taagattcaccagtgtctatagatgtctgaagacttcataccttttgtttctgaatagcattttagcatatagatatattacaattttattgtccatttacctatgtatgacatttgggttgatttccttgaggctattacagaaaaagctactatgaaatttcatgttcagttctttctataaacataggctttcatttctgtttagtaaatacttgggagtcggatagctgagttatgccctaagtgtatgtttacctttttacaaaactgcagaactgtttttcaaagtatttacaacagtttacataacycccagaagtttatgaagtttccacttgatttaaatccttgcagtacttgatgtcatcagtagtgtcaatttaagaccttttaatgtgtgaggcagtgtttaattgtggtttcatttacatttccctaatgaataatgatattgaacatgtgttatgtgcttatctgtcatctctgtatttatttgataagtttctgttaaaatctgttgctaaatttttttattattattgaatttagaaaattatatattcaggatacaagttgtttatcaaaaatgtgatgtgcaaatattccctaatgtcttg

SEQ ID NO: 765253 - DNA, 620 bp, Homo sapiens
taagattcaccagtgtctatagatgtctgaagacttcataccttttgtttctgaatagcattttagcatatagatatattacaattttattgtccatttacctatgtatgacatttgggttgatttccttgaggctattacagaaaaagctactatgaaatttcatgttcagttctttctataaacataggctttcatttctgtttagtaaatacttgggagtcggatagctgagttatgccctaagtgtatgtttacctttttacaaaactgcagaactgtttttcaaagtatttacaacagtttacataacccccagaagtttatgaagtttccacttgatttaaatccttgcagtacttgatgtcatcagtagtgtcaatttaagaccttttaatgtgtgaggcagtgtytaattgtggtttcatttacatttccctaatgaataatgatattgaacatgtgttatgtgcttatctgtcatctctgtatttatttgataagtttctgttaaaatctgttgctaaatttttttattattattgaatttagaaaattatatattcaggatacaagttgtttatcaaaaatgtgatgtgcaaatattccctaatgtcttg

SEQ ID NO: 765254 - DNA, 620 bp, Homo sapiens
taagattcaccagtgtctatagatgtctgaagacttcataccttttgtttctgaatagcattttagcatatagatatattacaattttattgtccatttacctatgtatgacatttgggttgatttccttgaggctattacagaaaaagctactatgaaatttcatgttcagttctttctataaacataggctttcatttctgtttagtaaatacttgggagtcggatagctgagttatgccctaagtgtatgtttacctttttacaaaactgcagaactgtttttcaaagtatttacaacagtttacataacccccagaagtttatgaagtttccacttgatttaaatccttgcagtacttgatgtcatcagtagtgtcaatttaagaccttttaatgtgtgaggcagtgtttaattgtggtttcatttacatttccctaatgaataatgatattgaacatgtgttatgtgcttatcwgtcatctctgtatttatttgataagtttctgttaaaatctgttgctaaatttttttattattattgaatttagaaaattatatattcaggatacaagttgtttatcaaaaatgtgatgtgcaaatattccctaatgtcttg

SEQ ID NO: 765255 - DNA, 589 bp, Homo sapiens
caaacacaattttattttttcttcccaatctgtatttccttccttccttccttccttccttccttccttccttccttcctttctttctttctttcttttctttctttctttctttctttctttctttctttctttctttctttctttctttctttctttcctctctttcttttctctctctctttttcttttctttctttctttctttctttctttctttctttctttctttctttctttcttactgcattagctagtacttttgatatcaagtcgaaaagcactggtgagaggtagtatacttgctgttttcccratggtagtgaagaagtttcaagtttctcattattaactatgatttcttaaaatgttctttaccaagttgaggatatttccctgtattgctagttttctgagagacattttgttttaagaatgggtggtgttagattttgtcaaatgctttttcctgcatctattgataagatcatgtaattttccttctttaaccaggtgattacattaattaattgtcaaacattgaaccagacttaaacacttgagataaatcccacttggtcatagtgtg

SEQ ID NO: 765256 - DNA, 603 bp, Homo sapiens
gtccgtgctctatgttggcccctttcagccacaatgggagcggctgggatacaagacaccaagtctctaggctacacacagcatgaggaccctgggcatggcatatgaaaccactttttcctcttaggcctcctggcctctgatgggaggagtgctgacatgccctggagatatttttcctattgttttggtaatcaacatttggctctttgttacttaagcaaatttctgcagctggcttgaatttctcctcagaaaaggggattttcttttctactgcactgccacactgcaaactttacaaacttttatgctttgcttcccttataaaacggaacgcctttaacagcacccaagtcacctcttgaatgctttgctgcttagaaatttcttccaccaggctgggagctgtgactcacacctgtaatcccagcactttgggaggctgargtgggaagatcacgaggtcaggagatagagaccatcctggctaacacggtgaagccctgtctctactaaaaatacaaaaaattagctgggcatggtggtgggtgcctgtagtcccagctactctggaggctgaggcaggagaatggcgtgaac

SEQ ID NO: 765257 - DNA, 576 bp, Homo sapiens
taagtatcaagcccaagtgttaattataaaggtaacaatgctctaaagaaagtaaaattctcaatgtcagcaagtttgccacactaagggcagattcctgaaagtagggaaacctgaggcatggaatggggacatcttagctgcatgtacttgaaattcctaaaactagatcccctgaaccctctgaatctgaggattcagatgcccctccatttgctaaagaaataagaaacacactgctgaggcagacaccagcatcattgagaataccagtgttggctttcctcttactgatagggctgacagtaagagatgttgttacttatctgggctccccaaaaacaatcagataaagaggagcctgaaatagaggccaggtgacagctattagcaatcaaatacatagtgagtatrccattattataatgagtgtcaaggtaggagtggtagccacagagtatggatacacattgctaaggagaagatcattgagcacagcgtccctgggggcaagacagatgcgcaactaatgaagatatgcccaatctatataatcaaaacaaaaattatggataa

SEQ ID NO: 765258 - DNA, 487 bp, Homo sapiens
  misc_feature 478, 479, 480, 481, 482, 483, 484, 485, 486, 487: n = A,T,C or G
ttttcaatctgtaggcttatatctttggccaaatttgggaaattttcagtctttatttctttgaatactttttttttttttagcccattcactttcttttctcctggacttacaatgatatgagtgttagactttttgctatagtttcttaggcccttgaggctccgttcattttcttttcttttttttttttttctggagcctgttttctggctgtttttcarattgggtcatttttattgttccatcttcaagttcattgagtcattcctctgtcctctccattctggggttgagcccatcaatttgctttttgtttttcagtaattttttagttctaaaatttccatttggttctttatgggctttctagttcttggtctaaaactggaaagcccaataatacatttttgtactgttactaaagaaagatattttattatcttagttctgtactattaagctgcaaaaaataagnnnnnnnnnn

SEQ ID NO: 765259 - DNA, 487 bp, Homo sapiens
  misc_feature 478, 479, 480, 481, 482, 483, 484, 485, 486, 487: n = A,T,C or G
ttttcaatctgtaggcttatatctttggccaaatttgggaaattttcagtctttatttctttgaatactttttttttttttagcccattcactttcttttctcctggacttacaatgatatgagtgttagactttttgctatagtttcttaggcccttgaggctccgttcattttcttttcttttttttttttttctggagcctgttttctggctgtttttcaaattgggtcatttttattgttccatcttcaagttcattgagtcattcctctgtcctctccattctgkggttgagcccatcaatttgctttttgtttttcagtaattttttagttctaaaatttccatttggttctttatgggctttctagttcttggtctaaaactggaaagcccaataatacatttttgtactgttactaaagaaagatattttattatcttagttctgtactattaagctgcaaaaaataagnnnnnnnnnn

SEQ ID NO: 765260 - DNA, 617 bp, Homo sapiens
gatgtgggagagataatctctcttgtgtttcttcttataaaggtactaattccatcatgaagactccactctcatgacttcccaaaagcttcacctcaaaaactattgtattggggattaaggcttcaacacatgaatttggcaggaggggcatgcagacatttagtccgtggcagtcagtttctttgaatgatttttttcctagttatgagtaatgtttccctatttctttgaatgtcttataatttttggttgaaaattgggcattttaagtgatgatcatgtaataactctggatwcttacagattttcctgaggattatgttttcttttttcttttcctttttatagtaactttcttggacttaaaatgtagaatttgtctccctgtggtatgtgtccctctgaagtctctactctttgggtcacgatcctaattgttagccaaagatttgggtagaagttgtgctcaaatatcttgaatttgaaagcctccaccttatgccatttaatgtttgtgtggtatacagacacatttaaagttcagccagttctcaacccttgggttttactttctaccgtgctctctcaggatctcccctgtgtctaagaagtgg

SEQ ID NO: 765261 - DNA, 599 bp, Homo sapiens
aggagatgctggggaatgtttctagacatctgacgcttataaggaattctacatattatccgagggtagatacgaaaagtcttttcttgacaaatcatcccaacatttaaaaacatttacctccagaaaagcatctgagtattttctcttagacgacattcctcaacgataacctcattgtgaacaaggatgtaacgcgtggtgatggttacaaatggtaacagagcttccagtaaaatgtgttctattagtaagccctcatggtgttttagctcagcagaaacagaaaagaaggctgatttccctccctacattatattataaaaactttcaaccatacagaaaaatggaaagaactgtagagagaactygtaatgcccacactgagactgtgcacctggcattccgcttggcctgcttcctcccagcctctcatctccccatccgtccagtcatccatcaatccttcttggtcttttgctgccaggagcctaattggagctgtcggcggctctgtctctgggaggggacatgatgatacatctccattgggcttgtctgaagagcatatggaggacacacaccctggctgccggaag

SEQ ID NO: 765262 - DNA, 609 bp, Homo sapiens
agccaggtatagtgagcttttacatattaagaagttcatcaatatattcaattttgtagcttacatttcatgaaaattgataaattttaatagttttaaactgatggggtcatggtttagagatggtttcatgcacgagccccacgttacagcctcctcccctctggggaggtgtgaaaagtgtcatggagagggtgattcagtgtcctcagggccagtcagggtggaaacagacrgtcgaagaaataaaaacatcaatcaaggactggattctatcctatgcttcaaattcagcaagttcagaaacatggacctacatttactcctgtccaaagcaagccctgtgtgggtaaaatgcacgaaagggcagaagggaccggtcatcggactcagcatgaactgtgtatgatgtcatccttcatccaaatctgtgtatgtgaggcacactttgattgtgttttaggcagtgtgtgtgctcaagatctccaattctcagagaaaaagcaggtgtatttgcaattccttacctgaatgcaagctcaaaaaacatgtgtttttgacctctggaacccagtggctagggctgagctggacccacagtgggggctc

SEQ ID NO: 765263 - DNA, 558 bp, Homo sapiens
ttctgaccctaaggactgcgagagaatatgtttctgttgttttaagccacccagttggggtgatttgtcagagcagccccaggaactaatagcagtcatgagtgtcagcctcccatggcacagagtagggccctgcagtgggggctggaagggtcttaaccaacagtaaccttacagccctctcccaagggaaggaagctactggattgcttccatacattggttgcaagcaacagaaatgaactttggccagtgccaatgaaaggaactaaaagggagctygcagaattggggaaaaggatgggaaacaagcactggaaataggcagagactcggaaactcaggggcttggatgcaggggctatagggagcagtgctagagcaggaacttgtaggtcaggacgcaaggaccccagaacagccaacatgatcttgtaaaagaacagccaagttggaggactcatagttctcaattccaaagcttataaagctatagcaatcaaaacagtgaggtgctagcatgaatacagacatatagctgctcactggaatgaatgg

SEQ ID NO: 765264 - DNA, 567 bp, Homo sapiens
atgtcacataggtggaatcgaatactctgtgctcctttgagtcttctccaggactgcctgctaggttcatacacattgttgcttgtattagcagcccagtcttttaaataaaggaaatattaaaacttaaaatgaggaagactaacagaattctgattctcccagtggtgtctacttgggtgctgtactcatctgttttcatgctgctgataaggacatacttgagactgggcaatttaccaaagaaaaatatttaatggacttatagttccacgtggctggggaggcctcacaatcatggcggaaggcaaggaggggcaagtcatgtcttacgtggayggtggcaggcaaagagagagcttgtgcggggaaactccagtgttcaaaaccaaaagagagagcttgtgcggggaaattccagttttcaaaaccatcagatctcgtgagacttgttcactgtcacaagaacagcatgggaaagacccgcccccatgactcaattacctcctgctgggttcctcccatgatatgtgggaattgtgggagctacagttcaaaatgagattt

SEQ ID NO: 765265 - DNA, 590 bp, Homo sapiens
ctctgtgctcctttgagtcttctccaggactgcctgctaggttcatacacattgttgcttgtattagcagcccagtcttttaaataaaggaaatattaaaacttaaaatgaggaagactaacagaattctgattctcccagtggtgtctacttgggtgctgtactcatctgttttcatgctgctgataaggacatacttgagactgggcaatttaccaaagaaaaatatttaatggacttatagttccacgtggctggggaggcctcacaatcatggcggaaggcaaggaggggcaagtcatgtcttacgtggatggtggcaggcaaagagagagcttgtgcggggaaactccagtgttcaaaaccaaaagagagagcttgtgcggggaaaytccagttttcaaaaccatcagatctcgtgagacttgttcactgtcacaagaacagcatgggaaagacccgcccccatgactcaattacctcctgctgggttcctcccatgatatgtgggaattgtgggagctacagttcaaaatgagatttgggtggggacacagccaaactatatcaggtgccttttttcaatgtca

SEQ ID NO: 765266 - DNA, 551 bp, Homo sapiens
ctgggctgaaatggcaccagcacagggaagccctctgtgaccaccccctgtgagcgtgcagcctagacacctacccttcgcctctcctccccagcttcactggtatcattagctagtgtagtgcccagcttaccttttctcttactcatctcccgctagatgctgagcccatgagggccaggattcttgagtgttttgttcacttttgtcttcccagtttcgatgatccccagtgtatagcaggttctcaratatttattgaacggataggtgaataactagtgccgcccataattcagaaaaacagcccctagtatttcctgggcatgttaaagttgaagggctctgccccaacagtggtccttgatccttgggtgcacatggcggtcaccagggagctctagcaacccctaatgtcggtgcgcacgcagttcacggaacaatctcagctggagacctggacgtggatatgttagaaatctcccctgggaagtaagttacaccaggcagagaggtggggccgtccagacaggcgaaaaagcaacccggct

SEQ ID NO: 765267 - DNA, 495 bp, Homo sapiens
ctcaggtgattagcaggaagtggaggagaatgcgaagatgagtaagaaaaaattccttgcctttaaggagtcagtagtgttaagctttctgatttcagagaatttttgtagcattcgtctctgggaaatacagtcagttcataagttatggacttttgcccattctgtttcattatgaatagcatatgttagggcatgaggaagagatgttacagaaaactgatggcttttacaataaagattctacttttactattagtcaaatttttgkttattattaaatttttaatacaaaaaattacctgccaaaatttcagtgtttcgtgcagcaattgttttaacttttattattcctgattcagcagcctgcaagaataaaaataattagaacacaaaatttactgccaaaatgaattatctatggaaaataagtcatatgtgatagacaaaatatcaagcacaaagtcagtcactaccctaccacctttttaattt

SEQ ID NO: 765268 - DNA, 603 bp, Homo sapiens
gggcctgatgcagccctactgatatagtaagtaggtagtaaagccagaatttgaaaataccgtatgtcttctaactcctggttcactattcttcctacaatattatgctgccattccttatggtacatagcaacctgacaataatggaagttaaaagaggacccagtgatttgcactttaaagttgtctgcctgaagtcttcagacaaataaaggaaaatgaactcattttcataaaaaacaaaaaagaagatatactttcatagggtttaagatgccawtgattttaagacatacccatagtatcacaacaacaaaaaaagtcagtgacaattaaactacgacacaatgctttctaatcacttagaatttttcttcacaatttcatcctctgggccataaacagcactgggaatgaacaccttatttcttgaaagaatacttcactattgtctctgagattttcttctaagtcaatggcacccattctgcatgttttgttactggtgctttattcatcttaccataagatgttaacggaaagttttcaataactagggtgacactttaaacagcaattcaactcaatgtatgtggtatcaac

SEQ ID NO: 765269 - DNA, 606 bp, Homo sapiens
gtgtatacaatttttattattcacaggagttatgttcaatgaagctgccacaaacactgaaataacaactactgaaccattactcctagggaaactatagggtttgattcctccaagcctttgttcacaacattttcgtcaaccagacaatgtataactttgttttgcatgtgtttctgtttaaaaacaacttgtttaatatatattgttgagtccttaacattgaactcacagcaaacagtgctataactcatgtcttaatgaagcatatctaacacatactttttctccataaagcacatcacagctttcttgcatttaggaacactagctggcatgtttgtacttcatttagtgaccattttaaacactgaaattaacaacaaaacaaacaaaaatgtgaaaaaacataacactaaataaactacaaaggrcacttgtttatagattcagagctgaaacaacaagccaaagcatcaccttgttcaaccccagctggtaacatgcatatcaggtgactcaaattttttgccactctgaaaatatctacaaatgaccatgaattgattttggggttacaaatacattttagaaagcaggcaaatt

SEQ ID NO: 765270 - DNA, 621 bp, Homo sapiens
tggacaaagaattctgagttgacagtcttttcctctcttgacagtttaaaggtgttccattctcttttggactccctcgcttctgatgagaaattcaaagtcatataaataatgtgttaggtcttttgatattgtcccatgggttcttattgctcttttttttttttttttttttttttttaaaatcttctttccctactctgttcttcaatttggttaatttctgtttatcctcttcagggccacaaattatttcctctgacatctctgttttgctattgascccatccagggattattatctttaatttaaaataactaggccgggccctggggctcacccctgtaatcccacccctttgtaggccgaggcaggcggatcatttgaggttgggagttcaagcccaccctgcccaacatggaaaaatctcatctctgctaaaaatacaaaatagctgggcgtgctggcgcatgcttgtaattccagctatttggtaggctgaggcaggaaaatcccttgaacctggaaggtggaggttgcggtgagcgagatcaccccattgcactccagcctgggcaacaagaacaaaactccccctcaaaaaataaaataaaataaaa

SEQ ID NO: 765271 - DNA, 621 bp, Homo sapiens
tggacaaagaattctgagttgacagtcttttcctctcttgacagtttaaaggtgttccattctcttttggactccctcgcttctgatgagaaattcaaagtcatataaataatgtgttaggtcttttgatattgtcccatgggttcttattgctcttttttttttttttttttttttttttaaaatcttctttccctactctgttcttcaatttggttaatttctgtttatcctcttcagggccacaaattatttcctctgacatctctgttttgctattgaccccatccagggattattatctttaatttaaaataactaggccgggccctggggctcacccctgtaatcccacccctttgtaggccgaggcaggcggatcatttgaggttgggagttcaagcccaccctgmccaacatggaaaaatctcatctctgctaaaaatacaaaatagctgggcgtgctggcgcatgcttgtaattccagctatttggtaggctgaggcaggaaaatcccttgaacctggaaggtggaggttgcggtgagcgagatcaccccattgcactccagcctgggcaacaagaacaaaactccccctcaaaaaataaaataaaataaaa

SEQ ID NO: 765272 - DNA, 608 bp, Homo sapiens
agtcaacttattagatcctgtcattacttgaaactgctcccacttttgctatctttttttgtttgttgtttagagacaggctctcactcactctgttgcccaggctggagtgcagtggcatgatcttggctcaccgcagcctcaacctcccgggctcaagccatcttccgaattcagcctcttgcrtagctaggactacatgcgtgtgacaccatgactggctaatttttattttttagagacaaggtctcattatgttgcccagaatggtctcaaaatcctggattcaagtgaccttctgcctcagtctcccaaaatgctgggattacaggactgagccactgcacccggccccacttttagtatcttaaactcgggttactgtctaaccactacttcttgcttctcctggaaattcattcttatctcttcttgtcttgcacagagatttctattccttttaactcttgttttctcccagtttaccagctccctactgtcttctagcccttccatccaggccctacatgctttatcacgaacctttaatgtctttgttactcaattctattcattccactcttgctaaactttctcagagctgttca

SEQ ID NO: 765273 - DNA, 615 bp, Homo sapiens
ctgggtgtgtgtgtgttgttccctcggcttgggtgtgtgttgctccctcagcttgggtgtgtgttgcttggttcagttgagtgtgtgtatctgttttgggcccagtcttgagctctgaggcgtgtgtttaaattccagggatcaaactgccctccttcctctttccatccccgccttccttggctctattttctccccgggaagcgctgagattgactgttgccactgattccttgcagagatggactttccccccttttcgtaccagcctctttggttgagagctgtgggactcacacgttccctaaatctcctgcccctggtgtcttcttgccatttcataaatctcagcctcattccctccggcctgggaggccaygccgcctccaaggcgacctcctctcgggagctccaggtatggaacacaccattcatcatggagatgcgggaggcgtcacaatttctcctgccagggagcgtggtcaggcccacagtggccacacatccaagatggcgacacccgcgggtgggcataagagggggcatggagatcacagccacgcctggtcacggggacaggtaggtggcgtggctcccaggtgtggctgagggcac

SEQ ID NO: 765274 - DNA, 552 bp, Homo sapiens
aaattattagttctaatcctggctctaccactcacttaccagctatctcactgagactcagtgattattcctgtaagtatcaacccctacatgtaccctcagtaaaatgatagctaacattattagaatacataaaaaagaatcagagcaactgagcagacatttacagttactctgacatactcttggtygaaagccaacattcgactgtaatcaaatgaaagattttaatatattgaaagaatatatccatgaggaaaagagttggtcagcaatggaaacagaaaaaaaagactgcagagaagcaaagttcacagtgagctgcttagcattgctaggaaagtaaatgggttctttaggttagtactgttcaatagaaatttctgtcatggtggaaatgccctgtccagtatggtagctgccaatcacatgtggctactgagcacttgaaatgtgattattgcaactgaggaattgagttcttatttaatttagatcatcacatgtggtgagtagctaccatatcaaacagcacagctctatgttatttca

SEQ ID NO: 765275 - DNA, 639 bp, Homo sapiens
cacaggggtccatacctggcttttcatctcactgccttcctgcggggttgctgcaagggagactggcgggggaagacctgttgcttttcacattcatttgtaggctccacaccatcagttgttacctctgcaccattcaagtccragataaccccagaggtcatttctgggtagtcatcctctcacagggtaggaggaattcaacacttggacacagagtagaaaggaaaacttccccaggatggtgaaccagacagaatggaaacaacggtacacctaaaactacataaatcatacctttatttccttttcccatttcctgactatagggtgactcaaccaataaacaatgattttcagtggagtatatacagatgtaaaacaaggtgccaggcacactcaagatagaaacccttctgatccaacttatctgtaaaatggaaatgatgccatctatttaatccttaccatcaccctagggaggattgaggtgcaataggactctttttttcccttgggagttaaagtctctccaagattgaacaaagcctgtaggtttttaacgtaacattctagtttgaatttaggtgcaagtgctagatttaaatttcatgcatgtgattgtttaagtgataatct

SEQ ID NO: 765276 - DNA, 609 bp, Homo sapiens
acattgtagaatggaatgaagcattacaattatgtaatctcctcatctctccctctgcactttcttttttgaagcccctcgtttgtttcacgattctctttgttcatctctcttactgaatttgatgccaaggcctttatgtattgctcctatgccggcaatccttcccatttcctccctgccttcctgtctacccagagagtttgcacaaagtatgattttgttcctatccaggcacagctaagtggacaaaaaatgaacgttgtggtcaataatagtttgctcttttcagagggacaargccgggcagttggaggaggaatgcagagaaaaagacacagtgattgtcttggttcctgatggttttcaagttctcagttcccatcatccttgtatccattcattcattcgtgggacacacatacactgagtgcttacttggggtagagcaaagggaagttattacgagggcttcagctttcactctgagtaggagggggaagccactaaaacagcatggcatgatgttggcttaaaaggcacttgagctgttatgtagagaataacctcgagggccaggagcagaagcagagaggctagctagggggc

SEQ ID NO: 765277 - DNA, 609 bp, Homo sapiens
acattgtagaatggaatgaagcattacaattatgtaatctcctcatctctccctctgcactttcttttttgaagcccctcgtttgtttcacgattctctttgttcatctctcttactgaatttgatgccaaggcctttatgtattgctcctatgccggcaatccttcccatttcctccctgccttcctgtctacccagagagtttgcacaaagtatgattttgttcctatccaggcacagctaagtggacaaaaaatgaacgttgtggtcaataatagtttgctcttttcagagggacaaagccgggcagttggaggaggaatrcagagaaaaagacacagtgattgtcttggttcctgatggttttcaagttctcagttcccatcatccttgtatccattcattcattcgtgggacacacatacactgagtgcttacttggggtagagcaaagggaagttattacgagggcttcagctttcactctgagtaggagggggaagccactaaaacagcatggcatgatgttggcttaaaaggcacttgagctgttatgtagagaataacctcgagggccaggagcagaagcagagaggctagctagggggc

SEQ ID NO: 765278 - DNA, 555 bp, Homo sapiens
gattctgtgttttgtctctgttcagacagtagtctaagactggtggggagactttttttttttttttggaaaaatgcactgaaagaaacaaaaaccaaagcagcttcataggaagacaaagaaaaaccctgttgctgacagacacctgcatgaaagacaggaagcatctgacagagtcagaccaggcacccctgcaaggaagcagctactcaacggggtatgcttaaaagtgtgtttcattaaggtgtttacaaactgtgaccaaccactggtgggagctgtcctgcagctcaraagcctcccttgatgctgagtgggtgctcaggaagatcaaatcaaactgatttgttatttttatagagtgctgtatgtatgtgtgtatgacagacagagaaagagagatcttccttgggcaccattctcttgcctgcagccagagagaaccatagaactcagctttctagagtagtgcctggttgaagagggagaattctaagtttagagcaagagtttgcaaactttctggaaggcagatagtaaatatttcaggttttg

SEQ ID NO: 765279 - DNA, 508 bp, Homo sapiens
cagaagcaaatgcttcttgtacagcctttagaactatgagccaaataaacctcttttctttatacatttcccagcttcaggcattcctttaaagcaacactgaatggaccaagacatctggcaaagtcccaayatctgcatatttataaaacacatgtttaaataccccatgtgtcaaacattggaagatgttttcagctaaatgataatgaacacacatgaaaagttgtgggactcagcaaaggcagtacatagagggaagtttatagctttatacgcttatattagaagagaagaaaaatttaagattggtaatctaaatttgtgccttaagaagttagaaagatagaaacaacttaaatccagaataagtagaaaggacataataaagagcagatattaatgaagtaaagaaatcgataaacaatagagactagtccagaaccaattacccttctcgtattctctgatagaaataattcaattaaactaatgaaaccatttctat

SEQ ID NO: 765280 - DNA, 613 bp, Homo sapiens
aacttagctccaagtcacatagctaatagacatgggagcaaaagcttgaaaccacgtgttctgtgtttagagtggagcggggctggttccaggtgcagtagtagaggaactccctgctttcatgcctcctcttctgcctgtggtacctgcactcttgagcgctaagtcactgcatctttcaaggcacrgctaagactcctggaagttgtgctgccatcctcatggcagggcatgctctcctgctacctactctctcccttctactctcaggaaagaaatcctgtttgccatttatgaatttaaatctatgggccgggtgcggtggctcacacctatctataatcccagcactttgggaggccgagctgggcggatcacctgagctcaggagtttgagaccagcccggtcaacgtggtgaaaccccagctctactaaaaatacaaaacttagccgggcatggtggtgcactcctgtaatcccagctactcaggaggctgaggcaggagaatcacttgaacccaggagatggaggttgcggtgagccgagattgcaccgctgcactccagcctgggcaacagagtgagactccatctcaaaaaaaaaaaaaaaaa

SEQ ID NO: 765281 - DNA, 613 bp, Homo sapiens
aacttagctccaagtcacatagctaatagacatgggagcaaaagcttgaaaccacgtgttctgtgtttagagtggagcggggctggttccaggtgcagtagtagaggaactccctgctttcatgcctcctcttctgcctgtggtacctgcactcttgagcgctaagtcactgcatctttcaaggcacggctaagactcctggaagttgtgctgccatcctcatggcagggcatgctctcctgctacctactctctcccttctactctcaggaaagaaatcctgtttgccatttatgaatttaaatctatgggccgggtgcggtggctcacacctatctataatcccarcactttgggaggccgagctgggcggatcacctgagctcaggagtttgagaccagcccggtcaacgtggtgaaaccccagctctactaaaaatacaaaacttagccgggcatggtggtgcactcctgtaatcccagctactcaggaggctgaggcaggagaatcacttgaacccaggagatggaggttgcggtgagccgagattgcaccgctgcactccagcctgggcaacagagtgagactccatctcaaaaaaaaaaaaaaaaa

SEQ ID NO: 765282 - DNA, 613 bp, Homo sapiens
aacttagctccaagtcacatagctaatagacatgggagcaaaagcttgaaaccacgtgttctgtgtttagagtggagcggggctggttccaggtgcagtagtagaggaactccctgctttcatgcctcctcttctgcctgtggtacctgcactcttgagcgctaagtcactgcatctttcaaggcacggctaagactcctggaagttgtgctgccatcctcatggcagggcatgctctcctgctacctactctctcccttctactctcaggaaagaaatcctgtttgccatttatgaatttaaatctatgggccgggtgcggtggctcacacctatctataatcccagcactttgggaggccgagctgggcggatcacctgagctcaggagtttgagaccagcccggtcaacgtggtgaaaccccagctctactaaaaatacaaaacttarccgggcatggtggtgcactcctgtaatcccagctactcaggaggctgaggcaggagaatcacttgaacccaggagatggaggttgcggtgagccgagattgcaccgctgcactccagcctgggcaacagagtgagactccatctcaaaaaaaaaaaaaaaaa

SEQ ID NO: 765283 - DNA, 617 bp, Homo sapiens
aattattgacttcaagttattataattgtcctgctttgttcatagcacctgctgccacatgttaattatgaaatgctcaagcactttcttggaataactttaragataaagctgatggggtttttaatgaaccaagattatctttagttcaaagctggtcaaaaaagctaggctttttcaaccctgtattgttcattaagtgggagcaggcatttagcatttttagagctgaggctcaaataattagagacagggttggaaggcacccacacacaagttagatgatgagccctactaaatgagatgggtgatatcagaatcataaacgcctagatccttactgccacaggattctgcttattgaggctatctgaatatatattaaataggtatcattcctgctctccctcctggtgcttatagtctatctttgaggtttggatatgcccaagggtattttaggagaaggaactgacctctcctgggtataggtgggatgggtaggagctattcatggaaatggcctcccactctgagagaggcctttggccaaacaagaggagttaccacacctaaaccaggatagcctgttgcatgctacttcatttgcctagttc

SEQ ID NO: 765284 - DNA, 617 bp, Homo sapiens
aattattgacttcaagttattataattgtcctgctttgttcatagcacctgctgccacatgttaattatgaaatgctcaagcactttcttggaataactttaaagataaagctgatggggtttttaatgaaccaagattatctttagttcaaagctggtcaraaaagctaggctttttcaaccctgtattgttcattaagtgggagcaggcatttagcatttttagagctgaggctcaaataattagagacagggttggaaggcacccacacacaagttagatgatgagccctactaaatgagatgggtgatatcagaatcataaacgcctagatccttactgccacaggattctgcttattgaggctatctgaatatatattaaataggtatcattcctgctctccctcctggtgcttatagtctatctttgaggtttggatatgcccaagggtattttaggagaaggaactgacctctcctgggtataggtgggatgggtaggagctattcatggaaatggcctcccactctgagagaggcctttggccaaacaagaggagttaccacacctaaaccaggatagcctgttgcatgctacttcatttgcctagttc

SEQ ID NO: 765285 - DNA, 617 bp, Homo sapiens
aattattgacttcaagttattataattgtcctgctttgttcatagcacctgctgccacatgttaattatgaaatgctcaagcactttcttggaataactttaaagataaagctgatggggtttttaatgaaccaagattatctttagttcaaagctggtcaaaaragctaggctttttcaaccctgtattgttcattaagtgggagcaggcatttagcatttttagagctgaggctcaaataattagagacagggttggaaggcacccacacacaagttagatgatgagccctactaaatgagatgggtgatatcagaatcataaacgcctagatccttactgccacaggattctgcttattgaggctatctgaatatatattaaataggtatcattcctgctctccctcctggtgcttatagtctatctttgaggtttggatatgcccaagggtattttaggagaaggaactgacctctcctgggtataggtgggatgggtaggagctattcatggaaatggcctcccactctgagagaggcctttggccaaacaagaggagttaccacacctaaaccaggatagcctgttgcatgctacttcatttgcctagttc

SEQ ID NO: 765286 - DNA, 621 bp, Homo sapiens
atacccaagagaatactttttgtatcagagaccagaatcagggtgaggaaaagcctgtcttaaatttctctggtctgacctaagcactttgtgcatagttatgccagacctactgtcttagtctgttttgtgctgctaggctaggtaatttataataaacagaaatttattggctcatagttctggaggctgggaagtccaaaatagagaaaccattatcttagaagggtcttcttcttgcattatcccatggtggaaggacaaagactaggtaagagagaggcaaaagggggctgaatttgtccttttataacaaacccactcctatgataacagcattaatccattaatgagggcaaagtccttatggccttattacctcttgaatgtcccccctsttaatactgttaccatagcaattaaacataaatatgggtttggaggggacaggtattcaaatgatagtacctgctatccaaagaatttatgtcagaagcccacatgaagagaaagcatggcgttcctctaccattgtgtgttggtatgtcaactaatttgttaactcttgaaattaacaaatttcattgaaggttgaaggccactcctttgcacacgtgatgc

SEQ ID NO: 765287 - DNA, 610 bp, Homo sapiens
atgaccacaaagagaaaataaatattatccatacacaatgccaccaagacaatggaccctaaagggggtatattgactactgtggagctgatggaccctccacccctgtctaacagagccagcagtccctaaagattgttgaaataaattccaggttccagtgggattgcctccaggtcccagtggaagaaaagattttggctggctggagagaagtattcctgtatttggttctcaactcagctcagctcatgagtctatattcttgggcaggtggagtgctgggaattgcttggacaatgatsatgctgataacaaatttatatttaaaagttgactcttttctcagttacttgagtgattgcaaaagaatagctctggggttctgaataatttgaggaattttttgcctggtagccctggcctaattacgttgggagtcaatttcatgtgtgcaatataatagcaggcacaatgcacttgggagggaagaagtcttagcttaatgtttttactcattttttcctccttacctcttcatctattttaatttggcaccttggaagccagctgcttcaattgtgatatttgtttctctatagggagcctg

SEQ ID NO: 765288 - DNA, 610 bp, Homo sapiens
atgaccacaaagagaaaataaatattatccatacacaatgccaccaagacaatggaccctaaagggggtatattgactactgtggagctgatggaccctccacccctgtctaacagagccagcagtccctaaagattgttgaaataaattccaggttccagtgggattgcctccaggtcccagtggaagaaaagattttggctggctggagagaagtattcctgtatttggttctcaactcagctcagctcatgagtctatattcttgggcaggtggagtgctgggaattgcttggacaatgatgatgctgataacaaatttatatttaaaagttgactcttttctcagttacttgagtgattgcaaaagaatagctctggggttctgaataatttgaggaattttttgcctggtagccctggcctaattacgtwgggagtcaatttcatgtgtgcaatataatagcaggcacaatgcacttgggagggaagaagtcttagcttaatgtttttactcattttttcctccttacctcttcatctattttaatttggcaccttggaagccagctgcttcaattgtgatatttgtttctctatagggagcctg

SEQ ID NO: 765289 - DNA, 638 bp, Homo sapiens
aagcttggagcagccacttttctgcttctgggttctgggtttacttgatctctctgaatctcatagcctttctcatttataaagtgggtataagatctaactgatgggatggtgtgaagagtgagataaagtaaaatttaaattaaattacgttaaaaagcttactaragcccctgaaatgtaatattattaggttggtccaaacgtaatttttgccattaaaagtaatggcaaaaaccacaattacatttggaccaacctaataacttgaatgtcattcttggatcatggaaggtggaatgggtaccaagtgaggaagtgggtttatctctgtatatgtgtttgcaggcagtgagcctgcagggtcatcattcaccagtcaggagaggtcactggagaaaaaatgtgctcctatccctgggtacatggaggaaacataggaccaaactctctcttggaagtcagatattctgtggcacagatggcctagatatagcaatgccacccatattagttatcaattgcagtgtaatgttaccacaattgtagcagcttgaagcaatattcatgtattatctcacagtttatatggggcaggaatccacttaggtggatcctctgcttacggtctgacaagg

SEQ ID NO: 765290 - DNA, 594 bp, Homo sapiens
atgcgctccagcttggacaacagaccaagactccattccaaaaaaaaaaaaagtaaaggaaaagtaacaggagacaaggaaagatacaaaaccatgaaagtattaccagttgattcacaacattccatgagtagatagaacagatcactcagcacatgagttgyctactgacatgttgcaaagatcaaccatgattccaagaggtcaataaaaggaagaaatggggaataatttctaactgtatctttcctgtcttctgtttctagttggtcagagttcatctctcagagtattaagcccttctctatatcatagttgctttagtgactcaagatgccacaatccgaactttcattgtgaggttctgttcaagtctagaaatggctgttaagaaccaggaactccagtcttgctactggccagcctagctactcagaaacagcattagagaaggagtttggcctttccagaacaagtgactggtcagcccccagtgtccgtaatgttgttcaggcattgggcagcacttctcacaggaaggaggtagaatatttgaggagtcctataaatcatgtgcctgctacactagatgtc

SEQ ID NO: 765291 - DNA, 658 bp, Homo sapiens
ctactaaataataaaaataataatccttaaaatactaatatagtttttagacaataatggcacttattaagtgcttaccactattctgagtattagagcttaggcactattcttagcactttataaaaaattactttatttaattcttacaaaacaacactatgagggtgctactctcattatgcacaggttacagatgaagaaacaggtttcagggagttaagcgacttctccaatgatgcagagctagtaagtggcagacctgaattttgaactaggtttgttgagcgcacaaatctttattgttaaccacacaatagtttctcatattcctggaataatgagatcccaactttatctaaaattatttctgatttttcttcttacctttgcctgtcctgatgtaactgttacctgaactaatcagtyagtcatataattagaagaaataaatgagcatttactgaatttctcctttagactaggtgtggaactaggcactttcaacattattcatttaaacctgacaacaatttcatgaagttggtattattgttcatattttaaacttgaacatgttgggactcaaaaagtttatggtactaatacaaggtcacaaaactagtaatgggcaaatccagggttgaatctgagttcc

SEQ ID NO: 765292 - DNA, 658 bp, Homo sapiens
ctactaaataataaaaataataatccttaaaatactaatatagtttttagacaataatggcacttattaagtgcttaccactattctgagtattagagcttaggcactattcttagcactttataaaaaattactttatttaattcttacaaaacaacactatgagggtgctactctcattatgcacaggttacagatgaagaaacaggtttcagggagttaagcgacttctccaatgatgcagagctagtaagtggcagacctgaattttgaactaggtttgttgagcgcacaaatctttattgttaaccacacaatagtttctcatattcctggaataatgagatcccaactttatctaaaattatttctgatttttcttcttacctttgcctgtcctgatgtaactgttacctgaactaatcagttagtcatataattagaagaaataaatgagcatttactgaatttctcctttagactaggtgtggaactaggcactttcaacaytattcatttaaacctgacaacaatttcatgaagttggtattattgttcatattttaaacttgaacatgttgggactcaaaaagtttatggtactaatacaaggtcacaaaactagtaatgggcaaatccagggttgaatctgagttcc

SEQ ID NO: 765293 - DNA, 623 bp, Homo sapiens
atccataatatgaacaactttaatggggagaaaggaggcactgatggagatcagcattgcccatcctgtgtgttctaggacacaaactgcagaaggtgttgatcaatagagtgatcccttggtcacataagtttgagaaacactgcacacaaacctgctgtatagtgcatactccacagccactaggtctgggagatgctatgcactcatrtacagtcacagcatgcaaccatgcacagcagcaggttaaatgcgctgagaaatattacattttaacatgttttagcttattacactccttttcattctgtcacattttataacagcccatggaattatgattcagtggaaaattctttggaaaatcttgatctcagaaatactatcttttatatcttaaatgaatttatttcaaaaaagaaatgtacacttgggaaaggtcactgggtgtgacattacaaatatttgctaaatatgtgaccttggggataccatttaaacttgctgtgaagtggaaataatgttatcttctctaactcacagtgggtcattgaatccaaagtctaaaagagatagtgcttttataagccttttgtaatccatgaagcactctcatttgtggt

SEQ ID NO: 765294 - DNA, 624 bp, Homo sapiens
ggagaaactaccaagaccaagtcaaatgctaccacccctcctcactctttaccatccctctaccatttcagcggtgtagcctcttagttgaggtgggatggaggtgatgaattgcaggagcaaggcttctcatctgggaagcccaggtaagcccagcaaarctcagatggtcatgagccctagccacggagttcttttgtgaggcaagtcatagcagccagtcccctggatcatagatggtggccatttctatagctatcaataaaactcacaaactctagataaattacactctcttgttgattcaaataagatttttttctcatttagattgaaataaatttttacttttgtttttcaaagaacagacatgaaaactattgggctcatggtctcatttttgaggatggatggctatttgtatgcaaggtatataataatgtgagtcttaagatttctctttgtaatatttgatttaagggacttttatcatacaattgaatatcatttttattttgtttattaaattaaataataaaccaaataaaatatgtttagaaacatgcccttcaaattaacacctcaaagcacaatttgagcataacactgtagtttaaacagttc

SEQ ID NO: 765295 - DNA, 623 bp, Homo sapiens
cttatttatttcataagtgtcttctgtgtatgcacaagcctttgcattcattgagacaacctggaaatgtgatagatgtatcaatggtttctttttattcttctaaatatccacccccaaccacccgcaatgttacatggctgggctggggtgatgttccagggcatcaagcaatgtgtgaggcactgagayctaaaaagatattttcttttttaagaggagagctatgtgttcacaaaatcattagtgaaccctaaaagagccaagagcaacttcagacctgttaatactcacactgaaaataaatggcaggtcagacaatgtccatgccataaaactatgtagatatgattcttatgtcttctgtctttgtaacatagagataagaagagagactaggagcaaaaagtgctttcctgaataaacatgatttataaatatggttcgatagaaacacatgaaaagtaaattttgttgagactggtgaaattttagaaggggaaacaattttcttattaaaacctaattgttctctgattctttctctccttctcttcaccctgtttctctttttctttccataaacacacacatttatttctatatatatatatacacacaca

SEQ ID NO: 765296 - DNA, 503 bp, Homo sapiens
ggagcttgaaggcataaaggtgcaattccaaatacctcaactgctgtagatgaaggggcagcatttgctctagatcctcatcacagcatttcctggtattctttcaggtaggtgaccaaagctcagcctgcagttcctctgaccaggcttccagctcaggtcctgcccatagaggtggtccacctgatgcagctggccaacttctgtctcctaccacaataagctctagtgaacccctgagcccagtagcctcttcatccaagcaagctctcaccagcttgcttctgtgactcaygaaaaggaggaaggaaagaaatggcccaccaaagagagatggtgatggagtccactgttggggaaaacagtcttatatctttcttttcattttaatcttcagtatcttctcagttaattattctccattgagtcatatcattggagtagactttcatcaatcaagacatagttcattcatcactataataaactttaagcttcttatt

SEQ ID NO: 765297 - DNA, 637 bp, Homo sapiens
actgtgttatcagtatagctgccatttatattttagtgcacatttaaataaatatctgaggacttctgcttctggccaagataaagtaaaaaggaatagatttacactcctgtgtgaaacaatcaaataacaatggataaaatatatgtaataatggttctcaagatactgtatgtcaagtagtgaaggacagtgattcctgaggggtggggaaaaacaaggtagggcctatgggtgctccggcttactctttggagagtttccaggccactatgcagggagggagaccaaggaagatcatggtatgctccctgtgttgaggatatgaaactgagagtctgagaagaccaaggtggctgaagttctcaggacagaagtcttgaaaagagaaagccacatggaagagaacactagagatctgcagaggatctcttttgagaattcagttaagtattggtcagtgcaatgttgtactggatgttcyaactagcaaaatatggcaagaagaaaaggtcatcttggaaggaaaagaagtaaaactcttttgtttgcagacaacataaatatctatgtagaaaatctagtggaaaaagctccttgaatgaagaagtgagtttagcaaagttatataataaaa

SEQ ID NO: 765298 - DNA, 640 bp, Homo sapiens
acagcaagaccctgtctctagacaaaactataaaggaaaccacgtgcggtatcagcgtgaggaaaatggtgagaaggaggcaggattaacttgcagctcccacttggatggacagagcagcgtgtggagactcacatcaaaaacttttgctccaagaactgccacacaaacatatcaggaaagccgagagaatcctcagagcctttgaaagtagcagcttgcctttgagggctgtgagaccaccgcaaaactgtgagtgcccaaagtgtgaggcgggaatgtccgccctgaacacacaacctcactgaggaatctgaaggtccagaycacgaaaaaaggatcagaccttacctggagctgagatgaatgtagagacccaagcgaaacataggagtagaggaggcagcgggaagagcccgtggacaccctcagtccccagggaagccgttctgactctgtctcgcagggatctttggggagggctgatagtggaattggggaaagaccacagggagaaggaaactcccagataaactttgtaacaattttgagcaacttgaaatttcctggacagaatctggtgatggggggagccaggagtgcagatcccagcacagaagctgtggcaggcggggaggcc

SEQ ID NO: 765299 - DNA, 640 bp, Homo sapiens
acagcaagaccctgtctctagacaaaactataaaggaaaccacgtgcggtatcagcgtgaggaaaatggtgagaaggaggcaggattaacttgcagctcccacttggatggacagagcagcgtgtggagactcacatcaaaaacttttgctccaagaactgccacacaaacatatcaggaaagccgagagaatcctcagagcctttgaaagtagcagcttgcctttgagggctgtgagaccaccgcaaaactgtgagtgcccaaagtgtgaggcgggaatgtccgccctgaacacacaacctcactgaggaatctgaaggtccagatcacgaaaaaaggatcagaccttacctggagctgagatgaatgtagagacccaagcgaaacataggagtagaggaggcagcgggaagagcccgtggacaccctcrgtccccagggaagccgttctgactctgtctcgcagggatctttggggagggctgatagtggaattggggaaagaccacagggagaaggaaactcccagataaactttgtaacaattttgagcaacttgaaatttcctggacagaatctggtgatggggggagccaggagtgcagatcccagcacagaagctgtggcaggcggggaggcc

SEQ ID NO: 765300 - DNA, 603 bp, Homo sapiens
ggaaataaacgcagtgctgttggcggggcatggtgggaaggagactggcctcgcaggctgcatgggagctgggtgaggcctgtcactggcagctttcccccacttccctggggacctgtacaaagcagcagaggcagccataatccccctcggaacataactccactggcctgagaactataccccaactcccacagcagccacagcaagcactgcccagggagattctgactcagacatgtctacctgtaccccgcagctgatggtctttctcttcccaccctcgtagctggagacaagacaaagaacataatctcttgggagctgtatggccctgcccaccacctgaaaaacctgaatacttatccagacaagcttagggcaagctggtatcctccccctcctacttcrgctgatgctgtctggaaagtgcccgctcctagtctgaggcccggacgacaaaaaccagcacactagacaaaactacagccaccggccctcacagagtccactttgcttccttgctacctccactggagcaggtgctagtatccaagccgacaaaattccagcacactagacaaaactacagccaatggccct

SEQ ID NO: 765301 - DNA, 506 bp, Homo sapiens
aaaactcaaaatttaattcagatgtcttaaagcttctacctcaaaagggcctataaaaatcagatacctctgagagtgttaggaaagtaaagttggaataaatttatctcaaatgattcctagaagagtctgctggaatagaacagactgatttacatcttgatagggctggggaaagttacctgtgatactgctatctacccacatgggaccttcaggagaaagtgatgctggaaaggacagtgcagaaggaacaaaggcaaacttcatccacatcagcatttgcctgagtccaaatgctgggtcaacaaaagcaagtctggttcaattccagctatgaaggggacattaacaccrtgctgtgggtcaagaaaaagacagattgtctgctactaataaattctcaaaacgccatttcctgagccaaaacattgccaaaaattatatgttcatttactcatgtattcaaatgttaatatgcagaccacgtctgaaattgtggacag

SEQ ID NO: 765302 - DNA, 669 bp, Homo sapiens
ccagattcactacagcttaagactagcctcagaattcttttttgcattaatcaaaactttacagaggagacaaacagtgatttttaccattcattgaactggtttgcacagagagagagggagaaaagggccagaggtctgactggtaagaaattcctaccctkttgccagcatgcccttctggtttccccttccctgagtggtcctagtgacccagctcactgtaccataatcccagaggccaagccacaacacagaaggaaatacatacatacatttttcaatgcccttcagtgtgttgttgttcatttggagcattccactgcaagttatttttagcaagactttgccatttctataagactttgctgcctcccaggcctaatgtataagctggaaggaactcagttttccagaaattaagaatcccatttttacctaaaatatggcctttactctcaggttctcttgattaactcagacaatggttttttcctacctaggtgcacaagaaaaatgaaacaaaggggtaaaacacaaaaatccctgtgaatttgcaaaagccaaattttataacccctgcaatattactgcttactactagttcttttctgacccagtcagatgtaagaggcctctaagtggatccaagccagttaattaacagat

SEQ ID NO: 765303 - DNA, 563 bp, Homo sapiens
tgcctggtaggtgagtacgctgctgcataagggacagtgtcattcatttttttaatttcaatcaacaaacatgttgaactcctcctatgtactaagcataatctctatctccacaaaactatgcaatttaaccttctaagaaaaatgccatttccatggataacatcgttacttcagacaaaaccttttaggtctcttcctcacagaacaacagggtatgcaacccattgtcagaatgccttgttttctaccagccaaaatcaccctcttgtaaaatgccttatgtgaatcaaaatcactcttcgacaagttttaaaatgcaattaccaacatcacctcaaggcagtcatttaatccctgcatgccttaaatactctgcaaaacaggagagtaatgctgttgtgaagtcgactgagctgaaataagawtgcttcaaggtaggagactctactgttgttattctaagttaggaattctatagtagcctcacagcttccctctatgtctccagcacagcaataaaaaattctttatagatggaaatgattgctgagtagagtctc

SEQ ID NO: 765304 - DNA, 618 bp, Homo sapiens
aattaaaaccaaagtagaggatcctcttcctgataaggtggagtaggcctattccaccatgtctcttccactgataaacccgaacagaaagcatgaagcaattatttgaaggccctgagaagtaaacagtagcaggtgaattggggaagagaaccaaaatccaaagtaccactgaaccagtggtgagcttcctttttttcctcagctgtcttctgtactaaacttatacagccatctgaaaacaggcactgaggcaggagaaggcagaggaggttctccaggaaaagctctagggccggttcatggagcaggaaaaggacttctaatgcttaragagagcagggggaattgcctattttttcccctttctctgttctattgcaccccagcacttaagcaatcctctggtggctgctgcaacagcagtgccactgcaagctgacaggagctcaaaaacatgaggagagggtccttcttccccaagcaagggatctgtggtcccaagaagggtagcaagaagccccacttcatcatcttttctttgtcctcctgctgcttggctctacatagggatggtcactggaagtcacagcagagcggggcaactacaggcccctg

SEQ ID NO: 765305 - DNA, 564 bp, Homo sapiens
gggctcctgcctgtaatcccaacatttagggaggccaggcaggcggatcacttgaggccaagagttcgagaccagcccagccaacatggtgaaaccccgtttttatcaaaaattcaaaaattagcagggcgtgatggcacatgtctgtaatcccagctacttggaggctgaggcaggagaatcacttgaacccaggaggcaraggttgcagtgagccaagatcgcatcattgcactccagcctgggtgacagagtgagactccacctcaaaaaaaacaaaaaaacaaaaacaaaaacaaaaaacaacctaacccagtactcctcaaaactattatgatcattacatacaaggaaagtctgagaaagccccaaagccacagcagcctaagaagatgtgaaactgaatgtcatgtggaatcctggggggccctggcacacaaaaaggacagcaggtaaaaactaaggaaatgtgaataaagcatggacttcagttaataataacataccaatggtggctcgttaattgtaacaaatataccaaattaatgtagggaataacgggaa

SEQ ID NO: 765306 - DNA, 349 bp, Homo sapiens
tggatttaaagccatgaagtcaagctcctgagtccacatttccagcctatgggctattggaaaaggagtcaatgaaaaataggctttggagtatggcagaaaaaatgcacagaagggaggggactagaggaaagggagctggtgttgaaggaaagatggsacttccacgtcggaatgacagacaggaatgctaggaaaaaggtcaggcctgaggacagatttggggaagatactcagaacgctgagggttaaagtaatgaaaatggatcttaaatggggaaagaacaagaaaaaagagcccaggtagagaggctaaactagcagagaaaaaagaaaagaatcagagaag

SEQ ID NO: 765307 - DNA, 651 bp, Homo sapiens
cgttagtgggactgcaactggtagtctttctgaggatggtctggttttattaaaatcaattccaagtgtagaaatgttaagataatttctgcacagataactgtgcagagttacaaagatgttgtaaaagaatgtttgttataacatgaggcatcactgccacaaaaggaggagggtaaatgactctcaaaaaggratttagtaaatgatgatgttttcatgcattggacatattatattgccattaaaatgatgatgtcagcctacatttattgacatggagagaagctcatgatttttaagtgaaatggaggtaaaggaagcttaatttcaatccattttaattttttaattaagtgattttttatatgcagaaaattctggtgagctatgtcccacatatgatagtgattacaattgcatgatgtatttatgggtgagctatgtgttcatttttatagttttctgtgtttttcttatgatgatatatttcttttgtagttaagaaaataaaagctgtttcataaaatacaaaaggaaatacatttcttttgaatcaatgattccatttcttgtactgtatcttaagtaaccaaaaaggtagacaaaaaattactctcaataatgttcttttctcccagtattccccaa

SEQ ID NO: 765308 - DNA, 651 bp, Homo sapiens
cgttagtgggactgcaactggtagtctttctgaggatggtctggttttattaaaatcaattccaagtgtagaaatgttaagataatttctgcacagataactgtgcagagttacaaagatgttgtaaaagaatgtttgttataacatgaggcatcactgccacaaaaggaggagggtaaatgactctcaaaaagggatttagtaaatgatgatgttttcatgcattggacatattatattgccattaaaatgatgatgtcagcctacatttattgacatggagagaagctcatgatttttaagtgaaatggaggtaaaggaagcttaatttcaatccattttaattttttaattaagtgattttttatatgcagaaaattctggtgagctatgtcccacatatgatagtgattacaattgcatgatgtatttatgggtgagctatgtgttcatttttatagttttctgtgtttttcttatgatgatatatttcttttgtagttmagaaaataaaagctgtttcataaaatacaaaaggaaatacatttcttttgaatcaatgattccatttcttgtactgtatcttaagtaaccaaaaaggtagacaaaaaattactctcaataatgttcttttctcccagtattccccaa

SEQ ID NO: 765309 - DNA, 606 bp, Homo sapiens
attgatgcggtgtacgccattgcccacgccctccacagcatgcaccaggcgctctgccctgggcacacaggcctgtgcccggcgatggaaccctttaatggccggatgcttgtgcagtacattcgaagctgtccgcttcaayggtgagtgggtgcctgcccccctgcagcagtgaaggacagctggggggctggattttgctgttaggcctgggacaacctcagggtggaagggctgggtgaggctgagtggtctaatgggggtgcctggggctgagtgccaaagacatgagacaagttccggtccccaatttttaacactgctccctccccaggcttcagtgttccctgcgctggtttgcacagttcagatgctggggagcttctttgatcccttctgccaggaacccccagtgggtcacaccacactcccctccactgcgcagagcttgagggcatctggaccctgggggtgcacgtggggcacagttaagactgcgtggggcgcctacccagggacatgccgcccactttgagtcatgcgccaggcacaggcgtgggtctgacctgtcccttggcaccaggcttggtgtgtggtcagggctca

SEQ ID NO: 765310 - DNA, 632 bp, Homo sapiens
gtgccaccatgcccagctaattttgtgtttttagtagagatggtgttttgccgagatggtgtttcgccatgttggccaggctggtcttgaactcctggcctcaagtgatccactcacctcagcctcccaaagtgccaagattacaggcatgagccactgcactcagccagatccagtccttttactaatttacttctctacacccttgcrtgccttttagaattctatccaactggtcagtttcttcttatcagagccttattccttcttggttcctatcccttacatttcttcagccttttctccacagggtggaatgtcatttttgaaaccccccaagctacttgtaataagcatcagtattccactctggctgtccatactacagcagtttttcccctgtcaaagcccaagagatagaaaatatttagtttggaatttttcacgtttagaaacaaaggtatcaatataacaaagagtatttgtgaagcagtttcattctataaaatgatgagaagattcacttggaattgtgcattttattccatttttgaagaagttttatgaaacaatatctgtataaagaagcaaccgaagacctaagtcaaacttttgggaaaagttaaatttat

SEQ ID NO: 765311 - DNA, 527 bp, Homo sapiens
tagttacctttgctggcaatctttaattttttgtatagatgagaattattttctggtgtccctccttttagattgacatagttccttacatattacttgaaaggcaggtctgatagcaacgcattctgctttcatttatctgggaagagttttttgtcttttttsaaaggtagttttgccaaaataacacttttggttgggaggttttcttttttgtttttgctttttactttcagcactttgaatacgacttccttccatctagtcccacaataggggccatcccactactttctggcccccattgtctctgatgagaaatcagctgttaagcttgttaggtataccttgtctgtgatgagtttaagattttctttatcttttcatcactgactacaatgtgtttcaatgtactactttgtgtttatactacttcgattttgtggagcttcttggatgtgcagattaatgttttctcatcaaattagggaagttttcagccattcattcttcaaatatttttttct

SEQ ID NO: 765312 - DNA, 593 bp, Homo sapiens
aaatcacagtccgaaaattaatttgaaaatattgagaactaaactaacattgtataaaatgtttatgaagtacatcctgaaactttcttaaaggacataaaagataccttaataaatgcaaaaatattccattaggaatattccagtggttttccagtgaggaaaactgcacactattaagataacatgtcggttaatgtggagactctggttaatggaaaattggatgcaatcccagatgaaatcctattgcatttcttgagaacttgacaaagtgctggtatattttacatcaaaaaatgattgtstcagtagtagtctgaaagtagcttaagaatagtgaaatcaaaccagggaaactcacaatgtcacagtaattaaaacagtgtgcatttggcaccgaaacaaaaacaacagatcaatggaactgagtaaggagcttagattatgataattaagtatttttaaaaatcaggcagagaaatacatcattttgggaaaaattaaatcccccttcacacaatatgtaaggatatatttcagataggttaaacctgttagtgtgaaaagttaaactctgcaagattagaaga

SEQ ID NO: 765313 - DNA, 668 bp, Homo sapiens
ggtctgcggcttcactcctgaactcagcaagaccacaaacccaccagaaggaagaaactctggacacatctgaacatctgaaggaacaaactctggacacaccatctttaagaattgtaagactcaccgcgagggtctgcggcttcattcttgaagtcagcaagaccaagaacccactggaaggraccaactctagacacattttggtgacccagatgggactattgcctatcgccaagcagtgagtaccatcagacccctttcacttgctattttgttctatttttccttagaatttgggggctaaataccaggcacctgttaaaagctggccagttaaaagcgactagcacggccaccagacttaagacatggttgtcaggctttctgggaaagggctctctaacaacccccgactctttggaattgggagtgttggtttgcctggaaccagcttccgcttttcctgtacttctgggctgagccaagggttggcagagacaaaagccattcagctctggggtcccgacaacaagttggttgaccctgcagccatgagcagaactctcaaagtcatgtcgcccaagcgagactcacccatctatcctatctatcctgatgcttgcctcctgggtcctaatgcctgtcagacaaacttcctcccgcct

SEQ ID NO: 765314 - DNA, 668 bp, Homo sapiens
ggtctgcggcttcactcctgaactcagcaagaccacaaacccaccagaaggaagaaactctggacacatctgaacatctgaaggaacaaactctggacacaccatctttaagaattgtaagactcaccgcgagggtctgcggcttcattcttgaagtcagcaagaccaagaacccactggaaggaaccaactctagacacattttggtgacccagatgggactattgcctatcgccaagcagtgagtaccatcagacccctttcacttgctattttgttctatttttccttagaatttgggggctaaataccaggcacctgttaaaagctggccagttaaaarcgactagcacggccaccagacttaagacatggttgtcaggctttctgggaaagggctctctaacaacccccgactctttggaattgggagtgttggtttgcctggaaccagcttccgcttttcctgtacttctgggctgagccaagggttggcagagacaaaagccattcagctctggggtcccgacaacaagttggttgaccctgcagccatgagcagaactctcaaagtcatgtcgcccaagcgagactcacccatctatcctatctatcctgatgcttgcctcctgggtcctaatgcctgtcagacaaacttcctcccgcct

SEQ ID NO: 765315 - DNA, 554 bp, Homo sapiens
ggcacctgttaaaagctggccagttaaaagcgactagcacggccaccagacttaagacatggttgtcaggctttctgggaaagggctctctaacaacccccgactctttggaattgggagtgttggtttgcctggaaccagcttccgcttttcctgtacttctgggctgagccaagggttggcagagacaaaagccattcagctctggggtcccgacaacaagttggttgaccctgcagccatgagcagaactctcaaagtcatgtcgcccaagcgagactcacccatctatcctatctatcctgatgcttgcctcctgggtcctaatgcctgtcagacaaacttcctcccgcctttyttctccgaggctagtcctgcttctaaaaaccactccctgtctctggtgcttttctagtttctcctgtaagaatgatttctagtataaacttcaggactctgttaacttctttaggcacccgggctcaccaaccagaaagacataatttttgcccaaagccccattgtaggggggactatctggaattttaggatcc

SEQ ID NO: 765316 - DNA, 685 bp, Homo sapiens
gggggactatctggaattttaggatccctcctcagaaaagcaggcctaacaaaagctattcctgaagctaggatttggggagcctcagaaattgtatccttcctattcgtataagtgaggacaaaaggcatcactcttctaactctggagatcccttccctccctcagggtatggcccttcacttcatttttggggcataacatctttataggacatgggtaaggtctcaatactaacaggagaatgcttaggactctgctgcatcagtgagcacaactattctgatcagcagggtccagggactgttgtgggttcttgggcaagaggtktttctgctgctacgtcagtgagggcgattattcccatcagcagggcccagggaccgttgcgggttcttgggcagggggagaaacaaacaaaccaaaaccactggcggttttgtctttcagatgggaaacactcaagcatcaacaggctcattcttgaaatgcatcctaagccattgggaccaatttgacccacaaaccctgaaaaagacctggctcatttttttctgcactacagcttggccccaatattatctctctgatggggaaaaatggccacctgagggaaatataaattacaatactatcctgcagcttgaccttttctgtaagagggaaggccaatggagtgaaatac

SEQ ID NO: 765317 - DNA, 685 bp, Homo sapiens
gggggactatctggaattttaggatccctcctcagaaaagcaggcctaacaaaagctattcctgaagctaggatttggggagcctcagaaattgtatccttcctattcgtataagtgaggacaaaaggcatcactcttctaactctggagatcccttccctccctcagggtatggcccttcacttcatttttggggcataacatctttataggacatgggtaaggtctcaatactaacaggagaatgcttaggactctgctgcatcagtgagcacaactattctgatcagcagggtccagggactgttgtgggttcttgggcaagaggtgtttctgctgctacgtcagtgagggcgattattcccatcagcagggcccagggaccgttgcgggttcttgggcagggggagaaacaaacaaaccaaaaccactggcggttttgtctttcagatgggaaacactcaagcatcaacaggctcattcttgaaatgcaycctaagccattgggaccaatttgacccacaaaccctgaaaaagacctggctcatttttttctgcactacagcttggccccaatattatctctctgatggggaaaaatggccacctgagggaaatataaattacaatactatcctgcagcttgaccttttctgtaagagggaaggccaatggagtgaaatac

SEQ ID NO: 765318 - DNA, 613 bp, Homo sapiens
gggaaggccaatggagtgaaataccttatgtccaagctttcttttcattgaaggagaatacaaaactatgcaaagcttgcaatttacatcctacaggaggacttcacagcttatccccatatcctagcctccctatagctccccttcctattaatgataagcctcctctaatctcctccacccggaaggaaataagcaaagaaatctccaaaggacctcaatcccccctgggctattggttatgtccccttcaagctgtggggggaggggagtttggcccarcctgggtacatgtccccttctccctctctgatttagagcagatcaaggcagatttggggaagttttcagatgatcctgataggtacatagatgtcatacagggtctagggcaaacctttgatctcacttggagagatgtcttgctattgttagatcaaacactggcctttaatgaaaagaatgagactttagctgtagcctgagactttggagatacctggtatctcagtcaagtaaatgatagaatgacagctgaagaaagggacaaattccctaccagtcagcaagctgtccccagtatggatccccactgggacctcgactcagatcg

SEQ ID NO: 765319 - DNA, 637 bp, Homo sapiens
taatcctgggacagcctgtaaccaggtatttctcccaccttctcagttgtaactgggagactttgctcttttcacatgcctttcttgttatgcctgaaagtcccacccttattaaggagggatatattagccaaggctggagctattatctacatgaatatggggaacaagttacccatttattgtcycctacttgggagggaatcaaccctgaagcctgggcattggaaggacaatttggaggggcaaaaaatgcccacacagtccaaatcaggctaaaagatcccaccacatttccttatcaaaggcaatatcccttaaggcctgaagctcataaaggattacaggatattgttaaacatttaaaagctcaaggcttagtaaggaaatgcagcagtccctgcaacaccccaattccaggagtacaaaaacagaatggtcagtggaaactagtgcaagatcttggactcatcaatgaagcagtaattcctctatatccagttgtacccaacccctataccctgctttctcaaataccagaggaagcagaatggttcagtgttctggacctcaaggatgccttcttctgtattcccctgcactctgactcccagtttctctttgcctttgaggatcc

SEQ ID NO: 765320 - DNA, 637 bp, Homo sapiens
taatcctgggacagcctgtaaccaggtatttctcccaccttctcagttgtaactgggagactttgctcttttcacatgcctttcttgttatgcctgaaagtcccacccttattaaggagggatatattagccaaggctggagctattatctacatgaatatggggaacaagttacccatttattgtcccctacttgggagggaatcaaccctgaagcctgggcattggaaggacaatttggaggggcaaaaaatgcccacacagtccaaatcaggctaaaagatcccaccacatttccttatcaaaggcaatatcccttaaggcctgaagctcataaaggattacaggatattgttaaacatttaaaagctcaaggcttagtaaggaaatgcagcagtccctgcaacaccccaattccaggagtacaaaaacagaatggtcagtggaaactagtgcaagatcttggactcatcaatgargcagtaattcctctatatccagttgtacccaacccctataccctgctttctcaaataccagaggaagcagaatggttcagtgttctggacctcaaggatgccttcttctgtattcccctgcactctgactcccagtttctctttgcctttgaggatcc

SEQ ID NO: 765321 - DNA, 541 bp, Homo sapiens
attactctctgtccccagaaggtctcccctgtctccccaagagaggacaaacagctctctctgggcagtggggaaagataagaccagaagcaccacagctgtgagcttggagacctcacaaaggatgaaggtacaaaaggtttacacatttccagaaatatttcacctttggtttatcttactcagactcacaaatcacaaatgctcactgggatatccaactgttcagttagaaaaggtcttgcccaacacaaatttcatgagcgtcaaaaacattccagcagacttctytgttcctttcaatcccacctcagagctcactctcacattgaaaaaataaacccatggatttaacggtgatccacccatgactagactcgaaatcagagtacttgacccttacatcttcagtcagacttttagcttctcctgaatcacagctctgcgattgacaggaaggacaatcaatggcaatgagtgggaaaatcacacaaataacacaacatatgactctgttcctgcaagagcgcaaactctctgc

SEQ ID NO: 765322 - DNA, 551 bp, Homo sapiens
aatgtaatgatgtggcagcttctcaaacttctatgtgcaagaaaataccatagggatcctgataaaatgtagattctttttttttttttttctttgggctggagtcttggctccatcgcacaggctggagtgcagtggtgcgatcttgactcactgcaacctytgcttcccaggttcaagcgattcttctgcctcagcctcctaagaagctgggactacaggcgcccactatcacggccagctaatttttgtatttttagtcgagatggggtttcaccatataggccaggctggtctcgaactcctgacctcatgatctgcctgcctcagcctctcaaagagctgggattataggcgtgagccaccgcgcctggccaaaatgcagattcttatctggtagttcagggtgggttctgagagtctgcatttctaacacactcccaggtattgtaggtgctccctatctgagaaggatctagtagaaaggagaaaaaccagacaaggtttttgggtggagaaaagtaggtgaagcttggagatggtgttccagg

SEQ ID NO: 765323 - DNA, 492 bp, Homo sapiens
acacctagaaaccattaaactccaaacaggcaaccagagcctcagatgatggcttacctttgctaggaatacttaaatagacctttgggaggagtctgactgctgttttcctccaaaacaatgacccctgtcagcaagatgcagctaagacctgtcatcgtccatattctaaaggcagttagatgtacttcttcagaaggggaaaatgatacggaagtgctgggaaaggaagaacggtccctttaaatgatacggaagtggggaagggaagtgctggggagaggaaaggtgtrgtccctggctagggctccaccctcagggaaataggtgaggtcaggcactcctgccttcatgcccaaatgttgcatttcccaagaccgccctggcctgccatgtccccatcctgtgcctctaaaaacccgagaccctagcagggcagagacagaagcagctggacgtcgaaaggagcacatcagcggaggaacacacagg

SEQ ID NO: 765324 - DNA, 548 bp, Homo sapiens
ggaacacacaggtggctggacgtggaaaggaaagcaccagcaccggcatgccaacaggccactgaccggcagaaccacatggagtttggctggggcagttggaggaaagcctggctgccaggtggcccgactccactggaaaaccgtctcccttctgcctcccccatctgctgagagctacttccactcataaaaccttgcattcattctccaagcccacatgtgatccgattcttccggtacaccaaagcaagaaactccaggatacagaaaaccctctatcctttagasagggtagagggtctaattgagctgactaacacaagccgcctatagaaaaagaaaggcaaactgaaagagcacccggtaacacatgcccactggggcttcaggagctgtaaacgttcacccctagacattgctgtggggtgggagtcccacagcctgcccatctgtatcctcccctaaaggtctgagcagcagggcactgaagaagcgagccacaccgccatcacatgccctgcgagggggacaagagaatctttctc

SEQ ID NO: 765325 - DNA, 630 bp, Homo sapiens
ttttaaataaattctggatgctagtcctttgtctgatatttataatgtaaatattttcttctgtctaatgtaaatatcttcctctgttgcttgccattttattctccttaaagtaagaaaagattcttggccgggcacagtggcwcacacctgtaatcccagcactttgggaggccaaggcaggtggatcacctgaggtcaggagttcgcaaccatcctagccaacaaggtgaaaccctgtctctactaaaactacaaaaattagccaggtgtggtggcaggcacctgtaatttgtacttgggaggctgaggcaggagaatcacttgaacccgggaggaggaggttgcagtgagccaagaccgtgccattgcactccatcctggcccacaggagtgaaactctgtttcaaaaaaaaaaaaagagtttgttgctcccaccgagttctgaagaacgccagcagctcgctgcttaaaattaaaccacagggttccatgatgggtcaacttgatgggaaagtcatcatcctgacagccgctgctcaggggattggccaagcagctgccttagcttttgtaagagaaggtgccaaagtcatagccacagacattaatgtgtccaaacttcaggaa

SEQ ID NO: 765326 - DNA, 630 bp, Homo sapiens
ttttaaataaattctggatgctagtcctttgtctgatatttataatgtaaatattttcttctgtctaatgtaaatatcttcctctgttgcttgccattttattctccttaaagtaagaaaagattcttggccgggcacagtggctcacacctgtaatcccagcactttgggaggccaaggcaggtggatcacctgaggtcaggagttcgcaaccatcctagccaacaaggtgaaaccctgtctctactaaaactacaaaaattagccaggtgtggtggcaggcacctgtaatttgtacttgggaggctgaggcaggagaatcacttgaacccgggaggaggaggttgcagtgagccaagaccgtgccattgcactccatcctggcccacaggagtgaaactctgtttcaaaaaaaaaaaaagagtttgttgctcccaccgagttctgragaacgccagcagctcgctgcttaaaattaaaccacagggttccatgatgggtcaacttgatgggaaagtcatcatcctgacagccgctgctcaggggattggccaagcagctgccttagcttttgtaagagaaggtgccaaagtcatagccacagacattaatgtgtccaaacttcaggaa

SEQ ID NO: 765327 - DNA, 600 bp, Homo sapiens
tggagatagtcctggggaagtttttgctttccttataaaggagagaaataaagctggccttgccccatcccccatcgttctgctttgaaggtgggaacaattcctgaagcgggaacagccattttgtgactctgaggcaaaaagcccaagggaaagctcgtcttggtgcatccagctgctggcccgctctagctgctggctgcctccctgaccctttgtcacatgaggaaaggagttatgtgcattcctacctaataggccagggccaccaaatgtctctccagagcagcctttagaagtgtcttcatcccagccgggcgcggtggctcacgcctgtaatcccagcagtctgggaggccaaggcaggcrgatcacgaggtcaggagatcaagaccatcctggctaacacggtgaaaccccgtctctactaaaaatacaaaaaattagccgggcgtggtggcagacacctgtagtcccagctactcaggatgctgaggcaggagaatggcgtgaacccgggaggtggaggttgcagtgagccgagatcgcgccactgcactccagcctgggcgacagagcgagactctgtctcaaaaaaaa

SEQ ID NO: 765328 - DNA, 600 bp, Homo sapiens
tggagatagtcctggggaagtttttgctttccttataaaggagagaaataaagctggccttgccccatcccccatcgttctgctttgaaggtgggaacaattcctgaagcgggaacagccattttgtgactctgaggcaaaaagcccaagggaaagctcgtcttggtgcatccagctgctggcccgctctagctgctggctgcctccctgaccctttgtcacatgaggaaaggagttatgtgcattcctacctaataggccagggccaccaaatgtctctccagagcagcctttagaagtgtcttcatcccagccgggcgcggtggctcacgcctgtaatcccagcagtctgggaggccaaggcaggcagatcacgaggtcaggagatcaagaccrtcctggctaacacggtgaaaccccgtctctactaaaaatacaaaaaattagccgggcgtggtggcagacacctgtagtcccagctactcaggatgctgaggcaggagaatggcgtgaacccgggaggtggaggttgcagtgagccgagatcgcgccactgcactccagcctgggcgacagagcgagactctgtctcaaaaaaaa

SEQ ID NO: 765329 - DNA, 549 bp, Homo sapiens
gtaaatgcaacacacaaaaggttaaaagcttccatctgtacaggactcatataagtcaataggaaaaagatgaatagcacaggaaaatataaaaaagacaagaaccacacaggtctcagcaaataaatatagggataatatatatgttaataatatattatttatgtaattattattaattatattatgtatgttatataatatgtaatatattataaattaatatacatataatttatacatatataatagacacataattttatattagacacatattatatacaattttataatagacacattatataatatagagrtataaataaatatagtttttctttcaatccaagaaattcaaatttaagtaacaagtacatttttaaagactaccataatggcaaatgttttttaaagtagatgactccctactgtgaacacacacacaaaattatagatagggacattcatttatacattagctctgaagggcaatttggccacatatatcacaaattttttatttttaatctagcaaataaaatccta

SEQ ID NO: 765330 - DNA, 587 bp, Homo sapiens
ttataaaaatgtcactactattgtgagttgaaaatatccaagacacattttccttatttgtgggaggagaagatcaaagagaaataattggtattccatggaaaggaagtacacgtcaaagagatatatgaatgttatctttggtgtagtgatttaaaagtttatgtagaataaatatatccatttgttcacccagaattaattgatttttcttctctatgtaaggtacaggtctgggcaatagttaaaatggtaataatgttcatttcttcacattttgctggaagttgtgctaatagaagaaaatacraatataagttatttagtcatccaataaacaggtgtatctcaaaaggcagttactgtggaaagaatactgaacttggagaccaggtatctgcattgaaaccccaggccttcatatacagcttctccacacagaatcttttttttagaatgtaaatcggattgtattatgtttccttgtcttttaaaggcttctgattgtccttacgatatagaaaacagtttataacgttgcatacagttcctgcgtggtccagctccatctttcagtgctgacccac

SEQ ID NO: 765331 - DNA, 586 bp, Homo sapiens
ttaccaggaatgcaaagaaataggaaaatgagaccaatgaagaagaggaaatataatcaatcaaaagtgaaatcacatatgtacatgatcgaattattattagtagatgagggcattacaacagtcatttaaactgtagtgcttatgttcaagaagctagagaaaagattgaacatgttcaataggtagatggaagatataaaaaaaacaaaacaaatgtccagagattaacactaaaatggctgaaatttaaaaatactctggtagtgattaatggcaaaatatacattgcagaataaacaatttgggaacttggaggcatagcaatataaatcacayaaaaattaaattaaaacacgctgaaaaattaaaagagttttgaaacaatttcaagtggcccatgtattcaagtatacacttcaagtacatatatatttgaagcctctgaagaaaatgacagagaaggggggatgacaataatattatttgaagaaattattgccaagaagtttgaagaaaactataaacccacattttgaagaaggcttcacaaatcccaagtacaagaaatgtgataaaacttcac

SEQ ID NO: 765332 - DNA, 557 bp, Homo sapiens
caccatgttgcccatgttggtctcaaactcctgggctcaagccatcctgctaccttggcctcccaaagtgctgggattgtaggtatgaaccaccatgccgggccaactggccaaatttttcataatcaatttaattcctcrtctctacttatccgttggacacaataacattaaaccatataaaactgccatttctataggccaaaaaatgtcagatatcagcaattacatttattcattctaataataaacttttttcaaagtaaaagaggcattgggtcccagagataaatgaagcccctttgaatttcatctttacatttcaacttccttcttaccagtttaaaaaatatatagatattcccatttcatacatgagaaaactgaagattaccaaagttaagagtataattgtaagtggcagacagctaggactcaaaactgtgttttgacttcagacacactggtcctgcttcaaactgaggcctccaagggactagttataacaggtactaaaagcattatgggaaatataaggaaacaaattatcagaattc

SEQ ID NO: 765333 - DNA, 557 bp, Homo sapiens
caccatgttgcccatgttggtctcaaactcctgggctcaagccatcctgctaccttggcctcccaaagtgctgggattgtaggtatgaaccaccatgccgggccaactggccaaatttttcataatcaatttaattcctcatctctacttatccgttggacacaataacattaaaccatataaaactgccatttctataggccaaaaaatgtcagatatcagcaattacatttattcattctaataataaacttttttcaaagtaaaagaggcattgggtcccagagataaatgaagcccctttgaatttcatctttacayttcaacttccttcttaccagtttaaaaaatatatagatattcccatttcatacatgagaaaactgaagattaccaaagttaagagtataattgtaagtggcagacagctaggactcaaaactgtgttttgacttcagacacactggtcctgcttcaaactgaggcctccaagggactagttataacaggtactaaaagcattatgggaaatataaggaaacaaattatcagaattc

SEQ ID NO: 765334 - DNA, 422 bp, Homo sapiens
aactcaacaccttaagtgagtcattacaaagaaataatttagcaatttacttgtgacctagtgggcgtcatcattattattattacaggcttggcaaattttggcttttcaattattctagaacttagttaatatctgtatagatgcctcttgtggctttaaaatgttgacagctgattaaacttatcytttctgagtaatcagtctgaaagattcttttttatttaatctagaagttttattaattgattttttaaaataggctgacagatgctattatatagccacaggaatagctaacattttacaaattgacaatagtaaatgttgatgagaatacagagcaactggaactctgatacattactggaagaagtataaattagcacaattatttggaatagtggcattacaaattagag

SEQ ID NO: 765335 - DNA, 422 bp, Homo sapiens
aactcaacaccttaagtgagtcattacaaagaaataatttagcaatttacttgtgacctagtgggcgtcatcattattattattacaggcttggcaaattttggcttttcaattattctagaacttagttaatatctgtatagatgcctcttgtggctttaaaatgttgacagctgattaaacttatcttttctgagtaatcartctgaaagattcttttttatttaatctagaagttttattaattgattttttaaaataggctgacagatgctattatatagccacaggaatagctaacattttacaaattgacaatagtaaatgttgatgagaatacagagcaactggaactctgatacattactggaagaagtataaattagcacaattatttggaatagtggcattacaaattagag

SEQ ID NO: 765336 - DNA, 620 bp, Homo sapiens
aatacatattatgaatagttcataatttcatgatagatgatgttattgtaaaatgtcttatgagaaaaatatttaagaaacgtaactccacagccgttagaaacatctagataggaaacacattagctgccccctttatcatcataagatgacaacaaagttacaataaataaatgtctgaaagtttagccccatcgtctgttttcttatagtttaaaagcttattttccatcttctactgttctttaggagtatggtaagtaaatactatgatatctgaatgtgtgtgtgtgtgtatgtgtgtgtgtgaattattccctgaagaaacacattcattttttacttatcttgtttccttcttaaacagaatgtaggctgggyacagtggctcacacctgtaatcccaacactttgagaggccaaggcaagaggatcttttgagcccagggatttgtgaccaccctgggcaatataacaagaccccgtctctaaaaaaagttcaaaaaattagccgggaatgctggcatacacctgtagtcctagatactcaggaggatgaggcaggaggattgcctgagcccaggaggtcgaggctgcagtgagccatgattgtactacta

SEQ ID NO: 765337 - DNA, 613 bp, Homo sapiens
tataaatgaggaaaatgagacttaaacataatctatcttaacaattccttcctcagtaataagcaaactgttggagcatattcctattgatatgctcatgatagtcttaactatcacaaaccagctttacaagcccactaggtggtgtgaacatctgagaacatgaaaatcaatgtatgggcataaagtctacacctcaattctaccagaatgttttgctattatgttccttgagacaaatcaatgatagagaaaamctgcctttattttctctttaagatgaaaactgcaaaatcagcctccattatcgggaactgattcaaagggaagagttggctgggtgttctaccaagaaaggggcaaggctaaaggaaagaaaattatatgttaaggagagtgattttttatattattaactcaaagcaagaaactttcattcacccaggatacagaaaatatatttgaggtgtaaaccaaccctacggttctttatttgggaaggaaaaaaatatcctcccttttgcaaattcatatgcaaaatgttcctattaaaacagtttccataattctgggcaacaaaatgtcttaaaagaaaaagcaccaacttggtacc

SEQ ID NO: 765338 - DNA, 644 bp, Homo sapiens
aggttcctgcatatgcaaggctctacttttctcctcgcaaatattcatactctgctaacacccgctttcttctttttcttctccaactacacactcttttctgacacctctgtgttcttcacacaagcttcttcccctccagatactctacacttggcaaagccctcgtggctgcctgaaattcctgagacattgactgtgctttcattgcatgcaacattttactgtcaaactttcaccatgctttaattatytgtgtccctccctacacacacacacacatacatacacacacgcgcgcgcacacacacacacacacacacacttcctccactagaaagtgggcttgatggggacagggatcatgtctccatctctgaattcccagagcctcaggtggagcttagcccctagcaggccttctgcaaatgctcacggggtaaatatggataattctcactgcaaaggactcaccctcacctctggaatctgtgtctcctatgcctctccagtgggagctccctttggaagtgtaatgtacgagtttgttgggaagtctgcacccttcctcatcctggccttcctggcactactggatggaggtaagtcaccatcagagcctccagcaggtgacagcccaggtc

SEQ ID NO: 765339 - DNA, 632 bp, Homo sapiens
ttccaccacgatgctgcctgaacaatcttcctgagcccagagcaggtgatgtttctcacctgatgtttctccataggccgcaaggccaagtacatgactcatctgcatatacaaggttcctgcatatgcaaggctctacttttctcctcgcaaatattcatactctgctaacacccgctttcttctttttcttctccaactacacactcttttctgacacctctgtgttcttcacacaagcttcttcccctccagatactctacacttggcaaagccctcgtggctgcctgaaattcctgagacattgactgtgctttcattgcatgcaacattttactgtcaaactttcaccatgctttaattatctgtgtccctccctacacacacacacacatacatacacacacgcgcgcrcacacacacacacacacacacacttcctccactagaaagtgggcttgatggggacagggatcatgtctccatctctgaattcccagagcctcaggtggagcttagcccctagcaggccttctgcaaatgctcacggggtaaatatggataattctcactgcaaaggactcaccctcacctctggaatctgtgtctcctatgcctctccagtgggagc

SEQ ID NO: 765340 - DNA, 644 bp, Homo sapiens
aggttcctgcatatgcaaggctctacttttctcctcgcaaatattcatactctgctaacacccgctttcttctttttcttctccaactacacactcttttctgacacctctgtgttcttcacacaagcttcttcccctccagatactctacacttggcaaagccctcgtggctgcctgaaattcctgagacattgactgtgctttcattgcatgcaacattttactgtcaaactttcaccatgctttaattatctgtgtccctccctacacacacacacacatacatacacacacgcgcgcgcacacacacacamacacacacacttcctccactagaaagtgggcttgatggggacagggatcatgtctccatctctgaattcccagagcctcaggtggagcttagcccctagcaggccttctgcaaatgctcacggggtaaatatggataattctcactgcaaaggactcaccctcacctctggaatctgtgtctcctatgcctctccagtgggagctccctttggaagtgtaatgtacgagtttgttgggaagtctgcacccttcctcatcctggccttcctggcactactggatggaggtaagtcaccatcagagcctccagcaggtgacagcccaggtc

SEQ ID NO: 765341 - DNA, 594 bp, Homo sapiens
attaattcaccaggttgtttcaccaatacttctgactggctataaattggagttcccatgaccccagccttgggtttgattaatttgctagagcagctcacagaactcagtgaaacacacttactgattgattgtacaggatattacaaaggatacagatgaagagatgygtagagaaaggcaggggagaagaggtggggtgcttccatgccctctctgggcacgccaccctccaagaccctccaggtgttcaactatccagaaacttcctgagccctgtccttttgggtttttatggaggctacattgcataggcatgattgattaagccattggccattggtgatcaacttaaccttcagcccctctctcctccccagaggttaggggcagtggctgaaagtcccaaccatctaatcctgccttggtctttctggtgacctgccctattctgaagctaccaaccatcagtcaaaaaaaaaaaaaaatcactctggagactctaaggattttaggatgccaggaaatggggtcaaagaccaaatatatattttataatatcatagtcatccattcattaaaccagcgtatctt

SEQ ID NO: 765342 - DNA, 594 bp, Homo sapiens
attaattcaccaggttgtttcaccaatacttctgactggctataaattggagttcccatgaccccagccttgggtttgattaatttgctagagcagctcacagaactcagtgaaacacacttactgattgattgtacaggatattacaaaggatacagatgaagagatgcgtagagaaaggcaggggagaagaggtggggtgcttccatgccctctctgggcacgccaccctccaagaccytccaggtgttcaactatccagaaacttcctgagccctgtccttttgggtttttatggaggctacattgcataggcatgattgattaagccattggccattggtgatcaacttaaccttcagcccctctctcctccccagaggttaggggcagtggctgaaagtcccaaccatctaatcctgccttggtctttctggtgacctgccctattctgaagctaccaaccatcagtcaaaaaaaaaaaaaaatcactctggagactctaaggattttaggatgccaggaaatggggtcaaagaccaaatatatattttataatatcatagtcatccattcattaaaccagcgtatctt

SEQ ID NO: 765343 - DNA, 434 bp, Homo sapiens
aactcaaatgaaagcatttttattcaacttgaagatagtattttttttcatgactgcagtcatgcacaggagatcccatgtcactttttgatttttagaacaatatcttgttttgtctgttgtcaacattggtatgwaaaatgcttgtagtcatattttataaatcacacagggttcatcttcaagttctgtcattacaaatctcccaattctaacaatatcattacaaaatattaaaatgttcacagcaaagggacacaaaagtttgaaagttccagtcaaactgattatacaaaatgataacactaaggttgtcccaacataaaagctgacaagtcaaaagcagggataatgtgcattttcactaacaaataataaaggttctgtgcatcaggacagccatattctcatgatcagagccattactggaagaa

SEQ ID NO: 765344 - DNA, 517 bp, Homo sapiens
taacatttataaataggcattttttcaatatacacagattatttacaactattgataatatagtggccataaaggatatctccattaattttaatgaacagatttcattataaaatatgtcctctgatcacaattcaactaagctaatacaaatagataactaaaaatatcccagtatatttgagaattaagaaataaatattttattacttttaaaaagcaccttgtaataaaattgattttttccycctgtggcatcacagttttttgtttaatacatgtgtgtaccatcatatttaaatacaaaacaatttaatctccctccaaagtccccctgttccatctctcataactcctgacaaccactgactgcttctgagttcctatagatttggctcttcaagaatgacatataaatggaatcacatagtatgtaacgtcttgagattgacttcttttacacagcataatgcttttaagattcatccaaagtcttgtgtatttcaaaagcacattt

SEQ ID NO: 765345 - DNA, 596 bp, Homo sapiens
acagataataaaatgttgtcatataaaaggttttacaaaacttttgaagatttgaataaaatcaaaaacgtataatttaccaaatctaactctagaaaattagaaaacttaaatcgttcaaaagcatttaaaaatacataatacaacaagtacagtaatattttaagtgatagaagcgtagtcactgtaagaattttcaactytgtatgcttgaaatttataataattaaagtgtcagcatgaaatttttgtacataagcacatacacagatgtgcacacacacaccctgaagttgctttttagtgaaattaaccaagcattaaggaaagcatatttccagtcttactcagggtttcatagttttccaaagaatagaaacacagagcacattcctcaactaatatttattttacctgcatatccttgaaacaaaaacctgtcaaagataacatttgaaaaagtaactgtcggccaaatttttttattcatgagtttctgtgcatttctttgagcaatacaatagtcagctatatctaattgtgtatttgtgcacatgtgtattcaaatttaattatgaagatgagttcaacatcaa

SEQ ID NO: 765346 - DNA, 686 bp, Homo sapiens
atatgggataaattatttgtttcaaagagtggcatccctcttagaattttttttttttttgcttttatcttatattttctagatgctaggccaagccctagattctactgctacattttcctatctcaaaaaattactcctcattgtctccttttctttctgtctctgttctgggcataaacttatgtgcgttctaaggcatattttactttagaaactttgcmaattttctgctacttattaaatataatcctacctacttttcgctatttatttgcatcaaactaaaatgtaattattttgcttcatatgtgttatttgaaaaagaaactgcacttctatggttagctgtatctataggattggtatcaacacaagaaattaatattttaccaactaaacaaccatttttcatttgccactgattcgttttcttcttacctgtttgtgtcctccaaaatcattacgagaggagtcttagaaacaaaagtgaactgcaaactgtgtatttcagagcttcacaaactcacctttctattttgtcttgtactgttatgtaaaatttgctccagcattttgctcagcaagatggcaattattaacaatatatttctctaaactgttgctgcaaagctattattcatgcagggctacaaccgagttaattttggaagagagctgttcaa

SEQ ID NO: 765347 - DNA, 686 bp, Homo sapiens
atatgggataaattatttgtttcaaagagtggcatccctcttagaattttttttttttttgcttttatcttatattttctagatgctaggccaagccctagattctactgctacattttcctatctcaaaaaattactcctcattgtctccttttctttctgtctctgttctgggcataaacttatgtgcgttctaaggcatattttactttagaaactttgccaattttctgctacttattaaatataatcctacctacttttcgctatttatttgcatcaaactaaaatgtaattattttgcttcatatgtgttatttgaaaaagaaactgcacttctatggttagctgtatctataggattsgtatcaacacaagaaattaatattttaccaactaaacaaccatttttcatttgccactgattcgttttcttcttacctgtttgtgtcctccaaaatcattacgagaggagtcttagaaacaaaagtgaactgcaaactgtgtatttcagagcttcacaaactcacctttctattttgtcttgtactgttatgtaaaatttgctccagcattttgctcagcaagatggcaattattaacaatatatttctctaaactgttgctgcaaagctattattcatgcagggctacaaccgagttaattttggaagagagctgttcaa

SEQ ID NO: 765348 - DNA, 686 bp, Homo sapiens
atatgggataaattatttgtttcaaagagtggcatccctcttagaattttttttttttttgcttttatcttatattttctagatgctaggccaagccctagattctactgctacattttcctatctcaaaaaattactcctcattgtctccttttctttctgtctctgttctgggcataaacttatgtgcgttctaaggcatattttactttagaaactttgccaattttctgctacttattaaatataatcctacctacttttcgctatttatttgcatcaaactaaaatgtaattattttgcttcatatgtgttatttgaaaaagaaactgcacttctatggttagctgtatctataggattggtatcaacacaagaaattaatattttaccaactaaacaaccatttttcatttgccactgattcgttttcttcttacctgtttgtgtcctccaaaatcattaygagaggagtcttagaaacaaaagtgaactgcaaactgtgtatttcagagcttcacaaactcacctttctattttgtcttgtactgttatgtaaaatttgctccagcattttgctcagcaagatggcaattattaacaatatatttctctaaactgttgctgcaaagctattattcatgcagggctacaaccgagttaattttggaagagagctgttcaa

SEQ ID NO: 765349 - DNA, 686 bp, Homo sapiens
atatgggataaattatttgtttcaaagagtggcatccctcttagaattttttttttttttgcttttatcttatattttctagatgctaggccaagccctagattctactgctacattttcctatctcaaaaaattactcctcattgtctccttttctttctgtctctgttctgggcataaacttatgtgcgttctaaggcatattttactttagaaactttgccaattttctgctacttattaaatataatcctacctacttttcgctatttatttgcatcaaactaaaatgtaattattttgcttcatatgtgttatttgaaaaagaaactgcacttctatggttagctgtatctataggattggtatcaacacaagaaattaatattttaccaactaaacaaccatttttcatttgccactgattcgttttcttcttacctgtttgtgtcctccaaaatcattacgagaggagtcktagaaacaaaagtgaactgcaaactgtgtatttcagagcttcacaaactcacctttctattttgtcttgtactgttatgtaaaatttgctccagcattttgctcagcaagatggcaattattaacaatatatttctctaaactgttgctgcaaagctattattcatgcagggctacaaccgagttaattttggaagagagctgttcaa

SEQ ID NO: 765350 - DNA, 668 bp, Homo sapiens
gattcgttttcttcttacctgtttgtgtcctccaaaatcattacgagaggagtcttagaaacaaaagtgaactgcaaactgtgtatttcagagcttcacaaactcacctttctattttgtcttgtactgttatgtaaaatttgctccagcattttgctcagcaagatggcaattattaacaatatatttctctaaactgttgctgcaaagctattattcatgcagggctacaaccgagttaattttggaagagagctgttcaaagaggcccagagctgtagcgcttatgaacactgccttttctcttatttctaattagtgtgaaatggttccaaacaggagtcagccccacagaagtctgtgtagcacaaagccaggcttgttaacggacacaggaaacagttttgttttgctgaataaacaamtgcgtcataaaagcttttcaaaaggaacacaatctgatttaccacactctttaaatgttgaatgttgtttatatgcctctgagtcctttttattaaaattcgaaaggcctactcttatgagtcaatatagatgatatgtttgtgatgtttccccgcagtagagcagtagacttacctagtaatacattttcccttcgcttttcattttataaattaacttttatcttttgttttgtgtgtttt

SEQ ID NO: 765351 - DNA, 557 bp, Homo sapiens
agaaggaaaggaaacaaaataaaagattagacagtagaaaacaactagcaaggtggcaaatgtaaatcggatgatacaaattgccttaaacattcatcgggtaaacaccctaattaaaagtaaagattgatagatttgatagaacagcaaaactcatttatgtattgtctataataaatccactttaaatataaagatatagataggttaaaagtaaaagacagaaatcagatatactatgcaaattctaatcaaaataaagttttagtggctatgttgagattagacaaagtaaacattasaacaagtcatattgtcaggaataatgagaaacattatataatgataaaggatcaattcattaaaattatataacaatcataaatgtgtatgcatctaatagtaggcttccaaatttgaactagatatgtactaagaatgatcctgtttgagagattgttcttatacatacttgtttttaaaatattgtttattcttcaagaaatagtcatatcatgtcatacatcaatttgcaaaggtaattttcttagtttata

SEQ ID NO: 765352 - DNA, 564 bp, Homo sapiens
gatcgcgccattgcactctatcctgggcaatagaacaaaactttgtctcaaaaaaaaaaaaaaaaaaaaaggaaagaaagaaatatggataaccattgagaattccttgtcctccactggtttgatagtttgacaactttgagatcagaagatgttcagggtcctatcttctagaatacttgggtgcagaggcgagtcttgaatttttttttttttttagaatattgaatctgaaaacctaggcagacataaraaaatgaactctggaaaatgtggcaatttagtagatcagtctttttcaataatacacatctctgtttggtaggcattaggtttggcaggatttctttctcctacacattccttctcttattcaaattaatattctaattttaacatgggagattccttatacggagttaatcagattaaaagtataatcaacttggttaattacttttttactaagattcctacaggtctaagtgtttgcagttttatattgtgctattatatgttcaattagattttgttatgtctacaactatattttgctattgtatg

SEQ ID NO: 765353 - DNA, 607 bp, Homo sapiens
actttttcacatgttttcttgctccttaaactgctgacatttcctttctcatcttcatgcacaactgataactttgctttctaccagactaagaaaataaagcagtaactaacttatttcaagttaaagtggactagacaattccttcattaagaacaaaccacgaaatctggaaaaaatattcatgaaagctttttgaaagcaagatggaattaacaaggtagtgaagaattagggcatatgatccaggaaaagaagaatccccagaaaattgagcctggcatgtatcccaaggatgtcttccaattcaggaagagacatatgagagcctgaggagctgaaaagcactttcaacagctttgattgtctaggggcacaagtattagagtctatgtctaaacaagaaggagcraccctggtaaactgcacataattagagtttgaacaacaaacaccagctacaccataagaataaagcaaatccagaaccggattagattatccagattgctagtgcctctacttacttctggaaacaagtatacatcctccctgaagaatttatacttattttatatatttaattatatataatgtaacatatatt

SEQ ID NO: 765354 - DNA, 558 bp, Homo sapiens
cttttctcttgctactttcaggatcctttctttgtccttgatttttcacagtctgattataatatatcttggtgaagtcttgtttggattgaaactgattggagacctttaaccttcctgtatctggaaagttacatctttctccaaatttggaaaggttttcactattatttctttaaataagctttctagkccctttgtctttctcttctccttcactaattcctataataaatatttgccctcttactgctgtctcataaattctgtgagctttcttcattcttttttacatctttttctcctctggatgtatattttcaaataacctgtcttcaagttcacagatactttcttctgcttcatcaattctgctatttatactccctattgtactttttatttaatttatggtatttttcagctgtagaatttctgtttggtttctctttataatttaagtctctcttacatttcttattttggccatttattatttcctgatagcattgaattgtttatctatattttcttgaagtttgctgtgcttccttaaaa

SEQ ID NO: 765355 - DNA, 558 bp, Homo sapiens
cttttctcttgctactttcaggatcctttctttgtccttgatttttcacagtctgattataatatatcttggtgaagtcttgtttggattgaaactgattggagacctttaaccttcctgtatctggaaagttacatctttctccaaatttggaaaggttttcactattatttctttaaataagctttctaggccctttgtctttctcttctccttcactaattcctataataaatatttgccctcttactgctgtctcataaattctgtgagctttcttcattcttttttacatctttttctcctctggatstatattttcaaataacctgtcttcaagttcacagatactttcttctgcttcatcaattctgctatttatactccctattgtactttttatttaatttatggtatttttcagctgtagaatttctgtttggtttctctttataatttaagtctctcttacatttcttattttggccatttattatttcctgatagcattgaattgtttatctatattttcttgaagtttgctgtgcttccttaaaa

SEQ ID NO: 765356 - DNA, 597 bp, Homo sapiens
atatgttatttgcttcttttctcttgctactttcaggatcctttctttgtccttgatttttcacagtctgattataatatatcttggtgaagtcttgtttggattgaaactgattggagacctttaaccttcctgtatctggaaagttacatctttctccaaatttggaaaggttttcactattatttctttaaataagctttctaggccctttgtctttctcttctccttcactaattcctataataaatatttgccctcttactgctgtctcataaattctgtgagctttcttcattcttttttacatctttttctcctctggatgtatattttcaaataacctgtcttcaagttcacagatactttcttctgcttcatcarttctgctatttatactccctattgtactttttatttaatttatggtatttttcagctgtagaatttctgtttggtttctctttataatttaagtctctcttacatttcttattttggccatttattatttcctgatagcattgaattgtttatctatattttcttgaagtttgctgtgcttccttaaaatcattatttcaaatatttgtcagt

SEQ ID NO: 765357 - DNA, 595 bp, Homo sapiens
aattttccccatgtcccctcagtaatctcttcccccaaaatattgattagctttggatttatatagttaggctatatgataatttctgcattaaattttttgttaattcattcatttatttattcaacaaacattgactgagaacctagtaatgtccctcacactctagtagatgttggatgataaaagaatgagtaagttcaatttctctcactttaaagaattactatttgagtgagacaaatgtgtaaacagacaaattaggacagattatgaaacttaccaaggtaaagggatgagcagagtcccgtgggaatacaggtgttcagtggctaagtcttcctggaaaggttgagaggttatctgatgggcagattcaaggattcctgagacagaggtgagtggagtagaaatggaaattagggagagcaggagttaccaagtcaaagttgtattgcrggtggtggtgacacatttagtgtccctgaaggtaggatgtgtgggatagagggcaagagatgagcttgggcatgcagaacacgggatgggcttttttgtcaggtaagattatttaccttctgctagctggcaatag

SEQ ID NO: 765358 - DNA, 636 bp, Homo sapiens
aatttgtgtttctaccatatacatcttaggattgttttttctatttctgtgaagtatatcattgatattttgatagggattgcattgatgctgtagattgctttgggttgtacacatataaactatggattcttccaatccatgaacatggaatatctttcctgttttggtatctttaatttctttcatcagtgttttacagttttcatagtagaactctttcacttctttggttaagttaattcttgggtgtttaattttatttgtagcttttgtaagtaaaattactttatttattttttakactgtttactattggcgtataggaatgctattaattttgtgtattgattttgtgtcctgcaattttactgaatttatcagttctagtagtattttggtggagtctttaggtgtttccaaatataagataatatcatttgtgaacaaggataattcaactctttaatttccaatttggatgccctttatttctttctcttgtctgattgttctagctggtacttccagtacaatgttgaataaacagtagttattcaaaagtggacattcttgttatattctagattttggaagaaaggctttccatttttccctttttggtataatactagc

SEQ ID NO: 765359 - DNA, 622 bp, Homo sapiens
ttaagcctgctccttttcagaaccttctttctggatttactattttctacagctatcctaaactagttaggttcttttcctcacagttaagtcaaggtctttggcttagatttatggggagtgctgggtaaaacctgggtgaagctgttatcattaaaaagtcttcattaagcacctaattactgctgtccttttcctagacccggcataaaaagaacctggtccggtagacctagcctctcagtatgctaggaacttacactttttagttgcctttaccaagtattgcagatactactgcaaataagtgaagaaagtaacagcatttaactgatttgggaacttggtttgatcttgttctaatgaccmacttcgaatggtggttgaaagtaaaatctgtatcgccgtcttatgtttccatttacctagaaatactttacctttgagcacaggaaattaatccccttctggttgttctccccctggcattggttttaaatatataatgattatgtttgttgtaggaaaaatagaaaaacaactacaatagaaaattcttcccatatattattttgaaatacatatttccgatccgataatccattgctctagcatggaaaat

SEQ ID NO: 765360 - DNA, 589 bp, Homo sapiens
aactctttctgatatgcttgcatttaaaatcaggctttttctcccttttggaaaaacacagtccttgtttgctttagggaagagtaaaggtcagtgcgctgcattgcattaatttcgaagggaaagatgagaagacatcttgaaaggaatggctggctttctagagaatagtagaggcttaataggtgtcatagaaaaaccagggttggacagtggtagtaaaacggcaaaacagattttattcagaaaaactactgcagtaagaggagagagacctcggtacagaactgctccactgcgaatacaaagaaaagtaggaattgatggcgggggagccggatgtcagtggatggaaaattattacgaggaaacacaggggtgtgcrttcttgctgaaggcaggccagagttatcagacatcacctgagggatggagggggatgtggaacctaatcggctgtctagggtgatcagatactgaagttgggggattctggtcaaatcaatttagcaggattcttggtaaaactgggcgatgcaaagacagatgcgttgagtacaaagtccaggccttattgggaagaggattt

SEQ ID NO: 765361 - DNA, 646 bp, Homo sapiens
ccacacttggctaatttttgtaattttagtagagacggagttttgccatgttggccaggctgttctcaaacacctgacctcaagtgatccactcacctgggcttcccaaagtgctgggattataggcaggagtcactgtgcccggccaatttttactgttttttttgttttgttttgttttgttttgttttaagagataaggtctcactacgttgtccaggctggtctcgataycctggcttcagtgatcttcctaccttggtctcccagtgttgagattacaggcgtgagccaccttgcccagcccccagagtagtttaaatgtgaatttttcttaggagtaagactcagcatcttttcagatttttaataatcatctgtgtgtctcttcctgtgaactatcttgttcttatctccttgcccatttttctgtggggcagttggcctttttcttaacttttagaagttttttttaatattaggaatatgaaccctgtatctgctctatgaattgcaaatattgtttccctctgtcactttttttttttcttgagacagtttcattctgccaccgaggctggagtgcagtggtgtgattacaactcaatccaaccttgagctcctgcgctcaagggatccttgtgcc

SEQ ID NO: 765362 - DNA, 646 bp, Homo sapiens
ccacacttggctaatttttgtaattttagtagagacggagttttgccatgttggccaggctgttctcaaacacctgacctcaagtgatccactcacctgggcttcccaaagtgctgggattataggcaggagtcactgtgcccggccaatttttactgttttttttgttttgttttgttttgttttgttttaagagataaggtctcactacgttgtccaggctggtctcgatatcctggcttcagtgatcttcctrccttggtctcccagtgttgagattacaggcgtgagccaccttgcccagcccccagagtagtttaaatgtgaatttttcttaggagtaagactcagcatcttttcagatttttaataatcatctgtgtgtctcttcctgtgaactatcttgttcttatctccttgcccatttttctgtggggcagttggcctttttcttaacttttagaagttttttttaatattaggaatatgaaccctgtatctgctctatgaattgcaaatattgtttccctctgtcactttttttttttcttgagacagtttcattctgccaccgaggctggagtgcagtggtgtgattacaactcaatccaaccttgagctcctgcgctcaagggatccttgtgcc

SEQ ID NO: 765363 - DNA, 646 bp, Homo sapiens
ccacacttggctaatttttgtaattttagtagagacggagttttgccatgttggccaggctgttctcaaacacctgacctcaagtgatccactcacctgggcttcccaaagtgctgggattataggcaggagtcactgtgcccggccaatttttactgttttttttgttttgttttgttttgttttgttttaagagataaggtctcactacgttgtccaggctggtctcgatatcctggcttcagtgatcttcctaccttggtctcccagtgttgagattacaggcgtgagccaccttgcccagcccccagagtagtttaaatgtgaatttttcttaggagtaagactcagcatcttttcagatttttaataatcatctgtgtgtctcttcctgtgaacwatcttgttcttatctccttgcccatttttctgtggggcagttggcctttttcttaacttttagaagttttttttaatattaggaatatgaaccctgtatctgctctatgaattgcaaatattgtttccctctgtcactttttttttttcttgagacagtttcattctgccaccgaggctggagtgcagtggtgtgattacaactcaatccaaccttgagctcctgcgctcaagggatccttgtgcc

SEQ ID NO: 765364 - DNA, 614 bp, Homo sapiens
gaggatcgcctggggccgcgaagtcaaggctgcaattagctatgactgagctgctggactccagcctgggtgacagagcaagaccccattgaaaaaaacaaacaaacaaaaaaagtccctgtgagagcaatgcaacagtccacaagttcgcggacttagctctatggcattgtgattgcagaggctcagatttgaattcagaagcatcctacatttctcctggagccagcaactgatcctgcattttatggggaaatctttatgctgtaattataggcccacatggaggggttctcgaaggtctcaaaatctaatcttgacaatgatgaaggccaggaagcgtttcccaagtgggtgagctgagaagcattgaracagagatgttgggaagtttctgagatcagacaagatgggaaaacagcatgcttgcgctctgaactcctgcagcccttgctgctctcaggccaaattgagactgattttccatctgctgccagcttttgccgctggggaaggggtcagggatggccaaggcatctgtgggcagcgctggtgggacgctggcctgcggttaagagactgactgcccagcctgggttcgatcccactttgct

SEQ ID NO: 765365 - DNA, 614 bp, Homo sapiens
gaggatcgcctggggccgcgaagtcaaggctgcaattagctatgactgagctgctggactccagcctgggtgacagagcaagaccccattgaaaaaaacaaacaaacaaaaaaagtccctgtgagagcaatgcaacagtccacaagttcgcggacttagctctatggcattgtgattgcagaggctcagatttgaattcagaagcatcctacatttctcctggagccagcaactgatcctgcattttatggggaaatctttatgctgtaattataggcccacatggaggggttctcgaaggtctcaaaatctaatcttgacaatgatgaaggccaggaagcgtttcccaagtgggtgagctgagaagcattgagacagagatgytgggaagtttctgagatcagacaagatgggaaaacagcatgcttgcgctctgaactcctgcagcccttgctgctctcaggccaaattgagactgattttccatctgctgccagcttttgccgctggggaaggggtcagggatggccaaggcatctgtgggcagcgctggtgggacgctggcctgcggttaagagactgactgcccagcctgggttcgatcccactttgct

SEQ ID NO: 765366 - DNA, 599 bp, Homo sapiens
cctgtgcccagcctgatttttcttttcttcattccttttcatgattttttcaccagtttccatcaattttgtggcttatgatagatttcagtggatgtggatataattttccttacatactttttcccagtttcagatwaggtgtataagatttttaatttttatttgtttatagttgttttgcagttgaaggggtgagggagaacaagtggaaagagactgttgccggttttccatgttataaattatctgagagagtactaatgttttaattcttgttcaaaggagagtttcttgctatggcttggcaaagagaagatttttaatgctttcaatcatgaatttgttttaggccctttgcttattttatgttttacagatctgcatattttttaattatacaagtaattttagtaataagattcttacattccaaaagtattataaagtaaaaagtgaaagctcacacaccttctccccagtgtagggtaataatcactgtattccagactgctttctttgcatacataactttttataaaaattagaatcataccataaattttagtcacaagttcctttttcacagtatcatagac

SEQ ID NO: 765367 - DNA, 599 bp, Homo sapiens
atctattcttgcctcagagaaagaaggtaactatgtgagacgatagagatgttaatttgttccactatagggaccattttactatatatatatatatatatcttgtaacagcatattgtataacttacatgtacacgataaaatttattttaaaaaaggaaaatctggctgggtacagtagctcatgcctgtagtctcagcactttgggaggctgaggtgggyggatcgcttgagctcaggagtgcaagagcagcctggacaacatgtaagacctcatctctacaaaaaataatttaaaaaattagtcgggtgtaggaactcatgcttgtagtcccagctattcaggaagctgaaacaagaggatcacttcagcctggaaagttgaggctgcagtgagccatgatcgtgcctctgctctccagcctgggtgacaaaacaggaccctgtctcaacaaagaaaagacaagagaagagaagagaagagaaaaagaacatctggaatatccaccaaaattaaaaggaaaagtaaaactacctgtagctactccatcaagtaataattactgttaacattctgatatatttccttttagtattt

SEQ ID NO: 765368 - DNA, 599 bp, Homo sapiens
atctattcttgcctcagagaaagaaggtaactatgtgagacgatagagatgttaatttgttccactatagggaccattttactatatatatatatatatatcttgtaacagcatattgtataacttacatgtacacgataaaatttattttaaaaaaggaaaatctggctgggtacagtagctcatgcctgtagtctcagcactttgggaggctgaggtgggcggatcgcttgagctcaggagtgcaagagcagcctggacaacatgtaagacctcatctctacaaaaaataatttaaaaaattagtcgggtgtaggaactcatgcttgtagtcccagctattcaggaagctgaaacaagaggatcacttcagcctggaaagttgaggctgcagtgagccatgatcgtgcctctgctctccagcctgggtgacaraacaggaccctgtctcaacaaagaaaagacaagagaagagaagagaagagaaaaagaacatctggaatatccaccaaaattaaaaggaaaagtaaaactacctgtagctactccatcaagtaataattactgttaacattctgatatatttccttttagtattt

SEQ ID NO: 765369 - DNA, 506 bp, Homo sapiens
ggagggaaccaggaaataaatactcaaacctttctcttctcccatcctctgacatcttatcggcaccgccagttggctgaccccaaccagaaacaaaggaaccattaatgtggtccatacagggcagcctccggggcaagaggtgggtgaagaagggtggagtgtactctgggcatgcatcaccaatcccacagtgggtctggaggagaaagcagaagatatccaggacagacatacctgagaaaatcacagaaactggtatatggacaggattttagataattctaaggaattattgataatagcattaasagataatggtgttgcagttataaacaaaatgtccatatatgtggaatttgctttaaaatattacagcaaaataagaagaaaggaaggagagagaaagtaaagaaaaagagaagaaataaagaaggatggatacagagtatgaagaaaaaagaaaggaagaggaatgaagggagagaggggagaaatagaaaatg

SEQ ID NO: 765370 - DNA, 575 bp, Homo sapiens
ccaatggattgtgttgccctgtgaaatttggagataaggggaaccaatgcaaatattctgacactcatgctgcatgctgtgctgtgagcaataaagttctttaactctgacccagaaattttgtgttttctatcagcatccattaatctgtggcaagctaaattgttagcttgcaagtagggtgaaatctcagaytcttcacagctcttgacagatatgttatccttcaatttcaaaaacttatccagaatatgccttagcgttaattattctgttatttttttctaaaatgaaatatgcttattttgaccgaaatattctgttctcttttaagaaaaaatggtttttattatgctttgaatactttgtttcatttgttggattctctgcatctaggactgttgacttgtttcctttgccccccatacattttttctgtttcttccaatggctttaatctctttgtccttctcctatgcattcaatatgattattctaagcttttcccaatgtcagtaatttgttatcagctgtgttctccatttccagatatttccgatttctctgttacctct

SEQ ID NO: 765371 - DNA, 657 bp, Homo sapiens
ctatgggtagtccagctatgggtacatatctctactatttaggacttaacaaggttgaattgtgaactctgaggataaatatgttaaaatccgttctgttttcctccaggatacagatttattctgcccccaccccaactcacagtctcgtttttctgcatcgccgtcattatctccttccatcctgagcrtgccttcatgttttcctgtgtctgcacaagtctcaattttctgtgaatttgcttgagcaatattcatatctaatatttctagctctcacagaagtgacattttccttcgatgtggggaatggaccttgtgaggtcacggtgcagtcacccactccctttaatgacaatcagtggcaccacgtgagggcagagagaaatgttaaaggagcgtctcttcaagttgatcagcttcctcagaagatgcagcctgcccctgctgatgggcacgttcgtttacagctcaacagccagctcttcattggtgagtgctggtggtttataactgaatttagtgtgagtccagagagggaccaaaagaaaataagaactgtgatgtactgagagcaacagttgccaacaactactgcttattggtactatttgctgataacctggtaggttccaggagcttgctgtgtgcttctta

SEQ ID NO: 765372 - DNA, 657 bp, Homo sapiens
ctatgggtagtccagctatgggtacatatctctactatttaggacttaacaaggttgaattgtgaactctgaggataaatatgttaaaatccgttctgttttcctccaggatacagatttattctgcccccaccccaactcacagtctcgtttttctgcatcgccgtcattatctccttccatcctgagcatgccttcatgttttcctgtgtctgcacaagwctcaattttctgtgaatttgcttgagcaatattcatatctaatatttctagctctcacagaagtgacattttccttcgatgtggggaatggaccttgtgaggtcacggtgcagtcacccactccctttaatgacaatcagtggcaccacgtgagggcagagagaaatgttaaaggagcgtctcttcaagttgatcagcttcctcagaagatgcagcctgcccctgctgatgggcacgttcgtttacagctcaacagccagctcttcattggtgagtgctggtggtttataactgaatttagtgtgagtccagagagggaccaaaagaaaataagaactgtgatgtactgagagcaacagttgccaacaactactgcttattggtactatttgctgataacctggtaggttccaggagcttgctgtgtgcttctta

SEQ ID NO: 765373 - DNA, 657 bp, Homo sapiens
ctatgggtagtccagctatgggtacatatctctactatttaggacttaacaaggttgaattgtgaactctgaggataaatatgttaaaatccgttctgttttcctccaggatacagatttattctgcccccaccccaactcacagtctcgtttttctgcatcgccgtcattatctccttccatcctgagcatgccttcatgttttcctgtgtctgcacaagtctcaattttctgtgaatttgcttgagcaatattcatatctaatatttctagctctcacagaagtgacmttttccttcgatgtggggaatggaccttgtgaggtcacggtgcagtcacccactccctttaatgacaatcagtggcaccacgtgagggcagagagaaatgttaaaggagcgtctcttcaagttgatcagcttcctcagaagatgcagcctgcccctgctgatgggcacgttcgtttacagctcaacagccagctcttcattggtgagtgctggtggtttataactgaatttagtgtgagtccagagagggaccaaaagaaaataagaactgtgatgtactgagagcaacagttgccaacaactactgcttattggtactatttgctgataacctggtaggttccaggagcttgctgtgtgcttctta

SEQ ID NO: 765374 - DNA, 600 bp, Homo sapiens
aaatgaactgcaaaaccaatttgagtcatcatgtactattaaagtcatcctatcaataataagaaatataactgcatatcaactccgttaaattatcaaacatgtaatgggagaaaagcatcttaatttaatcttgaaatgctagcttttataataaccattaaggsaggcactgaaaaaccaaacccattggagggcatacagttttctctcatcgtttgtagtttgactgctgaaaagacccatgtcattacagtcctatttttctaactcagggttctctttttctttacacaaaagatattcaccattgttggcgaggataactgaaaggtattcctcatagaaagagctcacatacagcaataagctcggagatcgtgtggttcggaagctcagtgtgatcatttctctggtcaatgttacatctctgtataatgaagaaacgagagagctggagttttcacttaaagtgtaatgttcttgaaaatggtatgtcattgaggagccagttgcaaaatatgcggaaatctctgaaatgataaatacatttttgttatgttaacaaaatgtaagtccaacggtcttgttttaagtaca

SEQ ID NO: 765375 - DNA, 600 bp, Homo sapiens
aaatgaactgcaaaaccaatttgagtcatcatgtactattaaagtcatcctatcaataataagaaatataactgcatatcaactccgttaaattatcaaacatgtaatgggagaaaagcatcttaatttaatcttgaaatgctagcttttataataaccattaagggaggcactgaaaaaccaaacccattggagggcatacagttttctctcatcgtttgtagtttgactgctgaaaagacccatgtcattacagtcctatttttctaactcagggttctctttttctttacacaaaagatattcaccattgttggcgaggataactgaaaggtattcctcatagaaagagctcacatacagcaataagctcggagwtcgtgtggttcggaagctcagtgtgatcatttctctggtcaatgttacatctctgtataatgaagaaacgagagagctggagttttcacttaaagtgtaatgttcttgaaaatggtatgtcattgaggagccagttgcaaaatatgcggaaatctctgaaatgataaatacatttttgttatgttaacaaaatgtaagtccaacggtcttgttttaagtaca

SEQ ID NO: 765376 - DNA, 539 bp, Homo sapiens
gttcttgaaaatggtatgtcattgaggagccagttgcaaaatatgcggaaatctctgaaatgataaatacatttttgttatgttaacaaaatgtaagtccaacggtcttgttttaagtacatttagagaatgagaccaaaccttaaatatcctgggagataaagtaatagtgaaatcctttcctgttttattttttatttttcactttttaaagttttttaaaaactacaacttgaagaaaaagtagcaaactccaatatactcataacccaraattgactaacacttaatagagattttaattctctaaatcatcctcatcttatatttacatataactaattcttcagtataaatgtataatttataggtgacttatctcatctttggtttccaattttttcccaaatcattaatttttaaacatctttattcagatataatccatatgccatgtaatagacccaattacagtgtaaaattctatgtcttttagtatatttgcaggcatgtgcaaacattgccatgatcaattttag

SEQ ID NO: 765377 - DNA, 641 bp, Homo sapiens
cctggtttttctatttctcttttcagttctgccaggtattctttatgcaatttggggctatattattaactgcatataagtttgtaattgttatatctttttgagggaattaactttttatcattatataagtttccctatttctagtagcaccttttgttttagagtttattttttctggtattagtatagtccctttggctctctagggttactctttgcatggtacatgttttcccttcttttattttcaactaaattacccctttcaatctaaattgtatgtccttagacagcawatagttaagatttcttttgttatccattctgacaatatttgtcttttgattggattgctcaatcgatgaacatttaatattattattgatacagttagatttacatctgccattttctttttctttttctatgtgcttcatttgttttcttttcactttccttctgactcattattttgtgttggtggatattttggagtgtaacattttaatttctttcttgatttcactatactttggggtaaaatatatataatatataatttgccacttaaccatttaaaatatgaaattcagtagcattaattaaattcacaatgttgtgcaattatcacctctttt

SEQ ID NO: 765378 - DNA, 613 bp, Homo sapiens
aacaggaaataaataacagaaatagtttaccacaacaagtaataccctatagtgacatttgttgttgtacagtctctattatctcttagaaccaaaaatacccagatattgtgacctaaaatctaatctttcaagatgcttcaataaaagaattagcaatggtcaagtaaacgtagtaactgctgcatttctacattatttttggagattttaaatgtttaccaggttaagggttcaaagaagacttttgtttcaaattagcatttaccagatgtaattgactgtggacacgtttttacataaaatttattagcacacacatggtagaattagttcagaagaaaagcacatctgtcagtaaatgttcagtacaagcargccaaatatgaaatatctcattttatatccaaacctctagaatcagttaaaatctggaacttgctcatttagtcgctttaataacctttctaaagatctacattttttttagaattgcatctatcacctggtgacttttgaaatcattttatacattttatattttaaaaatatgagaccatttattgtttttacctacagaccatgacattcaaggttgcctatggctgatcac

SEQ ID NO: 765379 - DNA, 458 bp, Homo sapiens
tttagtttaactagataccatttgtcaaatctgctttcattgcaattgcttctggcatctttgtcatgaaatctttgccattcctatgtccaggatgatattccctatgttgtcttccaggatttttatagttttaggttttacatttaagtctttmatctagttcattgagagtttttaaaataaagggatgttaaattttatcaaaagtctttctttgtctattgagataatcgtggtttttgtctttagttttgtctatgtgacgaatcacattgattgatttgcaaatgtcgaaccaactttgcatcccaggaataaagcctatttgatagtggtggattaaatttttgatgtgctgctggattcagtttgctagaattttgttgagaagttttgcttccatgttcatcaaggatattggcctgaagttttcttttatttttgtgtctctgaga

SEQ ID NO: 765380 - DNA, 541 bp, Homo sapiens
caggccaatacctgcaccaggttagcctctgtggccccaagatctagaccagcccttgtggcctccaggccccaggccagctcacatgacctcaggcaacaggcccatccagagccatgctggcacccacaccttcaagctccaggatggcccctgcagctccaggctccaacataaggccaacccctatggacccaattccaggcctgttttcatggtcttaggtactaggcttttcccaatggaatcagatatgaggcctgtctcagttgaccctagggccaggctgctgccatagattctatgctgaacccagcctcataaactcaggttctgggcccrcccagtaccagaatagcccctatgaactcaggctcaaggcccttcccagtgccagattggccttatggactcaggctccaggcctatccctgaagaccaagtctactctagtgggctctggtaccaggccagtcacctcagacccaggaaccagtccacacccacagacccaggatccagacccacccatgtagaccca

SEQ ID NO: 765381 - DNA, 541 bp, Homo sapiens
caggccaatacctgcaccaggttagcctctgtggccccaagatctagaccagcccttgtggcctccaggccccaggccagctcacatgacctcaggcaacaggcccatccagagccatgctggcacccacaccttcaagctccaggatggcccctgcagctccaggctccaacataaggccaacccctatggacccaattccaggcctgttttcatggtcttaggtactaggcttttcccaatggaatcagatatgaggcctgtctcagttgaccctagggccaggctgctgccatagattctatgctgaacccagcctcataaactcaggttctgggcccacccrgtaccagaatagcccctatgaactcaggctcaaggcccttcccagtgccagattggccttatggactcaggctccaggcctatccctgaagaccaagtctactctagtgggctctggtaccaggccagtcacctcagacccaggaaccagtccacacccacagacccaggatccagacccacccatgtagaccca

SEQ ID NO: 765382 - DNA, 525 bp, Homo sapiens
gtaaaaggatttcccactgaagtgtctgtaaagactgtaagaggtgcctacttcttcaaatatgaatacaccaaggcaaagccacaaggaacataaataatcagggaaacatgacatcacaaaaagaatgtaatacccataaccaatctaaagaaatggagatctatgaacttcctgaagaagaattcaaactaattggcttgaagaagctcaatgaactacacargaagacacagccaaccaaacaaaatcaggaaaacaatgtgtgaataaaatgaaaagtgtgacagagagaaaacataaaaaataaccaaacagaaattctgaagctgaagaacataatgactgaactgaaaaatttcagagatcttcaacagcaaacttgataaagcagcagaaagaggcagtgacctcaaacactgcttatttgaaattaaccagtcagaggaacaaaagaaaaaaagaatgaaaagagtgaagaagaccgacaggatttatgggccaccatcaagcaaacctaatatg

SEQ ID NO: 765383 - DNA, 458 bp, Homo sapiens
tttagtttaactagataccatttgtcaaatctgctttcattgcaattgcttctggcatctttgtcatgaaatctttgccattcctatgtccaggatgatattccctatgttgtcttccaggatttttatagttttaggttttacatttaagtctttcatctagttcattgagagtttttaaaataaagggatgttaaattttatcaaaagtctttctttgtctattgagataatcgtggtttttgtctttagttttgtctatgtgacgaatcacattrattgatttgcaaatgtcgaaccaactttgcatcccaggaataaagcctatttgatagtggtggattaaatttttgatgtgctgctggattcagtttgctagaattttgttgagaagttttgcttccatgttcatcaaggatattggcctgaagttttcttttatttttgtgtctctgaga

SEQ ID NO: 765384 - DNA, 458 bp, Homo sapiens
tttagtttaactagataccatttgtcaaatctgctttcattgcaattgcttctggcatctttgtcatgaaatctttgccattcctatgtccaggatgatattccctatgttgtcttccaggatttttatagttttaggttttacatttaagtctttcatctagttcattgagagtttttaaaataaagggatgttaaattttatcaaaagtctttctttgtctattgagataatcgtggtttttgtctttagttttgtctatgtgacgaatcacattgattgatttgcaaatgtygaaccaactttgcatcccaggaataaagcctatttgatagtggtggattaaatttttgatgtgctgctggattcagtttgctagaattttgttgagaagttttgcttccatgttcatcaaggatattggcctgaagttttcttttatttttgtgtctctgaga

SEQ ID NO: 765385 - DNA, 522 bp, Homo sapiens
aaagactgttattgctggggctcataaaattatactccaaagtatgacgctttggcatccagagtgctttgaactaaaggagactgaaggccccagaagccaagtttccctctgaccttctcctgccttcctgtcttccaccccctacttttcccctgaagtgagtcctggaarccagaattcttcttgcccaaagcaagccgtgacaccctggaaatatcactctaaccttccttgcctttccgtgtggcagctggccatgaagaaattctctgacctaccttgtttgatagcagatcacaagaccctggttccagagcggtcctgctttacaccgagggaaaggaatgtcatacagaaaggccaagaagaatctgaagagatgtccaatcacctttgcacgtggctgcccattcttcattgaacctaagcattaaaatagacagtttcccctgggtctttgggtcttcatttctgaagactccatgtcatgtaaaactttgattaaatgaatgtatcatg

SEQ ID NO: 765386 - DNA, 595 bp, Homo sapiens
actgcaacaaacatggctgaatctaaaaaaccttgtgttgaatgaataaatctagacactatagggtacattttgaagtcctagaacaagcgaaactaagatatagcagtagaaattgtatcagtagttacctgggttgaggtgggatgggagttgactgcagagaaacacaagggaagtttctggagtgatggaaatgttctatgtcttgattgactatggttacattggtgtggacatttgtcaaaaytctgaatttcatatttggaatttgtatattttgtatataaattatacttcaataaatatgtacatgtatatatatgtgtatatataatacattttgatatgtcatgatgtctatcacttcacagcatattatatttctatcataccatatttacataatggaaaaagatgaaaaggatgctgtattttggggaaatcacaagagattatcacctttatttattttttatacaaatacatataaatctttcacagtacaatacaaatgtcaaaatgtggtattttcattgctctataaattcttatatgttctatgtatgtaataaatgttaaaaacagtgtttat

SEQ ID NO: 765387 - DNA, 580 bp, Homo sapiens
gcctccctgctcagggagccccagttggaacgcagcacaggactccactggaagctctgccatgtggtatacagggcaaaccttaaaacagtataggagtctgatgtaagaggtgattaagaagttaaaacctatcctggccgggtgtggtggctcacgcctgtaatcccagaactttgggaggctgacgcgggtggatcacgaggtcaggagrtcgagaccatcctggctaacacggtgaaaccccgtctttactaaaaatacaaaaaattagccaggtgtggtggcgggcgcctgtagttccagctactcgggaggccgaggcacgagaatggcatgaacccaggaggcggagcttgcagtgagccgagatcgtgccactgcactccagcctgggcgatagagcgagactctgtctcaaaaaaacaaacaaacaaacacctatccaaacataaacatccattatttgtgactctgtcatccaaactgcccattgctattttttgcgtagcttaaaattttgactaaaaaagataacttcataccccttatctgtccctaagtaggatttttaggtctg

SEQ ID NO: 765388 - DNA, 579 bp, Homo sapiens
ttatgattcaaacttttctagcagaaattactttttattttctctgcagaacatgtggggttgggtggctgatgaatagtaacctggcaaattcctctgcctggaaaaatatcatccaactgatgggtgtgtggttgcaaaagcgagctttataactattagctgagcaactcgggatcatattaaggtaaaattcataaggtgtatatcttctaataaaatactatcatttaaaaaatgctatttattccattagagatgcagtttttgtttttgttttgagacggagtctcgctctgtcgcccaggctggagtgcagtggcgcgatctctgctcactgcaagctccacctcccgggtkcatgccattctcctgcctcagcctccccagtagctgggactacaggcgcctgccaccacgcctggctaattttttttttctgtatttttagtagagacggggtttcaccatgttagccaggatgaagttgatctcctgatctcgtgatccgccagcctcagccgcattacaggtgtgagccaccacgcccggccaagatgaagttttctaatcctcata

SEQ ID NO: 765389 - DNA, 619 bp, Homo sapiens
aaaacacgctacaagaatgtcataatgcaatggcaagtattaacagcaggatagaccaagctgaggaaagaatctcagagcttgaagactggctttctgaaataagacagccagacaagaagaaagaagaaagagtgaaagtaagaaatctctgagaaacatagaattatgtaaagagaccgaatctatgactcattggtgtctctgaaagagatgrggagaatggaaactacttgaaaacatattttaggatttcatccatgagacctttcccaacctagctaaagagaccaacattcagattctgaaaatgcagagaaccctgcaaaatccttcacaagaaaatcatccccaagagacatgactatcagattctccaagcttgaaatgaagcaaaaaaatcttaaaggcagagaaaaagtaatgagagataacctacaaaggtacaaagggaagtccattagactaacagcagacctattagcagaaacctcacaagccagaagaggttgggagccaatattcaacattcttagataaatggaattcccaccaagatttcaaatctaaccaacctgagcttcataagtgaaggagaaataagatccttttcagacaa

SEQ ID NO: 765390 - DNA, 411 bp, Homo sapiens
ggcgcggtggctcacgcctctaatcccagcactttgagaggccaaggtgggcagatcacgaggtcaagagatggagaccatcctggccaacatggtgaaacctgtctctactaaaaatacaaaaattagctgggcatggtggcatgygcctgtagtcatactcgggaggctgaggcaggagaatatcttgaacccaggcagtggaggttgtggtgagccgagattgcaccactgcaccctagcctggtggcagagcgatactctgcctcaaaaaaaaaaaaaaattcattgtatgaatattcaaaattatacatgattgtaattataattgagtcatgaaggctgaaaataaagataaatgaatcaagcttcatttaagtagcaaaatgaaagcctctccatcctccatta

SEQ ID NO: 765391 - DNA, 592 bp, Homo sapiens
cataccatttgggttgagataaggagaaagaaaacatgcttcgcttacaagattttgttggaaaactgcaaaaaaagtcttttacaaaattgttaaacattttttttttaaatcaacaccacaatccttaagtgctttagtcaaaatacttgtcaagtgagtaaaaaaaacaaattagttgatcttgcctctccccagattttaggttctgtctacacaggaactgagcaatagatcttatgttatgacttattttggtaaaataaatggtcagcrtagcaagaaaatgagtttaattgaagtttttcctgccaaagattgtaggttccctcgtttatagatactgtatcatggaatttactttaggtagttttttttttttccttctctgtctctgaaaagaccttgcatagtagtaggcttattttggcttagtgattgtcagccctgacttgattactcattaaagtaacctggaaagctttaaaaatactgaggccaggcccctccccacagattatattgaattgaactgtgatggggctagagaattaggatgttttttgaagcagctggacttgtgagtcactgg

SEQ ID NO: 765392 - DNA, 592 bp, Homo sapiens
cataccatttgggttgagataaggagaaagaaaacatgcttcgcttacaagattttgttggaaaactgcaaaaaaagtcttttacaaaattgttaaacattttttttttaaatcaacaccacaatccttaagtgctttagtcaaaatacttgtcaagtgagtaaaaaaaacaaattagttgatcttgcctctccccagattttaggttctgtctacacaggaactgagcaatagatcttatgttatgacttattttggtaaaataaatggtcagcgtagcaagaaaatgagtttaattgaaktttttcctgccaaagattgtaggttccctcgtttatagatactgtatcatggaatttactttaggtagttttttttttttccttctctgtctctgaaaagaccttgcatagtagtaggcttattttggcttagtgattgtcagccctgacttgattactcattaaagtaacctggaaagctttaaaaatactgaggccaggcccctccccacagattatattgaattgaactgtgatggggctagagaattaggatgttttttgaagcagctggacttgtgagtcactgg

SEQ ID NO: 765393 - DNA, 527 bp, Homo sapiens
acaccacacttgggtaattttaaatttttttttttttttttgtggagaccaggtcttattctgttgaccaggctggtctcaaattcttgtgctcaagcaatcctcctacattggcctcccaaagggctcggattacggggatgtacaaccgtgcctggccaggagtgccatttagcatggaaatgagattataatgaagcctgaggctttagctatcctggttctaacaagtgtyagtgggtctggttacaaagggaacttcctagagcaagtgtcgtgttttttaaagataagcagagttagggcagtgtggaaattcagctatgtcatggcagcatgctaccacttaacagtaatatctgaaaaattagtaacatggaaattttttgtacattttagacagatcatataaaaatacaaagaaataatatatatgtgataaatatcaagttacatataaagtagaataaaaatggctaaattatattggttactttttatttcatgagttgaactcaacaggatat

SEQ ID NO: 765394 - DNA, 636 bp, Homo sapiens
caaaatacttcctaattctaatcacttcttgtcacttccacttggccatcctgatctaagacaatgcaatctctacctagattattgtaataaaccccagtggcctgcctacttccaattccctgagtcaacttcagtctattttgcacaaagcaggcagttactctttaacaatcaaatcatttaacttccctgctcaaagctttccaatggctcttaattacactttaaatcaaaatttttatcatgtttctaaatctcagacctcacctmctaccacaatttctttttgctgtattttccaaccatccacattagctgccttgatttactttcaagtttacaaactcctgccccaaggcctttgaacttctagttcttttgtcttgaatattctttcctcagaatgtaacaagactcatttacctactaatagttttgatatttgtctccttcaaatctcatattgaaatgtgatccccaatgtttaaggcaggggctaatgggaggtgtctgggtcataagggtgggtcccccctggatggcttggtgccttccctccagtaaggggtgagttcttgctccattagttcatgagaaagctggcaatgttctactgattagaacattaaaatg

SEQ ID NO: 765395 - DNA, 591 bp, Homo sapiens
ttcagaagattcagagccacctgcacaacaatgtgctgaagataaagaaacacaggcgttctgccataagataccaattacctccaaaatcccgactcaaacaatgaaagcaaagtgagaaatcccataaaaatggtcttggtggatatcaaaagactcaaccaaagtcacaaccaggaaggaccttggttgtcatcattttaagatgaggaaatcaaggctcagaaaagttggttagggaagtatctactgacaaaatctagctaatggtaggggaatcactaaactctggtctcttttctgccctagaaaatgtcaccttctctttagatgccgcattkctctatagccagtaataaattctctagttgtacaaatcaagcaataatgattataaaatgtgcaatttcaaactactctaatagcttgaaatgtatatatcgtaataaccttcaaaaagcagttgcttcagagcttggaagtcagcactctatcttaagaacaagtaaaaagccaggcaaactgaaaaattaaccaatttttttagatccagcagagaagtgaggtcacagaacaaaccactgcccctca

SEQ ID NO: 765396 - DNA, 622 bp, Homo sapiens
tgtcgcccaggctggagtgcagtggtgtgatcttgactcactgtaagctccaccttccaggttcatgccattctcctgcctcagcctcccgagtagctgggactacaggcgcccaccaccatgcctggctaatattttttgtatttttagtagagacggggttkcacctgtgttagccaggatggtctcgatcttctgaccttgtgatctgcccgcctcggcctcccaaagtgctgggattacaggcgtgagccacggcgccctgccacttctttatatattttaaacaatctgatgatacacacaagtgtagtgagatctttctagtgagtttatctcagcattagatagagttcaagtttatccctaacaatgcttttcatctttgtctgacataatacagctatatctgctttcttttgatttgtatttacttggtaaatattttctattcttttagtttcaacttcaccgagtgcttatattttatcttttgtaaacaagctatagcttctttaaaaatccaatgataaaatctaatatctggtttttaaatgaacagagtttactcgtatttattatgattatttgtacactagtatgcatttaaaccatcttattt

SEQ ID NO: 765397 - DNA, 644 bp, Homo sapiens
gaacaaagcttccacagtgtggaaggggacctgagtgggttgccactgctggctagcgcagcctgcttttattctcttatctggcctcacctacatcctgctgattggtagagccaagtggcctgttttgacagggcgctgattggtgcgtttacaatccctgagctagataaaaaggttctccacatccttwtcagattagttagatacagagtttcgacacacaggttctctaaggccctactagagcagctagacaccagagtgtcgattggtgcattcataaaccttgagctaaacacagggtgctgattggtgtgtttacaaaccttgagctagacataaaggttttccaaggccccaccagagcagctagacacagagtgtcgattggtgcactcacaaaccttgagctaaacacagggtgctgattggtgtatttacaatccctgagctgtacataaagactctccacatccttaccagagcagctagatacagagtgtcaattggtgcactcacaaaccttgagctagacacagggtgctgattggtgtgtttacaatccttgagctagatataaagactctccacgtccccaccagactcaggagcctagctggcttcacctagtggatcctaca

SEQ ID NO: 765398 - DNA, 545 bp, Homo sapiens
aggtgagagatgaggatccagtttcattctcctacatgtggctagccaatcatcccaacaccatctgttgaaaaggatgtcctttctccactttatgtttttgtttgcattgtcgaagatcagttggccttaaggatttgggtttatttctgggttctctattctgttccattggttatgtgcctatttttataccagtaccatgctgttttggtgactatggccttacagtatagtttgaaatcaggtagtgtgatgcctccagatttgttctttttgcttagtcttgctttggctatgtgggctcttttttggttccatatraattttagaactgtttttttctaattctgtgaagaatgatggtggtagtctgatggggattgtattaaatctgtagactgcttttggcagtatggtcatgttcacaatattgattctacccatccatgagcatgggatgtgtttccatttgtttgtgtcatctgtgacttctttcagtagtgttttgtagttttccctgtagaggtctttcaacccctttg

SEQ ID NO: 765399 - DNA, 636 bp, Homo sapiens
tgttgatgctattcctttctgtttgttagttttccttgtaacagtcaggcccctctcctgcagatctgccggagtttgctggaggtccactccaggccatctgcctgtatcaccagcggagactgtggaacagcaaagactgctgcctgttccttcctctggaagcttcgtcccagaggggcacctgccagatgccagccagagctctcctgtatgaggtgtctgtcgacccctgctgggaggtgtctcccagtcaggaggcatggggatcagggacccacttgaggaaggagtctgtctcttagcagagttygagtgctgtgctgggagattagctgctctcttcagagccagcaggcagcaatatttaagtctgctgaagctgtgcccacagccaccccttctcccaggggctctgttccaggaagacgggagtttgatctataaggccctgactggggctgctgcctttctttcagagaggccctgcccagagagaaggaatctagagaggcagtctggctacagtggctttgctgagctgtggtgggatctgcccagttggaacttccctgcagctttgtttacactgtgagggaaaaacagcctattcaagcctcagtaatggtggacgcc

SEQ ID NO: 765400 - DNA, 564 bp, Homo sapiens
ccactgagctagaccacttggctccctagcagggaagccatgagggactgtgccatgaaggacagtgcattctggccccaatactatgcttttcccacggtctttgcaaaccgcagaccaggagattcccttgggagcctacaccatcagcaccctaggtttcaagtacaaaactgggtggmcgtttgggcagacactgagctagctgcaggagttttttttcacaccccagtggcacctgtaacaccagcaagacagactttgatgtaggcatttagggctatgaactttcctcttagcatcacctttgctgtaacccagaggttttgataggttgtgtcattatcattcagttcgaagaatttttaaatttccatgttgatgtcatttttggcccaacgctcattcaggagcaggttatttaatttccatgtatttgcatggttttgaaagttccttttggagttgatttccagttttattccactgtgatttgaaagagtgcttaatataattttaattttcttaaacttattgaggctcattttatggcctatcatatgc

SEQ ID NO: 765401 - DNA, 581 bp, Homo sapiens
aatgcattctatacttataatttctttcctttatatttaacactcctacacagattactaacaatacactaggcataaatgagtaagacctagacaacaggctcccataataaatgacagttctatcaagttcaatcaagatatgtactgccaaactattcttacaactacatttaaatcagaattattccattcccctgccttcattttagatcacatgtaggctcccaagaaatcaagtattcttgaatctctatcagagcagagcattttgagatgaactatgctcctaaacattaatcatttgcttggttaaagaaactgtatttgtatagatatttaagttttatatggatattgagtaatattctattagcacattccctttttagattcagacattcaacaaataagtactaatgagaattagrgtgaaaagctaaccatgtatgattcatgctatatttggctttatatataacagtaatcatgaataaagctatcaaaaaataaaactcagcctgaattcaatggcccatgatcttatgttggggcagagtatcttttaaaaaaattgaaat

SEQ ID NO: 765402 - DNA, 641 bp, Homo sapiens
atgaactatgctcctaaacattaatcatttgcttggttaaagaaactgtatttgtatagatatttaagttttatatggatattgagtaatattctattagcacattccctttttagattcagacattcaacaaataagtactaatgagaattagagtgaaaagctaaccatgtwtgattcatgctatatttggctttatatataacagtaatcatgaataaagctatcaaaaaataaaactcagcctgaattcaatggcccatgatcttatgttggggcagagtatcttttaaaaaaattgaaattgtcccccagattccggaagtatgactactgcaaacataagggggtaccttgaaatgtaacatcttaaaagaaagagacgatgttttctgtcagcatgattctcagaaaatcataattattccaaaaatatcccagaactatatatataaaaatgaactgaacatatgaggctgtaaatgtattctctaatttcaaagtagttcttgtccctccctcaactctctttttctattcttctattacctgtaccactaaaaaaggaaaaagaaaaactattgaatttacatattaaaaaataccagtggtagtcattaaataaagagagagtaaagatg

SEQ ID NO: 765403 - DNA, 583 bp, Homo sapiens
catgctagcggataacaggcaatgaagcaaagtgatacctgagatttgggaaacaaatgaggcgaaccctgtaactgtccccagctcaatatctcaaaaaagtttccaggctgcagcacagggcaggtaaaccaggcagacmttggtgtttccttgagttgaaaagatgcagctcagaatacagagatgccaagggggctagaattcagatggcagaggacccagggaggatagattcagagagggaggaggagaatctggagatcttcagaatttcccttgagtattcagttgagtactgatcagtgtaggtgtgtgaggaaacaacccaagacaggggaaagagctactggaaagggttagagaaatcaattccaggagctcaaacagggctggggatagtgcctgttcctacgaaccagagtgaaaaatctgaagcatacaaaagagtatttagaagggatataccttaataatggtgtaagtttagtcctagattaaacattacttgaatgccatctaaaacagcataaaagcaagactcaactgcttctaagcagcttaatggtatccgagaacaaaa

SEQ ID NO: 765404 - DNA, 370 bp, Homo sapiens
acagtctggcatttatgccaatacattccaaaatcctccaaggcaatcaatttgccaagatgttgtgatgggccagttgtctatagatgcgtgcttgtaagctgatcatggtacattagggccggtatgcaatgactgtgttaatctggtcattattattccaggttgctaatgtaaaggtttttatcaacttasaagaggagatgattataggtcttaataccactaaaatactgttttcaaaaaccaatttctgttactatcaagaattctttctaaattctaaaatattttctttgtcaaaagtatctacataaatgaagcagacataaaatgcattcctcagcaattctcaactgaacgaatttca

SEQ ID NO: 765405 - DNA, 610 bp, Homo sapiens
attattctcttcatctttttcaaagcaattaccataatttgtagttatctagtagttaattgctctttcatttattgtgtgccttatccaatgagaatggaccagaatcttgtcagtcttatttactgccacatccccacctctgatgcatgtcactcaataaatacttttgaaagaaatactgctgtacagcatttagaaataaagaggaggcacttctcagagactttcaaaatcctaaaaaaacagaccttggagttattataatctggttttcttttcttacaaacctaaaaagaaactgaggcgcrgcaactctcccgagattcatttaagatggcaagtttgagacacagccagtgatattcttccatctccctgtctcccactccagcgagctctccaaaccaagctgttgtttctgctagtcttactttattattcctacaggatgtatcaacagtgctgagcacacgtgaaaaccaaatgtttgcttcttttcccatactgcctttttgttgttgttttgccaactatagtggaaaaaaacacacaagacattggatgtcatgcaaatgagtctgacctcaatgccatgggcagaagagat

SEQ ID NO: 765406 - DNA, 608 bp, Homo sapiens
catcctacaaatcacttacccaaatcagactgtcaagattatagatcctgcctcagaattgtttggtacatttctatgtgaaatcttcttcaaaaataaattcatcaacataaattaacatgagacttttcttggttttctgacatggtgaatttcagaatagacaatgaattaaatattttaatggaaagagggaaacacaaacttatccctaaactagtacatgaggtactcatacgctttataaaaattagtatgaaaattaatgtaacacatgtaaacgaagcattttaattttttacaaagattattttgaaaacagttcaatagcttttaaatgaatatggaaggtcaataatacatatataattttatatatggatatttttgtataaatataaatatccmtatttatacataaatacccatatattaaaaatatattatacacacacgcacacaaaataatgacaaataagaccactgtatagtttttaaattcatataagtataaagtctatatacctgagccaacctctttttcctcctcttcaatgttgtttttgatgctatcatattcctcatcaatggtctggttaccacgcatc

SEQ ID NO: 765407 - DNA, 573 bp, Homo sapiens
aatgacacactcctgataaaagaaaaggtatacatttgtaaccttggcagcaaaagatctagacaactactgatctagaaatcttctaacagatttctgttacaagctaaatgtctaaagaaacttggaacaaagtaatttggaaactagagtgtaactaactaaaccaaacaagaaaaagagatgtaatcaatacctgcggagaaatcttaaaaagaggatcttcttacaccccaactcctgttttaaagactgctactacaacagcagccactytaaggagaatcaagagatactaatgatgtgaagataggaaatgccaacctatgaaatctcctttcagtgattctgacaagtcctggcgtaaattctatacaactgcaccaaaaattaaccgtaagataactctgatgacaaaaggagaaacctggattttacctatcgggttaacacccaagctgtacccattggggctctacttggtgtgcttcctaagtctcagctgacccttttgatgaattagtggcacatagcttcattcaaataaagaatatcctataaacaaaagtagtt

SEQ ID NO: 765408 - DNA, 599 bp, Homo sapiens
ggagattttagtctgactagctctccgagtggtggaattgggatccttattgctttctcatcatttactgccaaccacatcttgattttccatacacctggcacccagttagcagtagaccagagaacctttacaaagaggtgaccttcctgaagccagtgagaacccagataaatgtctcccttctttataaagacagagtcttacaaagctgtctctgcctgcatccagtgtttaatgggatgcagggctgaacaaagcaagggctgcaggaatagttaagtccttgaggcttcaactagttaagctgtcttaagtgggagagatggctcttttttttttttttaagtgaattaacctgccactccagaaatcaaatgcaagatcaaaaaagacgagtcgccattgggtgctttcgctgttttctcacaaaattaaraatttaattcctttaaaagattggggaagattccttgactctgaggcatctgattaactttagtgctgaaagttcagttgactgctttgttgggacaatgaccctttgcaatctgcactattctttggagaaacagtcacagtccttataagcagaatga

SEQ ID NO: 765409 - DNA, 570 bp, Homo sapiens
taccaaagagatgtctgtgcatacaaagaatgaattaatctgtaacattaaaaaaagaaagataacaaggggaagctacttcctagtcctcaaacttcaaaggagtgccatgaagggttctaggaaacattctacaatcacaaagatttactcttttacatgcatatagtctgcaactgtaaaactgaacatgccctcagggtcttccactakactgtaaattccacacgaggacagatttgtacctgttttgttgtctgtctattcactctctgagattcactgcaagagctcaacaagtatttgctaaatgaataaaagaatgtataaaatgctagtgtgaatagtactgttaaataaattcagttactgcagattaaaaatatcccaacaaacgccagctctatcttctggccagagtagacttaaaagaaattatccttttgcttctaaagcaggtcttgcctcgggactgggcagtttatccgcagagcaccaaggaagaatgtgtgcccactgccaactacaaagaatcatggatcataaaccctcagaagtggaggtatcacg

SEQ ID NO: 765410 - DNA, 627 bp, Homo sapiens
gaagagggagctggagagggcagggaaagccttaaaacctgttgcaggtctgaggcttgtaaaaggagaagggtaaggaaggatgattgtgtgggtgaatagagtctcaaactgtggtgcagctctggaaatgtcctggtcagcctaatagggagctctggcacaaggattgccctcaaaaaagtcccacgttgcatggcagtggtcatgccctagtacccctgccatgctcagtcattggtagagggctgcctgggagaaagtgctgcaccctggatgctggggtggatccagactaraagctgtcagcgttctgcattccttgcagcaggttctttctggaagggaagtctgcgtggcacgctgccacagctggcacaaccccaacagctgtccagccattctgctcttacctataatcaagctcacagaagggaagtagagtgtttttgtgctccacagaactgcctgagctctttttatgattcctttgggtgaaccctcagtaagtcaatctatgccttaggtttcttgtctgaaatatttcctttgcctggaacgcttttccctcagctacactaataactcaatgcctcatctccttgagggctctgctcatgtgttgtc

SEQ ID NO: 765411 - DNA, 612 bp, Homo sapiens
aattactattatcatttattaagcatattttgagtgccaggcacattatgtctactccttattacaattacacaaggtaattattatcatcttcatttcatgaaaagggaaacagaagtttagaaatgttatataatttgcccaaaatcacacactctaaattgctaagctgaggagtgaactgcaggagtgatggattctaaagctcttactctgtctacctatactttctcttacactacatactatacggaagtgtttccttttttttttttttttttggkactacgggagtctcacaatgttacctgggctgatctcaaactcctggcctcaagcagtcctcctgcctcggcctcccaaagcactgggattacaggcatgagccagttcacccaaatgggcaatgttttctaattattttgtgtgcattagtctctgctgaatttgttcataaaatcagatactatataatttaagagttgtattcagtcactagttctggagatacaggagttgaggccaggtgtggtggcttatacctgtaattccagacccttgagaggccaaggtgggaggattgcttgaggttgggagtttgaaaccatcctg

SEQ ID NO: 765412 - DNA, 612 bp, Homo sapiens
aattactattatcatttattaagcatattttgagtgccaggcacattatgtctactccttattacaattacacaaggtaattattatcatcttcatttcatgaaaagggaaacagaagtttagaaatgttatataatttgcccaaaatcacacactctaaattgctaagctgaggagtgaactgcaggagtgatggattctaaagctcttactctgtctacctatactttctcttacactacatactatacggaagtgtttccttttttttttttttttttggtactacgggagtctcacaatgttacctgggctgatctcaaactcctggcctcaagcagtcctcctgcctcggcctcccaaagcactgggattacaggcatgagccagttcacccaaatgggcaatgttttctaattattttgtgtgcattagtctctgctgaatttgttcatraaatcagatactatataatttaagagttgtattcagtcactagttctggagatacaggagttgaggccaggtgtggtggcttatacctgtaattccagacccttgagaggccaaggtgggaggattgcttgaggttgggagtttgaaaccatcctg

SEQ ID NO: 765413 - DNA, 639 bp, Homo sapiens
tacgggagtctcacaatgttacctgggctgatctcaaactcctggcctcaagcagtcctcctgcctcggcctcccaaagcactgggattacaggcatgagccagttcacccaaatgggcaatgttttctaattattttgtgtgcattagtctctgctgaatttgttcataaaatcagatactatataatttaagagttgtattcagtcactagttctggagatacaggagttgaggccaggtgtggtggcttatacctgtaattccagmcccttgagaggccaaggtgggaggattgcttgaggttgggagtttgaaaccatcctgggcaacataccgagactccatttctacaaaaataaaaaaattttaaaattttattgtttaaaaaaaatttattattttattattatgttgggcacacacctgtcattctagctcccaggaggctgagctgggatgatcgcttgaccccaggagttagaggctgcagtgagagcgcaagagtgacagcacaagagtctgtctctaaaatccaaaaacaggaacatagcctctttttgctatttcctctgccatccccagggtgggggccttttccttgtgttaaccagatggcttctggaagtccagccttcat

SEQ ID NO: 765414 - DNA, 433 bp, Homo sapiens
tagctgaaattacagtttggggctcaataatgtaatggttcaaaagattttctgtggaaatctctgcagtcccatctggaaagcaaacactggctggataggtagtagcgttggggtgggatcacatggaaggcatgtagacaaagttatgacccaggatttcagagtgaatatcctctatgtgccaggcacttttacaggtttatatttctagaaccaacctawgatgctggaatgataatttgaggtaatccctgttttatggcttaaaaaaatgtggtttggctgggtgtggtggctcatgcctgtaatcccagcattatgggaggtcaaggcaggaggatcgcttgagtccaggagtacaagagtagcctgggcaacatggcaaaaccccatctctacaaaaaatataaaaaattagccaggcatggtg

SEQ ID NO: 765415 - DNA, 433 bp, Homo sapiens
tagctgaaattacagtttggggctcaataatgtaatggttcaaaagattttctgtggaaatctctgcagtcccatctggaaagcaaacactggctggataggtagtagcgttggggtgggatcacatggaaggcatgtagacaaagttatgacccaggatttcagagtgaatatcctctatgtgccaggcacttttacaggtttatatttctagaaccaacctaagatgctggaatgataatttgaggtaatccctgttttatggcttaraaaaatgtggtttggctgggtgtggtggctcatgcctgtaatcccagcattatgggaggtcaaggcaggaggatcgcttgagtccaggagtacaagagtagcctgggcaacatggcaaaaccccatctctacaaaaaatataaaaaattagccaggcatggtg

SEQ ID NO: 765416 - DNA, 588 bp, Homo sapiens
attctttgtatcaagctgaattttatctccaggtaacttccacctgttggtctgagtcctcccctttaagaatgacgaaataaaggaaaatataatcttggtttacttatactcctcagtgggtgtctcttgtcccagtccctcaracactcctggcttggcatctttccagccgttttccatcctgtgggcttcctttggcatggcctccagcttgtccgtgtctgacttaagggcttcatccgggcctgcaggtggggtattgggagtgcatcataccaccctgttgttcattcatatcccccaagtctttcaaagtaaactattgttgaactctagtgggaagaaagtactgcacaggtggaaccaaggattgctgatgattatgaaaaataatagtgatgtctgtggacactctgctctccatttttctgtgcactccctgtgccacacccaagacagttcttaaaagagtgaccacttattgagttctgactgtgtataagatactgtcctagacactttacatacaccacccatttaactttctaaacaaccatattcttagatatgatttagctcttgaga

SEQ ID NO: 765417 - DNA, 588 bp, Homo sapiens
attctttgtatcaagctgaattttatctccaggtaacttccacctgttggtctgagtcctcccctttaagaatgacgaaataaaggaaaatataatcttggtttacttatactcctcagtgggtgtctcttgtcccagtccctcaaacactcctggcttggcatctttccagccgttttccatcctgtgggctycctttggcatggcctccagcttgtccgtgtctgacttaagggcttcatccgggcctgcaggtggggtattgggagtgcatcataccaccctgttgttcattcatatcccccaagtctttcaaagtaaactattgttgaactctagtgggaagaaagtactgcacaggtggaaccaaggattgctgatgattatgaaaaataatagtgatgtctgtggacactctgctctccatttttctgtgcactccctgtgccacacccaagacagttcttaaaagagtgaccacttattgagttctgactgtgtataagatactgtcctagacactttacatacaccacccatttaactttctaaacaaccatattcttagatatgatttagctcttgaga

SEQ ID NO: 765418 - DNA, 633 bp, Homo sapiens
gccaccatgaaagtgcactgctcagatctcctgctgtgggagcatgactgactgacagccccagctgttgcctctgtgcacacaccaccatgtttgcacagagctgggctttccataccaatgacagagcatggcaggtatatgaaagctggtcagttcttttggggtgcagtggtgcatgcctatagtcctagctacagaggaggctaaggctgatcacctgaggccaggagttcaaggctgtagtatactatgatcactcctgtgaatagccactccactccagcccgggcaatgtagtgagatccctgattytaaaaggaaaaaaaaaaaactatacaaaattagctgggcatggtggcacatgcttgtaatcccagctacttgtgagactgaggcaggagaattgcttgaacctgggaggcagaggttgcagtgggccgagattgcatcattgcactccagcctgggcaataagggtgaaactccatctcaaaaaaacaaaaaacaaaaaacaaaacaaaacaaacaaacaaaaacaaaacaaaacaaaaaaagaaaagagaatgctggctaattcccgtgagccgtggccactttggctcaaggactctgattggcctaaccaaggct

SEQ ID NO: 765419 - DNA, 669 bp, Homo sapiens
actactatgtgtcaggcactgtattagacactatggttctagtaaggaacaaaaaagacaaggttctttaatatagaaacagatataatttttaaatattgatttaacgaatcagaaccagaaaatgtcacagtcaggagtgacacagtaattgattaattcattcaacctgctcatactacatatgggaacacaaaccaacagaaatgaagtatcgcrttcaatttgaaggtaagaattaaattagcattcccaaattatgttttctggaatcttgtacttctgtgcaatgatagtaactgttctatgtacatatccttctaaaaagagagagaaggaaaatgagggtccatagtgaaaaaattggagaaacactggttaaacatagttaaataatatttttaacagcaagagctcttaagcctttcatagttaataaatgcagtgagtctccaactcccaaaaaaatcatcagaccaaggcacttcttttttaatggaatatacatttggaaaagtccggatcagatgttctctatgctctctttcatttctcaaattctatagatttatctgacagcatcaatctcagaagacttttcttcttgggtagatgacttaatataccagattctctagaaaaggcattcattcacatatattcacattc

SEQ ID NO: 765420 - DNA, 501 bp, Homo sapiens
acattgttctagcacaataaacttctgggcttttctcagacctacagcaaagtagaatttagaaaaagtgctggacccgttaaaggctctgccataataaatcctttcacctccctgagcccaggttcaataagacatacaaataagatatgtttggacacacagyggggaacatcacacactggggccaattggagggtgaagggtgggaggagggagaggatcaggaaaaataactaatgggtgctaggcttaatacctgggtgatgaaataatatgtacaacaaacatgcatggcacaagtttacctatataacaaacctgcacatgtacccctgaacttaaagttaaaaaaaacaagatgtgttatgagtgtaccctcagccctgacatgccaggatctccctaattttataggtggagcccctgaaaggacacagaagttacctccaagtgtaataaaacacatactactgaaacgcacatgtctctttactatca

SEQ ID NO: 765421 - DNA, 581 bp, Homo sapiens
aaattgtggatctatgaggacatgtgaaggtactgggctataatgtggtcaatgtgtctgaaaaaataacagttctgggccaaccaagtgtggctcaagggatcactactaagaatggttcctctttgggtagagcagagggaagagacactaaagggaactgyaatcaccagcaaaggaacacagtgaccatcaatgtctgaggactggcacaatgaaggataagaaagaacctctctgtacgaggcctactccctttcagttccctttcttccccattgtgtcccagtggaggacctgataatacacctgacccatatctaagacatgcagttggcagggctgatagtaggtaaggttcacagtatgttaaaaagtcacacgaggccgggtgcagtggctcaatgcctgtaatctcagcactttgggaggctgagggtaggagaatcacttgaggacaggagtttgaaaccagtttgggcaacatggtgaaacaccatctctaccaaaaatacaaaattacatgggcatgggtggtgcacacctgtaatcccagctactcggcaggctgaggcataagg

SEQ ID NO: 765422 - DNA, 581 bp, Homo sapiens
aaattgtggatctatgaggacatgtgaaggtactgggctataatgtggtcaatgtgtctgaaaaaataacagttctgggccaaccaagtgtggctcaagggatcactactaagaatggttcctctttgggtagagcagagggaagagacactaaagggaactgtaatcaccagcaaaggaacacagtgaccatcaatgtctgaggactggcacaatgaaggataagaaagaacctctctgtacraggcctactccctttcagttccctttcttccccattgtgtcccagtggaggacctgataatacacctgacccatatctaagacatgcagttggcagggctgatagtaggtaaggttcacagtatgttaaaaagtcacacgaggccgggtgcagtggctcaatgcctgtaatctcagcactttgggaggctgagggtaggagaatcacttgaggacaggagtttgaaaccagtttgggcaacatggtgaaacaccatctctaccaaaaatacaaaattacatgggcatgggtggtgcacacctgtaatcccagctactcggcaggctgaggcataagg

SEQ ID NO: 765423 - DNA, 649 bp, Homo sapiens
attatactaaactggctttcttaatttagattaataataactcttaaaatcaatggctatgtgtattagtttgctgtggttgctataacaccataccacaaactgagtggttgggttgaggttacagacatttattatctcacagttctagggactagaaatctgaaatcaaaatgtcagcagggttgctttcttatgtgggctacgaggaaaagatctgttccaggtttctctctttggcttgcagatgactgtcttctgttatctgtttacatcagatgactgtcttctgttatctgtttacatcatcttccctctgtgaatttcctctgtgtccaaatgttctctttttatcaggatgctggtcatattggtttagggcacagactactcatctaatgttaacttgaccacctctataaagactttgtctccaaataagatcatattctgatgtactgggagttaggactcttaatatyttgtgagctgggagagaaagtgggtgggacacaatacatccatgacatcgtaggtactctaaatctgttcttttataaaattattttggaaagtatagttccatttacttattcatatgaatttgagaatcaacttgtctatttttatgaagaatcctattgtgact

SEQ ID NO: 765424 - DNA, 625 bp, Homo sapiens
tactcacttccaacatgaatgagggtgaatatgccactaaaccctatactggttatcttttttatattgtgtttgcaaaaaaaaatttttttagatagattctcgccatgtcacccaggctggagtgcagtggcattatcttgactcactgcaacctctgcttcccaggttcaataaattcttgtgccacagtctcccaagaagctgggattataggcaggcaccaccatgcctggctaacttttgtatttttggtagagaaggggtttcatcatgttgkccaggctggtcttgaactcctggcctcaggttccaagacattcttaactcggggaccaaaagtagtggaaaactgtgtctacactattatctaagttttgaatgagaaaatatccaaccagaattttccacaatgtcatggaataatacagcagagcataaatagaagtattgagtgccttagatatatgtgctgagacagtctgacagtgtgccttcattatctgactggacatgcaaagcagtcatatatactttttctgtgcagttgaaagcaaagcagtcttgattgataggtgtgtgacctgaggttgtcttttgatcatgtcaactggattattaataa

SEQ ID NO: 765425 - DNA, 617 bp, Homo sapiens
ttgtgttaacagctgtctgtacaagaactagcatatggatcctctatgtagtaacacagtcttttatgttacattgtccacaatgctatgaagtaagaatcattttttgtatactaatttataaattttccttattttttttttgagacagtctcactgtgtcactcaggctggagtacaatggtgcaatcttggctactgcaaccttcacctcccgggttcaagcgattctcctgcctcagccttcaragtagctgggattacaggcgcctgccaccatgcccagctagtttttgtatttttagtagagttggggtttcgccatgttggccagggtcgtctcgaactcctgacctcaggtgatccacccgcctcggcctcccaaagtgctgggattataggcatgagccactgtgccctgacaaattttccttaattaattcttcctcaagatcaattccattgcaaggtaaaactggttttctgacattacgtagaggactggtcttgtgacctgctatgcccaccaaaaatgccattgtgcctaatttaagactagactttaagaagcttggcaggttcctttcaccctcccatataattgccacttcaataga

SEQ ID NO: 765426 - DNA, 558 bp, Homo sapiens
aaactaagcttcataagtaaaggagaaataaaatattttccagagaagcaagtgctaagggaatttgttaccaatagactagccttacaagagatccttacaagaaattcttaagggagttttaaatattgaaatgaatgttttctgcttccagaaaaacacatttaagtacatacccacagaccctgtatagcaaccatgcaatataaactacaaagaaaccaaccaacagcttcacaatggtgaatagtaatattcaatattaacctcgaatgtcagtggtctaaaccattgacatccagatacaggaaatccagagaacactttgaaatactatacaaaatgagcatcaccaaggcatgtagtcaacagactgtccaargtcaaccagaaagaacaaaatttttaaaaacagctagaaaaaaaaaaaaaagaaagatcagatcacatacaaagagaatgccgtcaggctaccacagacttttcaacagaaaccttaacaggcaaagagctgtaagttggattaaaaaacaaaactcattcatctctggtcttcaa

SEQ ID NO: 765427 - DNA, 558 bp, Homo sapiens
aaactaagcttcataagtaaaggagaaataaaatattttccagagaagcaagtgctaagggaatttgttaccaatagactagccttacaagagatccttacaagaaattcttaagggagttttaaatattgaaatgaatgttttctgcttccagaaaaacacatttaagtacatacccacagaccctgtatagcaaccatgcaatataaactacaaagaaaccaaccaacagcttcacaatggtgaatagtaatattcaatattaacctcgaatgtcagtggtctaaaccattgacatccagatacaggaaatccagagaacactttgaaatactatacaaaatgagcatcaccaaggcatgtagtcaacagactgtccaaagtcaaccagaaagaacaaaattyttaaaaacagctagaaaaaaaaaaaaaagaaagatcagatcacatacaaagagaatgccgtcaggctaccacagacttttcaacagaaaccttaacaggcaaagagctgtaagttggattaaaaaacaaaactcattcatctctggtcttcaa

SEQ ID NO: 765428 - DNA, 559 bp, Homo sapiens
cataactatagctaccagttatctgggtgtgtcacaagacatccttttctctcccttgttgggtgaggactcagttccacagtttccccttagcatttggcttatgacaagcagtccatacaacccccactccgagatacatctttgtcccagactcaattccaagcttagggtcaaagccctaggaaagaaaactggaggccgggcgcrgtggctcacgcctgtaatcccagcactttgggaggccgaggcgggcggatcacgagatcaggagatcgagaccatcccggctaaaacggtgaaaccccgtctctactgaaaatacaaaaaattagccgggcgtagtggcgggcgcctgtagtcccagctacttgggaggctgaggcaggagaatggcgtgaacccgggaggcggagcttgcagtgagccgagatcccgccactgcactccagcctgggcgacagagcgagactccgtctcaaaaaaaaaaaaaaaaaaaaaaaaaaaaggaacctggatctgagggatccagaggcagatgataatggaagttaaaagg

SEQ ID NO: 765429 - DNA, 488 bp, Homo sapiens
tttcttaaaaaaaaaaactttctttaaaaggggtttaaaggtttggttttaattcaaagtttacaatggaataaaaggttaaatttttgtctctgggatgataatggcccagcttcttcaattttaaaactgaactgcacatgtgtgttcaagtaaagcaaagtcttaatttcagggggatccctgagcttgccacatttataccttctctttttcacaacacatgaaggaaraaactggtaagtttgataaaattttgcaccttactatatattaattaaactttccattttgaaataaataaaaaacaatcctttctgaaataaggatgaaacaaatggcaacaagaacaaccacaaaactaagctgtggatggtatttaccgttaaattcaaaaccccttttgcattcacagaaaagtcttatcaaatgataaagctctttagaggactctgctggggtgttgttactatgattttatctaaaca

SEQ ID NO: 765430 - DNA, 488 bp, Homo sapiens
tttcttaaaaaaaaaaactttctttaaaaggggtttaaaggtttggttttaattcaaagtttacaatggaataaaaggttaaatttttgtctctgggatgataatggcccagcttcttcaattttaaaactgaactgcacatgtgtgttcaagtaaagcaaagtcttaatttcagggggatccctgagcttgccacatttataccttctctttttcacaacacatgaaggaaaaractggtaagtttgataaaattttgcaccttactatatattaattaaactttccattttgaaataaataaaaaacaatcctttctgaaataaggatgaaacaaatggcaacaagaacaaccacaaaactaagctgtggatggtatttaccgttaaattcaaaaccccttttgcattcacagaaaagtcttatcaaatgataaagctctttagaggactctgctggggtgttgttactatgattttatctaaaca

SEQ ID NO: 765431 - DNA, 627 bp, Homo sapiens
cagggaacaagttcagctctgacactgcagctgagcagttgctcttaatatatgacctcaatgacagggaatgatggagaggcccctgcctgaaggctgtttgtaatgccaagagcagtaaatgaagagaaaggcctggtcataaggaaaggggcacaagtgcattgtgggagctgggaagagagccgggggtttcaatcattgcatactcacagaatatacccagagcaaggcctgttctccatctctcagactggtatagattttctyactggcgttaggaaaaatcttgcttgtccattccttgattggaagacagcaactgtactttttcaggatccctcccccaaggaatgagaaccatcctccacatagcctcttgctgagattccctgtgctcttccagctcactggggttgccacagtgctgccactcaatttttgcctctcccctaaactgggactttccctcgggctgctggtggcttttcactccccaatcagcactcagcagcaaacagttagcacaatgcatatcctcatatttgcagctggagccctccttaagaaattatctgactcatttgggtcaaataatagtttccaaggagatttagaagagaggaa

SEQ ID NO: 765432 - DNA, 532 bp, Homo sapiens
ttgcatgagaactaagggcgtttcccatcttcccattaaccttctttttttaaaagagaatgtgaaaccaattcaatactttctagaatgcagtcagataagagtgtgtatctacagaaatgattaatcagggtacttaaataaaacttactttgcggacagttcgtgaggccagaatttctccagatactgggaggtggctggtggtcagtcaaagattttgtgtgcgagacagcatgttcttttctttacctctcttcagctcagaggcgtctgtactactgaaataggacctcagaaaaagacatgacctaagatgaaggggtatgtacttyttctcttttccaagtgggtattctgtaaggagaaaagacagagctcaaaggagtgtactgtacatgtctcctctgccctctgctgccccatggtttcatctcagctctctttaaaattggacatctgttcccttgaaacctgagttctgatatttctaccttctcccatcaggtactgctgctcagaaagactattt

SEQ ID NO: 765433 - DNA, 502 bp, Homo sapiens
tatatacatctatcctattagttctctccctttagggaaccctaatacactcagtatattactttgaattacatgacatgaggcagtcttgtctcttgtaactggtttctatttgtaaactaaagccaacagagactgtttttatatataggagtccattaagaaagcatcattggagatgtgcttttggataagtctgagtgattaaagtggatttattgctatgcccttgacattttactcccaaagattctaccattctacctggtttctgtaccagtatttctgaagttttatccttggcacctccattctattccygatctccttttcttcctgaactcctactttgcccatgctgcctgtatcctactcccttagtcacctacctccaagtatccaatcacaacccgtcgtcttgtttttcactctgccaaatgaaaggaaatcttcttttcaggcagacaaaggattacttgaagggatatgccaaacaatttat

SEQ ID NO: 765434 - DNA, 532 bp, Homo sapiens
ttacttttatggtgtgtggcagtaaggactttaaaaaaatgtaacaagacagtttcactagcaacaaatagatatgcaactcaatgtaaaagctgctctgcatacccattaaaatgagcaaataacataaaacccactcttagtatggctttcaggagacatgcctgctggtggcactttaacatgattcaattttctgaagtacaagttggtaaatgtaacaaaagctataaaactgyagctgggaaaatagccaagaaataaaagaacctcgtaattatttttacaagatatctatatcttcttgctgctattgtaatttgagaaaaaaagatatatcagtactacagtatttgtaatagtgagaaatgactcaacgtcaaagattaaagaaatagctaaacaaactacaatatattaatcatggtagaccttctggctataaaaaatgtaaaaaaggaaaattattttaatatatgggatatgctgttaaataaaatagaagctaaaataaaatatgcatgctgattag

SEQ ID NO: 765435 - DNA, 644 bp, Homo sapiens
gaaaacaggctcagaaaggctaattaacactcccaaagtccacagctggcaagtaaatggtgccaggattgaagtcaattctttcttctctcacaggtgcccaaatgtgatgttacacatttttaaaaataaaaagtagatgagaagaaaccgrgtggtgagtagttgaagtcagtgatggggcctgttatgctttaaatcaagtatcgttggcatgccctggagagttagttgctcttaaagtttctgcaggactttatcactcaaagcctgtgtggggggaaacaaaaaagtcaaagctccatctctctggggtccctgcttttctacattcgctttgctgctacccaccagatgacagacgggtctgcctctcttttccagccccagccttgttccacagcatcccttcagtcagtcaggtccagagaaacccacctgtcactctggtgcaagggaactggctgtggcttgcagtgcgtgtgtgcatgatacagcatacgtgtgtgtggagcagccacgcagcgcagcacaagggaggcagctcagctgttgatgcccagaggagggccctctcccaaggttcctcatcagctcttcagctctccacacagctcagcatggatttcctcagaccatcccaa

SEQ ID NO: 765436 - DNA, 629 bp, Homo sapiens
aaagtcatttgaatggatcatcacattccctgacaatgccaaacaaaggagaatcactcctgagggtgaaatggttaaaggagaaaactggtttggaactcaaatgtcacttcaatgaatgatcacattatctgacaatgccaaaccgacaggcaggggagcctggcaggaggatgagagctacctggtgactcacctggctggaattaacatgtcataaaaaggcaactgccctctccttgcggtgggtaatcaaggcacccatttagaggcttgctggtcaaaatgaaccaactccagtgttccatgcttggagctcaacactaagtcagactgctctggccctggagccaaagccagtgaccgacccctgcccattacccatgtgactaggtgcctgccccgctcactttcggtaccgggtctctttcctgctctgttcccccaagcctgaatctsagccttggggccctgccctcaagcctcccccaggtggggcctggccagcctctgggagctaatcccgcccacacgggtgggggcagacccacctggggagggactcaccggaacccccgggaaagggccccagagcagaaaaagcccagcgtctttaaacatatcagccc

SEQ ID NO: 765437 - DNA, 600 bp, Homo sapiens
attgaccaagaaattgaccttttactgtaggtaaaaggacttacctgtgaggatgttgtattggagaattaaagtctcagcttcaggtgagacttcagggtggctgtgacgggagataaagttagagacataaactagagctactttccaaagggccttgctgcaatataatttagtggttaggagtggaggtttagagatcagacagaattgggttcaaatctcagctttggtacttaccagccatgtgataataactgatttttttaaaatcccatctgagctttagtttccttaacacaacgactacctgttatcagttgtctattgctgcataacaaattatcccaaaatgtaatagcttaaagcaacacacagcttcttcagcttctgaagctgaagctgtaattmtcagttttggttggtctggaatcccaccaaaactataattataatctaaccaaaactataattctcagttttggtgggtctggaatctgcacctggcttagctgggtcctctgcttcagggtctcttgcaaggctgcaatcaaatgtcagccagcgctgagataccatctcaagacccaactggggaag

SEQ ID NO: 765438 - DNA, 613 bp, Homo sapiens
agttattttcctagtcaattgttttcttcctcaaatttgtctcacaactgtgagctcaaaggtcataaattatatagttcataatgtttgtcatactcttcctctgcaaatttaaatacgaattcacacgtgtatattttgaaatcatacttttctatcttctggaagacaagacagtagttaataagtatttatgatgtttagggccagtgataggcattttatttatttatttttttgagatggagtctcgttctgtcatccaggctggagtgcagtggcatgacctcggttcactgcaacctctgcctcctgggttcaagcttttcttctgccttagcctccmgagtagctgggattacaggcacacaccatcacacctgactattttttttgtatttatagtggggtttcaccatgttggccaggctggtcttgaactcctaacctcaggtgatccgcccaccttgatttcccaaagtgctgggatttcaggcatgaaccaccgtacctggtcagtgctaggcattttaatgtggttttctcacttaattctcctaacaacccagggaggaaggcattgtcatcccattttgtaacccaattttccttt

SEQ ID NO: 765439 - DNA, 598 bp, Homo sapiens
gacacagcaacgataggcaactctttcaagttgtctataaaggaaagcagaaaaataggatactggccaggacagggaagcagaatcaagggacaggttttatttttgttgttgttgctttttatttttttaagatgggagatattttagttgtttatatgccaatggcattgctttagtaaggtggagacaaaattaatgatgccagaaaggaccaggaaaaaactgcaasaatcgagtcctttggtgagtgaaagaaaatgagagccactgctcgagtgaaggggctgccctaagacaggggcaggagtgttcatttaccacaagggaagagaaggcagagcttatgcagacagaaatgcagatgcaggtaagttggtcatgggagaatatgggcgttctcttcttgttgctgccatttttatagtgaaagaagcagcgagctcaccagctgagaatgaggatgaggagaaaggaggtatcagaggtctgagaagggaaggtgtgaaaatcatgagaaggtgactcaggaaatgtggaaggaaagctggatagcactgaggatccacttgaagttaatatctgtgaattttaaatg

SEQ ID NO: 765440 - DNA, 447 bp, Homo sapiens
tgtttgtatttttgttgtatgttgcaaaaatgcttctgagaatctgataatgcagggctcagcaaagccaactgtctctaaaaccctctttggcttcacgaacttttatttacaaagcacctactatggatgtgtgctatgtgtgcgatggagtgtgctagaaattctgatgcaatgccaggagactctggccgtcacccttgcaacctcggcatctaataaaggaccctgaatccaaatacatagtagtcactgaataagtgactgtaaagaaaattaggggatctgatatgtattgagtacstaatataggctagagtctatacaagctcactaatccatacctcaactagaaaagtaggtctgtgatccccagttgacaagtaaggaaacatgttcagagagggaaagtaagctgtccatggtcacacagctaatgagaggcag

SEQ ID NO: 765441 - DNA, 627 bp, Homo sapiens
tcctccagtgcttctcattcactacagctccaatcactgttgaaggctagttctggagtgttcctcggatgaatcttgccccactgctcctgttgcccttatgatccctatttcagtcattggcattctttgagagcatgaaatgtccatatccaagagtcagcacaatgaagagggcttctcatcacactgggtctttgaggtcaaaacttagatttcgtcacacagccacttcacttctgtagacaggtctgcaggctgcttcacagtggcagaggtgcaggcccagagtctgcccttcacaggctgggagtggtrgggtggtggggcttctggtacttgtggaaacatgacccaggaaggctcagaggtagggaaggcagtgtcccaagtgtggtaacagacctggtccctaccagagtggctggtgtgggaccctttccagtgacctgtggttctttgaaaatctatgagtgttacagccaaaccagaggcgttcatcctactatcacagactctgctgttctctcagctctctcagagctacttccccagagagcaagagtgttgtaagagggctgggttctggaaattcattaggccgtagataagatagacaaggccgtc

SEQ ID NO: 765442 - DNA, 627 bp, Homo sapiens
tcctccagtgcttctcattcactacagctccaatcactgttgaaggctagttctggagtgttcctcggatgaatcttgccccactgctcctgttgcccttatgatccctatttcagtcattggcattctttgagagcatgaaatgtccatatccaagagtcagcacaatgaagagggcttctcatcacactgggtctttgaggtcaaaacttagatttcgtcacacagccacttcacttctgtagacaggtctgcaggctgcttcacagtggcagaggtgcaggcccagagtctgcccttcacaggctgggagtggtggggtggtggggcttctggyacttgtggaaacatgacccaggaaggctcagaggtagggaaggcagtgtcccaagtgtggtaacagacctggtccctaccagagtggctggtgtgggaccctttccagtgacctgtggttctttgaaaatctatgagtgttacagccaaaccagaggcgttcatcctactatcacagactctgctgttctctcagctctctcagagctacttccccagagagcaagagtgttgtaagagggctgggttctggaaattcattaggccgtagataagatagacaaggccgtc

SEQ ID NO: 765443 - DNA, 560 bp, Homo sapiens
aactgacttgtccaagcagttcaatagcaataggcagggccagaatttgaacctggcctcatctaacttcaaatcaactttgatgtgcagaactccaatagaaatgaagaaagacttttacatatgaagcttttcatattccatttattttgaatatgattttaggatttagataaccctggggattaagagttttttcggaataagatgtcgattaaatgtagagtactgtgcaattggtgtccaaggacttgtaagagtgctcagttgacagaaggtgaaaaaaaaaaaaagttagtgcttttggctgccaracctggaagcctatggaatggccctgttggaaaggggatgggcagtgctgacatccacatctggagtggaagaagcacaaatcagtgacaggtctgcacaattttctgaatgtgaataccaccaagagtaaaacagacagttcggccatggaggacaaaatgctgtgtgtaactcaaatgaaaagtccatgataattgagccaatttgaatttaaaataaaaagtttggctcagctatgtgggttt

SEQ ID NO: 765444 - DNA, 532 bp, Homo sapiens
ctcacttcacaactggttgggtagctcagagggaaataagtaaaatgtcttgaggctgtggcagtgcttgattggttctgctgtgtatatataaatggtttctacacacggaaacagagttgtgagtcccatgccttttttggcggggggctatctacttgcctggtgattgccctttcccttacaagctgtacatcctctttaccatccctccttctctccttccacagctccccttccacctctgttggtttctgcctccctttgtttcctcagtccttatacccacacyctccccacggaagggcataaagaaaggtgtgaagtttccaaaggaatttctgttccctgaatagcaggtctgatgaatggaatctgaaggggctctgcagggaggagtatgatctgttgtccgagggagatttggggaaaaagaaatatttttaccagccatgaatgtggcagagaggacacatggcaccaataggttggttaaggggcaggggaggaaagactggtgggaagtgagcag

SEQ ID NO: 765445 - DNA, 595 bp, Homo sapiens
gaggctgaggcatgagaatcgcttgaacctgggaggtggaagttgcagtgaatgccactgcactccagcctgggtgacagagtgagactctgtctcaaaaaaaaaaaaaaaagaaactataagaaaataatctaagagatgtcacaaaacactagagagtctagagagtttaattgctaaatgaatggcataggcagctttatttccattttcaaaaggtgatgatcctagaaacattctaagttgaaaaaaatcatgtttacttttccatagaatgtgatgacagagagaatgaatgaatgaatatgtgattagattcctagcacagggctcaagatccatttattacctctaataaatgttgtgggttgaattgtggtccccctcaaaagatagttgaggtcttaactsccagtatctcagaatatgaccttatttggaaatggggtctttacagaggtaatcaagttaaaatgaagtcactagggtgggggataatccaatatgattggcatccttataaaaagggaaaatttagacacatacacaaagggaagacagtgtgaggacacacagggagaagacggccatgtga

SEQ ID NO: 765446 - DNA, 609 bp, Homo sapiens
tagggctagtttgtgtgctgaatacatgtataggaatattttagggctcgttaggctgatatcaattccactctacccctgcctcacagagttacaggttcctgaagtgtgaggaccctcctccctcaatcagaggccctaaaataattactaccatgtgttgaactctagaaattgatgactttgttcattccatacaaaataacctgcacttcccacccagtccctgcttgcttagagtatcatatttggattcaaggaaactgggatacagatgtgtttcaaaggatacacactgcatctgtgagtycccaagttactccgctgaaaataagtttttagggttttttttttttttttttttttttgtaagtcccatcaggtgaaatgaacaatttttcacctgtttttttttttttttttattaaatttatttttttattgataattcttgggtgtttctcacagaggggtatttggcagggtcatgggacaatagtggagggaaggtcagcagataaacaagtgaacaaaggtctctggttttcctaggcagaggaccctgcggccttccgcagtgtttgtgtccctgattacttgagattaggg

SEQ ID NO: 765447 - DNA, 609 bp, Homo sapiens
tagggctagtttgtgtgctgaatacatgtataggaatattttagggctcgttaggctgatatcaattccactctacccctgcctcacagagttacaggttcctgaagtgtgaggaccctcctccctcaatcagaggccctaaaataattactaccatgtgttgaactctagaaattgatgactttgttcattccatacaaaataacctgcacttcccacccagtccctgcttgcttagagtatcatatttggattcaaggaaactgggatacagatgtgtttcaaaggatacacactgcatctgtgagtccccaagttactccgctgawaataagtttttagggttttttttttttttttttttttttgtaagtcccatcaggtgaaatgaacaatttttcacctgtttttttttttttttttattaaatttatttttttattgataattcttgggtgtttctcacagaggggtatttggcagggtcatgggacaatagtggagggaaggtcagcagataaacaagtgaacaaaggtctctggttttcctaggcagaggaccctgcggccttccgcagtgtttgtgtccctgattacttgagattaggg

SEQ ID NO: 765448 - DNA, 609 bp, Homo sapiens
tagggctagtttgtgtgctgaatacatgtataggaatattttagggctcgttaggctgatatcaattccactctacccctgcctcacagagttacaggttcctgaagtgtgaggaccctcctccctcaatcagaggccctaaaataattactaccatgtgttgaactctagaaattgatgactttgttcattccatacaaaataacctgcacttcccacccagtccctgcttgcttagagtatcatatttggattcaaggaaactgggatacagatgtgtttcaaaggatacacactgcatctgtgagtccccaagttactccgctgaaawtaagtttttagggttttttttttttttttttttttttgtaagtcccatcaggtgaaatgaacaatttttcacctgtttttttttttttttttattaaatttatttttttattgataattcttgggtgtttctcacagaggggtatttggcagggtcatgggacaatagtggagggaaggtcagcagataaacaagtgaacaaaggtctctggttttcctaggcagaggaccctgcggccttccgcagtgtttgtgtccctgattacttgagattaggg

SEQ ID NO: 765449 - DNA, 656 bp, Homo sapiens
ctgatgaaataatgaactcacctagacttgaggaccaagtggatcaatgacttgaagctcctgaaggtagagagtttactccaaattaggaattaaaactatgagcataatcaacgataattcaaaaataaattaaaagatggaagtgtaattttattttaaaaatacacgagcatttaattcactttgagatagtgtttccaaactataaacattttcaatcaagcgcaagaataagcacaaactgataaacaagggattaaagataacatgcttcaagaagcagagctagcctaattctaaaaatcattttggggtactgaccacatataagttcctctttcaatctgccaaatcactcaggcaacctaagatatgttatcatttctagggacatttttatagacaagaaaataatcttgtgtttcctcaaggaggcttttattgccaataaatacaamacacacacacacacacacacacatacacacatacatacacacaaacttccacccagtttcatgaaggatattttaaaagcaacagttaacactattgcaaattaacattttagaaactttcacaatttaaaatgagtccaggagcaaaaatcccaaaagaatacttaattaatgctcaaaaataattgtttcttg

SEQ ID NO: 765450 - DNA, 602 bp, Homo sapiens
ggaattagtgtaatggcttgactgatctgctagtccaggacttatttcagaaatgtgtcttcttcaaacagattgtattagtgcaccaggcaggacttctttggttgtaagtgttgggaacttaacttgaactagtatagaaaggatgtctgaaatcagagagctgattgcattctctttctctcctctccacttctctctgctttgatctccctgactggcttcctccaaatggtagcaaatatggcagctcctggtattatcagagagggctcaagactggctggctctaagatgtaagcaggcagacctggggatgagcttaccaactctggatcacctggtagaggagatgctagaaggttcttctggaagatggcagctctcatttgaacccctggtcaaagtagrggatgggcattcctgaaataagagaagtgttggtctagacacatgacccaacagctttctgtgcatggctggcactacgttttccttcatagcctggtgtgttttagtagcataaagtgaagtgctatttggttttagactctcgaaaatcgcagaaacagcatcatttgtgcagtagaatagagtaggaa

SEQ ID NO: 765451 - DNA, 681 bp, Homo sapiens
aaaccaaaaatagagcaatgtatttttattagtaactaattcctagtttatgtgatgaagttaaatgaatcaatacgtcatgatcttttgcaaaagcatcatgctttctgaacattctaccacctgaacagccacaacacaacagtaaagctgtctaagtacagaaggaatttttgttagctccatcccacagctccaagcaggtgatgaagggccacaacgctgggaggaagagtctcccaagacaacgctgctcccttggggcgctgcattagcagagaggtttctctccagcagagcagtacaccccgcctcaccagggtttacttctcatatttagaaagccttggcacctaccttcttggcggaggttctcagatgctctgtgtaaatcagccagatctccgtctgctccatcagtaaaatgaatgaccacctgcagataagagagctgtcaaatcccaggaaaactaaaaaggagtgttgcagactgctgatagaaaactgagagactcgctgtctcaagccyttcattttacacttaaggaaactgagggcccaagttgaggaatgattacccatgttcacaagactttgatattgcacttaaaatggaggagtatatttgagtgcttaatttattttaaaaaagacaagcagcaatgacaataaaaacaattt

SEQ ID NO: 765452 - DNA, 689 bp, Homo sapiens
ttctatcccttgtctgttggagaggagatgctgcctatctggtggtgagagaattcagccttgctggtcatggcctccttctcttttatggcctttactaagaagttattactacttagtagcagttactaaaggtactgatgtgtgtttctgtctctaatattagactgagttatttgagaactgtgttcttgttttatggcacagggcctggctctcagtaatttttgttggaggaaaggaaggcaggtagagaaagagggaggaagcaagagaaggaggtgactccagagacagattaaaggctggtgtttatattcactttgtatatgcacattagctaatttaatgttcaaaagccaccagataaggktactgttattgactcagtttttagagataaagagaattctggtaagagatgtttaataaaactcaacattaaaatggtataaatggactagaacttccattctgtttggctccaaagacttgattcttccactgtgattttccacagaaatggggtacacagtagcacaaactaagcagaaaaaaaaacaaaaacaaaaacagataaagaaacccaggaagggtcaggtagaggtgtgtgccactttacaggagcaagactaggttttagttatctgagacttaaatatgagtccaatggtggatcctaggataag

SEQ ID NO: 765453 - DNA, 544 bp, Homo sapiens
tatccagattcatatgccatcaattttgtcaacaaaacaagttgaaaagagaaaggacagcctcatagtgatttagagtgagcaggattctcttttttgacttcaaaagaatggttcttacctgcatcagccgggtaggatttaagtgtaatctaacaccatttatttgcttcccaaatacytattataagaagctaaatacagttgttcaagtcaggtaattattacagtcactatcagaaattaagtaaaacaaacaaaaaatgcttaatggaattactgtaaccttatttgcaaacgtaagccaatttaagtgatcagggaatatcttcacataatatcacagaaacccaattgaattaatttaaaatgctgagttactaccagcattgactagacttgtaatcagcactgaaacttttctaacaactaattaaaaaagggagtatacaaagttatgtttctaattcatttaataccacagtctctaaaggcatcttcaattagctacattttctttagttttactcaatttatcaaagtt

SEQ ID NO: 765454 - DNA, 620 bp, Homo sapiens
tgtgagagaaagcggtggagagggatcaaaggatcaaaggggttgactgtatggtgccttagaggccaccgtaaaaatgtaggtttttattctgaaaacaaacaaacaacaacaacaacaacaacaaaaaaactaacaacattgggggttactggaagagttttaggagacacataatgagactttcattttaaaacagtcactttggatgtagtggatacgaatggactaaatgagaagtgacagaagaaacaaagatgctaggaggaagctgttgccaaaacytagaagaggtaagaagggttttgcacagggtagtagcaatgcaggtggtgagaactggtggcatatattttggaagtggagccagtaagattttctgatggactggaaaggggatgtgaaagaggcgactcaacggtggctatttttttccccaaagcaactaaaaggttgaaattaatataaacgtagatggggaagactgtaggaagaacagcttttttaagggcttatcaggaacaaagattaaggtgttaagcaggatacaagagtttaaggaagagagatgggctggagatgtagatatgaagattgatagttaatagcaggtatttaaa

SEQ ID NO: 765455 - DNA, 633 bp, Homo sapiens
aagaatacacaaaatgtttcttgttctgttttctagtaagacactttgtttttataacaaaaaatccatacacttaaattgaaacttaatcctttgatcttgaaagccatgaagtttgatacatattaagtttatggcttcaaaacatgccatcatttttacattctaatgcaaagtatccccataagaaggaagacagtgaatgctttcttgttaaactacattttatttgagaaacctaatttcatagtagatccttttcaaattgattttgctattgayactttggttgctcttcagatctcatttacgaggaaaacataaattattttattagcttcaggtaaataccataacttcttcagagtagttcaatccagatgcatctaaaattttctttcaataaaaaaagtcttcaagtgaaagatgtcagcagcattcagaaaatgcaagatcacaagaaagaatacaacacaaaccaacccgtcaataaggcatacaatgaaaatcacttaatagttcactgtgtcctctttaaaaagtcactaataaactagaagtcagctcttattaagatagcagaacattagatctgtaagaaatttaaatattttctagtccaggggattttaa

SEQ ID NO: 765456 - DNA, 551 bp, Homo sapiens
gatttttagtgacttatacaagctctgtatacatcctacacaataatcagtcatccattaaataggctacaaagagttttctcagcacattactcatcttttaactttatcatgctttttattgtgcaaagatgatttttaatttttatggggttttatttgtcgatcatttcttttatggcttctggtacttatgtcttgtttaagaaggcctttttcacctccaatcttataaaaatgtgctccaatataatcaccaaatacttttaaatttcttttatgttcagctgcttaactcacctgaagtttatttttgtgggtgatataaagtaatrgtctactttcccttttttatctacccgtaactaattttcctaacactattaattgcataggttatacttacctccatggatttgaaatatcacctttattataacctaaatttctactgatgatgcatggatctctcttggtctctctattgcattgatttccactccagtttaccacactattttgatcacatctctagcatacattttaatgta

SEQ ID NO: 765457 - DNA, 551 bp, Homo sapiens
gatttttagtgacttatacaagctctgtatacatcctacacaataatcagtcatccattaaataggctacaaagagttttctcagcacattactcatcttttaactttatcatgctttttattgtgcaaagatgatttttaatttttatggggttttatttgtcgatcatttcttttatggcttctggtacttatgtcttgtttaagaaggcctttttcacctccaatcttataaaaatgtgctccaatataatcaccaaatacttttaaatttcttttatgttcagctgcttaactcacctgaagtttatttttgtgggtgatataaagtaatagtctactttcccttttttatctacccrtaactaattttcctaacactattaattgcataggttatacttacctccatggatttgaaatatcacctttattataacctaaatttctactgatgatgcatggatctctcttggtctctctattgcattgatttccactccagtttaccacactattttgatcacatctctagcatacattttaatgta

SEQ ID NO: 765458 - DNA, 643 bp, Homo sapiens
ctcagtaaacctctctcctctttctcccctctctctcctctctctcttctctctcctctcctatgcggtctaggcttatgttggtttcaggcctcygacgccagctccttgaaggcagaaggcattccccatgggatccagccttgccttatcaagctgctgtaccacaagttctacctgaggtttagagccaaaaccaccagaggttaaaaaatgttctaccttatttaattcctctttccttatatccttgtacaacaattcagaaacaagaagcaaatacagggaggacccaggtatttatgagtcaagtgaccctctatcaacaaattctctcagctgccatcttcaacaatcatgctgaaatcattgaaaaggagagaaaaaaaaacctgcatttaaaaacaacctgattttattcattattactggtaataagaaatatgacataagtctctgtagctattcattgtattgtatttttatccaatttaaacttcccaatcatgcttaatcaagtcccctcactctaccagacactttgcttaaatctgaatatattcttttctgaattgcaaattaataaaaatttagattagttattcctaatactctattccaaagaaaaatctgcaatgagaat

SEQ ID NO: 765459 - DNA, 594 bp, Homo sapiens
tggaattaaaaatttctgctattcaagatcgctaagagcatgaaaagacaagctacagacagaatttaatgttcagcttctttcagcaatttgtgtgtgattttcatccatgttgttgcataaagctgtagttcactcatttttattggtaaataatggcctattgtgtgacaagaccacaattcatttctccattctattgataggcttttggttgtttacagttttgggtgctaagaacgttattttacatgtctttttgtacataagagaacactttttttgctgttggatatgttaaccaggattgaaattgctgggccatacatagcgatgcgtttgtaaaccagctcactgaayaagaaagccttgattagcatttgctaacatctgtgatgttaatactcctaccatggccaatttccagctaccaataatgtaatgacccactcacagaagcccttttaacaatcgctctcatgagctgctcggaactggctccaacaatgctgactcaacccaccatacaacccacactttacctgttcttgactttagcagacgatgtcaaactgtttgtccaaatgattggat

SEQ ID NO: 765460 - DNA, 529 bp, Homo sapiens
aaggatttcattctcttcagcattagatggaatggataacatattaatcttagcatgttctgaatagtctcaacacagtgttgcattaaagaagtattaggctaatatccaaaaaaatccctagaaaagccatttagctttcactgatgtctttcaacaaggctcctgatggaaatgcctttatatgtagcaaaattgtctaaaatcctctttctccattctctcccagcaccttgcatatcacactgtggcagctacccctaatatcttctcttctctgtctcaaaattctttaaagtctcaactcgtgctagctcctatctttctctttccctcaggctctattccactcctccccacccccagacccattctttcattctttgcctyttttcctatgaatatagtctctcctctttcaactttcctgatgaacacaatccaggaagcaagtgactcttcctctcttgaatctggggaaaaagtactcttgcatcaatattttcaatcttcatcacagtggaaaggg

SEQ ID NO: 765461 - DNA, 605 bp, Homo sapiens
tctgtctttcaccacatacaaaaatcaactctaaatggagtaaaaacttaaatgcaagacaaaaaaatgtaagacaaaaaaatgtaaaactaaacaactgaaagaaaacatataggacattggtttgggaaaatattttatgagtaagacttcaaaactacaggtaacaaaggcaaaaatagacaatatattaaactaaaaagcttctgcaaagctaaggtgacaatcaagagaatgaagagaggtagcctatagaataggagaaaatatctgaaactattcatccaacaagggattaatatctagaatacacaataatctcaaataattcaacaacaaaaaacaaatattccaatttaaaaatgggcaagaaatacagatagatatttttcaaaaggagacatgcaaatggccaagcagcatatttggcaatgctcaacatcaytaatcatcagagaaatgcaaataaaaccaacattgcagtatcttctcattccagtcagaatggctattctcaaaaagacaaaaaataacaaattttggtgaggatacagagaaaagaaaactcttttacatagtgaaaatgcaaattggcagagcaatta

SEQ ID NO: 765462 - DNA, 639 bp, Homo sapiens
aagtaatagcagagtctgacataaatcagtttaaattacagttttgccagtcactgtttttgacactacggataaattattcaataactctgaggctcattttccgcatctgtgaattagggataaaaacgcttatcttatattgttcctgtgagtatctaatgagggcatatctgtaagtgcatgttacctaggcttgcacagtattttctaaaaatgaactatatatataatcatagtttccagatcgttaaccttcattttaatggtgcagaatatttttgttcwgttggtctacaatttatacacatatatttaaagctacacaaaaatatattaactaataaaaaaatggactataaaatctgaaaaaggaagacttaagaacggtgatgggttaataaatagctcaatgcagacttgttaagggatgactagctgaataggtgtgtcaacaatacaatcacacaatcgtcttcaaataatttttaaataaacatattactggcatttactaatacaaagaagggtttctatctataagataatttaataggatctttctgcacagattaagttgattaccataaataaactagaactgatgtattcaaggggcatggctgtttgaagaacaga

SEQ ID NO: 765463 - DNA, 558 bp, Homo sapiens
gatcacaatggcctgattgtaaaataagcctatgttcagctttgaaataaactgtcaaaccatttccaaaagtgaatgtagcagtttacatccccaccagcaacaaacggagcactagttgttctgaatctacagcagttgatattgtttaatttatttatttttactttagctattctaataggtgtgatgttataccttacagattgaatttgcatttcaaatagcaaataatgttgatcatcttttcatctgtgtatcctcttacctgaggtgtytatttagatcttttgcctattttgtaattgtgtcatttgtttagttttaggtgttctttgtgtattttttattgtttagttttaggtgttctttgtgtattttagatacaagtcattttgaaaaaaaaaatgactgtgtctggttgaggagattaactcctggttcaaaacctatatgtgattttttagacctgaccacaggcaactacaaaggctttacctggcaggactcatgggaataaactgcactcccacagaccagactgggtacacagacagt

SEQ ID NO: 765464 - DNA, 624 bp, Homo sapiens
tcattagaggtaggttggagttaatcatattttcaaaatggcaaaattaagtcaaacctggcttataaaatccagattgtatgtccactggatttacagaattatcagatggataatagattgatcttaattctgccctttaaattaaatgccagagtattataaacctgggagaatgacatttgggaaccagagttgtatcctctgatcgtctttcwtaataaaagtcttcaaaattgtaaggaataatcctagcactttgggaggccaaggcaggtggatggcttcagcttaggagttcgagaccagttggacaacatgcaaaaatgcatgtttttacaaaattgcaaaaattagccggccatggtggcatgtgcctgtagtcccagctactccgggggctgagggacgagtattgcttgaatcttggaggttgaggctgcagttatccataattgactgagccactgcactctagcctgggtgacagagcaataatttgcctcaaaaaaaaaaaaatgcaacaaaaagagtgccaaagataagatgttatctcatggaaatagcatggaataggatgatctacatgagttgattcactagttgtatttattaaaaataact

SEQ ID NO: 765465 - DNA, 624 bp, Homo sapiens
tcattagaggtaggttggagttaatcatattttcaaaatggcaaaattaagtcaaacctggcttataaaatccagattgtatgtccactggatttacagaattatcagatggataatagattgatcttaattctgccctttaaattaaatgccagagtattataaacctgggagaatgacatttgggaaccagagttgtatcctctgatcgtctttcataataaaagtcttcaaaattgtaaggaataatcctagcactttgggaggccaaggcaggtggatggcttcagcttaggagttcgagaccrgttggacaacatgcaaaaatgcatgtttttacaaaattgcaaaaattagccggccatggtggcatgtgcctgtagtcccagctactccgggggctgagggacgagtattgcttgaatcttggaggttgaggctgcagttatccataattgactgagccactgcactctagcctgggtgacagagcaataatttgcctcaaaaaaaaaaaaatgcaacaaaaagagtgccaaagataagatgttatctcatggaaatagcatggaataggatgatctacatgagttgattcactagttgtatttattaaaaataact

SEQ ID NO: 765466 - DNA, 507 bp, Homo sapiens
gtaatttaacccaaaaaacactgtctttactccataacctaatccaattattgcctcacttcctcctctttagggcaaatatctttaaaaatgtctgttgcccaagtctttggtttctcatgtatcattctcttctcaattcactccaacaggtatccattcaattatcatcaagatcctcaactagtattcacttctcagtccatgatgctctatgcctctcagcaacacttgaccacttcatcagacattttcttcttagtttccaggatataatagccttcttgcatttctttttatctttgctttttctcaatagtttttttstatttcctcctcttctttccaacctttaaatgtttgtgtttccaggcatccagtcctctgttctcttccattctccctcgacatttaatccctagatcagtgtttgtttttcaaactgatgcctaatacaaaactttatgaaattaattttgtaggctatgactattacataaatatggc

SEQ ID NO: 765467 - DNA, 567 bp, Homo sapiens
ctaatacccagtccagattatatgacagataaaaccctaggaactcctcataatattgttcttgaagtcctgaggtttataaccatcccacaccttcttctttccatatttcagagtcctttcatgattgtatgttgaattgtttccagtacagttggttgtatttagagcagagcagcagggaaatgtgtttctgctrtgttatccccactgggaaactacacctgaccatattttctatgctgtatcttcaattttctcaatttccttaacacataaaaacttttaatatgcagttaaaaattcaaatttctacacaagctacttttctaattgtcatatttcttcccttacttattaactttccaaaattttatgctgtcaaatgtcaactttccagaggaacatcagaagaatgtattaatcaagcaaagctaagtgttagacttattgtagtaaaaggaaacactatctttacagggtgttagtagtgtctgtaaaaggattaaaaacaatccccaatttcccttgccttaatctttacctccttgtaatttttttattctt

SEQ ID NO: 765468 - DNA, 650 bp, Homo sapiens
gattatatcagtaattatttttaatttatcatttgctttatcaattaatttgctgtctcccacgtaaaagagaagaagtactaggctgggcgctgtggctcatgtctgtaatcccagcactttgggaggccgaggcaggaggatcacctgaggtcaggagttcgagwccagccaggccaacatggtcaaaccccctctctacgaaaaatacaaaaattagctgggtgtggtggcaggcacctgtaatcccagctactcgggaggctgaggcaggagaatcactggaacccgggaggtggaggttgcagtgagccgagatcgcgccattgcactccagcctgggagacaagagtgagattttgtcgcaaaaaaaaaaagaacaagtactctatactttctgaccttaatttcgaggaaaaattttattgcagaatcaaataaaccttattatacacctagcatgagcagggcattattctagataattttactgacattatttattgtttatcttttcacagttaataaatatttgattacaataaagaatagcaaatcacatttgtatactgcttttaagatatcaatgcagattccctgtttgatgttaccttttaatatgctatttcatttatcttacaaggaaatgc

SEQ ID NO: 765469 - DNA, 552 bp, Homo sapiens
tcatccattcatcttataggatatatgcatcaacaatacataaaaacataggcacatgtccatgatatagtgttaaaggggaaaagcagtatgagcccaacttggagtctgtgtgtgtgtgtgtgtgtgtgtgtgtgtgtgtgtgcgcgtgaggccctgtgctgagcagtagccacaggtaatcttgtgtacccctgttcgtaatcctgkggggtgatagcataattatcctctttttataaatggggaaactgaggctgagagcatttaggtcactcacccaacacagctaatacctggtaaagtcacgattcacatgtgctcttaatcattgccttataatgatcctgtatccttggccaatccttttcaccttacaaaggatattcgtgtttatgatttcaaataaaaatattcacagccactccaacaagcatctaataatgagcccattttagagattaagaaactgacactcaaagaagttaggagacttgcccaaagtcacagagctaatcaactgttgcaaaagaaggactccaactcaggtct

SEQ ID NO: 765470 - DNA, 561 bp, Homo sapiens
ctgggccagcaggggtgagtctagccagcagagggaggtgggaccctctcagactggtgacaggtaattggcctactctgagagctggaggaaggaagagggtgaggggagtccctctcagcctccctcctgcctacaggctccagcagcacccatgggcaccgcccataccmcattcccagtcaatttcctgaacctcaaacttctccctgctagctctgcttcaccgctgctgccgctcccctttccatgaaagctgcacctcctggatttccttctctcattcctccccccaccccatgtcaccataacctccggtgccggtgctggctcccctccgtggggtgccctgggccacaggtgagaccgggcagggcccaccacaattggctcctttatcactgctttgatgagacaaaaaccctgcggatggatgaagagatcaaactaaccgtcctggggcaggaaggtggggtagggagtatctcccaggatctgagctgccatcctggggcaggagggggcactggtttgttttccttccttgagcaggtacaaaag

SEQ ID NO: 765471 - DNA, 561 bp, Homo sapiens
ctgggccagcaggggtgagtctagccagcagagggaggtgggaccctctcagactggtgacaggtaattggcctactctgagagctggaggaaggaagagggtgaggggagtccctctcagcctccctcctgcctacaggctccagcagcacccatgggcaccgcccataccacattcccagtcaatttcctgaacctcaaacttctccctgctagctctgcttcaccgctgctgccgctcccctttccatgaaagctgcacctcctggatttccttctctcattcctccccccaccccatgtcaccataacctccggtgccggtgctggctcccctccgtggggtgccctgggccacaggtgagaccgggcagggcccaccacaatyggctcctttatcactgctttgatgagacaaaaaccctgcggatggatgaagagatcaaactaaccgtcctggggcaggaaggtggggtagggagtatctcccaggatctgagctgccatcctggggcaggagggggcactggtttgttttccttccttgagcaggtacaaaag

SEQ ID NO: 765472 - DNA, 493 bp, Homo sapiens
gcattgggaatgctagttcccaggtaaccttcgctcctcccagggccaggcttgggggcagctaaaaaggtggcaggaggagggggataaggtactggttgagaagtcagactgaagaggttgagtagattccctgcagatagtagaggagrgatgttgggggttgacctttgggagtggagaacagggctctcacaccaagtaggcgggtggtggggaaaaaggtggaggtgagaagcacaacatttttgttcattcattcattcattcattcattcatttcacagtctgagggactatgtgaatagaggctgcagagctgggttagaatggaccagtggctgcattggctttgagctcccagcaccaaggtctggtgccctctggggtagctggatgggccccttctgtgctcagcaaaggacaagagtctagttccacaaaacacccaattcagttttagttcagctcaaccgtccacctagcttgactt

SEQ ID NO: 765473 - DNA, 503 bp, Homo sapiens
tttagagttagaaactgaagaaagtgacctcgacttaacatttctggatccctaagatctagcatggtgccctacacatagcaagagctcaaaaaatgtctgttggccgagtgtggtggctcgagtctataatccttgcactttgggaggccgaggcaagaggattgcttgaggccaggacttcaagaccaacctgggaaacayagggagatctaatctctacaaaaaattataaaaaattggccaggtatggtggcatgcatcaatagtcctacctacttaggaggctgaggcaggaggattgcttgagctcaggaacttgaggctgcagtgagctgtgatcacgccattgcactccagcctgggcaacagagaccatgtctcaaaaaaaaaaaaaaaaggctgtagtactaaatgctcttaagcctttgttaatttatccaaaccaatattttccagggtaaacattttttagagttttgtgaattacagaaacagtaaaa

SEQ ID NO: 765474 - DNA, 503 bp, Homo sapiens
tttagagttagaaactgaagaaagtgacctcgacttaacatttctggatccctaagatctagcatggtgccctacacatagcaagagctcaaaaaatgtctgttggccgagtgtggtggctcgagtctataatccttgcactttgggaggccgaggcaagaggattgcttgaggccaggacttcaagaccaacctgggaaacatagkgagatctaatctctacaaaaaattataaaaaattggccaggtatggtggcatgcatcaatagtcctacctacttaggaggctgaggcaggaggattgcttgagctcaggaacttgaggctgcagtgagctgtgatcacgccattgcactccagcctgggcaacagagaccatgtctcaaaaaaaaaaaaaaaaggctgtagtactaaatgctcttaagcctttgttaatttatccaaaccaatattttccagggtaaacattttttagagttttgtgaattacagaaacagtaaaa

SEQ ID NO: 765475 - DNA, 590 bp, Homo sapiens
tatgatgtcatgagaatgacactttacttctgtgatctccctctcaaaagaaccataaccttgtggcttgcacctgtaatccctgcactttgggaggccaaggtgggccgatcacctgaggatcacctgaggtcaggagttcaagaccagcctggccaacatggtgaaacctcatctctacaaaaatacaaaaattagcygggtgtggtggccagcacctgtaatcccagctactcgggaggctgaggcaggagaatcacttgaacctgggaggcagaggttgcagtgagccgagatcgtgccattgcactccagcctgggtgacagagcgagactccatctcaaaacaaacaaacaaacaaacaaacaaacatacaaatataacctcagtgtaaacatgagaagactatcagatgaatcccagttgaggaacattctacaaaatacctgaccagtactccttaaaactgttaaggtcatgaaaaacaaggaacaccggagatactgtcacagacaaaaggggccgaaggagacatgatgattaaatgtaacgcagcatcctggatgggatcctggaatcgagaaaggac

SEQ ID NO: 765476 - DNA, 588 bp, Homo sapiens
tgttgctgcagtgttcatatattttattgttgattcataaaaactttttgtatattagaatgttaacttttgttgctcatatgtcttagaaacattttttgtcctataagtttgtatgggggaggcactcttttttttttttttttcttttttgagatgacatttttctctgttgcccaggctagagtgcagtggcgtgatcttggctcactgcaacctccacctcccaggttcaagcgattctcctgcctcagcctcctgagtagctgggactataggcatgcaccaccacacccagmtaatttttgcatttttagtagagacagtgtttcaccatgttgcccaggctggtcttgaactcctgacctcatgatccacccgccttggcctcccaaagtgctgggattacaggcgtgagctaccacgcccagcccggcactcttaaactaataagcaaagccctcaaacaagacagaatctaagccttcaaaagcagttggcacctggcaagagacttaacttaaaccattcttgtcaaagggcatcagctgtctagagaagaatccagggtgggggaactggaaaggc

SEQ ID NO: 765477 - DNA, 683 bp, Homo sapiens
aggagaggaagaggagaggatccatgggaagtcgggaaaggcccccaacaccggtaatcccccctcaacttcagcaccagcgcccctactccctggagagctgggccttgtgagggactgggtaggggagctggcctgtgaggagatggaggtgtgcctccttctagggaccacttcctagggatctccctctgaattcctgagtcggtcaggttgaatggaaagagagcacagagatggagtcacacagatctgggttgaccctcagtcccaccatttcccatctgtgtccaaaggcccaccacgcaaacctccctgggcctcagattcttcagatgaaaaatgggaatgatgcctacctcctggcatccttgtgaggactgaataaggagaagcacatggagatgctgagcgccctgcctggaacagagcgggtgctcaataaatgttagttcttcatggagccaggcatggtggctcacttctgtaamctcagtgctttgggaggcaaagacaggtggatggcttgacgccaggagtttgtgaacagcctgggcaacatagcaagacctctgtctctacaaaaaaaaaaaaaaatgttttaactagccggctatggtggcacatgcctgtagtcccagctgctcgggaggctgagacaggaggattgcttgagcccagga

SEQ ID NO: 765478 - DNA, 634 bp, Homo sapiens
agccaaagtcccatgctaatgtagggaaggtggatgatcttcgctgagtacttacaggtgcttacagcactgggcgctgtattacaagcatcagcttggatacacctcctacaactccatgaggcatgtactgttgagaattccattctacagatggagggactgagactcagagaggttacatacctctagcaggtggcagagctgggacacagacacacaatcacatcttgctccctccagaacccagctcttaaccattactctgttctgccatgaagcagatcctgcataaaatatataggagaaatgaagtcagggagccaggacctgtaaygaaggaataaaaggagcttctagaggtagtcattcatccactgatttgatatttaccaagcatctactagatgctgagcactcagagataattataatgatgatgagaataacatcaatggtagtaacattagtgatagtggtaagataaaaactattgctgacatcttctgagctcctacaatgtgtttggcactgtgctaggtcttctgttgcagaactctaatccttacagcagccctgcaagacagttattattattattatcgccactttatagatgagtccactgaggctc

SEQ ID NO: 765479 - DNA, 634 bp, Homo sapiens
agccaaagtcccatgctaatgtagggaaggtggatgatcttcgctgagtacttacaggtgcttacagcactgggcgctgtattacaagcatcagcttggatacacctcctacaactccatgaggcatgtactgttgagaattccattctacagatggagggactgagactcagagaggttacatacctctagcaggtggcagagctgggacacagacacacaatcacatcttgctccctccagaacccagctcttaaccattactctgttctgccatgaagcagatcctgcataaaatatataggagaaatgaagtcagggagccaggacctgtaacgaaggaataaaaggagcttctagaggtagtcattcatccactratttgatatttaccaagcatctactagatgctgagcactcagagataattataatgatgatgagaataacatcaatggtagtaacattagtgatagtggtaagataaaaactattgctgacatcttctgagctcctacaatgtgtttggcactgtgctaggtcttctgttgcagaactctaatccttacagcagccctgcaagacagttattattattattatcgccactttatagatgagtccactgaggctc

SEQ ID NO: 765480 - DNA, 582 bp, Homo sapiens
tttcagaactaagctagacacaaaaggattaacgtggcagggttccacttccatgaagtacaagaggactgaaattcatggagaaagaagtaaaagggtggttgccagaagctgggggaggaaagatggggagttattgcttaatgggtacagggtttcaatttgggacgatgagaaagctctggagatggacactggtgatggttgcataacaatgtgaatgtacttaatgccactgaactaaacactttaaaatggtggaaaatggtaaattttatgttatgtgtattctaccacaatttwaaaaaacagtgcttacaaatcttagtcgtgcgctgctgtcccctgccaaaaaagtgtcatttcagctgcattctaaaggaggggcaggacacaactcatccactcatttgctgcacaatagttgaacagcacctgtaaggcacaggtttggaagaatttctgtcttctgcgtctcaggttggataaataaagcaagttctctgcctcacagtgcttcagtccagctagcaagagaagcacgtctctctggtatacagaagaatgaatccagagggggga

SEQ ID NO: 765481 - DNA, 625 bp, Homo sapiens
gagattgttaactcacctgcctatttttatttccttagcacctcagacagtgtctggtacacagtcagctctcaatacatgttgaatgaatgaatgaataaatgagtttctgaatacttaaggctgagactcaggccatggttaatgaaaaatggccaatattactattattattattattaatttttagagcagtagttttcccccagtgacaccctcaacctcaacatttgggatttactgtttattatgtgtcaaacagaaatctttgcacttttgcaggagagagtgagtgaggctgttgttcttctctttcatgttactgttagatctgcagatatgaatttcctgtggtctgagaacataagactcttggaaggacatcatgaaaagtcaattctgctggtgacatttctcctyttctctattactttgagacttgagtataagatgtgtttttcttataaattcttctgggaacattctttttttcttttctgctgtgtcaactccaagtgaagccacagttctcctgggctgccatcatggctatttcctcaccttaggctgtaaaggatcctaggagagaattatatgattttcagtgtaaatcaggcagcaggag

SEQ ID NO: 765482 - DNA, 576 bp, Homo sapiens
agagcttcctctcttcttccttcaccacaggtctgaagcatttgccctcagaccctctctcctgcaaagtgaagtcagcctgaaaacatggaacaggagaaaatgtccacctcaaaggaatgggaaaactggcatcagaaacatttctgtaaacttctattatgtgagaaaggggccattatgcatgtttaataagagcaacagaaaacatgttttattcttgtaagcttcaattaaacttagcattaatttttgctcagctaggctgaagaagacaaaatttgtgtccctcaagccttaagtgagtcatcaatgcatcataaaggaaagtcaacctagaatttctccagggatagatcgtctccstctttgtaggaattctggtggaggaatttcctcctttcccaaatgctacagggcttcatgtggctctctactaagctggaagcagagaatccaacggactatacttgttggtcctccactctaggtacacattagaatctccagggaagattgttttaaataccagtactgggggacccagaaaattaaatcagactctctagaggcagg

SEQ ID NO: 765483 - DNA, 637 bp, Homo sapiens
gttagctgtttattgtgccaacttctttgtgtgattgctatacagtgtcaccggtctgtgtaccaagtgtgtttctgtattggctgctaatggtctttctttttgatatttagtgcttctttcaggagctcttgtaaggcaggtctgatggtaatgaattccctcagcatttgcctgtctaaaaagtatcttatttctcctttgcttatgaaacttagtttggctggacatgcaattcttggttggaatttcttttctttaagaattttcaatataggcccccagtctctcctggcttgtagcgtttctcctgagaggtttgatgttagtctgatggacttccttttgtaggtgacttgttctttctctctagctgcctttaacattttttctttcatttcaatcttggagaatctgatgattagtgtcttggggataatctccttgtgcagtattttgcaggggttctctgtrtttcctgtacttgaatgttggcctctctagctaggttggggaagttctcatggatgatatcctgaaatatgttctccaagttgtttccattctccccatctcagggacaccaaagagctgtagactaggtctctttacataattccatacttcttggaagtta

SEQ ID NO: 765484 - DNA, 654 bp, Homo sapiens
agtcccagagtaaaataatgattttaggggccaggcccaggatcctgctgccctgcacaatcttgggacactgctccccatctcctggctcttctagctccagcctcagctcaaagtggcccaggtacatatagctcgagctgctgctctagagggtgcaagccataagccttggtggcgtccacttggtgttaagcctgcaggtgtgcaaaataaaraagtgaaggaatttggcaacttccacctagattttagaagatgtatagaaaatttggggtgcccaggcagaagctgttgcaatgatggggagcctccacaaaaaaaatttagtaaggcagtgctaaggggaaatgtgggattggagtccctacacagagttcctaccagggcactgcctagtggagctgtgggaagggggtcaccatcctccagaccctagcatggtagatccaccagtttcttgcatcctctgcctggaaaagttggaaacgctcaacttaaacttgtgagagtagatacatgggctacatcctgcaaagccacaggggcagggcttcccaatatcttgggagcccgctcttcatactaggatgcaggacatggaggcaaggattatcttggagctttaagatttaacgcctaccccgctgggtt

SEQ ID NO: 765485 - DNA, 678 bp, Homo sapiens
aaataatgattttaggggccaggcccaggatcctgctgccctgcacaatcttgggacactgctccccatctcctggctcttctagctccagcctcagctcaaagtggcccaggtacatatagctcgagctgctgctctagagggtgcaagccataagccttggtggcgtccacttggtgttaagcctgcaggtgtgcaaaataaaaaagtgaaggaatttggcaamttccacctagattttagaagatgtatagaaaatttggggtgcccaggcagaagctgttgcaatgatggggagcctccacaaaaaaaatttagtaaggcagtgctaaggggaaatgtgggattggagtccctacacagagttcctaccagggcactgcctagtggagctgtgggaagggggtcaccatcctccagaccctagcatggtagatccaccagtttcttgcatcctctgcctggaaaagttggaaacgctcaacttaaacttgtgagagtagatacatgggctacatcctgcaaagccacaggggcagggcttcccaatatcttgggagcccgctcttcatactaggatgcaggacatggaggcaaggattatcttggagctttaagatttaacgcctaccccgctgggtttcagacttgtatggggcctattactcctttcttttg

SEQ ID NO: 765486 - DNA, 646 bp, Homo sapiens
gcagtgaggtcccatgcctggcccatgaaaccattctttcttcctaggactctatgcctgtgttgacaggggctactacaaaggtctccaaaatgccttcaaggtctttttctcattgtcttggatattggtagttggttcccttttatttatgcaaataacatgctaaacatgataaatatcctgacttcaaaaatcatgcatattccatggcagacgggaggcaggacyagattgcagctccagacagagcagcatgtggagttttgcattgtgaattttagctccaggtctactgcaagaacaaaccagcaatttcgagagcacccagagaccctctgaaagaagagaactgttcttacaggacccaggagacactgcaaatactgtgagtgccccagctagggaagtgggaaacagagactctcctttactaacacacacccccactggagaagctgaaggtctgtttgtgggagaagtttccaactttatatggagctgaatcaagttagccaagcgaaatacaggggtagaggaagcagcaaaaaggccctgggggcttgctgggtccccaagcagcccattcctgcctgacaccacagggatccatcaggagggtggccagaggagcagcgcataaaac

SEQ ID NO: 765487 - DNA, 646 bp, Homo sapiens
gcagtgaggtcccatgcctggcccatgaaaccattctttcttcctaggactctatgcctgtgttgacaggggctactacaaaggtctccaaaatgccttcaaggtctttttctcattgtcttggatattggtagttggttcccttttatttatgcaaataacatgctaaacatgataaatatcctgacttcaaaaatcatgcatattccatggcagacgggaggcaggactagattgcagctccagacagagcagcatgtggagttttgcattgtgaattttagctccaggtctactgcaagaacaaaccagcaatttcgagagcacccagagaccctctgaaagaagagaactgttcytacaggacccaggagacactgcaaatactgtgagtgccccagctagggaagtgggaaacagagactctcctttactaacacacacccccactggagaagctgaaggtctgtttgtgggagaagtttccaactttatatggagctgaatcaagttagccaagcgaaatacaggggtagaggaagcagcaaaaaggccctgggggcttgctgggtccccaagcagcccattcctgcctgacaccacagggatccatcaggagggtggccagaggagcagcgcataaaac

SEQ ID NO: 765488 - DNA, 532 bp, Homo sapiens
tggatattagcattggctcccttttagtcctgctaatctctttagcaagtagttgctccacagcccactgcaaatttcccacacttttatgctcttcttcccttttaaatataagttccaactttacatcatttctttgctcctgcatctgaacataggatgttagaagcagctaggccatatcttgaatgcttttttgcttaraaatttcttccactagatactctaagtcatcgctcttaagtccaacccttcacaaattcccagcacgtagtcataatgcagccaagctctttgctaggatgtaacacagatgacctttactctacttcccaaaaactcttatttccatctgagaccttgtcagtctggactttactgtcagtatctctataagtattttggccaaaaccatttaaccagtctctaagcagttcaaagtgtcctttatcttcctgtcttcttctgagccctccaaactctttcaacctctgcctgttacccagttctgaagctgattttatctttatag

SEQ ID NO: 765489 - DNA, 532 bp, Homo sapiens
tggatattagcattggctcccttttagtcctgctaatctctttagcaagtagttgctccacagcccactgcaaatttcccacacttttatgctcttcttcccttttaaatataagttccaactttacatcatttctttgctcctgcatctgaacataggatgttagaagcagctaggccatatcttgaatgcttttttgcttagaaatttcttccactagatactctaagtcatcgctcttaagtccaacccttcacaaattcccagcacgtagtcataatgcagccaagctctttgctaggatgtaacacagatgacctttactctacttcccaaaaactcttatttccatctgagaccttgtcagtctggactttactgtcartatctctataagtattttggccaaaaccatttaaccagtctctaagcagttcaaagtgtcctttatcttcctgtcttcttctgagccctccaaactctttcaacctctgcctgttacccagttctgaagctgattttatctttatag

SEQ ID NO: 765490 - DNA, 638 bp, Homo sapiens
gccagcagattataaacaatctgaacttgctctctatatgagtgaattcacatctcaatacttctgttgtttcttccctttttccttttgaagacttggaataaaacttccatagaatgaagcaaatttgatgtccttattttatttctttttttgtcartaaaccatcaggcaaaaggatgcaatctaagggaatttattgacacagtcttgttggaaattgtggtagagatttagaaagctcagtctctgcagttgtttatgaatatggtagtcccccttatctccggggaatattttccaagagccgcagtgtatgcctgaaaacatacactgctttttttccatacataccttcctgtgataaactttcccctttttactcaaaggaagcactttatggcttctctttggcatacctgaattgccagcattactacttttgtgctttggggccattattacataaaaagaaggttatttgagcacaagcactgtgatactgaagtgggtgatctgataacctagacagccactaagtgactcatgggcaggaaacagcacaaatactctggacaaagacaggattcttgtcttgggcaggagggagcagagcacaagatttcctcacactactt

SEQ ID NO: 765491 - DNA, 638 bp, Homo sapiens
gccagcagattataaacaatctgaacttgctctctatatgagtgaattcacatctcaatacttctgttgtttcttccctttttccttttgaagacttggaataaaacttccatagaatgaagcaaatttgatgtccttattttatttctttttttgtcagtaaaccatcaggcaaaaggatgcaatctaagggaatttattgacasagtcttgttggaaattgtggtagagatttagaaagctcagtctctgcagttgtttatgaatatggtagtcccccttatctccggggaatattttccaagagccgcagtgtatgcctgaaaacatacactgctttttttccatacataccttcctgtgataaactttcccctttttactcaaaggaagcactttatggcttctctttggcatacctgaattgccagcattactacttttgtgctttggggccattattacataaaaagaaggttatttgagcacaagcactgtgatactgaagtgggtgatctgataacctagacagccactaagtgactcatgggcaggaaacagcacaaatactctggacaaagacaggattcttgtcttgggcaggagggagcagagcacaagatttcctcacactactt

SEQ ID NO: 765492 - DNA, 638 bp, Homo sapiens
gccagcagattataaacaatctgaacttgctctctatatgagtgaattcacatctcaatacttctgttgtttcttccctttttccttttgaagacttggaataaaacttccatagaatgaagcaaatttgatgtccttattttatttctttttttgtcagtaaaccatcaggcaaaaggatgcaatctaagggaatttattgacacagtcttgttggaaattgtggtagagatttagaaagctcagtctctgyagttgtttatgaatatggtagtcccccttatctccggggaatattttccaagagccgcagtgtatgcctgaaaacatacactgctttttttccatacataccttcctgtgataaactttcccctttttactcaaaggaagcactttatggcttctctttggcatacctgaattgccagcattactacttttgtgctttggggccattattacataaaaagaaggttatttgagcacaagcactgtgatactgaagtgggtgatctgataacctagacagccactaagtgactcatgggcaggaaacagcacaaatactctggacaaagacaggattcttgtcttgggcaggagggagcagagcacaagatttcctcacactactt

SEQ ID NO: 765493 - DNA, 448 bp, Homo sapiens
ttggatgccagcctggctgacgtaactcagggcatctctgaggcactgtcagctgaggcaggacaaaggaagtggatgttcccatggcaccacgctacgatgtcttgacaaggccccctgcacctcgttttgtggttcattcttattttgctgaaaggagctyttccgcttcctctgagataaacattcctaacatcatttcttctgagccggccagccaagagaacagctgggagctctccgagcacaggcagagtgcattcattttctggaactccgctgagaatcttttctccaggagaccccaagaagccattgcaaataaacaaaatgaagttgctggggaaactggcggccaggaagctagagctggtgtagccctggggagaagaatggagtcagcccccagtgctggggttgctggtgctgggcgctgcagttggcgggc

SEQ ID NO: 765494 - DNA, 551 bp, Homo sapiens
ttttttttttgagatggagtctttctgtgttgcccaggctggagtacagcggtgtgatctcagctcactgcaacctgcacctcccagattcaggattctcctgccttagcctcccaagtagctgggattataggcacacaycaccatgcctggccaatttttgtatttttagtagagatggggtttaaccatgttggccaggctggtcttgaactcctgacctcaggtgatccaccctcctcggcatcccaaagtgctgggattacaggcgtgagccactgcgcccagccaaaatggaaatttctaaatgccgagtaaaagattaaacaaacaacattctttttaatgtcttgctaattatgatggtttccattacatctcaaggcaaaatatgcatttggggtgaggattattgtcaacagggatggattttctaatctgtacttcgaatagacttctggataactagggtttgtgtgactgtcctctgtgggactgactggctagctgcctttgtttttaccttgggatatgtctgataaagagctcag

SEQ ID NO: 765495 - DNA, 490 bp, Homo sapiens
gcgtgacctgggaggtggagcttgtagtgagccgagattgtgccactgcactccagcctgggtgacagagtgagactccatctcaaaaaataaataaaataaataaataaataaataaataaataaataaataaataacccactctcaggtatttcttcacaatggcctgagaacagactaatacagtaaattggtattggtagtagggtgctgctataaggatagttgaaagttcagaagtgactttggaactgaataactggcagaggttggaacagagggctcagargaagacaggaaaatgtgggaaagcttggaacttcctagagacttggagagctcagaaaacaggaggatgtgggaaagtttggaacttcctaaagacttggtgaatggctttgaccaaaatgctgacagtgatatgaagtccaggctgaagtggtctcagattgagatgaggaacttgttgggaactggagcaaaggtgac

SEQ ID NO: 765496 - DNA, 613 bp, Homo sapiens
cttcaagccccaagaccgcaccgcggccctgagcccacaccctcagtctcctctgcgtgccccaaagcctccagatctccgcctcgcgccccttgggcaggagcggctgcaggggccctgggtccgaggatccgcgggagcggtgcgggagacgtccgcggtcagagctcacagtcccaagtgccctcctttcacttagccggctgcaaacgcgataaggcctttgtccccttaatgggacccttgggtgacagataacacacattgcggcgccttggtttccccaaatctggtatttattactagaaaaggaaggagccgtggccatgccagaagccgcgggtgaggtgaacattgcaaggcaccggscttcgccttctgagctgctcactccatacaggtggaggccctgcttggggcctgtgttgctgggggcctgcgcgcgggacgtggctgtccgtgtgagctcatttatggacacgtgcatgctgtatgatgtacgcgtgtgtcgcatgtgggtatgtatgtgtgcacacgtgtgtatttatgaatgtgcacatgcctgtgagcgttgtgtgtgatcgtttttaagagccgggctacctgtaacaga

SEQ ID NO: 765497 - DNA, 600 bp, Homo sapiens
tttaaattctttatccaatttgaatttttatttcttggcctggcaaggtggcttacgcctgtagtcccagaagtttgggaggccaagatgggcagatcgcttgagcccaggagttcaacaccagcctgggcaacacagcaaaaccctgtctctacaaaaaatacaaaaattagccaggagtggtggcacacatttgtagtccctgctactggggaggctgaggtgggatgattacctgatcccaggaggtagaagctgtaggtgaggtatgatcatgccactgyactccagcctgggtaacagaatgagaccctgtctcaaaaaattttttttaaatttattttaactgtattttccgaaatagtcattatttgcaattccttatccaaaccctgtgtttttatttaaaaattcttattattctgaggacttctagaggtgtaaaagtagggggagtataaagtagacatacctgtgttttactttcagaaagaaaaatacttccagtagccacactgatgataggctgaattagttgtactctgcctagtggcgggtaatgctgctgcttgctgctcctgcagtcgcctgttccagggt

SEQ ID NO: 765498 - DNA, 600 bp, Homo sapiens
tttaaattctttatccaatttgaatttttatttcttggcctggcaaggtggcttacgcctgtagtcccagaagtttgggaggccaagatgggcagatcgcttgagcccaggagttcaacaccagcctgggcaacacagcaaaaccctgtctctacaaaaaatacaaaaattagccaggagtggtggcacacatttgtagtccctgctactggggaggctgaggtgggatgattacctgatcccaggaggtagaagctgtaggtgaggtatgatcatgccactgtactccagcctgggtaacagaatgagaccctgtctcaaaaaawtttttttaaatttattttaactgtattttccgaaatagtcattatttgcaattccttatccaaaccctgtgtttttatttaaaaattcttattattctgaggacttctagaggtgtaaaagtagggggagtataaagtagacatacctgtgttttactttcagaaagaaaaatacttccagtagccacactgatgataggctgaattagttgtactctgcctagtggcgggtaatgctgctgcttgctgctcctgcagtcgcctgttccagggt

SEQ ID NO: 765499 - DNA, 628 bp, Homo sapiens
gggtaagcactgtagaaacttcagatagacacaaatgctgtgaataaacctgctgaaaatgtctgtctaaagatcagcaacagcttttgctttgttgctttttgtaagctgttgaaaatcattgcagttcagaggtgaaacatgggatagttcatcgtctggttatcaggcaaagtggtttctcccttagccctaaactctgggcckattgcagccaagagtcatctagcattccataagaacagactctctctggagcagctgttgtcactgatggttaaaggaatagctgtgacctaaaagcactgttttgtctccatctttaacactcgttctcctgggcagctgggaaccgcctggtctatgaacttgtctgtgaactaagtcttctggctgtctttgtatacgttgcttttttttttattgcattacaggagatacaggaaataatattctaactcatagtggatctttatttttatttttattttttggccagctgttacaggtctaaaacactgtgctgtttcatagtacagtacagtacatgatacgggaattgagtcatgtgctgcttaaggacacagatacgttctgagaaaagcgtcctcagctgatcttgttgtgt

SEQ ID NO: 765500 - DNA, 628 bp, Homo sapiens
gggtaagcactgtagaaacttcagatagacacaaatgctgtgaataaacctgctgaaaatgtctgtctaaagatcagcaacagcttttgctttgttgctttttgtaagctgttgaaaatcattgcagttcagaggtgaaacatgggatagttcatcgtctggttatcaggcaaagtggtttctcccttagccctaaactctgggccgattgcagccaagagtcatctagcattccataagaacagactctctctggagcagctgttgtcactgatggttaaaggaatagctgtgacctaaaagcactgttttgtctccatctttaacactcgttctcctgggcagctgggaacygcctggtctatgaacttgtctgtgaactaagtcttctggctgtctttgtatacgttgcttttttttttattgcattacaggagatacaggaaataatattctaactcatagtggatctttatttttatttttattttttggccagctgttacaggtctaaaacactgtgctgtttcatagtacagtacagtacatgatacgggaattgagtcatgtgctgcttaaggacacagatacgttctgagaaaagcgtcctcagctgatcttgttgtgt

SEQ ID NO: 765501 - DNA, 628 bp, Homo sapiens
gggtaagcactgtagaaacttcagatagacacaaatgctgtgaataaacctgctgaaaatgtctgtctaaagatcagcaacagcttttgctttgttgctttttgtaagctgttgaaaatcattgcagttcagaggtgaaacatgggatagttcatcgtctggttatcaggcaaagtggtttctcccttagccctaaactctgggccgattgcagccaagagtcatctagcattccataagaacagactctctctggagcagctgttgtcactgatggttaaaggaatagctgtgacctaaaagcactgttttgtctccatctttaacactcgttctcctgggcagctgggaaccgcctggtctatgaacttgtctgtgaactaagtcttctggctgtctttgtatacgttgcttttttttttattgcattacaggagatacaggaaataatattctaactcayagtggatctttatttttatttttattttttggccagctgttacaggtctaaaacactgtgctgtttcatagtacagtacagtacatgatacgggaattgagtcatgtgctgcttaaggacacagatacgttctgagaaaagcgtcctcagctgatcttgttgtgt

SEQ ID NO: 765502 - DNA, 653 bp, Homo sapiens
tcatctctgttgagttgttggtcttttctttttttaatttttactttatttgagacggagtctcactctgtcacccaggctggagtgcactggtgtgatctcggttcactgcaacctttgcctcccgggttcaagcaattctcctgcctcagccacccaagtagctgggattacaggcacgtgccaccaagcctggctaatttttttttttttttttttgtatttttagtagagatggggttttgccatgttgaccaggctggtctcaagctcctgacttcaagggatccacccacctcggcctcccaaagtgctgggattccaggcgtgagccactgcgcctggctgggttcttagtttttagaaactccataagtttcaaggaatcatctttagtaggaattgcatgtatttgttttctgggtttttaatcttgtcttttgactttgccrtgcaattattttcttttctttttttttttaatgctatatttatcagtcctttttggtgtggcttctgggtttcgtgtcataattcataatgtataatgcgtttctcatcatacgtattgtacatatgcatgtattgtgcatacataatacacatgatgccccgtacattctaaagacagccccctgcagtgtcgcctggta

SEQ ID NO: 765503 - DNA, 587 bp, Homo sapiens
taaagaaataataggaagaagaacacatctttttacagaagtattccaactatgttaggttgatagtcctccaatcaagtaggtgaagcttaaacactcatgagttgattgtagcctgagactagagacayggaaaaagtaatcatattagtatattttataatgagatttcagatataataccaaagacatgatctgtagatgaataaaattttattttttaaatctaaatttgtataaacacacacacacacacttttctgcaatacacactgataagggagtaaaagacagccacagacttggagaaaatacttccaagtcacatatttgttaaatgaattcttttaatttgttaaatgacttttataatcaatatgcaagtaaacttacaactaatcaaaagaaaacaatacagttaaaaatgaaccaaatatgagaagaggcatctcagcaaaaactatatgaaaattgttaaatgtaaatttttattaaggaaatgtgcatttaactaaaaattagataccattactcacctattagaatggttaaaacacataattctcataattgtaaatggcaatatg

SEQ ID NO: 765504 - DNA, 757 bp, Homo sapiens
  misc_feature 1, 2, 3, 4, 5, 6, 7, 8, 9, 10, 11, 12, 13, 14, 15, 16, 17,18, 19, 20: n = A,T,C or G
nnnnnnnnnnnnnnnnnnnntaggattatggttactgttaagattacttttcctgtgatcccgggatttgttttttgtggctgcatagcaaatgctcatctgctaagtcacttaaaagaataagcatttattctcccacagtgctgcgggacacaagtgtggcrttaaaaggaccatgctcactcctaaggctctgtgccaggacctttgtagcctctcccagcttctgtgggctttgggcattcctgggctttccttgtttcatagacgcatctcttcctccatcttcatgcgccttcccctctgtgtgtctctgtgtcctcttcttttcaagacactgtcattgtatttaagccccatcctattccagtggaacataatttttaactagctacacctgcaaagaccctatttccaaatgaggcaacattctgaggttttgggtggacatgcatttttgggggttatctttcagccccgaacaacttggtactgcagtgctccctgcctgattttggttgactctgttctccactttctcttttttgcttttttttactccctggctcatctgtcggttctgcaaggcatctccaacaccagccattgtgaacagtctgttcagtgcagacagaaaaggtggcacccatccagaatgtcctgtgggctgctgttagaatattatcagttagagaagagatgagggaaagataaacccaggagtaataattagtagaaaggaatgtcacatggcatg

SEQ ID NO: 765505 - DNA, 608 bp, Homo sapiens
taacactctccaccccctgtcccatagagaagccaccctgtgatccactctctccccttgtgtctgaatccaagtctaagctcccccaattccacagtggtggcatcccacatcgtggttcactgccttctcttaggtgggggaaagttctgtggggctaacttctgctggcacagttggcccacttttatgttggtggtgaccaccacaagtaccatttggctacagactgtgtcctggtattccaaggcttttgtgtctggaaggcatcctttagccagcctgctaaaggttgttctggatgtggagtggccctctgtcacatcctccacttgtaaggcatgacatgtagtgcrgttgttactcctaaacagtatatctcacttcagcttccttctgtctttgagaccagggtcttagggacacacacttatgtccttgcctttaacacagtccccacctaaacccctcagggtaactgactacatccaattcacagggctgtccctgcactagaactcccaaggtttgtattcatttcactgtgactttagcttcttcagagccctcatcctcccttttggaacagtcgcagtggggcaccttct

SEQ ID NO: 765506 - DNA, 562 bp, Homo sapiens
ggatccactggatttatggcctccatgctcagggtgtcaggtcccaaaccttctcaatcacaggaaagcaggactcaggccaagggaaggaagcacatgtcgcagctggagaccacacataccttggcagcaccccagggagagaaaattccctgctgcaccaggcttctctgtgcacttccagcccccgtcacttaaggaacccctgtcccactctgagtcttcttctgaggcctctgtttgtgttgtcctgctcctgtcctggcctccagatccctcctctcrtagggtcctaggtctgaaggaaaagcaagatggcggcagtctgggggaagagcatgtgcttggggtccccgtggcccatttctgggcttggcctggtcacctgctgcagtcagtatcactcattcagacctaagcagtaatgccaggcgggtcatgtcctccttgtaaaattgtttgtttggagaatttgtggtgaactccaaatctctctctctctctcaaaattaataccattagagtcatttgtgcttgactgcagccctatggaagggacagc

SEQ ID NO: 765507 - DNA, 623 bp, Homo sapiens
cctgcttgattgctctggctctgacttccactactacgttgaatatgaaatggtcagagtgcttgcctttttttcagttctccaggggaatgtttccagcttttgcccattcagtataatgttggctctgggtttgctatagacgactcttattattttgagtcatattattttgatgtctagtttgttgagggtttttatcatgaagtgatgttgaattttattgaagtttttctgcattttttgagatgatcagatagtttttgtgtttmaatctgcttatgtggcgaatcatatttattgatttgcatatgttgatccaaccttgcatcccaggaataaagcctactttatcgtggtgaattaactgttttatatgctgctggattcagtttatcaatattttgttgagaattttttgtctgtgttcatcatggacattggcctcaagttttctttcttcattgtgtttctgccagagattgagtttgaaaggattccctcctttttttgtaatagcttcagtagaattcgtaccagtttttctttgtatatctggtagaatttgactgtgaatccatctggtctaggacttttttggttggtggtagtttttttttatt

SEQ ID NO: 765508 - DNA, 509 bp, Homo sapiens
attccctcagtgatcttagttagattctaagtgacagacaacttgtggcattattggatgtcagtcttctttggagaacattctgaataggattgacaagaagggcattcgcttttagatctaaaagaaatgatttcttttgtgtgtttatgaaaaacaaatcatatttttatggaaacccaggcattaagaagtataatacaaataatttgccatctggaaataatcatggagtctgagaatgctaacaaggtcatggagacagtaattttcattcagtmtaacactgaggagttccttgtatagtaagtagttccttgtagcagttactacctttctttattcacagataagtaagcaaactcactcctgtaatattctccatggaaattcagtgtggattcttgcattgccgtcattcatacagtagaggaaaacatgcttttggtttcctaaagttacataggtgtttcagctgttacttataccaaatgagtttctaggtagta

SEQ ID NO: 765509 - DNA, 607 bp, Homo sapiens
agagttctgaaaatgtgagcgccagcagctgctgcttttgcattgtggtgggcttggcagaggagcagagactggaggcagtgggccaaagtggattcttgaatgggagggtcacaggaggaatgcaggatttagaaacattatcctggcagcaagagatgagggaaggaaaaaccattttgcattgggggtgaattttcaggaaaacttctctcttcatggttcctaataattttggtgggtactcaattataaataacaacaatatttgtagcctgagggcttttgtatctataaggtgaatttcaagctcttcaraatgcccagcaacaatgcctactgtgtgctaagtgctagggaacaaggaaaaataggatttggcctccactttcaaggtgctctgaacaagagagaagacagacggtaaagacatagcacacgtggagtgtgcctgggacagtggaagatgcctgggcatgtaccagcacataggtttcaggatgtgtggagcgtgaggggaagtgaggtggagaaggaaggaaacttgtgtgagtttgcagggatcagctcaggaagcttcttccatgcttaggtggtttgcatgttt

SEQ ID NO: 765510 - DNA, 601 bp, Homo sapiens
aagcaagggaaaaggacttggagtggaaaagtattgagtattcagtcagagtgaaaaaaagtatctttagtgtttccttcctcctttccccaataaggaatctctgcagaggtacccaaagaaggcctctgctatggctccaaataaagagacctctgaatggggrcctagtccaggaatgctgacatatgtaagagcatgacaggtcagcgaggtcttagttcttgactgtaactctcatcagagatggcaatgcaccaactgtgcacaaaatctggggaggcaagggggcagctttctccctttaggcctgccagtaaaagcctttccctgtggtgtctgccttcaaaaatgatacaaaggtttttggctattaccccgacttctcactttcaaagaactaactcgttttctcgatcttctctattatctttctattctttatttcattcatttctgctcttatctttttctgcttgctttgagtttactttgtttttctttttccattttcttaaggtggaaggttatgttgttttttttttacatgtgcatgtttattacattgatctattgcttaatgctggaatttgagtttcta

SEQ ID NO: 765511 - DNA, 607 bp, Homo sapiens
aggtaagagattcccatcccttaggtgttgagcctagcactatgtcacaatacccaaatatgtgtggcctaagaaaaagaggagacttacatcacctagataggccagtgatgtttcacaatttctctgagcagagaccaggcaggagaagagagtaacatcatcatggtgayaggcattcagttatgtcacaaagatgcctcctggcagggcccaggaagataatgttacatcacctgggtgttggacccagcaatatgtaacaatgtctaatgtgacatattttgccaaaatatggcacaaaatacagggcacaggtggcagagtcacataacaggggtgcaggatccagcaatatctgacaatacccaaaatttgtggggtcccaaaaatagaggagagtcacatcacctaggggctggctccagtgatatatcacaatctcacctttgggctatgaccaggtagaaaagtcaagtcactcaggttctgattagaagtgtatgtcacaatcacatctgcagaaaggtccagtgatgaattaacagtcctgcacaggtcccagttccaggtatgagagtccccacattctctatgttgggtctaa

SEQ ID NO: 765512 - DNA, 588 bp, Homo sapiens
cccatcactgagattgtgactgtctttttcctgggacctgtccacagtggagagtatgacactttttggccaagcacctacaagatacgactctcttcttacacctgggccactggggtgattttgacatgtagttggccccagctccaagattatgtgactccacacttcttcctgagccctacctacaggtagcattgtgtcatatctgtgagaccctcaattaggtgaaatgactctttgtttgggccctcttctcaaggtacygtgacattgctgggcccagcatctaggtgatgtaactctactgtactgtttggtttctgcctaaaaagggattgtgacataccactctatcaagaacctaggtgaggtgactcctctccagcctgggacctgcatacattgcttattgacacatatcactggctccagcacctaggtaatgcaactctcctacatgggcccccacccataggggtattataagatatctttctattaatcacctaggtggtgtgacactcctcttctgcctgggccctcccaaaaaagtattgttacacatcactgagcccagcacctagg

SEQ ID NO: 765513 - DNA, 565 bp, Homo sapiens
agaagaggcaaatcaaaccacctgggttctgggcccagtgatatgtcacaatgtcttccataggcaaagcccaggtaacagaggagactcacatcaaataattgatggacccagagatatttcacaatgcccgctgtgagcaagagccaggcaagagactcacatcacttttgtgctgggccactatcttttgtgtgagcagaacataggaaaaagagaagcattggccgggcgcggtggctcatgcctgtaatctcagcactttgcggggctgaggagggtggatcacctgagatcaggagtttgagaccagcctgaccaacaaggtgaagccccgtctctactaaaaatacaaaatacaccaagtgtgatggcaggtgcctgtagtcccagctgctcaggaggctgagacagaagaattkcttgaacccaggaggcagatattgcagtgagccgagatcgtgccactgcactccagcctgggtgatggagcaagactccatctcaaaaaaaaaaaaaaaaagagagagagaagcatcacatcagcagagtgctgagcccagat

SEQ ID NO: 765514 - DNA, 616 bp, Homo sapiens
ctttgttctatatcctgttatttcaatttctgagtttaatgctaaattttatctgatgaaatttggtacctcctagaagtgttcccatgtaactgtttaccacatgatttttaatacaaaaaataaaataatactttattgtccaaaagaaataaatacatttgcttctcttactgaggtacaaaatgtaagcaccttaaaattttcttatatgtttttgaatcattttgctggatttttcaaacacttattttcaaaaactaagtgaatgactctgacatggtarttaaagcttgagcccaatgactgcgagcgaaggttaattttgagccggcaaaaggaggttattaaaggcccagttagttccttctggaaagcctttcctgcagatgtcccagcctgcttaccccagccatggaagaagcctctatagtgagagaagctacagagccttggaaagctggggccccacagacagatgcagttaaggttaagatagaaggggtttgggagtgtcttactgaagataaaattgttacttttttgaggcagttttgagaggttttaaaataaaccagttagatgtatatataaaaaaaaaagaattccaaaggag

SEQ ID NO: 765515 - DNA, 706 bp, Homo sapiens
gaaaattgaaaattctatgttcagagtgattactgggaacatggttaaaacatatcttcaatgttatgaaaagtttttataaatatcaccccacttcaaaaagtattttagtaaaagattgtttatttatagtactcaacttagattcataaaaatttcaatattccaggaaagtcagagacacttaaatgtaaacaaaattccttaaaacttgaatgagataaattcctcttggttaagaattttattattaataaatatagagaaaaatagaaaactagtacttccgccaaaataacagtttttggcaygggagcatcactgaaacaagtgctcttcatcatcattgttaaagtaagaagagcattgcctgctttcttggaagtagctggcctgttttccactgatacaaagtggagaaggcattgaaatagtgaaagaggatgatataaattgaatacttatgtaaaatacagtctataataaaacgtagcatttggtgttgtacaactttagatgagactattagcatgaggtcataatattcttatttctattgacaaattaacttcatttaccatattctgatttcagataatattcttttttctgctctatatttgctagcttttggtcaaatcttatctgaactcaatagaaatcaacaaaataaatcgattctaccacaagcattttattattgatg

SEQ ID NO: 765516 - DNA, 706 bp, Homo sapiens
gaaaattgaaaattctatgttcagagtgattactgggaacatggttaaaacatatcttcaatgttatgaaaagtttttataaatatcaccccacttcaaaaagtattttagtaaaagattgtttatttatagtactcaacttagattcataaaaatttcaatattccaggaaagtcagagacacttaaatgtaaacaaaattccttaaaacttgaatgagataaattcctcttggttaagaattttattattaataaatatagagaaaaatagaaaactagtacttccgccaaaataacagtttttggcatgggagcatcactgaaacaagtgctcttcatcatcattgttaaagtaagaagagcattgcctgctttcytggaagtagctggcctgttttccactgatacaaagtggagaaggcattgaaatagtgaaagaggatgatataaattgaatacttatgtaaaatacagtctataataaaacgtagcatttggtgttgtacaactttagatgagactattagcatgaggtcataatattcttatttctattgacaaattaacttcatttaccatattctgatttcagataatattcttttttctgctctatatttgctagcttttggtcaaatcttatctgaactcaatagaaatcaacaaaataaatcgattctaccacaagcattttattattgatg

SEQ ID NO: 765517 - DNA, 604 bp, Homo sapiens
agaacaatacagaagggggaagcttcatgacaatgggtttggcaatgatttggggaacacaacatcaagagatcaggcaataaaagtaagagcatagccaggcacagtggttcacgtctgtaatcccagcactttgggaggccgaggcaggtggatcacttgaggccaggaatttgagaccagcctgggcaacatgstgaaaccccgtctctactaaaaataaaaaacttagccaggcatggtggtgcgcacctataatcccagctactcagaaggctgaggtagagaatcacttgaagtcgggaggcaaaggttgcagtgagccgagatcacgccactgcactccagcctgggtggcagagtgagactctgtctcaaaataaaaaaaaaaaaataagagtatatacatgacactaaatcagtggattcaaaatatcccatagtcaaggcaaaacatggaacagatatttgtacattcatgtacattgcagtatgactcacaaaagataatacctggaagcaaatgtccctttacaaatgagtagattaaacgaatgcggcacatatatacaacaggatattattcagtcttttgaaatagggt

SEQ ID NO: 765518 - DNA, 621 bp, Homo sapiens
attcacgttattatccctgagtaacaaatgagtcagagaagtcgagaaacttgcccaaggttacacaggtactctgagcctgctcttctaaccattgaacacacggtgtcatccaggaaacacacatgcaatactatttctaaaggtccataaaatcacatatacacatgcaaatatgtgtaaagataaaatgaacttatacagtgtttacctgcagaaaagtcactggttgaaagtgtagaaggtcacatagaagaagccttctctgtttttattgktttgttgttttgtagagataaggtcttgttatattgtctaggctgatctcaatttcctcggctaaagcagtcctcctgcttcagactcccaaagtgctctctgccatatttttaaaagtacttattgggtcaagtgtgctggctcatgcctgtaatcacaacattttgggaggccagggggaaaagattgtttgagttcaggagtttaagacaagcctgggcaacatagtgagacctcatctctactaaaaatagaaaaatatagctaggcacggtggctcacacctgtgatgtcatcactttgtaaggctttttcttccatgattaaaaacaaatcttggta

SEQ ID NO: 765519 - DNA, 660 bp, Homo sapiens
tcctctaaacgttcattttcttggtttcatcttttgaccaaagacatcagatcaatttggccaaccaagccaggctgtctcttacttctacagcccagtagttaccaagtgatgtctaactttatttataaaatgagttttgtatttgctagtgtctcatcgttttcatacctattgccgtaaatcagacccttattatccctattctgggttatgcaataaatgattaccctgcctccaatctctccttttccaattcatcttaaattagctttttaaacacagatttaattatgttatttctctgctcaaagatttttggtgagtccccactgactatagaatagkatccaaatgcttttcacataatcttttacacctgatctcaacctacctttcaggagttcgccaactctgagcaatttcctgaatttaaaatgcaatgtcatattctgccctgtttacattattctctttctcctggcacaataagaatccatcacatttgtatgttgttttccagtttacagtgaaatttcccatgcaccttctgtgaggtaggcagagatatttccccccagacttagagctggaagagtcaaggttctgaatgtgtaggtgacatactgagcaagctaatcttgcttatgattagcaaga

SEQ ID NO: 765520 - DNA, 616 bp, Homo sapiens
ctggttctgtggagcaagttttgagagacccaatctcaatatatcgtatagctcaatttccctgaccaacatggaagaagaggccattaaaatggcatgctttataggaaagccaatgaacaaaaagcagaggtgattctcctccatctttttttttactagaagactttcctaaagtgaaagatatgtatgttccaggcagggtgtagttattttctcctattacacttgtccctattacaattacagttacattccaataacttgtggtagttataataatgtactgttcaagttataccacctcactcttacgttgcaacgttatttgcttaagataaygaatgggtataaagaagaaactagtgcccagtacaatgtctgtggcacacacataaaaagatatctccattgggctgaagcatgtgcttggggaatagaaagatggactcaatagttgataacaaggaatccagccaggtggataaagttattcaaggagtgtgatgacaggcagcaggtaggggcagcagacaatgcttctgaaagttgggctctgtcagggtagttcataaagggagcataagtaagctagacagggcatgatgtacacaag

SEQ ID NO: 765521 - DNA, 616 bp, Homo sapiens
ctggttctgtggagcaagttttgagagacccaatctcaatatatcgtatagctcaatttccctgaccaacatggaagaagaggccattaaaatggcatgctttataggaaagccaatgaacaaaaagcagaggtgattctcctccatctttttttttactagaagactttcctaaagtgaaagatatgtatgttccaggcagggtgtagttattttctcctattacacttgtccctattacaattacagttacattccaataacttgtggtagttataataatgtactgttcaagttataccacctcactcttacgttgcaacgttatttgcttaagataatgaatggrtataaagaagaaactagtgcccagtacaatgtctgtggcacacacataaaaagatatctccattgggctgaagcatgtgcttggggaatagaaagatggactcaatagttgataacaaggaatccagccaggtggataaagttattcaaggagtgtgatgacaggcagcaggtaggggcagcagacaatgcttctgaaagttgggctctgtcagggtagttcataaagggagcataagtaagctagacagggcatgatgtacacaag

SEQ ID NO: 765522 - DNA, 631 bp, Homo sapiens
attgggctgaagcatgtgcttggggaatagaaagatggactcaatagttgataacaaggaatccagccaggtggataaagttattcaaggagtgtgatgacaggcagcaggtaggggcagcagacaatgcttctgaaagttgggctctgtcagggtagttcataaagggagcataagtaagctagacagggcatgatgtacacaagttttttttttttttttgagacggagtctcactctgtcacccaggctggactgcagaggcgccatctcggctcactgcaacctccgccacctgggttcacgccattctcctgcctcagcctcccaagtagctgggactacaggcacccaccagcacacctggctaattttttgtatttttagtagagatggggtttcaccatgttagccaggatggtctcgatctcctgacatcgtgatccgcccgcctcggcctccsaaagttctgggattacaggcgtgagccactgcacccagctgtgtccacaagttttgaagcaagagacctcaagcttagaatcattgatttacttattcattaaacattaattgagtgccttttgtgggacagccattatattaggcagtataaatacaagatgaataa

SEQ ID NO: 765523 - DNA, 444 bp, Homo sapiens
agttctattcatgccaaggctactcaaaggggagggcatgagcctggaggtttccggtcccaccctggggagaccgtgcctgagaaggaagcacacattgaataaagaaagagggagagggagatactgaccttgttaagcaagctgaactctgatttctcatctacatgaggcaatgaattcttgttttgcttaagtgaatttgatttgaatttcttttccatataataagagttctaactgatacatcacatcttctgatttcaagtcctattataaaaatttytaacatttttattggtgtgaaaaatgttcatttttgcaagaagtcataatgcaacagcacatgtttaaccctgtggatttaaatgtaacttttgaagagcaaagtagcttcagtttttttcaacagaacctggcaagtgaagttcacgtctactcaag

SEQ ID NO: 765524 - DNA, 634 bp, Homo sapiens
tcttctttgatcacattggaataaaactagaaaccaacaacaaacacatggaaactatacaaacacatggaaattaatacattactgaatgatcagtgagtgagtcaatgaagaaattaaaaaagaaattaaaaattttttgaaacaaattaaaatgcaaacacaacatcccaaaacctatgggatatagtaaaagcagtactaagaggaaagtttgtagcaataagcaactatacttaaaaagtagaaaaacttcaaataaacaacctaatgatgcatcttaaagaagtagaaargcaagagcaaaccaaaccaaacccaaaattagtagaagaaaacaagtaataaagattggagcagaaataaatgaaattgaaatgaaaaaaatacaaaaggtcaatgatataaaatgttccctttttgaaaaaaaatcaacaaagtcaacaaacatttagccagactaagaaaaaagagaagacccaaataaacaaaataaacattttattaagaaaaaatagccaaataaataaacattttactaagaaaaatgagaaaagacccaaataaataaaatcagttatgaaaaaggagatattacaactgatactgcagaaattcacaggatcattagagg

SEQ ID NO: 765525 - DNA, 627 bp, Homo sapiens
tcagaaattgaacatgtatgcatttagaaataaaactgcatattaaacattgagcaaagtatatattataaaatatttccccaattaagttccattaaattggtaaaatgcaaatcccggaactctgtatcactcctctcaaattaaatgtttgtagtagccmcctagaaatggaaagaaaagcacctgagaagtaggatgtctcagatatcagagttgtgcttagatttaatcaaaaaaacaaatgaacaaaaaattcaaaatgatgcctattcctttctaaagtagaacatttatcaatgttacaagttaatcacttcaggattggattttaatattaatgtcaaaatcttaaattagtatagctatcttttgaaaagaatctccaccaaaggaaaatattaatagaactttgtcctcgtaacaaaaaataattcaatgtgattttaggcaagtttatagatagaaatttctgaagttttaaattattgtgacagaattaagacaagggcatttaaaatgattctcagttggtcattttggctttttgaagaatagctatgacataatatttatcattagggatcaatatggataccagcctttcatgagaaatatgtttgttga

SEQ ID NO: 765526 - DNA, 479 bp, Homo sapiens
ttgtaaagggccagatagtaaatattttaagctttgcggattaaggtctctgtcacaacgactcaattctggttttggagaaaaggaataaaagagatcaaaggatcactttgaagagcttggaagaagcctggagcaaaggaagtgacaatatctcaraagctggaaagagggcacattcaacagtcacctttgacctgcagcctggttttagcagtcacaaaccagaaggtggcagcagagagctacactgctggaatagattcctgtactaggacaaaagatagctgaaaggaggacaaacagtcaatactgagtccggaaacccacattcaaagagaaaaagggagcaacactacataaacagatctaacatcagaatcaaagaaatggcttcagtttcatttccagtgacagagaagcactaagagcaaagttagagaatttatgttatgtaaggtttgagatcaggaaaggaa

SEQ ID NO: 765527 - DNA, 548 bp, Homo sapiens
gtcacagatcagaaaagcagagtttttctctaacaaggatttgaataactattgtagtgaaaataattttagtaccttaacacttgactttgattccacctttgttcaaagcttgaagtgttttgatcctcaggattcagtggtaaaaaaattatctctgaatgaagatggtaaatattcatcttttaatgtttgtccttccaatagagcaataaacatatctacttttagaatacctgaactaaaaraaaatctacattattaaagtttggatggaatcatccatctttccctttctgttttaactatgtttgtttccagaacaaaacagaacgtcatgatgggaatacttaaatataggggaatatttccctatatctaaggggaaggctgtttattatgataggttttctttgttaaaccaaaaaaaaaaaaaggaaaattaatcattatagcacagaaagcatcaggatttacaaactttttcttctaataggatggaaacaagaagctggtgatggtaaagaagatgtaatatacagcatcaa

SEQ ID NO: 765528 - DNA, 548 bp, Homo sapiens
gtcacagatcagaaaagcagagtttttctctaacaaggatttgaataactattgtagtgaaaataattttagtaccttaacacttgactttgattccacctttgttcaaagcttgaagtgttttgatcctcaggattcagtggtaaaaaaattatctctgaatgaagatggtaaatattcatcttttaatgtttgtccttccaatagagcaataaacatatctacttttagaatacctgaactaaaagaaaatctacattattaaagtttggatggaatcatccatctttccctttctgttttaactatgtttgtttccagaacaaaacagaacgtcatgatgggaatacttaratataggggaatatttccctatatctaaggggaaggctgtttattatgataggttttctttgttaaaccaaaaaaaaaaaaaggaaaattaatcattatagcacagaaagcatcaggatttacaaactttttcttctaataggatggaaacaagaagctggtgatggtaaagaagatgtaatatacagcatcaa

SEQ ID NO: 765529 - DNA, 556 bp, Homo sapiens
atagctacaagagaattttattgagccttaaaaagaaggcaatccgctcacatgctataatatggataagccttgaagacattatgctaagtgaaataagccagttacaaaagacaagtactgtatgaatccacttatgcaaagtccctaaagttgtcaaattcatagagtcagtaggataatggttaccaggggatggggtaaggaggaaaagggaaattaacaggtacagagtttcaagatctgttttgcaacaatgtaaataaacttacattgaactgtgcacttgaagatgttcaagatgatamattttatgttacatattttatcacggtaaaaaataacgtgattcttttccatggtttctcaattttaatgtccttcatccaaaactaagcctactaattttccagctcatctctaaatgtatggtaacttcaccatatggaaggataatagtagttgttacactcctctgcacccccattcttctctcagtaccctacagcaggcttgcccatcatctgcaagactgaatcagttaccattctctttc

SEQ ID NO: 765530 - DNA, 610 bp, Homo sapiens
attttcctcttgcaaatgagaaaattgagacttaaggttaagtaactttccaagatcaatagctagtcagagattgatcccatgtagagtctctatgactccaaagcctgaactctatccactattccatcccaatggaggtaggctaaggggaaaagcatattagcacttattctgtaaataggggctttacttttagatgggatactaaaaaagaactaacagtagagcatagcatttgctaccaacattcgcttggttcttagttcacaatagagcaccagttattacargttttctgggatcgcacagtcaacacaatgcaaatgtggctttttgaaaatgacacaaatggaatcaataattggtcctattgactgaccttatccagagatgcagaatttgtaagtgacatagctttattcagacagatttcacccacaaaaatatcagcagagaacaaaagttcacatggggattgaaagaaacattccttacctcctgaagcatgttcttttttatgttcttctattgtttctggttcctctttggcttcctaaaatcataagattttaccactgtacatagagtggaaatacttcataaccag

SEQ ID NO: 765531 - DNA, 610 bp, Homo sapiens
attttcctcttgcaaatgagaaaattgagacttaaggttaagtaactttccaagatcaatagctagtcagagattgatcccatgtagagtctctatgactccaaagcctgaactctatccactattccatcccaatggaggtaggctaaggggaaaagcatattagcacttattctgtaaataggggctttacttttagatgggatactaaaaaagaactaacagtagagcatagcatttgctaccaacattcgcttggttcttagttcacaatagagcaccagttattacaagttttctgggatcgcacagtcaacacaatgcaaatgtggctttttgaaaatgacacaaatggaatcaataatyggtcctattgactgaccttatccagagatgcagaatttgtaagtgacatagctttattcagacagatttcacccacaaaaatatcagcagagaacaaaagttcacatggggattgaaagaaacattccttacctcctgaagcatgttcttttttatgttcttctattgtttctggttcctctttggcttcctaaaatcataagattttaccactgtacatagagtggaaatacttcataaccag

SEQ ID NO: 765532 - DNA, 607 bp, Homo sapiens
tttgctaccaacattcgcttggttcttagttcacaatagagcaccagttattacaagttttctgggatcgcacagtcaacacaatgcaaatgtggctttttgaaaatgacacaaatggaatcaataattggtcctattgactgaccttatccagagatgcagaatttgtaagtgacatagctttattcagacagatttcacccacaaaaatatcagcagagaacaaaagttcacatggggattgaaagaaacattccttacctcctgaagcatgttcttttttatgttcttctattgtttctggttcctctttggcttcctaaaatcataagattttaccactgtacatagagtggaaatacttcataaccagtcattttcctacttcstgtcctctcctaagcctactctgacaaaaacactctataacagcagtccccaacctttttggtaccagggaccagtttcctggaagacagtttttccacgggggtgaggtgagggggaaacagtttctgaaggaacctgttccacctcagatcatcaggcgttattctcctaaggaacatgcaatctagatggctcgcttgcacagttcacaataggg

SEQ ID NO: 765533 - DNA, 491 bp, Homo sapiens
tggaaatgtcaaataggaatttggatatacgtctggattcaagggagaggttttgggtcgaagataaaaatctgggagtcctgagcctacaggtggcacttcgagctgcgagagctcttgagatcacccagggtgtgaaggcagacagagaagggaagtccagggctgagccctactgcacatcagcactcaccagtctgaatgatgacatgaggargaactagcaagagactgaaaaggaacagcagaaaggtaggtggaaaatcaggtgagtgcagtgtcctggaagccaagtggacaaagcattttacggagaagaaagtaatgggctgctgataggacaagtaaaatgaggactatgaaacgatcttggattagtagtgaaggaggaggtaattggtgatcttgatgaaagcaatttcattataacttgttcaaaagtgaatgggggagagaaatgagaaactgccaagatggatactgctttttaa

SEQ ID NO: 765534 - DNA, 510 bp, Homo sapiens
ttatgggaattatcatcaggagggggagactgaggatgcagaagagagagatgagaatggcagaacctgtccttgagcatgagtcaggggtgactctaagtgcacaggtggtgggacttcaccagcagcagagacaggtgattcctaagaagaagggaaggttggagtgtgggcacaggtgcagatgggcagttataggggagggaggtggggatgatttcttctgattgcttcaactatctcagcaaagctgtagggaggaagtgttaaataagggagaggagaaagtataaaataatctaggggagaatgtgagagagaagggattagggaaacactgtatgactgctgggcagcatgraagactgcatgaaaattcatggtcccaaatttaataggagaccagctagcacagttttatgtcttttaactgcatggctgcaggcacggagcaggtggggagttgcagttaactaggggtgtgatctatccaagcaagtatgatgtgag

SEQ ID NO: 765535 - DNA, 655 bp, Homo sapiens
aaaacaaagctctagaacaatgcttaatgtggataatcctttggaatgtgttctaacagaatgctaattgtgataatgaaataatacataacatttattgggagattactgtgggcactactactaagctctttatgtgtataataccatatgcaccccagaacaatttatgaggtgagtattgtgcccattttatggagggggcaactgaggcagagagagataagtgacttgcctgaggtcactcagttaggcagataagtcaggtgtcaaacccaggcagccatcctccaggtgtggcatttgtaactgctgggttctgctgctgcctgctggtggaaatctgtacytgcattatactggagaagcccttcctagagttccagactgattttcctggcactatccgtgtccctcttggtgagctaatcagcaaaggaaatccaagtctatgctagaaacaagctgcagggtctctgattcttccagaagctgatcccagcttcagtaaatggcaaagactggggtcccagagtactggcccctgtcagtcaccacaaagtctgagtaaagagaggctccagggctaccatactggagaaaaacttgtgtaaatggtcagtttaggatcctctaaggtggaacctttaaagga

SEQ ID NO: 765536 - DNA, 493 bp, Homo sapiens
actcaagatacacacttttaaaacctcaaatccccagaaaaatgataatcctttcttatacctaagatagtagtgttatttttataaatgcattcaaatacggcatcatactttgtctgactaactcaacatagatgctgatwcaatgtttgctctatcggataaaactatattaaaatcacgtgagaaattttcatgtataccatggacctaggaaatagaagccaaaataagtgttggttggagacagtgcttggtttgtatgcagccaaatcatagctaagtgtcaggcttgttggaagagttgacacgcaagacagctggagtcagtttatttacctgtaggataaaacgcttacacaaagagatggccagaagctgatgatgccaaatctaatttaaaaatgaaaacacttacataaagagatgaccagaagctgatgatgccaaaagtaatttaaaaatgtgtggtcacctgccccattgcattttt

SEQ ID NO: 765537 - DNA, 606 bp, Homo sapiens
ttcatctattggttcaaaaagaccaagttcacattgatgtcctcacaacacttcacatttccatgtgacacttctctatgccttaccatagcgagcatggtaccatgcccaacctttcctgtccctgcccttcccaccgcaaacactaaaactaatacctctctgagcttcagagactcagtgagcacacagtactgctagtcttcagtaggaaacttgggattgttccacccacaaatccctgtgctgcctttgtgatatgtggtctgatttagagcaggagcagacacaacttaaggaatgagagatcagacaaagggaccaaaatgarattgtgaccaaagttaaagcattgactctatctatgtgactgtgaatgaaaatggatccctttaaagtcctgtttcaggactgaacattacttaaagcttccaaagagaagtgttgaaattcatctttatacattatcagccagggaatacttgattgtctcttttgtgttcatttacttgtatggcaaaataattcaagaaaaaagagcaaaggagtttagattaaatactgggtttttttttggctgatggtcgatttttatcctgtcttttt

SEQ ID NO: 765538 - DNA, 670 bp, Homo sapiens
aaatggatccctttaaagtcctgtttcaggactgaacattacttaaagcttccaaagagaagtgttgaaattcatctttatacattatcagccagggaatacttgattgtctcttttgtgttcatttacttgtatggcaaaataattcaagaaaaaagagcaaaggagtttagattaaatactgggtttttttttggctgatggtcgatttttatcctgtctttttgtatatttgcttttgaatttgatgcaagagtatgattctagtrtgtaaaataagaaaaagaaatgagaacaccaactactacaaatatattctaaagaatataaatttttctctgaaactataaatgaaaaattaaaacaaaacacctttgactgatttgaggaatacaaaagactttgctattctgatttgggggatttatttggtaaaaggttttattttttgatgtcactatcaaaaattgaagccatattattattttgacagtcagaggtatctaggcattcccaaaataaaatgctagattgctaatttcacttaagaccagcatatttgatgaccatttggattttgaaagtatattaccaattattattttgacacagttttaaatttcaagatagaggtttaaaagttaagaaagaacagctatttcagcttatg

SEQ ID NO: 765539 - DNA, 726 bp, Homo sapiens
aatatattctaaagaatataaatttttctctgaaactataaatgaaaaattaaaacaaaacacctttgactgatttgaggaatacaaaagactttgctattctgatttgggggatttatttggtaaaaggttttattttttgatgtcactatcaaaaattgaagccatattattattttgacagtcagaggtatctaggcattcccaaaataaaatgctagattgctaatttcacttaagaccagcatatttgatgaccatttggattttgaaagtatattaccaattattattttgacacagttttaaatttcaagatagaggtttaaaagttaagaaagaacagctatttcagcttatgacacaatcacagaaattgaacttgctttcccactaaaaacaactagaaaactgacaaaatatgtaaaacagctattttcaggcattggacagctggaagtacaggactgcattgctttaaaaaagggaaacaaaagaggtgaactatataatcactgcactttcttactggaaacacctttcttaatttcaragcagataaggggagcccaaaccaagcatgacagtctcacctagttgatggaacagcaattagagttcagaaaggctgaagcagctgaacttgcaagaaagagtaaatagctctagaaatctgcatggatccccttgatagcttggttgaacactaagcaatatatgcatgag

SEQ ID NO: 765540 - DNA, 650 bp, Homo sapiens
catagcgctcccaggcttattaggaagaggaaattcccacttaataaattttggtcagactagttgatctcaaaaccctgtctcctgataagatgttatcaatgacaatggtgcccaaaacttcattagcaattttaatttcccctgtggtcctgtaatctcaccctgcctccacttgccttgtgatactctattaccctgttargtacttgatgtctgtcacccacacctattcgtatactccttccccttttgaaagtccctaataaaaacttgctggtttttgtggcctgtggggcatcacggatcctaccaacgtgtgatgtctcccccggactcccagctttaaaatttctctcttttgtactctctccctttatttctcaagccagccgacacttaggaaaatagaaaagaacctacatgattatcggggcaggtctcccgatagcaaacaatatttacattacttgtaatggcaaaaatcgcaatttcttttgcacaaacctaatataaagtgttgtgctttccagctctagttcctctcaaatgaatgaaacattggtgggattgttaatttaaggcatcagtttgattgaggtgcccaggtatttagtcaaacattatttctgggtgagtctgtgcaggca

SEQ ID NO: 765541 - DNA, 650 bp, Homo sapiens
catagcgctcccaggcttattaggaagaggaaattcccacttaataaattttggtcagactagttgatctcaaaaccctgtctcctgataagatgttatcaatgacaatggtgcccaaaacttcattagcaattttaatttcccctgtggtcctgtaatctcaccctgcctccacttgccttgtgatactctattaccctgttaggtacttgatgtctgtcacccacacctattcgtatactccttccccttttgaaagtccctaataaaaacttgctggtttttgtggcctgtggggcatcacggatcctaccaacgtgtgatgtctcccccggactcccagctttaaaatttctctcttttgtactctctccctttatttctcaagccagccgacacttaggaaaatagaaaagaacctacrtgattatcggggcaggtctcccgatagcaaacaatatttacattacttgtaatggcaaaaatcgcaatttcttttgcacaaacctaatataaagtgttgtgctttccagctctagttcctctcaaatgaatgaaacattggtgggattgttaatttaaggcatcagtttgattgaggtgcccaggtatttagtcaaacattatttctgggtgagtctgtgcaggca

SEQ ID NO: 765542 - DNA, 564 bp, Homo sapiens
tgccccagggtcccaaatgccccaggatcccaaaaagattgccacctctgacctttgaaaatatgagcatgtgagcttgaggcagcaggagaagaggaagtgggctttgactgatttacaattcagggaactaactcttgcccatagcttctagtgtggttctttccaagagccagactaccacttttgctcctctctttttctcatttcaggaccctcttccaatccatctataccctgtccggtttatgttagtgacaaaacaagactcccccatccttcaaggaggtggagcatcagaatcttttcaraataggggtggagaggaaaggattcagttgtggtgccctcatttgtgagactcgagcccttgttcaaaatcatcttctcagataaatccccaccagatctgcccagaaagtttatcagaccctccatggcccatgtcattttggttccaaatgtttcaggtgacttttgaattgcaactgaaaaagttattctgatttttgacattatagagttcattatcgacagctggctataaattactaaatttataat

SEQ ID NO: 765543 - DNA, 575 bp, Homo sapiens
aaatctttcagggaaaaaaaatgagcggaattccctctaagagttaactctttctcgctctgcctttttagagcaaaggaagttccagtgggctgggagtaagggacagattgtggaccctgacgaaaggcgtgctggagaaagctgggagcccgccgttcgcacacaaagctgcggagttcccaagcggcgggcgttctcgccccggggtaccgcagcgcgccaggaagcgccctrggctctctggctgtccagccgctctgctggtggccgggagaagttagtcacccggagcccgaatccggcgagcgtcaaagcatcaagaggctggagaatggggagggaggaaaccgggtgccgggacggaggggaggaagcgaagggaacgcggtggttaggggacgcacgggaagctgaaaagctctggctggtggatggagttgcacggtctgcgaggccagagcgcacgggtgtgcaaaggggaaaaacttgcggcaggaacttcccaccgagggcgagaaaagcaggcaagaaggaggcagggagagacttgaaacgtctcaataactttaacc

SEQ ID NO: 765544 - DNA, 557 bp, Homo sapiens
ccaattattcttttactttgaaaaaaatagactgtaaatatttttacaagattagatattaacagctaggatccacaaagcacataaagtttatacttttacacctaagttacaattaaaaatatataaacttacattttaaatttatatttatgcatgtttacatccctctactcaagcatgcagtgaatatgggtaacataaaatatgaaaagagaaaaatagaaaaacgcattctctaaagcctatctctttagatcagaaacagaaactcaaagttttgagatgagaggctttytggactctgcgataagcaggcaatggcatttaagtgtttggcccctgtgtgctaatagaggcaaaaaaaaaaaaataataaaaaataaaaaaaaccccaactatatcacaataaatggagacctaaagtctgtctcattagttaaagctcaaacttaaatcttactactgatccctagattatggtagcaggcttaggaaaatggcaactaactgttacctgcaacaatgttttgtagcaagctatggtccgggtcagt

SEQ ID NO: 765545 - DNA, 557 bp, Homo sapiens
ccaattattcttttactttgaaaaaaatagactgtaaatatttttacaagattagatattaacagctaggatccacaaagcacataaagtttatacttttacacctaagttacaattaaaaatatataaacttacattttaaatttatatttatgcatgtttacatccctctactcaagcatgcagtgaatatgggtaacataaaatatgaaaagagaaaaatagaaaaacgcattctctaaagcctatctctttagatcagaaacagaaactcaaagttttgagatgagaggctttttggactctgcgataagcaggcaatggcatytaagtgtttggcccctgtgtgctaatagaggcaaaaaaaaaaaaataataaaaaataaaaaaaaccccaactatatcacaataaatggagacctaaagtctgtctcattagttaaagctcaaacttaaatcttactactgatccctagattatggtagcaggcttaggaaaatggcaactaactgttacctgcaacaatgttttgtagcaagctatggtccgggtcagt

SEQ ID NO: 765546 - DNA, 585 bp, Homo sapiens
atgagacccacagagccacacctgcacctgagcgatttgcagggaggacagctgtaccagccacaaccctttcagcagacaaaccgataacatttccaaaggtattattttattttgtcctgctattttgagagctcaaggaaraataaccacttccaacaacaagattgcatatattttaattgcagtcatctctcccttagccacatgtggtttaactgtgttgtggcttacttgtggcaaacatttcatttgagtttgctttccccaccctctaacacaggcccagctggctgatcagtataccaggggggttgtgcttctggaacataattctaatattgacctgagcaaagtatcgagagaaaattgtgctaaacaaaacatcacagtgcagtaaaaagttcaatataaattgtccttccataaggatggacagtgcagaactcatgagcaagtattgttgatctcttttttttaaagaaaaacttcatttgtattgtgatacctaaaatccatttgaaaagtgcattaaagtgtataaaatataaatgtatagtttaattgttataaagtaactttata

SEQ ID NO: 765547 - DNA, 646 bp, Homo sapiens; identical to SEQ ID NO: 752202

SEQ ID NO: 765548 - DNA, 617 bp, Homo sapiens
atttagtgagatgacaaagaatgaaagaacatgcaaaaacaaaatactatgctatggtcttccacacttttttatatactaaggacaaagcacttaatttagtgggggtaaacaaaggcagtctttgaaagttctcatcaagattccaatttagttcccatggcattttgaacaaccggggattttgttcaacaactcaccaggtactgtgatagttttttgcccagttctctcattccaatagtcagatgagtcctgtaatcgaatctttttccaaattcaaagctagaaaactcatgatgagcagttgtgttaagggacactaccagcagagcatcaagtcctatgtggtaaaaaccmcaatataaataaagcaaaggggttgtacatgaaaaagaagaagacataataattctactcagtgaacatgatttaaagaattgaaaaggggaaaaaaacaaacataagaggaaggagtactcctgacatatgaagaaactaacagagaatttgcctgcattttctgaatatgcaccagctctggtccctgaccgtcgcatgaaatcccctgataaaaagtattcaagagaaacgatttacaaatctacagaaaaaca

SEQ ID NO: 765549 - DNA, 635 bp, Homo sapiens
cagggtgtgaggaaaatgaactggagaacaatgacccatttctgggtctgttcactgttcagttccagctgagagtagctatgtggaaaatggggcctagtgttgtcagatcttctgatttttcaaagaggagcctgatgtcaacatttttaatgtagaaccttcagtgtgaatgctgtcaactaatttagcaactcatcaacgctggatgcgacaaacaaactgcaactgcaagctgccatttggttaytctgatcctgcccaggttgttcattttacagatggggaaacagtcgtgtgtggaggttgttgctgctgaaccagagttagaactctagctttctgattccaggccctgggctctttccaccactgtaatctgcctccacttgagcaccgcaaatgggacatataagatgtggagagtttggaaagactatcacattttgtgaaagaagtgatttcaatcataataactctagaaacgtaagaactctaaggaatttctgcatgttgtgcaaattccacaaactgttatcatttgctactgcttccttacatgctgtcctctcaactcctagcctcaaatttacagaagctgagtcccctgtggccactctcagctggagctgaat

SEQ ID NO: 765550 - DNA, 641 bp, Homo sapiens; identical to SEQ ID NO: 752201

SEQ ID NO: 765551 - DNA, 539 bp, Homo sapiens
aagtgactccagtttttcccattgtgcaacccgtgatttctggaccagagaaataatgggcaagtagccagtgctctttgctgtctttctggagctttttcaggaacatctgtaacttaagaaaaagtgtggtgccttatgtgtctgtatgagtttttgaagcccatgaaacctcacaagctggtcattaattatattagaagataagggcaacccttaagctaagccatacaatgtctacaatgacagtgctggggcyctgtgagccttgtctattcatagttcaagcctttgggagaaagtcagctaccattagcctgggaagattcatgttgacttctgaaatgtctccaattttaacccagctagaccttcatactttagacccacaagctactaacgttggcttttatgtggtattccaaagtccaatcttctccttcattcatctcaacccattcaactcctgccaattcattcttcattcttctgacagagggatccttctaaaccacatatctgattaattgctctactga

SEQ ID NO: 765552 - DNA, 705 bp, Homo sapiens
gatattgttcaaactgctagcctggatcctctcaaatcaaatacagtaacatcacctgatattgttggtaactccaaagtttttcagtccactaaagctcttcccttactgttggtggtgagtcagttgttgttattgtttttaattttctatttccatgtttcccaagagtatctagaaatggctcccaaggattcagattttgatgttgtgatttgtctatagtattattgatttgtgtgtaattatgaatagaagcctcttttattctcaaaaaaagtcttgtttagatgatgagctatttgatgactctacttctgaggattcttcttgttttattttatgatgtaagtgactaatttggtcccaaagactctttattccattgctaatgccacataggggaaactgagactatagatagttttcttaacagtcattttttggcatcatctatatattttctataggataaagataaaggtaaaaggacataaagagkagttaaaagaaataagtaaggacattgacaactggcagataagccaaagcacattttgaggaatctaaacaacccattattctggcatttacttctaaattgctccaacttaatctgaaggatgagatgtaaaaccaaagacagatcttggcattcataacatatattctcttgtcaacactttagaggtgcatattttgtgt

SEQ ID NO: 765553 - DNA, 463 bp, Homo sapiens
tagagaaatttgttttaaaggaatcattgtctatcaaataagtagaatttagggttgtatagctgttcagtatattctgaaataaactaagtcaaattatgaataaaattggcccactgacattggcagatatttctgcatttcacttgtagcaagacaaccattggtacatggtaaaaagtaaggaaaaagwaaatgttattagcaatgctaggtcaatgcaaaatggcttgtaccaggtcccagttaattgacataatgtagatttgaatgaaaactctaaaaacaaatttttaatttgacaattattctttttctttcttcattcacttttactatagcaaggttaaaatctcagaaatctcaaaagtcactactaaataatttatacgtgtaacccaaaaccacctgtacctcaaaaactactgaatttttttaattggctagctagaaaagtagctaa

SEQ ID NO: 765554 - DNA, 508 bp, Homo sapiens
aagcagcaatcaatttaattttatgtgtcaattccattaaaaaagtgaacaaaacaaaaataaaaaacatgtacaccgacaactatctgaactttgataagataatgaagtcgatgacatcttaaatctctttatccaaaatgatttgtaaaacttgataggaatacttacaaatagaaagaatattctaatgtttctattgcttacttttaaaatgtttggattgcctgtaagttattaatttctctcaaatttaccttccttgaattactcwcttctactacaaactaagtaatatagtcaaaactgacctcattttttccatcaccttcaccttacctaaaatgctagaacctatagaatcattctagatggcttcctttcaatcatttccttcatttctattctctcaacaaatgctgtatgctctggtcatttactgtctatcatgtgcatccctacctctttactttcactgcctattcctaaattcagaattcagactatg

SEQ ID NO: 765555 - DNA, 659 bp, Homo sapiens
cagatgggcaatctcacaaggtttgaacaaaataaacacataaaacttttgcaaaaagtacaaaaataaatatctttgcatttcaagggtttttgaaaatcatcaaataagtgtagacttcttatgccacttgccctaagaaacaaaactagagctctacttgatacaacaactggaatatagcaaatgagacagggtgagtgaggattgcattttttaaatgtattcacatcaatttttctatataattttaaatcaagcattttgatccagttataacatgaaacctagcttgcatatatagtcatgcaaaaaatacaaccataacattgccttataagtgtaatgttttkttccaattgtgagaatagcaatattcagaagtatttgtatattaaaatagcatggtgcttatatattaatgaatattttaacagtttatggagagtataatgaaaaaattctttaccataagctttagaaatactgcatatagtaacggttttattttttaaatgttatttacatataaaataatgaaattcggacatctttttttgctgtgagaattactattcaatatcaaacatacttcatgctaaaatctggactgaagctagataaaatgaataaatatatacttaaagttatgctaatag

SEQ ID NO: 765556 - DNA, 588 bp, Homo sapiens
atcttcaaatattcattttggaatcaacaagtaatagctaactttctgatttagcaaggccatcatatcctaagtttcctattaatgtatttctgctgctggttcattaattttgttaaattgtagcatttattagctggcaccaaatgtttatgattgaaaatgctttcatctagtagtttaattatccctgtgaattgggaaaaatattaaacattcaattttttcagcaaatatatttcgttcragtcaaggaaaccattaaatcatggctttaaatacacatgactaatccaaggagatatgaagcagtggcataaagggtcccacctagatgagatggaaacaatatgaaactacagcctaagaatcctactggcctatgttaagaatgccaacttcaaggcttagattcagagatacttggaatcccacctctacctgtttataggcaacatgtctttagggaaacgatgtaaatcatgaccttcagtttttcccataaataaaatgaaaatattattcacatctacaacattgagttgtcacaatagttaaataagataatgcatataaattacttaggaa

SEQ ID NO: 765557 - DNA, 642 bp, Homo sapiens
ataattttcagattatttatttgatatcctctctaatcaaataatataatttgtagtgtgatgacaacagttgacttacagttcctaacaccttgaacttcgcaagtcattctgaccactccccaatatggaaaatttatttattgattaagaggaagtatgcagggcacaagatgccaaaagtgtcatacaacttgctggagttatgttttattattaagaatgaaattctatagttacagaaatatttttaatagacatacgttaatattttcattaaaatataaagtataaacatggctgtagtagttcacaaacactattgacaaatccttcctaagttaacccakcaggatatcatgtcttcctctggaaaatgcacagaatcacattctgagtaaagagggatgtaacacagtgaaagaatatgtgttgaagtcagataggtctaggttcaaatcttcataccattatttaacagcttggatagttactcaacttctagtcctatttctttgtccgtaaatggagagagaaatactatatttcacgttgttgtgagaacagggacacagtgtacattgtaaagccagtgttacatacaagttggccatctttataatgttatcatcatgatcatca

SEQ ID NO: 765558 - DNA, 642 bp, Homo sapiens
ataattttcagattatttatttgatatcctctctaatcaaataatataatttgtagtgtgatgacaacagttgacttacagttcctaacaccttgaacttcgcaagtcattctgaccactccccaatatggaaaatttatttattgattaagaggaagtatgcagggcacaagatgccaaaagtgtcatacaacttgctggagttatgttttattattaagaatgaaattctatagttacagaaatatttttaatagacatacgttaatattttcattaaaatataaagtataaacatggctgtagtagttcacaaacactattgacaaatccttcctaagttaacccatcaggatatcatgtcttcctctggaaaatgcacagaatcacattctgagtaaagagggatgtaacacagtgaaagaatatgtgttgaagtcagataggtctaggttcaaatcttcataccattatttaacagcttggatagttactcaacttctagtcctatttctttgtccrtaaatggagagagaaatactatatttcacgttgttgtgagaacagggacacagtgtacattgtaaagccagtgttacatacaagttggccatctttataatgttatcatcatgatcatca

SEQ ID NO: 765559 - DNA, 620 bp, Homo sapiens
catgttgttcagacaatgaattgctcaaaagatttaaaaggttataaaggcaaatatctttctctgtacattaagggttagatttggtgaccatatataaatgcacatgaaacccctgtaacaacacacaagcagatgctagaaaatgctcacacttatgttaaagagcaggaagatttgattgtaatatttttgaacttagaatatatttaggtgtagatcccagttttgaacttgtaaatatgacaatcaatggcatcttttctaagtagtaattttgtctttctctatttttgtgtctggcaataattttccccttgctttttatagtttctaaaaatawatcttgagattttcaaaatacatgaaagcaaattcccagccagtttttcacttgagcatatttgcaatggtgttataattctaaaaataatatttatgttatgtttaatgtatcctgatttgaaatttgtacaagaggttttaaaactttgtgagttgttagcatatatgattatataaattttaaaagctgaagccaatgctaaataaatgtcagtgtagtcgttaggaaaaaatgtgataatttacatcagctaacaagtctaaacattgtattt

SEQ ID NO: 765560 - DNA, 659 bp, Homo sapiens
agtcttagagcctatctattaagacagttctcaaattttcaaactgctgcaaggttattttttataacttacattttgctacttatggtaaatattaaaatctgacattgcctttcagtataatgcttaagttagtatgttctaaactgggagaaaaataattcagtggacataytatatttctagaaattgggcaagctcaaaactctctattccctgacttaaaaacattgtccaatcttgattcgtagggctggagttcttccatgactcattgcagggtgtgtcgccacagcacgtgtggttcaagggagcagaatgagtcagatgtgggaaaacaagatcagtacaagggagtaatgtctaacaccagttgcaaaaggtgagtataaggctatcaacagtccattaagtatgtgagaaggaatcaagttgatcatattagagagtataaaagagtaaggaaacacaaagtcttggccatgaacgtggtaaggaggtcaagattattttcaatgggttctaattttgaggtccatgtcggtaagatcataggcaggtttgggatagagatcttcaaaacgctacataaagccttaaattgtatattgataagtgactattcttttaaaatgtttattttgctattttcactttgt

SEQ ID NO: 765561 - DNA, 645 bp, Homo sapiens
attccacctcccactcaccgtccattcctcctttcctctagcatcatttcctttggtgtgcaaaggtctttccaaatcatctgtatgaagcacacacactccatcaaactcttcagcagctgctccgtgtctatttctcttcacarcaaaacttttttgaaaaggtgtctgtactgtccacatttccccctcctattgctctttcctggaacactttccgctctaggctttggtgactttcaggtctcatccccacttcactggctcctcggtcttgctcttctttgtaagttcttccttctttgctgaaactccaaatattgaagcacctcagggctcagtctggggttcttctctttcctatctatgttcatttcccttagtaatctacatgcaaacaactcccagatctatatcttcagctttaatctcttatctgagctcaagttgcaaatatccagtggcctgcttgatatctttgcacggatgcctaacaggtatctcaaacttgatgtggccagagcaaaactcttgatcccagaatactccagtttctaccacacaggcacatgtgcacgagcatgtgcacacacatacacaggtgtgcatacccacgcattttcatatacacatagaaaatcccaa

SEQ ID NO: 765562 - DNA, 645 bp, Homo sapiens
attccacctcccactcaccgtccattcctcctttcctctagcatcatttcctttggtgtgcaaaggtctttccaaatcatctgtatgaagcacacacactccatcaaactcttcagcagctgctccgtgtctatttctcttcacagcaaaacttttttgaaaaggtgtctgtactgtccacatttccccctcytattgctctttcctggaacactttccgctctaggctttggtgactttcaggtctcatccccacttcactggctcctcggtcttgctcttctttgtaagttcttccttctttgctgaaactccaaatattgaagcacctcagggctcagtctggggttcttctctttcctatctatgttcatttcccttagtaatctacatgcaaacaactcccagatctatatcttcagctttaatctcttatctgagctcaagttgcaaatatccagtggcctgcttgatatctttgcacggatgcctaacaggtatctcaaacttgatgtggccagagcaaaactcttgatcccagaatactccagtttctaccacacaggcacatgtgcacgagcatgtgcacacacatacacaggtgtgcatacccacgcattttcatatacacatagaaaatcccaa

SEQ ID NO: 765563 - DNA, 538 bp, Homo sapiens
aaaatggcaggccattaaaaactatgctcacgcctgtaatcccagcactttcggaagctgaggtgagcagatcccttgagatcaagagtttgagaccagcctgaccaacatggccaggtgtggtggcacatgcctgtagtcccagctactcaggaggctgaggcacgagaatcacttgaacccgggatgcggagcttgcagcgagccacagtcacaccactgcactccagtytgggtcacagagcgagactccgtctcaaaaaaataaacccccaaaaactagactttcatgcatccattggggtagttctggacatcttcagcactgagggagtggctcttcctgcttcaagggtccatagtatcccacatcaggattgggacacgtagctgcccaggacaatctattggtctgagaaggaccagctgatgacaaccacaccctaggacagccagtgatggatggggaagagtttgtgttttccctgtgttcatgtgggattcagaccaccctcctttaaaaaagttttaattttta

SEQ ID NO: 765564 - DNA, 538 bp, Homo sapiens
aaaatggcaggccattaaaaactatgctcacgcctgtaatcccagcactttcggaagctgaggtgagcagatcccttgagatcaagagtttgagaccagcctgaccaacatggccaggtgtggtggcacatgcctgtagtcccagctactcaggaggctgaggcacgagaatcacttgaacccgggatgcggagcttgcagcgagccacagtcacaccactgcactccagtttgggtcacagagcgagactccgtctcaaaaaaataaacccccaaaaactagactttcatgyatccattggggtagttctggacatcttcagcactgagggagtggctcttcctgcttcaagggtccatagtatcccacatcaggattgggacacgtagctgcccaggacaatctattggtctgagaaggaccagctgatgacaaccacaccctaggacagccagtgatggatggggaagagtttgtgttttccctgtgttcatgtgggattcagaccaccctcctttaaaaaagttttaattttta

SEQ ID NO: 765565 - DNA, 548 bp, Homo sapiens
tgtatttttagtagagacggggtttcgtcctgttggccaggctggtctcaaactcctgacctcggatgatccacccacctcagcctcctaaagtgctaggattacaggtgtgagccaccgtgcctggccagtgattaagtaaattaagtgattcagaaaagctctaaaatgcccaaggatcgtgaacacagggtgctagtcttgaggctgctatttgccctttgctggctcagcagagaggcaagacatagtcccagcctgcatgagcttatgtctgggcagcaaggcatagacacatgccacaccgacctaagatgacatgtaatcaggaaataaatacatgtttggggcatagcacctcagtcatatggatgataaaaaggarcaggtagaatccaaggagactcaatagggaaggtgggtctccaccgactgtgaagaaccgataagacatgggcaaattgtcggcccagtctttcttggaacactaccatcccacaaggaagactgagagttttcaccactaaatagaataaaagaagttccaa

SEQ ID NO: 765566 - DNA, 520 bp, Homo sapiens
ccaacctgctggtgccttgatcttggacttcccaaccttcagaactgtgggcagtaaatgtttgttgtttaagccacacagtctaaggtgcttttgttattgcagcctgaacgaactgcaagacaattagcatccaagactggatccctcctcataccctggagatgaaggagawgagtgcctgtgggcagagaagagggccactctgaaaccactcacctcccaccacagggtctgccgctgcacttccacacatcacccacaagccaccatgccagcctaccaccaagccggactctgcaggggcccagccagggccacaaatccacggcttttcctaaggcacagagaagctgagaaacctagtaagagcctctggggtccccacttttagtaaattacaaggaggtgttcagcctgccctgaacctcataaaagatggatggtgtagttatataacatccatggctttttacgaacttcacctttcctttaaaaagctgctaacttcaaagaaaaa

SEQ ID NO: 765567 - DNA, 520 bp, Homo sapiens
ccaacctgctggtgccttgatcttggacttcccaaccttcagaactgtgggcagtaaatgtttgttgtttaagccacacagtctaaggtgcttttgttattgcagcctgaacgaactgcaagacaattagcatccaagactggatccctcctcataccctggagatgaaggagaagagtgcctgtgggcagagaagagggccactctgaaaccactcacctcccaccacagggtctgccgctgcacttccacacatcacccacaagccaccatgccagcctaccaccaagccggactctgcaggggcccagccagggccacawatccacggcttttcctaaggcacagagaagctgagaaacctagtaagagcctctggggtccccacttttagtaaattacaaggaggtgttcagcctgccctgaacctcataaaagatggatggtgtagttatataacatccatggctttttacgaacttcacctttcctttaaaaagctgctaacttcaaagaaaaa

SEQ ID NO: 765568 - DNA, 617 bp, Homo sapiens
ttagttgagggcagggatcatgtttcaaccatctttgtaattctctgtcatgcattccccagtgcccaatacagggtggatgctcagtaaatattttgaatgacccccaggactggttgctagaggaggccagcttttctctgaagcagggggagcagatgcctgttgtcaggtggtcattggcagggacgtmcagatttggaaaatgaagactcttcctgcagcagcatccaggcacatacaggccagttggctgtcatttttacctggcagggagcggggcaccaggaatgtctggagcagatagtagcttcctgggacacgacaggtggaatcagcttctagtgaaggaagaacctggtcagaacaactgaattataatcctgacctggccacttaccactgcatagccccaagccaaggatttactctccctgggcttcagtttccttgtctgtaaactgaggctaaaaagtccctgtcttgcagggtgggaatgaaagttaaatgagatagtgtgttgaatcagtgttcacagggcttccttgtttatagtagatctctctgtggtctctcctcccacttaaccctgctcacacattttttcaggttattaa

SEQ ID NO: 765569 - DNA, 661 bp, Homo sapiens
aaagtgttacattgatggctttgaagatggaagagggggcacaagttagggaagatggatggcctctagatgctggaaaagccaaggaaacagattctgccctaaagcctccagaaagaacacagccttgccggcctttgattttagctggtaagactcatttcagacttctgacctccagaactataaggtaataaatgtatgttgtttgaagccggtaaggtttgtgtaatttgttacagcaagaattggaaattaatagaggcctcatttgtttctgatgtacaaaacactttctattacagacctgaatccacattagtgaacgagsctgggtaattttgaagcagaatctgtccaaaattcaaaaaaatgaaagaatttgtaacaaacatgcatctagtttcagaaatagcttgggagtattttaaccacacttacataatgcaagattgggaatttggactccagaaacttagaaaggaggtggttagggggagtagaaaggagactgcctcaggagtcgacagactcaagttcaaatcccagctttgccaggtattatgttggctgggtggccgttagagagctgcttacccttactgagactcatttggttcatgccctcatattacagaggaggatcctgaggcctaagtca

SEQ ID NO: 765570 - DNA, 621 bp, Homo sapiens
aaaaagacttgaggccctattttttcagttcttcaaggagaactaggtacataactagtaccattccagatgcaggggagagacgctcattcattccagactgtgaagccttggggctttcaggcttacttctccagtgggaccccagttgaagcaggctcctcaaccccatgccccaccctgtctttccttcctaaggaaatggtacctgtacctaccttgttgcccaagccagaaacctgacagttcattctaggacccccctctttcctctcctccttcctccaaaatcartttccattatctaatcattctatctacttttgaatctcttcccttctcattctcctcactgccaccaacttggtcagcccacaccattttgcccaattattattcagaagctgcctgagtggcttccttgcctcttgcctccaccagtccctccccagctgcttcctagaaaagcctcacagcacacaagtcttattctatcatttcttccttcctggctcaccaaagcctttctgataaagctccacattggccttgtggactgccggatcttgcatttacaccatgccctcccttctcctgcccttctctcccacctgctcctct

SEQ ID NO: 765571 - DNA, 621 bp, Homo sapiens
aaaaagacttgaggccctattttttcagttcttcaaggagaactaggtacataactagtaccattccagatgcaggggagagacgctcattcattccagactgtgaagccttggggctttcaggcttacttctccagtgggaccccagttgaagcaggctcctcaaccccatgccccaccctgtctttccttcctaaggaaatggtacctgtacctaccttgttgcccaagccagaaacctgacagttcattctaggacccccctctttcctctcctccttcctccaaaatcagtttccattatctaatcattctatctacttttgaatctcttcccttctcattctcctcactgccaccaacttggtcagcccacaccattttgcycaattattattcagaagctgcctgagtggcttccttgcctcttgcctccaccagtccctccccagctgcttcctagaaaagcctcacagcacacaagtcttattctatcatttcttccttcctggctcaccaaagcctttctgataaagctccacattggccttgtggactgccggatcttgcatttacaccatgccctcccttctcctgcccttctctcccacctgctcctct

SEQ ID NO: 765572 - DNA, 621 bp, Homo sapiens
aaaaagacttgaggccctattttttcagttcttcaaggagaactaggtacataactagtaccattccagatgcaggggagagacgctcattcattccagactgtgaagccttggggctttcaggcttacttctccagtgggaccccagttgaagcaggctcctcaaccccatgccccaccctgtctttccttcctaaggaaatggtacctgtacctaccttgttgcccaagccagaaacctgacagttcattctaggacccccctctttcctctcctccttcctccaaaatcagtttccattatctaatcattctatctacttttgaatctcttcccttctcattctcctcactgccaccaacttggtcagcccacaccattttgcccaattattattcagaagctgcctgagtggcttccttgcctcttgcctccaccagtccctccccagctgcytcctagaaaagcctcacagcacacaagtcttattctatcatttcttccttcctggctcaccaaagcctttctgataaagctccacattggccttgtggactgccggatcttgcatttacaccatgccctcccttctcctgcccttctctcccacctgctcctct

SEQ ID NO: 765573 - DNA, 584 bp, Homo sapiens
ctgagatgggaggatcgcttaagcttgggaggtctggagaaggtgccactgcactccagcctgggtgacagagtgagaccctgtctcaaaaaaaagaactatcatcctgtagttcagaaagaccactattgcactactgtggcagacagtgttggtcacctcctcaacagttgtttgtctcctttcctccttgctgatggaacccaaacttggttcaattatcagtagtcacatgcttcaaggmaggccaggctcatgccccagggggtagaccttgattgatgtaagacaatgtcattcccctagctggtttctggtttaggcaagagaaaggtacataatctgggcaaccagacttgatgggtgtctacaggaaggcttctgagagtgttctcctcactcttacaaatgggacacaccataggaacctttcaggctttttcctctacaggtggctcagtgcggggtgatgcctaagccactgcagtcatattctggcctgagggagccactgacccatggggtaaagcagaaaggaaagatgaatgaagctgcatcactaatgatattgtggccactgaatt

SEQ ID NO: 765574 - DNA, 610 bp, Homo sapiens
cataggaacctttcaggctttttcctctacaggtggctcagtgcggggtgatgcctaagccactgcagtcatattctggcctgagggagccactgacccatggggtaaagcagaaaggaaagatgaatgaagctgcatcactaatgatattgtggccactgaattaagctactctggaactaccttatcttcacactcttggttaacagatacccaaatgtttatgccaattttgttatatttctgttacttcccgattaaagcttgctaaatgacacaactgatgaatgtattcaagaagcgtaagaccacaggaactctgaagcagttataataattgaggcaagaaatgagagtggccaggaatcaggatagcatcagtagcaatgaaggaaatggwcagatgtgagacacctttcaaagtataatcacaagagaatggtgaatgcttggagatgaaagtgaaaggaatggtaaacaactgaagttcacatttctgactttgtaactagtagatggcagcctgaaccatttactgagacaggatacacaagaatattcagtagctgattggagagcggggagaatgagttcaggttgggacatacta

SEQ ID NO: 765575 - DNA, 527 bp, Homo sapiens
ttctcaggacagtttcctccacttccatggccttagcataagtagacctagatttttttttcttcaacttttaagttcaggggtacatgtgcaggatgtgcaggtttgttacataggtagatgtgtgccatggtggtttgctacacagatcgtcctatcacctatgtattaagcccagcatccattagctcttcttcctgatgctctctctccctctaccccaccctgacaggcccgagtgtgttgtccccaccacgtgtccatgtgttgtcatcattcagctcctacttgtaagtgagaacataccgtatytggttttctgttcctgcattagtttgctgaggataatggcttccagctctatccatgtgtctgcaaaggacatgatcttgttcctttttatgactgcatagtattccatggtgtataggtaccacattttctttatccagtctatcatcaatgggcatttaggatgattccatgtccttgctattgtgaatagtgctgcagtggagatacgcatg

SEQ ID NO: 765576 - DNA, 646 bp, Homo sapiens
cctgggctatcatttaaaatgaaaaggatgtgtgttggggtggggggatgagggtatttgtagagagtactaagcaattttgcgttctgtgtaaggaaatattttacgagatttaggtggatcccaggacacttttgctctgtctggcaaaacaagccaagacttctactacyctaggaaagtaagaagatatagaatatcatagggctaatgcaaatgaaaggaaagggtgggtcattaaaagtaatctatgcattgctttactgctaagagggagaaattaaattcacacacaggaaaggtcaaagtcagagcctaaaagtagacagaaatagtaagttcagttaacatagtgaagaaaagcaggatagacctgacaataaggataccaagaaatggctcagaagcaatgtttgaatgcagacatacttcctggtttatgcatcctggtatttttttgcaaggttgggtagaaatttcaatgaggtcaaatttaacctgacagagaggaagcaatagatgtcatctatgcatttaaggtgtttgttttttaggtctatttttaagatcccttccaactctacctcctaaaccccagtgtatacaaatacacacactcaaacccaatgaacatataggcacttgt

SEQ ID NO: 765577 - DNA, 596 bp, Homo sapiens
gcttcatccatgtccatgcaaaggacatgaactcattcttttttatggcagcgtggcattccgtggtgtatatgtgccacattttctttatccggtctatcactgatggggatttgggttggttccaagtctttgatattgttaatagtgttccaataaacatacacgttcatgtgtctttatagtaraatgatttataaccctttgggtgtatacccagtaatgggattgcggagtcaaatggtatttctgattctagatccttgaggaatcgctacaccatcttccacaatggttgaactaatttagactcccatcaatagagtaaaagtgcttctatttctccacagcctcgccagcatctgttgtttcttaacttttaatgattgccattctaactggcatgagatggtatctcattgttgttttgatatgcatttctctaatgaccagtgatggtgagctttttttcatatgtttgctggccgcatcaatgtcttcttttgagaagtgtctgttcatattctccttgaaagtcagcacaaaacaaggatgccctctgtcaccacccctattcaacatagtattagaagttc

SEQ ID NO: 765578 - DNA, 628 bp, Homo sapiens
tagaactatcagcgaagttaggtcaaagggcaaaccaatgccctaaaaagtggagagatagacatacaaaattagggagtaacaacttattgaaggagaaatccaccagcagaaacctctgtaggaactactactgtggcaaaaagcaaaacaaaaaatccctcaactaaaactgacaaattcttaggtaatcagtgtggacaattatgagagttaaaaaatccagggacactcactcataagaggttcttcacatttttatgagttttaccttaggaactctaccaagttctcagagtaaatattggaaaaaaatcrcctcctacttctagcagaagagaagaaaagtaaccccatttttaacctaatgtaaaactgggaaaaagacctaaacagatacgtcaacaaaaagatatacagacaagaaataagcatataaaaagatgctcaacaccatatgtcattaagaaactacaaattaaaatgagataccactaggtacttactaaaatagccaaaatgcagaacattaataacacaacatgctggttaggatatggaacaataggaactcccattcattgctagtgggaatgcaaaatggtacagccattttggaagatagttt

SEQ ID NO: 765579 - DNA, 611 bp, Homo sapiens
ttttacactttttgacacattgtgtattttatctgatttaagtttggttatttctactctcttttggtttccactgcaggaatatattttttcactcattcacttaaagcccatgtgtgtctctacaagtaaagtgagtctctttaggcagcatatagatggctcttgtactttaatccattcagccactcagtcttttgattagaaaatttaatccatttacattctagataattattgataggtaagtacaaactaccaccattttgtccattttgttaggtttttttagttgtttcatagatcttttgcttttttacttcctctcttgcttttttttttttttttcctttttgagacagtctcactctgtcgcccaggctgcartgcagtggcaccgtgccgtgtcggctcactgcaacctctgtctcctgggatcaagcaattttcctgcctcagcctccaaagtagctgggattacaggcgcccaccaccacgctcgggtaatttttatatttgtagtagagacaggatttcaccatgttggtcaggctgatctccaactcctgacctcaggtgatcccaaagtgctgggattacaggcatgagcc

SEQ ID NO: 765580 - DNA, 558 bp, Homo sapiens
aagggtgtctatttcactcattcattcaccaagtgttattcaatactatgggggacaacaccactttctaccttacttagaaaaatacaaggcttgtttgtgactgtggtttaaaagtgctaataattatggattgtgakttgacattcagcaggagatttgtaaaagatattttagtcttagtgctcatattaagcagaagtcagattttgggcaaatatctttatatctctcgatctaggtttcataaaataaaacatactactagattttcagtctactcagatgaggagcctttaaagaatttctgcttgaaatttaccacttctgaatacatatgtgtgttcatgccaggggagttagttttagcagtgaaatgtcataatgagtgaattatgcatcactgagtctttattactttccgtctaagaatccacagagtgggtgagccttggtttcgaggtgcatcaggtaaggttttggactctactgttgatcctaattctgggaggagaggatccacagactagatggtcctcaagggcaaacgcttcattt

SEQ ID NO: 765581 - DNA, 629 bp, Homo sapiens
taccttccacaacaagttagacactttcttttaggataagaattgactttcaagtgtttttagctggtaatttgtgaattatctatttttactgttatggtggaaggaggaggggtgagaaataaggcagtcgttttgatattaatttttttctgagtaaaggaaatagagctaaaactcaaattggacagtttattttattattttcttttcacagtctaaattagtacttggtaagtggacaggtcgaatccattggctaaagtgattctttaaagacaaattttatttttaatcacctatgctatctatttcacaagaccaaraaaaatgattggtgcataacattttatgggtaaagttcatatgaaaacgatggtatggaaatgtcctagttattcatccttaattaatatagtaatatttatattaatacataataagattaggtaaaataaatattgaagataaaataattagtaatccataatcagtcacatttaagcatggccaaaggtaataaggcagacattgttgatggtggatggctcctgctatgtttctttcattttctttcacctagtcagtttcattgattccatgctcaggaagagagaccatgttggaag

SEQ ID NO: 765582 - DNA, 724 bp, Homo sapiens
caggcaataacaaatgctggcgaggatgtagagaaaagggaaacctcatacactgttggtaggaatggaagccagtacgaccactatggagaacattttggaggttcctcaaaaaaattaaaaatatagctaccatgttatcctgcactcccactgctgggtatataacccaaggaaggaaatcagtatattaaggagatatctgcactcccattttattgcagcactgttcacaagagcgaaaatttggaagcaacccaagtatctatcaacagatgaatggatgaagaaaatgtgcttcgtatacacaatggagtactattcatccacgaaaaagaatgagatcctgtcacttgcaacaacatggatggaactagaagtcattatgttaaataaataaaccaggcagagaaagacaaacatcacatgttctcacttatttttgggatctgaaaatcaaaacaattgaacttacggagagagagaatagaaggatggttaccagaggccagcaagggtagtgagagggatggaggaargtgaggatggttaatgggtacaaaaaaatagttagaataaataagacctagtatttgacagcataacagggggactataatcaataataattatgcactttaaaataactaaaagagtataattagattgtaacacagagaataaatacttacggggatggatacctacttttccatgatgtgat

SEQ ID NO: 765583 - DNA, 531 bp, Homo sapiens
ttattaatgcacatgggcatgatggtagcaggttaattgcatcatcctagtgcagaccagtagtcatytgcttcacagatagctccttccatgactcacttaaagataggcttgtggtttttcatatgagcagggaccacacgaaatgcagatccctggccactggtgtggtcactctcccctgactaggacctgggctttcctgccttggttttgatgtgtcatcattcacctggaatgccctcctcatccttccaatccaaactcaacttctaccttgattgtaaaaccctcttcaaggatccattgcaattattatatttgtaatttgtttggaattagtcgttgcatctgtagagtccgggaagggattgcggagaatatgtaggcctatgccctcactctacggctgaggtcctgagagtgtaccaaggtcacacaatgaggtcaccatatgaggtctgagatccaggtctcctcagtctgcagtaagtagcccctactatgagttttatgctcattggattcagt

SEQ ID NO: 765584 - DNA, 640 bp, Homo sapiens
ttcaacaatggtgagaactctctcattctgttctacagactgtgcaggaacctccattctacttgttctttaagacttaggtgctattacctccacaagcaaacctttcctgatgctctctgcccaagccacctctcccttaagttgccctcttctaagatcctggcagcatgtttctcatgtgtttcatattgttgaatttattgttagctttttgaaagctttttggagatataattgacaagtaaaaattgcatatattcaaggtgtacaaaataatgttttgatatacatatacattgtgaartagatgaccacaatcaaactaattaacatatcaatcacctcacatagttattctttttgtggtgaaaatacttatgttctagcaaatttcaagtgtacaatacagtattgttaactatagtcacattgccatacattcaatttccagaacttactgattttggatagctgaaactttatactctttgaccaacgtctaccagtttttcctcattccaccccatgcaacccccatataagtcagatcatgcagtatcggtctttgtgtgtctagcttatttcacttagcttaatgtcctctgggttcatccatgttgttataaatgacaggatt

SEQ ID NO: 765585 - DNA, 444 bp, Homo sapiens
atagtgattttatttactttggatatgtatccagaagtggaattgctggttcacaggtgagttctatttttaattttttgaggagcctccatactgttttccataatggctgcatcaagttacattcccaccaacaatgtataagagttccctttacaccacatccttgccaacacttatcttttgactttttgataacagccatcctaacaggcatgaggtaatatcttattgtggttttcattatcacttccctgatgattagtgaygttgagcaccttttcaaagactacatttgacagtaatttagaattctcaggtcaattgggaagttggaacacaaagggagaggaagaatggtggctgttggatagagagggatgtaagagctaaattctcatcacacataacagtgggccaatagataatatctaaactttaaaa

SEQ ID NO: 765586 - DNA, 501 bp, Homo sapiens
tttacagtaaaatgatttgtattcctttgggtatataacaagtaatgggattgctggatcaaatggtatttctgattctagatccttgaggaatcaccatactatcttccacaatggttgaactaatttacatgggccctttctttcttaatgtaaatatgcacaaagaccatattacttccattttacttaaactctggcaagtacaggtgccataaaacctatggagtgcttkaaagggaatcattctctttgctttctcctcattcttagattatttgtttcccagttttcttcttaaaaagaggaactgagctgaggcctaaaggttttctgtggtggatcaatatgtgccatttgtgggcaggactccacagtgggtcaccactgaaaacaacagttcagttcctcatgcaaatgcacacagacaagccgaatcgagcttaatttgtggagaaaaagcaacagagaggaccctttagaatgcatctctgaactaga

SEQ ID NO: 765587 - DNA, 501 bp, Homo sapiens
tttacagtaaaatgatttgtattcctttgggtatataacaagtaatgggattgctggatcaaatggtatttctgattctagatccttgaggaatcaccatactatcttccacaatggttgaactaatttacatgggccctttctttcttaatgtaaatatgcacaaagaccatattacttccattttacttaaactctggcaagtacaggtgccataaaacctatggagtgctttaaagggaatcattctctttgctttctcctcattcttagattatttgtttcccagttttcttcttaaaaagaggaactgagctgaggcctaraggttttctgtggtggatcaatatgtgccatttgtgggcaggactccacagtgggtcaccactgaaaacaacagttcagttcctcatgcaaatgcacacagacaagccgaatcgagcttaatttgtggagaaaaagcaacagagaggaccctttagaatgcatctctgaactaga

SEQ ID NO: 765588 - DNA, 559 bp, Homo sapiens
ggagacacaagcaggcataatatctgatactaaattaataatagagcatatagtcattaaagtacacaataagtgagataagctgcagaagatatactgacttggaagaccaaaatggaagaatctctaatgttaaggaaaaaatgtgtaactcaattataatgaaaatattacatatcaagacttgtggggtgttataaaatgatctttgataaaatgtacacactttaaatagcctttaatatttaaatattaaacaagaataaaacctaaaaataaatgaactaagtgttcacctaagtgaataagaaaaaggaaaacaaccaaaatagcataaaatgtaaatcaatgaactagttaaaaacgatwtcacagagaagatgaacaaagccaaaatttctttttcaaaaaaaataccaataaatgataagccattgacaagattgatcaagaaatgtaaagaagacacaaataaataatattctggatgaaaatgagaacatatccagcaataaagctgaaaatgttccataatcaaaggaatcataatcaaagctgt

SEQ ID NO: 765589 - DNA, 573 bp, Homo sapiens
agaaaaagtgaatatgccaaatggcagaaccatgtttccaaaactacagaaatactctcacaaggaatcaaacctaacaagatgaaatatcagaaccaattgtagatcaaatgagtggttattaatgcagcatggcaaacgagattggggaggagtgaatatatctaaatttactgggagtatttatttaactatacacacaccctaaggttgtgtcccctcttagcatcccttcaccagatagaatattacaagttgaggacatcttatctgaaaatcygaaatctgaaattctccaaaacccaaacctttttgagtacctatatgatgctcaaagaaaatgcccaatagaacatttaggatttcatgtttttgcattagggatgctcaacaagtataatgcgaatattccaactctgaaaaaacttgacatttgaaacacttctggtgccaagcatttcagatatggggtactcaacctggatcaccacaatgagctctattactgcaggcatgcagtagaaaggcaggttgagaacttctcgtctagaaacaaccactgtatgtgtataa

SEQ ID NO: 765590 - DNA, 468 bp, Homo sapiens
tatgtaggtaaagtctttcaggtaaagccgctctggggtgatgtcaacatttagcctcttttcctgttatatatctttcctggatgtcttcaggcagatacgggaacctcagagaaaacctctgcttatagctgctgttccccacaattccccaatcaaggtaccaaagaatcatattttggggttttgttttctgagccccaacatctccataagaaaataaagtaggaaatgatcccggacatggtcacagctgcttcagcagagcacaaaaaaggacaggtrgcaaagggactttcaaatttactaagctcactctcttactaatatgtatatttagaattgttatatcttcttgctgaattgatccctttattattatataatgacctcctttctctgtttttactgttgttgattttaagtttgttttatctgttataagtatagctaccccttctggaaaaa

SEQ ID NO: 765591 - DNA, 621 bp, Homo sapiens; identical to SEQ ID NO: 761100

SEQ ID NO: 765592 - DNA, 608 bp, Homo sapiens
acaatgctgaggtttacagtacaaattaatctgtcacccatgcagtgagcacagtacccaataggtagtttttcagccccgtccctctccctctcaatatctaagtcccatatgcggcattgggttttctattttttctttagttagcttaggctaatggcctccagctgcatctatgttgctgcaaaggacatgatttcaatttctatggctgcatagtagtccacggtgtatatatatgaaaacktcatatatatttatcccatccaccattgatgggcatttggatttattccatgtcttcgctattatgaagagtgctgcagtgaacatatgagagtgcatgtgtctttatggtagagcaatttgttttcctttgagtatatacccagtaacagtattgctgggtcagatagtggttcaactctgttcctcaagaaatctccaaactgctttctccagtggctaaactattttatattccaaccaaaagtttgtaactatttccttttctctgcagcctcatcaacatctgttatttttggctttttaacaaaagccattcgactggtgtgagatggtaactcactgtggttttgatttgcatt

SEQ ID NO: 765593 - DNA, 602 bp, Homo sapiens
actctgcctgacatcatcaccaccaaagctgagactgacttggagcttaggtcttcatctgagacattcggattcttttattgacatctatcttcatgcttatctccccatcagtagttcaaactatacccccatgctctatataatagaaaggaagggaataatatttttctctcttgagatttaaggatattagaattcacaggattttgcaactcatcaaaacagatgcagaatataatgtcatgactaaatatarcacattgttgccctgaaattatctttatttccttagttaacttttttgaaatgtctgacataaggtaatatcttacttccagctttgttgcttctctttcttgtgtttgtttattggttgtgtgtaggtttgtttgtaatggtaggcgtgaggttatctcactcctctcatctcattacacatttttgaagaaagaagagtagaggccctaattttgtacactatttgttcttagaaattacgactcccttttgaatgcaataaactcaggcaaaattctgaaatgacctcaaacaaaacaggttgccgcttgtaacaaaaaaaattttttttcatatagaca

SEQ ID NO: 765594 - DNA, 558 bp, Homo sapiens
gaggcgactgtgctctgaggacccagagctacctgcaagggcaagtaggaaacaaaacaccggacccatctccctccctccctctctctcccgcaagccttgtcacacacacacacacacgcacacacgcgcacacacacgaacttcccatgcctcttactttgctgacaggccgagagaatagagacagcagccagcaggatcgagttcccggccatctttctcacggaactatttgtagagcgcacgggaagataaatggcgctwcttgactttgaatgctgaccttccttatcgggtaaacaaagttggggaccgggtggggggaaaaggctgattcaagcggctgaatgacctttgctctggaacagaagtcaggaaggcaggcaggtctggggctgccggtcacagatctttatggggctgggagttgcttccggcgtttgttttaagcctctcccacggccagcgggcagggctgtagctcactgtgggaccagccctccagccgcagtgccagttacactatcttctctgccaatgcacagactctctgga

SEQ ID NO: 765595 - DNA, 632 bp, Homo sapiens
ggaaccggctcccaatatttcagcataggttctttctattttccataagtgttggctggctgagaaataaaaagaaagagtacaaagagaggaattttacagctgggcctccggggctgaatcacatatcggtaggaccgtgatgtccacctgagccacaaaaccggcaggtttttattgaggatttcaaaaggggagggggtgtaaaacagagaataggtcacaagatcacatgcttcaaagggcaaaaaggagaacaagatcacatgcttctgaggcatgatcacaaagatcacaaggcaaagggcaaaatcaaaaactcctgataagggtctatgttcagctgtgcacstattgtcttgataaacatcttaaacaacagaaaacagggttcgagagcagagaactggtctgaactcaaatttaccagagtggaatcttttccacctgttccctaaaatcactgttattctgttctttttcaaggtgcactgatttcatattgttcaaacacacgttttacaatcaatttgtacagttagaaacaattacagtggtcctgaggtgacgtacatcctcagctaacaaagataacaggattaagagattaaagtaagacaggtgtaagaaat

SEQ ID NO: 765596 - DNA, 658 bp, Homo sapiens
atatcataattttaatttccaataacttatttttattctctgattgctttttagttgttggtgctgatgttaaaccgtcacttttttatttcattgatgtagtttattctcttatatttgaggattttaattataattttaaaaattctctgtaacatttctgtttcttccaagtatctttgtgtcttttttggcctttgtctttcatttgtatttattatttacccattaagtatttattgagcacttctgtgtacygggcattgttataatagcttggcctagatccatgaacaaatcccacaaaaatccttgccctcttggagtttgctgaggaagccagaaaataaacaataagcagatgatattataagaaaataatataagctgggcatagtagctcacacctgtaatcccagggactcagtaggcccaggcgggagaactgcttgagaccagaagttcaagagcagcctgggcaacatagcaagagccccctctctctattaaaaaaaaattaaaaaattagccacatgtgggtacatacctgcagtcctagctacttgggaggctgaggttggaggattggttgagcccaggagttcaaggcttcagtgagctatgatcatgccactatactccagcctgggcaacagcg

SEQ ID NO: 765597 - DNA, 658 bp, Homo sapiens
atatcataattttaatttccaataacttatttttattctctgattgctttttagttgttggtgctgatgttaaaccgtcacttttttatttcattgatgtagtttattctcttatatttgaggattttaattataattttaaaaattctctgtaacatttctgtttcttccaagtatctttgtgtcttttttggcctttgtctttcatttgtatttattatttacccattaagtatttattgagcacttctgtgtaccgggcattgttataatagcttggcctagatccatgaayaaatcccacaaaaatccttgccctcttggagtttgctgaggaagccagaaaataaacaataagcagatgatattataagaaaataatataagctgggcatagtagctcacacctgtaatcccagggactcagtaggcccaggcgggagaactgcttgagaccagaagttcaagagcagcctgggcaacatagcaagagccccctctctctattaaaaaaaaattaaaaaattagccacatgtgggtacatacctgcagtcctagctacttgggaggctgaggttggaggattggttgagcccaggagttcaaggcttcagtgagctatgatcatgccactatactccagcctgggcaacagcg

SEQ ID NO: 765598 - DNA, 599 bp, Homo sapiens
acatgtatgtccagatcacctgaagcaactgaagatccacaaaagaagtgaaaatagccttaactgatgacattccaccattgtaatttgtttctgccccaccctaactgatcaatgtactttgtaatctccctcaccattaagaaggttctttgtaattctccccacacttcagaatgtactttgtgagatccaccccctgcctgcaaaacattgcttctaactccaccgcctatcccaaaacctataagaactaatgataatcccccmccctttgctgactcctttttcggactcagccggcctgcacccaggtgaaataaacagccttgttgctcacaaaaaaaaaaaagtgttttctcacattaaaaaatgacaaccataaattttgcataaaatattaaagaataaatggctctaataaaatattattagaggcagctatttctaaattaaaagacgcattgagttttagcataagaataactaaggtaaatcacataaattaaaaagaagaaataaagtgaaacatgattatataatgactattttagtttacgtaggcaaatcgtcaccaataatctatgtgcagcttaaca

SEQ ID NO: 765599 - DNA, 615 bp, Homo sapiens
cacttatactcaaattctggatgagttagctatcttgggaagaaaagtgtgatcagtaagtttccaatctgacatagcttctaaaaatgttcaagaattccagtacatgtgggttaagacaaaagaaataccttagaaaaaacaggtattaactcaattagttagtaacaacttcactaaattacattccaatgaattacagtcatgcattgcataatgatggggatagactctgagaaatgcgtcattaggagattttgtcattgtgtgaactttgtagagtgtacctacacaaacctagatagtattgcctactacatacttaggctttatgaaataacctattgccccttggctgcaaacctgtacagcatgtgactgtactgaatactgcaggcaattgtaacacaatggtaagtatttgtatatctaaacatatctaaacacagaaaagatacagtacacytacagtactagagtcttataggatcaccattgatcttatggaatcaccattgcatatgcagtccatcattgatcaaaacatcattatgcagcgcatgactgtatatctcttgattataatgccctttaatttatttttattttatttaa

SEQ ID NO: 765600 - DNA, 588 bp, Homo sapiens
tactagaatgttcattcatacagtaccatccataatagccccaaacttgaaacaacctaaatgtccatgaacagaatgaataaattgtggcgtatttgtgcaatgaaatactgtgccacaacgacaatacacatacatgcgacacccaacaacatgaatcaatctcacaaatataattgatacccgtgggctgggagagatccccaaacaccaatgggacctcaaccccagctggtgtccaggctcttgacactgtcgtgagaaggaatttaaggataagtcagaaaatagtgaaagcacagtgatttattgcaaagggaaaagtacacactcaagggaatgygggcggactcaaaagtcacgtgtaagggggtttgaggttgctacctctataggtttctttaaccaaggactgggatattcatgaacattcctgggaaaaggtggagatttcttggaactgtggtgccacccatttttacatcaaacctgggtgttcttggaactgtcgagacacgggtgggtgtgtgtttaggatattaatgagtgtatattgaggtcctaggagaaacctggtcacatccagtg

SEQ ID NO: 765601 - DNA, 563 bp, Homo sapiens
  misc_feature 545, 546, 547, 548, 549, 550, 551, 552, 553, 554, 555, 556,557, 558, 559, 560, 561, 562, 563: n = A,T,C or G
gtggcttttgcctgtgccttgatgaacacctgaagcgagacccagagacgctcaactccccgacagccctggttccaaaccggagctgcagcagttgctgagcgcggctccttcacgccttcctgccgtgagcgttcctcaccgccgaggcttcctcctcctgctcccaaaccgtgtccacttttargaggggactttctagaacgtgcttccgaacggtacctatgtgatgaggggctgagcatgaaataaagacaagggcatgagtgtagaggccaggcagacctgactcgcccctcactccccaggacccggacctctctggatctgcatcctccccctagtaaaatgggagacacaccgctatccagacaactgggattcctggaccagacttttcttttgaggtgagcacacccgccccgcaacccagatggactagggtgaccttctccccaccccactcgcacctcaacaggcacatttccccatctgcccttgggctgagtgacacagtggctgggccagggatggtttgacaccgnnnnnnnnnnnnnnnnnnn

SEQ ID NO: 765602 - DNA, 563 bp, Homo sapiens
  misc_feature 545, 546, 547, 548, 549, 550, 551, 552, 553, 554, 555, 556,557, 558, 559, 560, 561, 562, 563: n = A,T,C or G
gtggcttttgcctgtgccttgatgaacacctgaagcgagacccagagacgctcaactccccgacagccctggttccaaaccggagctgcagcagttgctgagcgcggctccttcacgccttcctgccgtgagcgttcctcaccgccgaggcttcctcctcctgctcccaaaccgtgtccacttttaggaggggactttctagaacgtgcttccgaacggtacctatgtgatgaggggctgagcatgaaataaagacaagggcatgagtgtagaggccaggcagacctgactcgcccctcactccccaggacccggacctctctggatctgcatcctccccctagtaaaatgggagacacaccgctatccagacaactgggattcctggaccagwcttttcttttgaggtgagcacacccgccccgcaacccagatggactagggtgaccttctccccaccccactcgcacctcaacaggcacatttccccatctgcccttgggctgagtgacacagtggctgggccagggatggtttgacaccgnnnnnnnnnnnnnnnnnnn

SEQ ID NO: 765603 - DNA, 482 bp, Homo sapiens
ccccaagcttttgttctgtctgccttcaccgccccagggtggagttcagctccccttcagctccccccagacactgctgcgggaactcatttgcagccgccgtttctgcaggccgggggctgtggaggggcgtttttgctcaggcggggctggagggctgggctggatgcccttggctctccccgtttgccccgcaagcctcaaaggccctaaaactggacccctctttgaggaacagcctcacacccgccttctcagagccyctctcttcttttcataactaccatctcccctgcccccaccagtctttctgtcctcttcaaacctctttccctgtgatgctgaagcattctgtagcttgctttgaccaggaaacctgcggaggcccttgtctgtccaggagttcaaaacggtgccattgtttcttttaataacatacaacgtttatgtcccttttcaaactataacacgactccgagact

SEQ ID NO: 765604 - DNA, 398 bp, Homo sapiens
cgccgtttctgcaggccgggggctgtggaggggcgtttttgctcaggcggggctggagggctgggctggatgcccttggctctccccgtttgccccgcaagcctcaaaggccctaaaactggacccctctttgaggaacagcctcacacccgccttctcagagcctctctcttcttttcataactaccatctcccctgcccccaccagtctttctgtcctcttcaaacctctttccctgtgatgcygaagcattctgtagcttgctttgaccaggaaacctgcggaggcccttgtctgtccaggagttcaaaacggtgccattgtttcttttaataacatacaacgtttatgtcccttttcaaactataacacgactccgagactctgatatgttccc

SEQ ID NO: 765605 - DNA, 632 bp, Homo sapiens
ctctctgcacagcttctcaactgcttccccctgctcccttcaccctgctgtctgggagggtgggaagaaggggactggctgctccaaaggggtcctctctacggtggccactctggcttgtaccatcagcctctgtccctctagcctgaaaagtacccatctgagcgagtctccctaagcctcggtctcctcatccggcaaataggatagtatttttattatcatcagtctttctctagacagaaggcagctcaggccttcacacagatggggaagatgaaggagtgaggctgagacacacattatatcgcaggagtgtgcasaaggaggcccctgcccacagacgggtctctttctctgcaggaatcagaagtcctcgacacagaagtcccacttgcttctgggggcacacatgtgcaggcatgtacacatgccccctgcccctttgtatgctgggagattctagcacttgggttctggaagctcctggagggcagggagggaccctctctcccatggctcacagggataagtaggcaaaacattgaggctttgcagcaggagcacccccagttaaggctgcagaggagaaggctaggtgaatgtggggagaggggacatagaaggcttcc

SEQ ID NO: 765606 - DNA, 575 bp, Homo sapiens
tagctgggactacaggcgtacactactacgcccagctctctttccatctttccaatccccttcattctcctctctgattgtgtcacctatggaccaaaggacatcagcagcatccccatccttggtgacactccctaatggtgagacagacaagtaaacaggtgaagtgcagggccccacacagagtgttgtcaggatgtggggcagcaggaattctacackgttggtggggtgtgaattggcacagctactttggaaaacagcttggctgcatctgcaaaagctgaacttgcctatgctatgacccagacattccactgctttctttgggtatacacccaacagaaatgggtacatatgtgcccaaaaagacctgaattagcatgtttttagcagtattatccattaatagccaaaatgctagaaactacccaaatgctcatcaatagtaaaatgaaaatcctggtatattcacacagtggaacactacacagtcacgagactaaactgtctacaactacaagtactgtctgtgtctgcataggcgaatctagactgaacgtgagagaagccag

SEQ ID NO: 765607 - DNA, 672 bp, Homo sapiens
agggagaattgcttgaacccaggagatggaggttgcagtgatctgagatcgcaccactgcactccaggctgggtgacagagtgagactctgtctcaaaaaaaaaaaaaaaaaaaaatggtatatcttataactggaattgtatttatttatttttaactggcactttaratttgatgagtatagcaataacaatgacaatcacagttacggcttaagggatgcttattgatgccaaggccttcagtttttcacactactctatgaggcaggtgctacaactgttcccattttatagatgaaaaaaccgaggcacaggtttgttaagcgatttagcctaggttgcaaagctgcaagtggtggaggggagattcaggccccgagtctagcctaaaagtatgctgacaggggtactgacctgaatgctggcacttgacatgaacctgcagcaaggctggcgtggggaagagctccttacactggtcacattcatggaacttcatatctgtgaagtgcataaagaaagacgtgctgggaaagaacaaatggttggctctccaggctgaagagtaacagggctggggttggggcgatggccaatacttagcaagcatctaccaagtgccaggaatcttataacctatggtatatttgtacaatctagtggaaagagc

SEQ ID NO: 765608 - DNA, 535 bp, Homo sapiens
gcattgatacatcctgcctaaggttgacaagaactgttatgaagtgacatttggagttactgcttacagagcaaaagggcaggaaacctgcagtgcagttttacaacttctggctctgtgtcactcaatattctgcttccaaaatcagtatcaactttacacagtgaagagctgatcagtaacctaagttctactgaatgaatgttaataggagcttaaattccacccttaaggccttttctaataaaaatgaattcttcatakttcgattatttgacatgtattcaagtggccagcctgtagggggggaaaaaggcaaaattgggccgtaaaatggaattaagctgacttctcaaagccaattgatctaaagacaaatcctagcaactcaacagaccacagatattatctgtttacaaaattgtgtttctgttaactgtttagcttcaaaataaaagcacaaagttagctgcatttcccccataaatttcaagctcaatttaatctccgttattttgtactcagtcatttccca

SEQ ID NO: 765609 - DNA, 621 bp, Homo sapiens
atataggaacgtgttgtttttaaaccgataaaaaggtaaatgacaaatttacaaacaataatctctccaacaatgttgtgaaaatataggacagagatgagcagataactcggaaagcactaaaattataacaatttaaatagcatatgatagaataacaatgtattttaaagtacattgtacaaatatgtcacaaagtacatgttcaataaacattaactgaatctgattttgattttgaattcagaaagaactatcttattataaaagaaacaattttcttttcactaaagagtactgcattcttaattactaaataattaatcactaaataatcaaaaagagtactgcattcctatgctacatgccaggaacagccttaagcactaagtaatgtcccccagtcactgggatttttcaattcatttagttatgctgccatttatttctctcacatccatcaaaccactcatttttttmctgcttgaatcataaatcaagtaagattcagccacatctactttccttagtgattcagaataacaatgatttatgaaaatttaatttattagatacccagtttctcgacggaaggaacaaaaatttataagcacttcatct

SEQ ID NO: 765610 - DNA, 637 bp, Homo sapiens
agaataaggtaacaggcatgtcaaatcctatattgatatccacataaaaaaccattgatacttacctcctgaatatggaacaggttattctgcataagaaacctacaggaagatgacagctttggaaaaccgaggcactttgagtctagtgtttctcctattcaactcaaaattttctccacagtatttcaagcgggatgctggccaagtaaaagaaagttaggatcctttttctatgtagttttcatatcacttagcaatttaaatacaaaacactaaatatactctatcaaaacacaagggttagaaatatctgaaattcatgaaatagggctaagaaattcaaatgctgacaagagccaagtcagtctctcttcayaggaaatttcaacaaaataccaaaacaaactaagaagaaaggaaatttcaactttagacatatcaggatcagaattcttggtttgttccctgccttagttatacttttcttctctttccaattctaatttagtttaattaatattccaaaaaaagttatgaaattataatttaattccataatgtcggttggtttgcaaaaattagtggcataaaaagggtttattagatttcatgatgtttttcagattgtcttggg

SEQ ID NO: 765611 - DNA, 559 bp, Homo sapiens
caagtcagtctctcttcacaggaaatttcaacaaaataccaaaacaaactaagaagaaaggaaatttcaactttagacatatcaggatcagaattcttggtttgttccctgccttagttatacttttcttctctttccaattctaatttagtttaattaatattccaaaaaaagttatgaaattataatttaattccataatgtcggttggtttgcaaaaattagtggcataaaaagggtttattagatttcatgatgtttttcagattgtctwgggtcagctggacccctcagttccagagagcattacttgaggaaatttaggcaaacatatttagctggaagttggactatagctgcaccatcaagttggcctcagttacatggctgatacctcagctagggtgaatggaacagccagagactggctggtcctctctctccaacaagattcaacttcttacttggtgcttggctttcaaaacagcaaaagtggaaactgtcagatctcttaagctctacacccaaaactgatatagggtcaaagcaagtcacaggg

SEQ ID NO: 765612 - DNA, 632 bp, Homo sapiens
tctcctcttcctgggtggaacccgggatccaagctttgggcgggaagcactctagcaggaacactggcctagcgagagtccctgtttttcccctttcttcctttccacccaataaaactctgtctcactcaccacccaaattgtctgcgagcctgaattttcgtgatggaacaaagaaccccacctttagctgaattaagggaaagtcctgtaacaggaacacattatgtatatgctttcttagtatcctaaaggtattctgyagagcaggacaacacagttgggactctgtttttctttgtttttaaataaatacttaagcaacctagttttgtttggtcctcagagtaactctactaaatctattaccattaagtaaaatggttttatttgctgaactatgattatctaagcttggtgctatcaattgaatttgctgaggaaaaattcaccaaatacattttactccattatattaacttttattccccctggccacctgtttcataagcctggacatattttccttttctttacttaagacatgtatcaaatctacatctatttaagtgaatttgaattatgaagtttgttagatcaaagatacattactttgttttgatagcatttta

SEQ ID NO: 765613 - DNA, 525 bp, Homo sapiens
gtatagcaatatgtttttcaaatctttttaaaacccagattactgcaaaaagtaggaataagataaaagatgttgtgagtcatgtgtgacagaggtctcatcaacattttctgaaacatggataaagaaaaattatcttgaggcctggacagcacacacacacatagctcaraagtgtttgcacactgtagttccaaatacattttcacattgaagattaattcaccagagcctttctaaattgctatgtatgcatttctgtgtgacagaggagagagaagaacagaggtaaatcttttaaagcaggcaatgggggtcagagatagggatgccttactaggcgctgactcaatgtaccatagcatggggcaaattgatctttgcagcatgtggttagctgacaacatcatctcacgttactggcttgatgccttaaaaaaacaaacaggggaagcagagggacatagtaaaatacgccaccctgctgtgcttgtaacatgcacaggaacatgtatctgaatattt

SEQ ID NO: 765614 - DNA, 525 bp, Homo sapiens
gtatagcaatatgtttttcaaatctttttaaaacccagattactgcaaaaagtaggaataagataaaagatgttgtgagtcatgtgtgacagaggtctcatcaacattttctgaaacatggataaagaaaaattatcttgaggcctggacagcacacacacacatagctcaaaagtgtttkcacactgtagttccaaatacattttcacattgaagattaattcaccagagcctttctaaattgctatgtatgcatttctgtgtgacagaggagagagaagaacagaggtaaatcttttaaagcaggcaatgggggtcagagatagggatgccttactaggcgctgactcaatgtaccatagcatggggcaaattgatctttgcagcatgtggttagctgacaacatcatctcacgttactggcttgatgccttaaaaaaacaaacaggggaagcagagggacatagtaaaatacgccaccctgctgtgcttgtaacatgcacaggaacatgtatctgaatattt

SEQ ID NO: 765615 - DNA, 562 bp, Homo sapiens
ggctggcaaaatgcaagagttttctttgccagaaataggaaaatgtacacccaggccagcatctggaagttattcttaaagaaatgtgacattagataaaatgagagtggtgggtcaatttctatttacccatttcactgttccatgctgactaaagtttaatgcaactttaaactaaaatcttcaccctgtttttcattctctttcttcttgttgcatcatgtttatttccaaatccatttgaaaaatagatactggtggcattctattaagacttaggtgaactatggaccttaattattctttttataaaatttgcttaagtaaaarggatcctagagtggaatatatataatatttgaattcagagccacctggctgtaaatacagtgactatgaaaccttaagcaagtgtttcaacttttctaaagttctttatgtgtacatgggtagatcacctgaccactttgaaaaattataattggagtaatacatgatgtatacgaaatactcaactctagtaggcactcaataaactgaactattattactactaatcact

SEQ ID NO: 765616 - DNA, 640 bp, Homo sapiens
gctagtcctggagatttatgactaagggaaaacaatactccaaggaccttcacctactatccacccctcctccctttatcctccctctcttccattatacttccttttcaagttgataaccctaaagaaccacgttatacaaggccatctgctgttcagatattatttaatttttagatttcttctaaaagttaaatgacaatcctcttatttccagagtaattggatttaatgtacaattagaataaaaatacctattacccgtcaatgaataagaagttatagtttctcttttcttcagcactttctctgccccaaaatgaaaaaaaaaaaaagaagaaaatggcaaggaagatttaattttacctcagcctagtcatttttctgkgtggcttttcttttaattactctcatttaatttttttcaattaccaggatagatattaatttgacatagttaaattctcatatctttgataaaatgcactatgcttgaaaatttttggtatggcagaactttctgattcaagttcattagtagcaagaaactcttacatgccataagccccacttcttttaaaaaccgtgtttgaatcttgctcaagttattaagccctatatttccattcagcagatataa

SEQ ID NO: 765617 - DNA, 671 bp, Homo sapiens
ctcaatagatgcagaaaaggcttttgataaaaatcaacatccttcatgttaaaaattctcaataaactagggattgaaggaacacacctcaaaataataaaagcctatctatgacaaacccacagccaacatcatactgaatggggaaaagctggaagcatttcccttaaaaaccagcacaagacaaggatgccctctcttaccactcctattaaacaattcctatttgcagatcacatgattctatatctaggaaaccccacaatttcagccccaaatctccttcaactgataaacaacttcagcagagtttcagggtacaaaaatcaatgtacaaaaatcactagcattcctatataccaacaacagccaagttgagagccaaatcagaaatgcaatccattcacaattgccacaaaaagaataaaatacctagaaatacagctaactagggaggtgaaagatctctacaatgagacttacaaaacactgctcaragaaatcagagatgacacaaacaaatggaaaacatcccatgctcatggatagaaataatcaatatcattaaaatagccatactgccaaaagctatttacagattcaatgctattgctatgaaactaccaatgacatacttcacagaactaggaaaaaactactttaaaatcata

SEQ ID NO: 765618 - DNA, 594 bp, Homo sapiens
attctttctgctactgtccaaatgtttatgtccccccaaaatttgtatgttgaaacctagttaccaatgtgatggcattaggagatgggggcagggagtcttttgggatgtgattcagtcatgagggtggagccctaataaatggaactagtgcccttataaaagagcctcagagagctggtttgcctctcccatcatttgagggcacagcaagatggcactgtctgtgaaccagaaagtgagtcctcaccacacaccaactctacctgtgtctttatcttggatttctccacttctggaactgtgagaaataaatttctattgtttccaagctacccagtctatggtattttgttacagcagcccaaatggactaaggcactttccatttctgtattgtattgtgtgaatgtgygcttctgtgttcctagagctaaaagctagtctgagtgcctgtctgcatgtccaggctttggtttgaatcttggtttattcctttcctggttgtttgatttggggcaagttatttttcctctgtggcccccctataaaatttggctaatagtaataccctccttataagattgttgtaaa

SEQ ID NO: 765619 - DNA, 631 bp, Homo sapiens
ccctcataaaatttatagtcatcaacatttaagtatcaatgtggctctctagtgatagagtcagagtttaatattcatgtatcttgtcctaccatttcataaaattagtaaacataccaactgggacatataggggctgtcatcagaacatttgctttcagccataatgtagtaaaagggactagatttactctcctgcctaaaacaacccccaaagcagagaaaatacatgaaatagtgcattacaaaacaatggacatcataaaatacaacacagttatcctgtgaatgtgagacaaaaggaaggaggaacccaaggagagctagtagacttcccaagttgagagtcaagggagaccaaggcgctggagagtttcccaaagtgttcagcagagtacatttggctcatgcttgtgaggagaccacccaaggctggggaaataactgagaggaactggagaaacagygcatagtgtctgctttcaccagccagactggaaaacctcatgagacatggggcattaataaaattactcagaaggatcttgcctcagtagtgggggacaaatagccttggactaaatacagctctggccacctcctaaaatagcttgtagtttatttaatcatt

SEQ ID NO: 765620 - DNA, 631 bp, Homo sapiens
ccctcataaaatttatagtcatcaacatttaagtatcaatgtggctctctagtgatagagtcagagtttaatattcatgtatcttgtcctaccatttcataaaattagtaaacataccaactgggacatataggggctgtcatcagaacatttgctttcagccataatgtagtaaaagggactagatttactctcctgcctaaaacaacccccaaagcagagaaaatacatgaaatagtgcattacaaaacaatggacatcataaaatacaacacagttatcctgtgaatgtgagacaaaaggaaggaggaacccaaggagagctagtagacttcccaagttgagagtcaagggagaccaaggcgctggagagtttcccaaagtgttcagcagagtacatttggctcatgcttgtgaggagaccacccaaggctggggaaataactgagaggaactggagaaacagtgcatagtgtstgctttcaccagccagactggaaaacctcatgagacatggggcattaataaaattactcagaaggatcttgcctcagtagtgggggacaaatagccttggactaaatacagctctggccacctcctaaaatagcttgtagtttatttaatcatt

SEQ ID NO: 765621 - DNA, 544 bp, Homo sapiens
acactggagttcccaatttcataaaacaattactactagacttaagaaatgagacagcaacacaataataatgcggggacttcaatactctacagacagcactagatagatcatcaagacagaaagttaacaaagaaacaatggatttaacagatatttacagaacattcttcccaacaattgcagaatatacattctcctcatcaccacatrgaacactctcccacacagaccatatggtaagccacaaaacaagtctcaataaatttaagaaaatcaaaattatataaggtatcttctaaaatcacagtggaataaaactggaaatcaacaccaaaaggaaccgtcaaaactatagaaatacatggaaattaaatgatctgcttttgaatgatctttgggttaacaatgaaatcaagatggaagttttaaaaaattttgaaatgaataataatagtgacacaatttatcaaaacctttggaatacagcaaaagcagtgctaagagaagagttcataccattaaatgcctacatcaaaaaccc

SEQ ID NO: 765622 - DNA, 626 bp, Homo sapiens
cccaatctgtgggttgtctctttattccattaattgtttcctttgctgtgcaaagctttttagtttgatgcaatcttacttacctatttttgtgttgattgtgtttgggggtcatatgcaagaaaccactgcccagaccaatgtcatggagctcttctcttatgtttttgtagtttttagtttcaggtattacatttaaggctttaatccattttgagttgattcttgtataaggggtgagataagggtccagttttattctgtatgtgaacattcagttttcccaataccrtttattgaagagactgtcctctccctattgtgtgttcttgctacctttgtcaaaaatcaattgatcaaaggtgtgtaggtttattttagtcctctttgtcttattccattggtctgtttttatgtacttgccatgctgttttgattattatagctttgtaatacattttgaaatccagtagtgacatacttccaattttattctttttagtaaagacagctttggctatccagggtcttttgtggttccatgcaaattttaggattttttaaaaaaaattctataaagaacaatatgcagattttgttagtattgtgtcgaatctttagattgc

SEQ ID NO: 765623 - DNA, 633 bp, Homo sapiens
tggtaatgtttttattgctcagtgtatactttctcttgaactcagtgggtttatttgggtcttaataattcagaatataaaaactgatgacctaataccacgtatattgatgctaacggacatgtttagaatttgtcagactatgtaagctattatgaaagttactgctttctctttctccaacataaaaatattcagaggcagaaagatagacatgaataatagagttttttctccattttatttccttgatttctgaaacaaatttaaacagaactaagaagayaggaaaacaatcacatcatatttagctaagttaaaactgcttatgtccaaagaagaaaaatgtgcattattaagagtatcttggctagcatagccagctgcctatccgataccctttctttccttcttagctaaaaaaatccaaattctgttcagactagcaaggttttataactaagttaccaattttcacattttgaattatgaagaaagaaacacacctattcagttaaaacactcaatcctcccaagatccttagaagttaggaatggtcacgtgacacatttctggttaatgcactgttcaagtagaaactcttctgtgtggggctgccagaaaagcactgg

SEQ ID NO: 765624 - DNA, 568 bp, Homo sapiens
acaagtatttactctgcttcgagtttgttgagtttcttggatccattcatagttttcatcaaatttgaaatgttttcagccattatttttcctcaattttttttgccttcacttccttcttttgaaacaagatcacatgtatgttaaaccacttgatrctgctccacaggtcactgagctttcattcatttttctcagttgtttttctcactgtgttttactttggatagtgatatagtttggatgtctgtcctccccagatctcatgttgaataaaccccaatgttggagctggggcctggtgggaggtgtctgggtcatggggcagatccctcataaacggcttggtgccctccctgtagtaacgttaccttgaaatctgattgttaaaaagagaatgccctccccatagtaagaagttatcatgagatctgactgttaccttccccctgactcttgctccttctctcaccatgtgacactcctgctccccttcccctctgccatgactcaagagcttcctgaagcctcatgagaagctgagatccggatgccatgcttgcacagc

SEQ ID NO: 765625 - DNA, 572 bp, Homo sapiens
aactttgctagtttagtacttgtctctaaattgatgttcacccatttcaatattgcacttattaatggtctttatttttctagcatagataacaattgattctttagattcatatatggaggtaattcttgctttctaaagaaaggaatatggcacattggaaccattttattcaccagtggatttacccttagagtatttttagatctgagctgatgacttgtgagagaaaaagggaacagagtaaagccatggaagccatgaacagtaagagactgcygcctggcatggtttcttcttctgcagaagatgaaactgaggagaaacaagacaacatccttcataccaggaatggtcaagataatgcaagaagaaaaaagctttcaaacaaatcagaaggcagtcaacaaacagaaagggggacattccttccctggcagttactcaaaactgaaattgcttattgtgtacaccggggcttgtacttggggaatttaataaaaatgctcattaccaagctccagagagatgtggtttaaagtcttaagtagatccaaggaataacctacatt

SEQ ID NO: 765626 - DNA, 581 bp, Homo sapiens
aaagatgtcttttgcccttggaaggccatagaatatcaagttgaaatttgcaaaaactctaaaatgatcaaggtcacattttcatcttttaattgagaactcattgtggacataatttgtcactgcttgtaaagtgtaaaaagaaacaaccaaaacagactttgaaagaatggtttatatgaggaagccctcctccccccsagaaaagggctattaagatgaaagtgaaagaaggagttggaggcagcaaatgttattgttgatgttggacaaaggaaggaataaactgtatgacaccaccttgaacttgaaagtcgtttgttttttaaccagaagatgaacaagaactatttagaatatcaaatcccaagagcagctttcatgtattttgctgtttcctaggtatgtgggtggcctcaccgcatagtcctgtgacaaatcttaattatttttttcaccaacacaacttgccatattttatataaactacttagatacatatttagactgtttctcaagagtgctttatagttgagtacaggttttatgcattgttagaagcataaagacgcttgtttttt

SEQ ID NO: 765627 - DNA, 581 bp, Homo sapiens
aaagatgtcttttgcccttggaaggccatagaatatcaagttgaaatttgcaaaaactctaaaatgatcaaggtcacattttcatcttttaattgagaactcattgtggacataatttgtcactgcttgtaaagtgtaaaaagaaacaaccaaaacagactttgaaagaatggtttatatgaggaagccctcctccccccgagaaaagggctattaagatgaaagtgaaagaaggagttggaggcagcaaakgttattgttgatgttggacaaaggaaggaataaactgtatgacaccaccttgaacttgaaagtcgtttgttttttaaccagaagatgaacaagaactatttagaatatcaaatcccaagagcagctttcatgtattttgctgtttcctaggtatgtgggtggcctcaccgcatagtcctgtgacaaatcttaattatttttttcaccaacacaacttgccatattttatataaactacttagatacatatttagactgtttctcaagagtgctttatagttgagtacaggttttatgcattgttagaagcataaagacgcttgtttttt

SEQ ID NO: 765628 - DNA, 581 bp, Homo sapiens
aaagatgtcttttgcccttggaaggccatagaatatcaagttgaaatttgcaaaaactctaaaatgatcaaggtcacattttcatcttttaattgagaactcattgtggacataatttgtcactgcttgtaaagtgtaaaaagaaacaaccaaaacagactttgaaagaatggtttatatgaggaagccctcctccccccgagaaaagggctattaagatgaaagtgaaagaaggagttggaggcagcaaatgttattgttgatgttggacaaaggaaggaataaactgtatgacaccaccttgaacttgaaagtcrtttgttttttaaccagaagatgaacaagaactatttagaatatcaaatcccaagagcagctttcatgtattttgctgtttcctaggtatgtgggtggcctcaccgcatagtcctgtgacaaatcttaattatttttttcaccaacacaacttgccatattttatataaactacttagatacatatttagactgtttctcaagagtgctttatagttgagtacaggttttatgcattgttagaagcataaagacgcttgtttttt

SEQ ID NO: 765629 - DNA, 581 bp, Homo sapiens
aaagatgtcttttgcccttggaaggccatagaatatcaagttgaaatttgcaaaaactctaaaatgatcaaggtcacattttcatcttttaattgagaactcattgtggacataatttgtcactgcttgtaaagtgtaaaaagaaacaaccaaaacagactttgaaagaatggtttatatgaggaagccctcctccccccgagaaaagggctattaagatgaaagtgaaagaaggagttggaggcagcaaatgttattgttgatgttggacaaaggaaggaataaactgtatgacaccaccttgaacttgaaagtcgtttgttttttaaccagaagatgaacargaactatttagaatatcaaatcccaagagcagctttcatgtattttgctgtttcctaggtatgtgggtggcctcaccgcatagtcctgtgacaaatcttaattatttttttcaccaacacaacttgccatattttatataaactacttagatacatatttagactgtttctcaagagtgctttatagttgagtacaggttttatgcattgttagaagcataaagacgcttgtttttt

SEQ ID NO: 765630 - DNA, 596 bp, Homo sapiens
ataaaggagagaagtgtaattgactcatagctccacagggctgaggaagcctcaggaaacttataatcctggtggaaggggaaacaagcacatccttcttcacatggcggcagcaaggagaagtgccgagcaaaagggggcaaagttccttataaaaccatcagatcttgtgagaactcactcactgtcaggagaacagcatgagggtaaccgcctccatgattcaattacctcccaccgggtctcatatgtggggattatgggattacaattcaagatgagatttaggtggggacacagccaaaccatatcaagggcctatgagaatatttggtctgagatgttatcagtggaagtcttttttttttttaatgyagatgttcttatttctatgagacaaaatggtaatacatctattgtgagggaattattcatcaaacatatgcagttttatcattctgcactgtaggaaggttgaaggaacacgtgtctgggtgtagtttgtgtgttacttctcacagaattactggtgtattatattatgttctattctgggtgtcttgaggcctgataagacaagcatggccatgagaaat

SEQ ID NO: 765631 - DNA, 632 bp, Homo sapiens
gaggtggagaaagacaagccgcccaatccccgggaactctctgcggcgctcgacccccatcacgtgaccgttctttcatcgttctgttcctaaaccggaatcggagtccaagagagggactggacttaggcgtttaacagttgrcatgctttaatgcatagtacacacagtgcagtcctggagcttgtagaagtcacttcgagctaggtctttgttttgtcaaccaccttcaccccttaaattcactgaacgtaatgtagcagcatggctggggaaagaaactgtagctagtacgccgtgttcatttgcaactcatggctccttcgcatgcctagtgtctaacacaggctgcagaaacttttcctgccgctttgttttaggagatgaagaattcttttcccgaacaactgctgctccagggcactgtgctcacttttctaggggaagtgactctgaaacccaaaattccctggataccaccagagaatggctgaacaggaagttttcttctttatttaaattagtaaattcgactgttcatgcgagccaaaggcagtgtcataggtgtctgtgtggacccgaaggtgaccttgtcccatgagagggatgctgtccaccagggaagggaccat

SEQ ID NO: 765632 - DNA, 588 bp, Homo sapiens
ccaggacagaagtccagtacaagctcatggtcatagctgcgagtttgggggcagcacggaaaggcacgctttctgctgcttctctcggtagcacatccgtcatagccacttgcactcaccagggaccatggaagccgcccctctccctgccagccacgcttctcccatcttccatggacagtcacatcctgcttccctgcccggggtcccagggtgagtgcttgggcaagyggggtccttcctgcccgccccccaccacacccaaggccctcagctctgcaccagccttcgcttgagcatgcagggacattctggcgatgcctctgtcaaaagcacaggctcctgttcctcctgcagtctagcacgcgtcactaacgtaacaggtatttgatgtgtttcatgaagaaatggacaagaacttaatgcgacggactttacaatgttgtttttagaggtcttcaagggatcaatatggcacgagagcagaagatgtggagtgtgctgacagggttactcctctgagggtgcaaaggtagggcaagtgatgagggcagggaacaggctgtgcttctgaaggtgcagagctgg

SEQ ID NO: 765633 - DNA, 584 bp, Homo sapiens
catcctgggaacctgtccgtgccccttgctgcttctgccctgtggacacagggtcttgccccctatctgcgttgtgtggccacattgcattccagccaggatcaaggatgcagggaagaattgtgagccatccaccaacaaggacactgccagggagytgacttgatctctttgctcataccctatcggccagcacttggccatatggccacaccttgctgttaggaatctgggaactgtagtcaaggcaaccatgtactcaggtgaaagccaggcgttccattagcatacagcagtatttctgggatgagggtgatgaggatgatgttggtattcagggcagggtagtctgttgtgcagtagggtactaagttatccagttccccagtcatatgacaattcaaaatcatctcctgttgaggaccattgccctgtatgaagcagaggactgctgccgaggtacaattaattggaagtgcttgctggatcggcctaaagcaatacatcactgatgccatccacaccacctctattcaggaggattgtcctctgtgaccacggactaggtcaaggaagcagttgtc

SEQ ID NO: 765634 - DNA, 485 bp, Homo sapiens
aaataatctcaagctttttaatctaaatttttaggaactttttatttccaatgaagccaaatagttttaatgtttacgcatttatcttctacagaaagctattaatgtcatttctatgttttattctgattttcccattattgtttagtttctcattattccacatgcacagtagaagcccctggccagcctaggacagctctgcaagttgtccccagtttttctctttgccttttcatttgattatggtgcttttgattcaatgctgtgacctttaattttaacgtgtyaccttgactgaccacagagtgctcagaataaatattatttccaggtgtgtctgggagggtgttttcagatgagatcagccttggagtccttagactcagtgaagcaggtgccctcccaatgtgggtggcctcatcctatccattgagggcctgagtggagcaaaaggcagaggaagagggatttggccccttttt

SEQ ID NO: 765635 - DNA, 617 bp, Homo sapiens
ttgttgaaagtgtaattaaagaagtagagtagtaaataaattagagtaatatataaataattgagctttttaaaaaataatccttatatttctgaaaagggaaaatactgatccaattacggatactaaatacaagaatcaatcttagtacatcaggckcagggaatatgagaaagacacaggtgaagctgagtttatgttttctcatctgccggtccatggcaggacatgaagagttgggtaatttatggtttggaacgcatgctcacttttgcaggactttggaaagccaagtctaattacacccaaatcatagttactcctggaggcgttgcctgtgtacgaatccaacaccaaccggatgttcctcaggagaccgtttcatagaccatgggctgctgcactgcagtgtggacgggcatgaaataacttgcactcccatcatttatgtgggggtttgaatgcaaacagcgagtatgcatcttattaagaaatgcgtgtcacccagctccatagcctcgctggaaattccagctacccgaagcaggaatgaggatgccaacattaatacacacacacaaagacatttttcagctcagggacaagactttcatagc

SEQ ID NO: 765636 - DNA, 548 bp, Homo sapiens
agtagactgatttcatcttgatagtccaggtcaatcacgccagccaacactgtaattcccttattagcaggttgacttaaaggcaggagaagcccaaagtatccaggtggcaatcttaactccaagtttaatggaaccattgttgtctccyggtggcagtgttcctccctctggaactaagacctctaggccagcagaacataatgtcgcagtaacaggaagtaaaaattttgctagtggatcattagggttgatggtgagtggtgccacttccacttccaccccttgattcctggacccgtgaatcctggctatggaagaaacagtaccatatattggatgctgaatcagagcacacacggccatctggagaactttgccccagccctagccaagcattgtcagctagttggcattgtaattgtgacttcaaaaggccatgccaccattctatcaatccagctgcttcaggatgatgggaacgtggtaagacccatgaattccatgagcatgagcccactgccgcacttctttagacataaagtgag

SEQ ID NO: 765637 - DNA, 507 bp, Homo sapiens
acctgctatgttaaagccttttgcttctcggcctccagtaaaataagctcagtgttctaatgttcaatccccatgtaaagtagttcatcacaaaactatcacccttactttagcacaattggccgtcactattcacataaaacagaaaaataagttaccatggagacaaagccaattcttctctccagaatggctgattcttccaagtcagaatagatttttaccagaaaagtcatataaagtactcacagaaactggcagtccaaatctgtcgccagtaactgtagaggtaaccatrtatagattatcattcaatagaatacaaaaacaaatattgcactaaaagataatcctatgtaatcactatttacaaaataaaaccctatgtccttctaaacagtgtagaaagtttaaattatgttttctacctctacttagtgctttattaatggggtgaccacactgtttgacctatttgctaaaatttgctagatctccaggagaaca

SEQ ID NO: 765638 - DNA, 669 bp, Homo sapiens
ggtaatatatattcccaaatatttgagaactcatgtcaagtcctcccaagggtactttcaaaaattcttacagtgtttgattgaaaagttagaaaggggcaaacaaaggtgtcctttatttttacaaattccctttaaggaccttcctatattaactttctagtcttcttttatctaggttgtggtcactctgttcttttggcaattttgtagtaggtgctgcatgaatgtatccagtctttttgccagaattctgagactactggaaagatccattacatcatattataaaaatagtcaagagaagaggttgaycagacaacaaagagaaagcacaacgaataaattcgggaagccaagaatgtgcaaagtggaaagatctgcttcagagagccagtgtcattctgtgagaaattagaaacaggtgtttttttgtttttgttttgttttttatgtaaaggatattctggtattgtgaggctttcaaatatattatctgtcaagtgacagactcaaatctgtcctttaaagtaaaaacaagaggggaaggcagagagcaagtatgttggaaggttatgggaataatttaaagggagtagagagtagcattccttaataaggaagaagcagctgaagtgggagaagatagattcaagaaagattatggag

SEQ ID NO: 765639 - DNA, 669 bp, Homo sapiens
ggtaatatatattcccaaatatttgagaactcatgtcaagtcctcccaagggtactttcaaaaattcttacagtgtttgattgaaaagttagaaaggggcaaacaaaggtgtcctttatttttacaaattccctttaaggaccttcctatattaactttctagtcttcttttatctaggttgtggtcactctgttcttttggcaattttgtagtaggtgctgcatgaatgtatccagtctttttgccagaattctgagactactggaaagatccattacatcatattataaaaatagtcaagagaagaggttgatcagacaacaaagagaaagcacaacgrataaattcgggaagccaagaatgtgcaaagtggaaagatctgcttcagagagccagtgtcattctgtgagaaattagaaacaggtgtttttttgtttttgttttgttttttatgtaaaggatattctggtattgtgaggctttcaaatatattatctgtcaagtgacagactcaaatctgtcctttaaagtaaaaacaagaggggaaggcagagagcaagtatgttggaaggttatgggaataatttaaagggagtagagagtagcattccttaataaggaagaagcagctgaagtgggagaagatagattcaagaaagattatggag

SEQ ID NO: 765640 - DNA, 613 bp, Homo sapiens
cacatgtattgtgctaagtttatagactggttttgttattgtattctagttatgtaagataaccatgggagaaactgagtgacgggtacatgagagctatctttgtaacttcctgtgactttactatttattaattctaaataaaaggcttagaagaaacaaagaaaagcctgagatttttgccaagcccttccaacttcaaagtctgtttcctctgtattgaataacagctaaaattctgcccagctttttcagacttctagctattgagttctgctcagcaaattggaatcttcctcttgcctctagttcatccatggatttgaagagagtttgtcatcagatctgcaggtttcttcttttacaagtgcctccttttcaggatttccctccttaatttccagccactcttgcaggcccacattgcatcttcagatacctcargttaataagatggtagctttctctgcttgaattccagccactctatactttgtagaatgcagagtgccctcagaggaacagtcagataaaggcagacctcacccactgttgttcccttcttccaagagttgaatcccttagaaattctgcccactttttttcaatctcc

SEQ ID NO: 765641 - DNA, 672 bp, Homo sapiens
catatgcccccagtacagagcctgtaccactgataatatccctgtatcagagtggcacctttgttacaatcgatgaactacattggcacaccattatcacccaaagcccatagttccatcgtttatatcagggttcacctttgttgttgcacagtctatggatggcatgtgtctaccattatagtatcatacagaatatagtttcggtgcactaaaaatccgcggtgttccacctattcatttcttcttcccctctaactcctggcaatcagatttttaaaatgtcttcctagttttgccttttccagaatgttctatagttaggatggtatagtacacaatctttttttttttttttttgaggtggagtctcgctctgtcacccaggctggagtgcagtggtgcgatctcagctcactgcaagctctgcctcycgggttcacgccattatcctgcctcagcctcctgagtagctgggactacaggcgcccgccaccacacccggctaattttttgtatttttagtagagatggggtttcactgtgttagccaggatggttcgatctcctgacctcgtgatctgcctgcctcggcctcccaaagtgctgggattacaggcgtgagccactgcgcccagcccagtatgtaaccttttaagattgatgtatttt

SEQ ID NO: 765642 - DNA, 652 bp, Homo sapiens
atttgggattctcccatgtcttttcagggctcaatagctcatttctttttagtgctgaataatattccattgtatggatacaccacagttttttatccatatacccactgaaggacatcttggttgctttcaatttttggmaaatataaataaagctgcaatagccatctgcgtgcaagtttttgtgtagagataagtttcagattaatttgggtaaacaccaagaagctcaattagtggattgcatgataaaaaatgtttagttttgtaagaaactcccatcaactgtcttccaaagtggctgcactcttttgcattctcatcggcaattaatgagagattctgttgctccctatctttgaaagcatttggtattgtcagtgttttggatttttggtaattctaatgggtgtgtagtggtatctcattgttttagtctgtaatttcctgatgacatgtgatgtggagcatgactcttaattttcttacttcattttattgatttttggtttggcttagtagtgtctttattgcaaaaaataatacttgcctcatgggattattatgagaaataaggaaagaatctgataatttcaaatacagaggtgaatttatagacttcatttctatatcttgctcaagtttgataagg

SEQ ID NO: 765643 - DNA, 652 bp, Homo sapiens
atttgggattctcccatgtcttttcagggctcaatagctcatttctttttagtgctgaataatattccattgtatggatacaccacagttttttatccatatacccactgaaggacatcttggttgctttcaatttttggaaaatataaataaagctgcaatagccatctgcgtgcaagtttttgtgtagagataagtttcagattaatttgggtaaacaccaagaagctcaattastggattgcatgataaaaaatgtttagttttgtaagaaactcccatcaactgtcttccaaagtggctgcactcttttgcattctcatcggcaattaatgagagattctgttgctccctatctttgaaagcatttggtattgtcagtgttttggatttttggtaattctaatgggtgtgtagtggtatctcattgttttagtctgtaatttcctgatgacatgtgatgtggagcatgactcttaattttcttacttcattttattgatttttggtttggcttagtagtgtctttattgcaaaaaataatacttgcctcatgggattattatgagaaataaggaaagaatctgataatttcaaatacagaggtgaatttatagacttcatttctatatcttgctcaagtttgataagg

SEQ ID NO: 765644 - DNA, 652 bp, Homo sapiens
atttgggattctcccatgtcttttcagggctcaatagctcatttctttttagtgctgaataatattccattgtatggatacaccacagttttttatccatatacccactgaaggacatcttggttgctttcaatttttggaaaatataaataaagctgcaatagccatctgcgtgcaagtttttgtgtagagataagtttcagattaatttgggtaaacaccaagaagctcaattagtggattgcatgataaaaaatgtttagttttgtaagaaactcccatcaactgtcttccaaagtggctgcactcttttgcattctcatcggcaattaatgagagwttctgttgctccctatctttgaaagcatttggtattgtcagtgttttggatttttggtaattctaatgggtgtgtagtggtatctcattgttttagtctgtaatttcctgatgacatgtgatgtggagcatgactcttaattttcttacttcattttattgatttttggtttggcttagtagtgtctttattgcaaaaaataatacttgcctcatgggattattatgagaaataaggaaagaatctgataatttcaaatacagaggtgaatttatagacttcatttctatatcttgctcaagtttgataagg

SEQ ID NO: 765645 - DNA, 652 bp, Homo sapiens
atttgggattctcccatgtcttttcagggctcaatagctcatttctttttagtgctgaataatattccattgtatggatacaccacagttttttatccatatacccactgaaggacatcttggttgctttcaatttttggaaaatataaataaagctgcaatagccatctgcgtgcaagtttttgtgtagagataagtttcagattaatttgggtaaacaccaagaagctcaattagtggattgcatgataaaaaatgtttagttttgtaagaaactcccatcaactgtcttccaaagtggctgcactcttttgcattctcatcggcaattaatgagagattctgttgctccctatctttgaaagcatttggtattgtcagtgttttggatttttggtaattctaatgggtgtgtagtggtatctcattgttttagtytgtaatttcctgatgacatgtgatgtggagcatgactcttaattttcttacttcattttattgatttttggtttggcttagtagtgtctttattgcaaaaaataatacttgcctcatgggattattatgagaaataaggaaagaatctgataatttcaaatacagaggtgaatttatagacttcatttctatatcttgctcaagtttgataagg

SEQ ID NO: 765646 - DNA, 626 bp, Homo sapiens
ggagtaagtgctacaaaagaaaagtctaagaggtcacaagagtataagaagagggtctgccttgcctggagcatcagatgctcccctgaggaaggagcctgtgagctgagcggtccggatgagcaggtgttttctacagtctgtgcattgtgtctgctgagaatctggaaattaaaaatgctgctgttgggggtttcaccatgtacggacgaggcaggagttcctccaaaaaatacaaattccatgaggttaaatcagacctctcagccccaatcaaaaggtaaggacttcgtggaagctaaggtcaaagtccaatcgatttaatagaccctgagaatgtaacatcctatggaagctgaaatctaagtgcaggttagttctcccaattgctttctgccctttaaggttagagaaagatgacagcaagaagcataaaactcagttgtggctctcagagcagtccttgttttgakgttttcttttttctgtcttctcctttcccccctgtctcctctctgtctttgtcctccttcctctaccttctttatttttcactgttatagattagtaccatctattctattaatattgactataaatgcatgttttcttcatgttaaatgcct

SEQ ID NO: 765647 - DNA, 626 bp, Homo sapiens
taaagaattttttattaattagatatcaaaaataaagagatcacctatattttaatgatgaaaggaaaattagaattttccagaaaaaaaccttttctaaatggaaaaatgactgtaaagaattagagtacagtaaatgttaaacatgctgaatataggaaagcagcttttattatattctttatgcatttttgtactttctgtaaattctccaaagaatgccgattagctttacaataaaaaacattaatatattattatagcaaaaatatacaatcaaatttaaaattgctgattgattgtggctcacatcaaaatataagtctttacttcagtagagactatttgctattactctacagtaacctctcagaaatgaatggttctcartgatttagcactttaaatatgatacttaagaagtaagatatccatttacactgtccactcctcctccagagaaaaataagaaagagagagaaagcctactctaaaaatagcaatctatctttttaagcaatagcaaggtcattgcttaaaaagattctcaaacctcacctttacttcttttgaaggcccgttattgcaggcagggaagtttcccaccagcatgtacaacctcaagc

SEQ ID NO: 765648 - DNA, 679 bp, Homo sapiens
gtaaatattgcatgtccatttgatggagcctgggtgttagtttcatctttcatctggttctttcttctgtggcatagtgatgcccgcatcctggaaagcacccagcacagtgtggatgccctgataaatattaaaggatgatgatggtaatgacagagcagagccctgtctttgcagctgtataattcctcccttacattgcatgcctcctcagacagctgtcacatcctttctttaagaagcagagatttcttgccaaattaaagcttgagatgagcacattacatcctcatgtcaatgtgggaatgtgagatgtgaatgcctacagccatagacgccactcagaggcacatctatttgataaatactcttctaagagtcaattcagatcgactacctggccagttcaatcaatcatacagagaactgccccaragagtttataacatgcccaaaatattgaccaattccaggagggaaatgtccagtccatttgagacctcttagcacattttagctgagtagcattaattttaaattaatgtgtttttgaagatttttaaaaatatgaaatttaatgaaatttttttgagagactaaggagatataatcatcaatatcaatgtcagtttttaaggaatgaataacactactgaggcaatttgccagtcactataca

SEQ ID NO: 765649 - DNA, 617 bp, Homo sapiens
tatctatcagttatttcatcatttagctccctcttataagtgagaatatgtggtatttggttttctgtacctgtgttagctcattaaggataatggcttccagctctacccatgtccctgcaaagaacatgatctcattcttttttatggctgcatagtattccatgatgtatgtgtaccacatttttttatccagtctatcgttgatgatcatttaggttgatcccatgtctttgctattgtgaatagtgcttcaatgaacataagcatgcacatgtctcccattctgtagactgtttactctgttgataagtgttttgttgttgttgttgttgtttgttttttgctgtgcagaagctcttaaatttaattagatcccatttgtcaatttttgcttttgttgcaattgctttttgtgtcttcagaagacagctctttcaagaaccctattttgatacggaaaayccatctctttcatttataaacatcctgtgtattctgtcctttctgtgacttttatttaagagtctctgttaagagtctggatttgtatgtcttttccacccaccttagatatcctggcttgtatttcctttgtgatactccacagggacctt

SEQ ID NO: 765650 - DNA, 554 bp, Homo sapiens
gcatgagaactagatgaagcatacacaagtatcagtagtcgaatatatcaagcagaagaaaggatatcagaaattgaagatcaacttaatgaaatgaagcataaagacaagattagagaaaaaagaatgaaaaggaacaaacaaagcttccaagaagtatgggactatgtgacaacaccaaacctacgtttgattagtgtacctgaaaatgacggggaaaatggaagcaagctggaaaacacccttcaggatattatccaggagaacttccccaacctagcaagacaggccaacattcaaattcaggaaatacagagaayatcacaaagataatccttgagaagagcaaccccaagccacataatcttcagattcaccaaggctgaaatgaaggacaaaatattaagggcagtcagagagaaaggtctggttacccacaaagggaagcccatcagactaacagtggatctctctgtagaagccctacaagccagaagagagtgggggccaaaattcaacatctttaaagaaaaaaattttcaaaccagaatttc

SEQ ID NO: 765651 - DNA, 554 bp, Homo sapiens
gcatgagaactagatgaagcatacacaagtatcagtagtcgaatatatcaagcagaagaaaggatatcagaaattgaagatcaacttaatgaaatgaagcataaagacaagattagagaaaaaagaatgaaaaggaacaaacaaagcttccaagaagtatgggactatgtgacaacaccaaacctacgtttgattagtgtacctgaaaatgacggggaaaatggaagcaagctggaaaacacccttcaggatattatccaggagaacttccccaacctagcaagacaggccaacattcaaattcaggaaatacagagaacatcacaaagataatccttgagaagagcaaccccaagmcacataatcttcagattcaccaaggctgaaatgaaggacaaaatattaagggcagtcagagagaaaggtctggttacccacaaagggaagcccatcagactaacagtggatctctctgtagaagccctacaagccagaagagagtgggggccaaaattcaacatctttaaagaaaaaaattttcaaaccagaatttc

SEQ ID NO: 765652 - DNA, 554 bp, Homo sapiens
gcatgagaactagatgaagcatacacaagtatcagtagtcgaatatatcaagcagaagaaaggatatcagaaattgaagatcaacttaatgaaatgaagcataaagacaagattagagaaaaaagaatgaaaaggaacaaacaaagcttccaagaagtatgggactatgtgacaacaccaaacctacgtttgattagtgtacctgaaaatgacggggaaaatggaagcaagctggaaaacacccttcaggatattatccaggagaacttccccaacctagcaagacaggccaacattcaaattcaggaaatacagagaacatcacaaagataatccttgagaagagcaaccccaagccacataatcttcagattcaccaaggctgaaatgaaggacaraatattaagggcagtcagagagaaaggtctggttacccacaaagggaagcccatcagactaacagtggatctctctgtagaagccctacaagccagaagagagtgggggccaaaattcaacatctttaaagaaaaaaattttcaaaccagaatttc

SEQ ID NO: 765653 - DNA, 595 bp, Homo sapiens
gagaaagaaacacttcttatttttgaatttactttcatttggacaggatttgttttcttcttctcttcttaagaatgcaactataatatattttaagtagtacagtttgctttgctgatgtgcgtactcagttgaaaaaagtgtgtaaaaattgttttacttatagatagccttcatgtggtggctttctcaaatgttagctgtattattggtgtactgaatgggtgagaagactcatagcctcctgagactccatgctggtggaggtcatgagaagcttatctcattcctaagcactgtgcatttatgtccagaatttgtagtgggttgttaggttgacttccaggatagtaggtggcactcacaggtaagagctggctgctgtggtacctgtaggatttatgcttaattgtttactagaagaagttctctggtgccmcaggcaataagctgatctgtagaatacgcagtggtctctgtcccatgtttagcctcagagaatgagggtgtagctgggcagagctggaccaggcaaactcacactcaggctccccagtgtcgggtgcaagcaccctcacaggaatggcagggaagt

SEQ ID NO: 765654 - DNA, 518 bp, Homo sapiens
cgttagttcacttaaaataatgccttccagctccaaccatgttgctggaaaggatatggctttgtttttatttatggctgtatagtattccctggtgtatatgtaccacgttttctttacccaatccactgctgatgggcacctaggtggattccaggtccttgatattgtgaatagcactgcaataaacctacagatgcgtgtgtgtttttgattgaatgaacaattttcctttgagtatatacccagtagtggggttgctggattgagtcrtagctatattttaagatctttgagaactcttcacattttgcatattaactctattatatatgtggtttgcaaatatttttttcatacagtagattgtctcttcactccgttgattttttaaattgtatagtacctttgttttaatgtaatcttatgtgtccatttttcttcactttgttttattttagtagttatacagtttcaggtcttatgctttaaatcttttatccaatttgagtttattt

SEQ ID NO: 765655 - DNA, 579 bp, Homo sapiens
agcttagtgtggaattagaaactttattcattggtgtaaccaaaccacctagtgagttaccctaagaattgacacaaatctcatattttaggagattatattggttctgcctctggcatgctggtagactagggccatctcaacttattrttttccagaggttctcctccagacaagatttgcagtaagcaaagagttatactctacctgtctctaaattttctttttcttttctctgtatccttgtcattggccacacacacacagatttgtgtggcttttattgtagaactaaacttagcatagtgttctgttgtttacatgaagtgtgagttttcttttgtttctgctgttttccaactaaagatttttttctaagtaaatattttcaacaattgatttgaaaaaatttgtcaggattatttcagcttttcacatttattatctgaaattcctatttcctattaatgtaggaggtggatgcagactttattaatatgaggaaaagaaatgctcagttgaaggacatttccctattttctataaaacaatggttaaattcattttctattttgttat

SEQ ID NO: 765656 - DNA, 622 bp, Homo sapiens
atggtatatatgttttgcaaatattttctcccgatctgtgacttgtcttttctggaactttggaaataaagctaaggcacagaacaaacaaacttaaatggtctatccaagagaaactgctgaatcttagtaagctagtaggkgtctgtgatattttaacttggggatcccaagctcagtggcatcgtattcaaactctggcagccttgcagtcagtagagaggtttgacctcttttggacctctgttaaaagaagtaaaagtcgtgttcactgaaaactataaaacattgtagaaagaaatgaaagatttaaataaatggaaagtcatcccatgttcatgggttggaaaacaatattattaagatgacaaaactccccaaattgatctatagatccaatgcaatctctaacaaaatcaccgctggctttcttgttttttgttttgtttttttgcagaaatcaacaagctgatcttaaaactaatatagaaatgcaagagacacaaaatagtcaaagcaatgttaataatgaaggacaaagttgaaggactcacacttcctaatttccaaacttactacaaaactacagttataaagaaagcacggtacaggcataaaagta

SEQ ID NO: 765657 - DNA, 614 bp, Homo sapiens
gctccctgataccctttctctggggattgtctcctcaattgtttctgagacaaaagggaacgacagcagggactaaaatactttatcaaataaagtctggattttgtgccattaaactgagtgttcgtttcctttttactaatcaagttctgtcaagccacagaaaactgtccatttactctgaaatcctgaggtcagtatctatgcaataaaataggcttccagttaatttgatgtagaaatatttttaccttgatttacataaagtagttttcttcattatatatccaaataggcttcttttctttcatagattttgaatttctagccttagttgaaaarctcttcgggtcaatgtaatttcctagatttttttccaagattaaaaagagatttatatttttctatagtttttctatacaggatttgtttttatacattctaatatatagtttcctcagctttcaaggatgagtagatatgagaaaatatatttgtggttatgaaaaaggttggtatctacaatataaatagagtttttataaagcccaagaaaaacacaaataacacaattgaaaaaatgctaaataatatgaccatatacatactgtgaa

SEQ ID NO: 765658 - DNA, 579 bp, Homo sapiens
aaaaactcaaatctctgaccacccccacaattccaagctctcccttcctgcctgctgtctcagctcatcaaattctctctcattccaccaatggaccaaccaccttctccctgttctctggaagtagttctcaaaaccagctctgcagttcccttgtcaggatggtcagcaattgctccaacgtcagaagctcaaagctctgctcctggtgtgcatatcagaccatggccacctacaagaaagcttccagagaccctagaagaggactcatcaaattgcctaaagcaccagcacaagatctcttgyccagaaaagctccacttcaaattatattaatattcccaggtgttctcttcctttatctttactattggaagtctctcttatttgaaagaaaagtggaatccagggtttctgtgctcgttgattttaatgccatttataaaatggctcctagaatatggaatctagatttctgggagattccttcatgcactattgttgagggacattcctaaggcaagaaatatcattgttaatattgaaaaatcacaaaaattcctactgaatttaaaataa

SEQ ID NO: 765659 - DNA, 631 bp, Homo sapiens
atatggagcaataatgaccaaaatgtgaaagcagttccatttgtccctatctttttgtaaaacctcactcagaaggtgattaataaaacactatcaccatgaaaatattattattataagacttaaatgttttatcctactagaatatgcacttataaataacttgcatgaatttaaagagaacagacttcataagttaaaaatgacactaaactttgggaaagtaataattccaaagaagtcagaaataaaattaaaaactaaaagcaataaataaaaggatgaaatttcacgtaaatcaagacaaacacatttacttcaattatatactacataatagtattaatagaaatatgattggcagtgaatcccataccagctaagacatatggataataaaacatgtagattattggctttagtttgaggatttatattttaagagatacattataaaactaaaatrcctacacaaaataatgactagagaattgaaaaatcagaacatcatgcctcttgaagaattattgaaggcattgattttttcaatgctgggtagaaaatgctttgtcaaatcatgaagcagtagctttcttcagctatttaaagggaaatcatgtgcatagcttag

SEQ ID NO: 765660 - DNA, 631 bp, Homo sapiens
atatggagcaataatgaccaaaatgtgaaagcagttccatttgtccctatctttttgtaaaacctcactcagaaggtgattaataaaacactatcaccatgaaaatattattattataagacttaaatgttttatcctactagaatatgcacttataaataacttgcatgaatttaaagagaacagacttcataagttaaaaatgacactaaactttgggaaagtaataattccaaagaagtcagaaataaaattaaaaactaaaagcaataaataaaaggatgaaatttcacgtaaatcaagacaaacacatttacttcaattatatactacataatagtattaatagaaatatgattggcagtgaatcccataccagctaagacatatggataataaaacatgtagattattggctttagtttgaggatttatattttaagagatacattataaaactaaaatgcctacwcaaaataatgactagagaattgaaaaatcagaacatcatgcctcttgaagaattattgaaggcattgattttttcaatgctgggtagaaaatgctttgtcaaatcatgaagcagtagctttcttcagctatttaaagggaaatcatgtgcatagcttag

SEQ ID NO: 765661 - DNA, 613 bp, Homo sapiens
aatatgatcaagttatcaaatatagaaagataaatatttttagttcaacatctccttctgaaagaaggatatattaatgatgataaagctccccactttcaccagatcagaaacaaaaggataaatgaattttattgctaaagtagatgaaggaagacagttactcacagattactggtggatatttaaagtgttataggctttctggtgagaaatayggcaatagtcgcttacaaactatatatattgtcaatctagcactgttactactgggaatctttcccagggaaaggaaactaacagtacctaaggacacatgggcaatgacgtttattgtagagttattttaatgaccaaagatagagaaaaatgtggttttttggtagataactttctaaataatacattcactgaacagaataatatgcatccatctaaaataaggaactataggtctaacagatggcttggagatattttcctggggtatggctgggtgagcaaataaagaagcaaaaaaggtacaaaacatggtcccagttttataaaataattatttaaggcaccctaaatatgattttctgtattgcgtgtctgtgtgagattacataac

SEQ ID NO: 765662 - DNA, 551 bp, Homo sapiens
tacattaaattctatcctaatagccccaaagttttagcacatttcagcatcaactcaaaagtctaaaggctaaagtctcatctagatatcatctaaatcagattatgagtaagacataaagtatttttcattctgaggtaaattactctctagatataaacctatgaaatcaaacaagttatgtgcttccaaaatacatgatgggacagaacaaatatttcaattccaaaatggagaaatagaaaagaaggaataacaggtctcaattragtccaaaacccaacagtgcaaacaacattaaatcttaagtcttcaggatagccttgatgttatgtcccgctttccaaatacaccgtgttaggggttgcatcaataaggctcctggttccttgcctctctgtctttgttgagtgcatcctacaccgcaggtcctatggattgcagtccagtgcctgtagttctcaggatgccactgtagctagtggctataccggtctgaggtctcctggcagctctgtttccatagatctacggaaaattgccccatttgg

SEQ ID NO: 765663 - DNA, 551 bp, Homo sapiens
tacattaaattctatcctaatagccccaaagttttagcacatttcagcatcaactcaaaagtctaaaggctaaagtctcatctagatatcatctaaatcagattatgagtaagacataaagtatttttcattctgaggtaaattactctctagatataaacctatgaaatcaaacaagttatgtgcttccaaaatacatgatgggacagaacaaatatttcaattccaaaatggagaaatagaaaagaaggaataacaggtctcaattaagtccaaaacccaacagtgcaaacaacattaaatcttaagtcttcaggatarccttgatgttatgtcccgctttccaaatacaccgtgttaggggttgcatcaataaggctcctggttccttgcctctctgtctttgttgagtgcatcctacaccgcaggtcctatggattgcagtccagtgcctgtagttctcaggatgccactgtagctagtggctataccggtctgaggtctcctggcagctctgtttccatagatctacggaaaattgccccatttgg

SEQ ID NO: 765664 - DNA, 551 bp, Homo sapiens
tacattaaattctatcctaatagccccaaagttttagcacatttcagcatcaactcaaaagtctaaaggctaaagtctcatctagatatcatctaaatcagattatgagtaagacataaagtatttttcattctgaggtaaattactctctagatataaacctatgaaatcaaacaagttatgtgcttccaaaatacatgatgggacagaacaaatatttcaattccaaaatggagaaatagaaaagaaggaataacaggtctcaattaagtccaaaacccaacagtgcaaacaacattaaatcttaagtcttcaggatagccttgatgttatgtcccgctttccaaatacaccgtgttaggggttgcatcaataaggctcctggttcctygcctctctgtctttgttgagtgcatcctacaccgcaggtcctatggattgcagtccagtgcctgtagttctcaggatgccactgtagctagtggctataccggtctgaggtctcctggcagctctgtttccatagatctacggaaaattgccccatttgg

SEQ ID NO: 765665 - DNA, 551 bp, Homo sapiens
tacattaaattctatcctaatagccccaaagttttagcacatttcagcatcaactcaaaagtctaaaggctaaagtctcatctagatatcatctaaatcagattatgagtaagacataaagtatttttcattctgaggtaaattactctctagatataaacctatgaaatcaaacaagttatgtgcttccaaaatacatgatgggacagaacaaatatttcaattccaaaatggagaaatagaaaagaaggaataacaggtctcaattaagtccaaaacccaacagtgcaaacaacattaaatcttaagtcttcaggatagccttgatgttatgtcccgctttccaaatacaccgtgttaggggttgcatcaataaggctcctggttccttrcctctctgtctttgttgagtgcatcctacaccgcaggtcctatggattgcagtccagtgcctgtagttctcaggatgccactgtagctagtggctataccggtctgaggtctcctggcagctctgtttccatagatctacggaaaattgccccatttgg

SEQ ID NO: 765666 - DNA, 612 bp, Homo sapiens
ttactcttagctaagaagttgatcagcatcttcggagtcactgtggatgataacgaagcatccacaaaggctaaactcccaaggaataagtacattgggatatgaaggtgagggtctttccagatgagaacaattagaccaagattccccatgatggtgatgagatatattaccaagaatgccaggaasagcggtattttacagtcaggttgatgtaaaaatcctgtgagaacaaactctgtcagcaatgttgcattttcctcttccatctcctcactgcatgtcctctgaaaaatgaagcaaaggtaaaggaacatttgcaatggaattgtgagttgaaattggggaagaggtgttgaaataaactatgtaattatcgagccctcttaattttttttgatcagtgctataattgatgaaccctatatttgaggatttaaatacatggaaataataatgaatttggtttgaaaattgtgtaggagttaacagactgagagttaaaaagacgcattatctgaatgtactaaatttttgtggactctactgaatgtaatgaaaaaaatctgtctgggacatggatgtagggtgaaggaaaaaagatatttgaaa

SEQ ID NO: 765667 - DNA, 662 bp, Homo sapiens
gtgtctttatagtagaacaatttatattcctttgggtacatacccagtaatgagattgttaggttgaatgatatttctctgtctttaggtttttgaggaatcaccactgtgtcttcaacaatggttggactaatttatttacatttctacaacagtaggcaaatggcaaatgttgttcacattacttggagtgcagtgctgtagttcattcccctcatttgttgtgccatttgtttcccattcacttcttatttttttctgactttaattctatcagaaaatgcaaactgctctcactgaagccactaaaaatctctaatttccacaatcagtgatctctattcatatttagtccaaccagagcatttyttctggcattttgccctgtactttgtccttcttgagtatatttcctatctttatgtctacaacattcagctttccagtttccctcctgcttctttgatcactctgctcagtatttttttctgacatcgcccttgtctctttgtttgagccaggactcttggttgcattgggcaatgagtttattgaacggaaagctatgtaaaatagaaatgccagggaaattggaagaatcagctgtaaaaatgggcaggaacagaatgaagtaagacagccagtcaacagcccaaattatg

SEQ ID NO: 765668 - DNA, 651 bp, Homo sapiens
cataatgacattttgattgcctatgggatggtggtgccataagattacaatggagctgaaaaattcctatcacctagtgacatcatagccatcattatgtcacagtagaacacattaatcatatgtttgtgtgatgctggtgtatacaaatctgcactgtcagtcatataaatgtatagctcwtatatttatgtaccgtccataatacttgatagtgacaataagcaactgttagtggtttatgtatttattatgctattaatcattattttagagtatatgccttctaattatataaaaaagttaactataaaacagtctcaggcaggtcctccaggatatattccagaagaaggcatcgttgtcataggagatgagagctacatacatgttatttcccctaaagaccttccagtggcacaagatgtggaggtagaagacagtgatattcatgatctcgaccctaactaggcctaagctaatgtgtgtgtttgtgtcttagtttttaataaaactttttaaaaataaaaaatttaataaaaattctaaaaatagaaaaaagcttatagagtagaatttaaagaaaaatattgtcgtatagctgtacaacatgtttgccttttaagctaagtattattacaaaaaagtcag

SEQ ID NO: 765669 - DNA, 651 bp, Homo sapiens
cataatgacattttgattgcctatgggatggtggtgccataagattacaatggagctgaaaaattcctatcacctagtgacatcatagccatcattatgtcacagtagaacacattaatcatatgtttgtgtgatgctggtgtatacaaatctgcactgtcagtcatataaatgtatagctcatatatttatgtaccgtccataatacttgatagtgacaataagcaactgttagtggtttatgtatttattatgctattaatcattattttagagtatatgccttctaattatataaaaaagttaactataaaacagtctcaggcaggtcctccaggatatattccagaagaaggcatcgttgtcataggagatgagagctacatacatgttatttcccctaaagaccttccagtggcacaagatgtggaggtagaagacagtgatattcatgatctcgaccctaactaggcctaagctaatgtgtgtgtttgtgtcttagtttttaataaaackttttaaaaataaaaaatttaataaaaattctaaaaatagaaaaaagcttatagagtagaatttaaagaaaaatattgtcgtatagctgtacaacatgtttgccttttaagctaagtattattacaaaaaagtcag

SEQ ID NO: 765670 - DNA, 692 bp, Homo sapiens
taataaaactttttaaaaataaaaaatttaataaaaattctaaaaatagaaaaaagcttatagagtagaatttaaagaaaaatattgtcgtatagctgtacaacatgtttgccttttaagctaagtattattacaaaaaagtcagaaagttttcaaaagtttaaaaatttataaggcaaaaacattacagtaagctcagttaatttaattttgaagaaagaaaaatgttgaaataaatttaaggtagcctacatgtacagtgtttataaaataaagtccacagtagtggacagaaatgtcccaggccttcacattcactcatcacttactcactgactcacctagaactacttccaatcctgcaagctccatttacggtaagttgtataatttttaaacttttakgttgttttattactctaccttttatatgtgtggatatatttagatatacaaatccttaccattgtattacaattgcctacagtattcagtatagtaacatgatgtacaggtttgtagcccaggagcaataggtgataccgtatagcctaggtgtgtgggcaataccatctagattttttgtaagtacactctaggatgttttcacaatgacaaaatcacttacttcttgcaagaacactataggatgtaatcataatgacaaatttctcagaacatattcccatcat

SEQ ID NO: 765671 - DNA, 514 bp, Homo sapiens
tgacgaagaaaagcaaagaaaacggaagatggcgcctccatgttgaacatgcctggctcccaggtagcctattcctgtcggcacagccgccagcatttatctatgcaagcttccaggttgcttatctatgtttgcagcttaatatttcaggctgctctttgttaraaaagaaatgatttgggggctgctttttattaaaagggaagccttgcccaggactcctttaccctcactgtctgcctaaataatttcttcttagctcctgtatcactaactttggtgttaaagtgtcaactctgggaatcttttcttctcttttaattcaaatttcaaagttcattttctgagcagaatttgtgtttgaaagggagatctgactttaagttttactttacaaacttcaagttttttattaatatattagcattatctgaaagttctttccatatttaaaaggttatcattgtgattagttattaaaacagactttttctagtaattctgccggttttac

SEQ ID NO: 765672 - DNA, 514 bp, Homo sapiens
tgacgaagaaaagcaaagaaaacggaagatggcgcctccatgttgaacatgcctggctcccaggtagcctattcctgtcggcacagccgccagcatttatctatgcaagcttccaggttgcttatctatgtttgcagcttaatatttcaggctgctctttgttagaaaaraaatgatttgggggctgctttttattaaaagggaagccttgcccaggactcctttaccctcactgtctgcctaaataatttcttcttagctcctgtatcactaactttggtgttaaagtgtcaactctgggaatcttttcttctcttttaattcaaatttcaaagttcattttctgagcagaatttgtgtttgaaagggagatctgactttaagttttactttacaaacttcaagttttttattaatatattagcattatctgaaagttctttccatatttaaaaggttatcattgtgattagttattaaaacagactttttctagtaattctgccggttttac

SEQ ID NO: 765673 - DNA, 563 bp, Homo sapiens
acacaactcccctagtctaatgaggggtgggatggcagtgtgtaggatccagcacaagagatcggccttttgtagaaaaacaatatttttgataaagtagaagcccatcaaagacataaagagaaattcctttctgccactcaggaaattttttaaaaatggaaagtaggagaaagttgtggaaaaatatctttgagaaggaggaagctctctccactgcgcaggcttccttaaaagcgtctcgtaccctttctgacatgccagctattgatgctgctragtccactcaaaccagcctgattaactgctcttccacccaaactcccctcttggtcattgtttcatttggtcgacactgtggctgtgccctgtgaccgctgcatgcacggagccagtattataaccatctttttgcagtttgcccttacggcctgtcactccctaatcaggagtctatgttcaatgcaatggtctgggaatgtcccccaccaagttggtagccatatgcttttctattttggagcactggaagtttctggttcagtagttccctttttaaaggc

SEQ ID NO: 765674 - DNA, 638 bp, Homo sapiens
ctttctcagaagcaagtcatgttcatttcttcctttgcaaatgctagttaagacatttaacagatgaagtattgggaatcaggcaatgtaagaagaaaatattgatgagcaagtgtaaagtgacttcctcctgttggtgagaagcatatttcatttttttctggaagaatgtattaaatttaagccgtcccagtaataactaaatgctatctacctgtcagttgtatcagtcgattgctttagagtgtggatttctatattatcgcccgtggcttctctctaaaatcctttagcgatgctcccacgtggaattgcatctgcaaagaccatygacagagttctcagctcacagcctggatacaaatacgcatgaatgaaagacttctctctttagagactgcctctaaagaactcaggttccttacccatgttttatctaggactttgctccagagctgggagggaaagaagaaaccctcttggtggctgggtgtcccattcttttgtctctcacttgggatccatgattaatcagtgcattgtacataagagcgaccttatttcttgggcaaatggaaccaagttggagctgtaaaagcaggaccatcaatcagtttgttacaatggcaactttcttg

SEQ ID NO: 765675 - DNA, 636 bp, Homo sapiens
tagccgtggctttgtaagacaggcacaggtgctgatgctctcaggatgggttgcattaagttgacatgcttgtcttccccttaaagttccttgatattctcagttgtgcttaattgaactttgaggtctcacagaaccccaccacagaggagatgcctgatccatatttcttaagagtataaacatttttctagctaccacccgttgtctaagtttgggaaaaaagaaggaaagatcaatggaaagtctggaggagaagagaggagtagatggagcaaaaccaaatgaaagataagggggtggggaaagggacgcagtaacttcttcagttctaagatgtgcatttgtttcacaaatcaggttttttgtgtaaaaaaattggcccatgtaatgtattttgttayctccttgaaaagctgttatgaaatcaagagtgactctttcttacacatgatgataccttagaacctgatgacgagtgaccatagggacccagctgactcatatgccaggtaccctggcattagcccctgtttttctagatgtttaggtttcctagaataaccagagttttatagttcccacacctgaaattattagccagcgtctgatcgtttcattctgagtaaagttaca

SEQ ID NO: 765676 - DNA, 573 bp, Homo sapiens
aagatgtcttaagataaaattcaacagttgttctcattttaaaagattgctttaaagccagtcttgcagagaaattttaaaacatactattttataaatttttaccagccagtctttgctcaataagccatgcatgagcagtgagctaatggctgaaacttgttagagcgctggccagacaggtttgaaaagcagacttaagatttccatttagcaactaagtaatatttctctaatccctttcttttttcttgtagaataggttttaaaatttcaaagcaagtgccaggcaaggtggctcacacctgtgatcccagcactttgggaggccggaggccagggtgggagaattgcttgagcccaggagttggagtttacagtgagctgtgatcgcrccactgcacctcagcctgggaaagagagcaagaccctgtctcaaaaccgaaaaaaaaaaaattttcccccaaacaagcagttccttttatagttgctcatttatttcatttaattctgtagtaaattatagaaatcattttagtaagctcaaaaatatcgtgatgctttagagcatgt

SEQ ID NO: 765677 - DNA, 573 bp, Homo sapiens
aagatgtcttaagataaaattcaacagttgttctcattttaaaagattgctttaaagccagtcttgcagagaaattttaaaacatactattttataaatttttaccagccagtctttgctcaataagccatgcatgagcagtgagctaatggctgaaacttgttagagcgctggccagacaggtttgaaaagcagacttaagatttccatttagcaactaagtaatatttctctaatccctttcttttttcttgtagaataggttttaaaatttcaaagcaagtgccaggcaaggtggctcacacctgtgatcccagcactttgggaggccggaggccagggtgggagaattgcttgagcccaggagttggagtttacagtgagctgtgatcgcgccactgcacctcagcctgggaaagagagcaagaccctgtctcaaaaccgaaaaaaaaaaawttttcccccaaacaagcagttccttttatagttgctcatttatttcatttaattctgtagtaaattatagaaatcattttagtaagctcaaaaatatcgtgatgctttagagcatgt

SEQ ID NO: 765678 - DNA, 636 bp, Homo sapiens
tttcttgcttgcctaataaatgtcatcagtgtagacaaaaatctctagagctgaacccacacagcacaacaggcattttcttaggtgatcttgaagataacagaaaaataagccatttggagattaaggaccatgtgccatttcatctaagaaaaactctcggcttactgagatgtcttaaaaatatgttccaactagaacttcttccacttttcctgtctctgatgtatcacaatctaatttcatacaataacaaccaaaggcaatcctgcaaactctcttctgagatgagcatttgatcactagcgatacaaatatattgtcaactccatgaaattttaatcttcaaggaaaactggtgggcaacaactacttgattttttyccccaactttttattcacaggagatgaaatgcacaatacaggtgctttcaaaggacaagaatctagagatcaaagctttacttctccttcttatggggatttaactcatttgttattcttaaagagactttataacttctaggctttccaaaaattaatgaaagtctattctcttaacttcattatttactgctacatacagcattactacataaataaaacaagttacatactccaaggaagatacttata

SEQ ID NO: 765679 - DNA, 624 bp, Homo sapiens
gtcagaggtagttagtataattgaaatataaacttgctgatggctctattaaggatagaatgcttaggacttgaataatttttgtacatcatgttctttcctctctgctatggctgaaaaacattgactttgtcatcaaattatattytgcaggacagctggttccatattcagttggcaagatgttgcatgcacctaaggtgacatacattttcaactttgaaaatatacttcaaaatctcttatatttcaccttcatgacttataatcattgatttacagtcagggaatgtgcatgggttttttttttttttttttttttaacacagtaaggagggatagcttgctgacctgctagcagtaggagacttgattgattttctaagaagtgcttctgcttgaagacccctgcaacaaacgaatttcatcttgcaaaatgatgagctgagagtcccctgccagctatggccagggagtaaagtaccactcgttagcctccccaggattccagcctgtcgttttacatgtcttagctataaactttcagccaaagtcagggagcgcttttggctctgctcagggtgaaacagttggcattacacctgcatgggatagcttagtaaa

SEQ ID NO: 765680 - DNA, 624 bp, Homo sapiens
agtcctaaactgaaaaacaactgagatgtccttcaacaggtgaatggttaaatggctaaacgaagtataacatatctaacatccatgccatggaatactacttagcaataagaaggcatgaactactgatacactaagaataagaaagacaagagagaaacacacacacacacacacacacacacacacacacacacacagacatacaccctgtatacacactgagagacgcacagaaaaagagagaactcacaaaggaaatacagaaaaatatctaggatatttttactaggctatatctttgcagtttagttattttaacataaaagtccctaataatctgagattagcaaaggtagtatttcaggatactgctgatttttataaacaaaagcaaaactatagcgttttatgtacaaatttaaaatattttcaggtttcattatgtctcatgttctttaaaactatytgcttttgagcctaaagacgaattacttctttgtggtttaaaattcaaacaatgctataaacctaattctttgatcaataaagccaaactttaataagtctgacctgacttaataaaacaataactcactgtggttgattcttacttattgttca

SEQ ID NO: 765681 - DNA, 628 bp, Homo sapiens
tgaatgtggcagtttgggagttttcttgctacattcttggtttgttagtaattttctgtcctggagcattatttttaaagccaagtggcaataaattgttaatacacccttagatttgtgcactgatattttttaaggctttgtatatgtctgaatatatgatgcggattttttccacatcattatttatctgtaggccccactcgcacagtctaattgttctgcagtatattctgaatgttagcatagtttaaacctccccacgatttgaatatgtagccagggctgggaatcactgcagtggaattgagcttactgtgtttcttacgtattttctttgagagtctgagagtctggcagagctttttttcttctgcctccttgaccatacatttgtactgaagggtggatgaaccctcagaggtgacttctcatkgaggggtaggtcctggcctgtggccagcactacctgggggactctgcatcttcagaagctccttcctctgtttccagcaggaagtgagccagagagaacacagtaagcagtgtcctgccagcgacctccctgttctgtctacccagctttggcccacagtggcaaatggtaaaagcagcagtaagcactctc

SEQ ID NO: 765682 - DNA, 628 bp, Homo sapiens
tgaatgtggcagtttgggagttttcttgctacattcttggtttgttagtaattttctgtcctggagcattatttttaaagccaagtggcaataaattgttaatacacccttagatttgtgcactgatattttttaaggctttgtatatgtctgaatatatgatgcggattttttccacatcattatttatctgtaggccccactcgcacagtctaattgttctgcagtatattctgaatgttagcatagtttaaacctccccacgatttgaatatgtagccagggctgggaatcactgcagtggaattgagcttactgtgtttcttacgtattttctttgagagtctgagagtctggcagagctttttttcttctgcctccttgaccatacatttgtactgaagggtggatgaaccctcagaggtgacttctcatggaggggtaggtcctggcctgtggccagcactacctgggggactctgcaycttcagaagctccttcctctgtttccagcaggaagtgagccagagagaacacagtaagcagtgtcctgccagcgacctccctgttctgtctacccagctttggcccacagtggcaaatggtaaaagcagcagtaagcactctc

SEQ ID NO: 765683 - DNA, 602 bp, Homo sapiens
aattatcattatcactgcatgtccactagaatggctaaattttaaaaagacggaagaaacaagttttggtaaggatttggactaattagaacttacatattgttggtttaaaatggtgaaacacttgataaaatataaatattcttgtacatatcatttgtgaatatgcctaggataaattccttcaactgggaatgttgggtaaaagggttttaacttttatagtgtcaaatgactttccayagaagttgtgccattttacattctcatcagcaacattatgctcccaagttgatttccctcacatccttaccaagatagtatactaccaaaactttccatctttgctgttctaaaaaatgacatttcatgtggttttaattagcattatgtatcttcatatatttagaggaatttgcatttttctttttcataaagttggcccattttattgttaaattgctggcctttccttattaaacaattctttatatattaagaactctttatatattaagcccttggtttgtaaaatatgtcacaaatcttttccaagtttatatatcttctgactttctatgccatactcttacgccatatga

SEQ ID NO: 765684 - DNA, 644 bp, Homo sapiens
caataaagcacttttaaattaagctatgtatgatagtttttttttcccaacataatgctattgtgcacttaatagactacagcataatgtaaacatgacttttatatgcactgggaaatcaaataatttgtgtgacttgctttatagcagtgatctagagcmgaacacataatatctctaaggcatgtctgtggtataaccccaattttctgggaaatttagggtgctctaatctctgaagaggatcccctttccgacctccctagccctgcctcccaaactcctttttttacattgccacaagtcccaatctagaaatccatcctcttccccattcctggtctcagcccaatctgtatataatctctgtaaattatagtatcttgtataatcgattttttctctatattagttccttttcactaacttttacaaaagcttaagactgccatctgggacaaacaaactctctgtgatcccctactcatcctccagttatcttaattctatttttctttccttctctaaagagcatttacttaatggccattccctcatctcccactcactctacaatctattttaaagtgtatcttggcccagtcaccttcactctgttcactgaagtcaaagttgtccccttg

SEQ ID NO: 765685 - DNA, 644 bp, Homo sapiens
caataaagcacttttaaattaagctatgtatgatagtttttttttcccaacataatgctattgtgcacttaatagactacagcataatgtaaacatgacttttatatgcactgggaaatcaaataatttgtgtgacttgctttatagcagtgatctagagcaraacacataatatctctaaggcatgtctgtggtataaccccaattttctgggaaatttagggtgctctaatctctgaagaggatcccctttccgacctccctagccctgcctcccaaactcctttttttacattgccacaagtcccaatctagaaatccatcctcttccccattcctggtctcagcccaatctgtatataatctctgtaaattatagtatcttgtataatcgattttttctctatattagttccttttcactaacttttacaaaagcttaagactgccatctgggacaaacaaactctctgtgatcccctactcatcctccagttatcttaattctatttttctttccttctctaaagagcatttacttaatggccattccctcatctcccactcactctacaatctattttaaagtgtatcttggcccagtcaccttcactctgttcactgaagtcaaagttgtccccttg

SEQ ID NO: 765686 - DNA, 609 bp, Homo sapiens
caacggggatacactctgagaaatgtgtcattagacaatttcttaattatgtgaacataatggagtgttcttacacaaacctagatggtatagcctacgacacatctaggctatatggtatagcctattgcttctaggctgcaaatttgtacagcatgttactgtgctgaatacyataggtacttgtaacacaatggttagtatttacgtgactaaacatggaaaaggtacaataaaatatgattttttaaaaaagataaaagatggaacacctgtgtagggcacttactatgaatggagtgtgcaggactggaagttgctctgggtgagtcagtgtgaatgcttaggatattatcgtacactgctgtagactttataaaccctgtacatttaggctatgctaaatttatttggtaaatatttttatttctttaataataagttaacctcagcttactacaatttttcctctataagtgttttaatttttttaaactttttgactcttttgtaataacagctccaaacaaaaacgtacactgggcatggtagtgtgtgcctgtagtcccagctactcaggaggctgattgcttgacccaggagtttgaa

SEQ ID NO: 765687 - DNA, 586 bp, Homo sapiens
caaattatctggcattaaaattcaatttaaaaaattagctcagctcctattgtgccaccaggatgatttaaattctgttttttcttaaaagaaaaggagcagaacatctctaaatctttgcatttcaaatatttggtttcagttttgggtctggttctcaacactgaccactagtattaacatacagtttactagaggaaacttgtgtcaaattttctataacaatagtcacaacaacatataatgaaaagaaaaaaatgtaacatcaactaggatgggatgctagcgtcgacagtttatttttactcctggtattacaacctatattttcactgttttaaaaaagattcaagttccacatgaacctagcrgtacactaacaatatgacaacaacgtagccacttatctcagtaaaacaaaaattttactacttttggtggtgccttgcagactcatttttttcagaaattgcttatcatctgtttatttataatattcaagatacccataggtgatatggaatgaaatgatagccaattgtattcattagattttgctccatattaagccacctcaaaatttatt

SEQ ID NO: 765688 - DNA, 632 bp, Homo sapiens
gaaagcaatcctcccatcttggcccttcaatgactgggattactggtgtaagccaccatgcccagcctggattcgttcttcgtaaatcaaaccctttgtcattttcttgcaaatagcctaccctttctcttacacgtcctttgacacattttagatggttttgccatacaaaacttttcgatttttagttaaaggtaggctcaggaaacatttcaagaaactgaagtgtttcttttttcacctgcttttaatctaaagtcttattatatctggattttaacatttattaaaagtaatgtcagattataaatgtttggattttattcattttctaaatgattctgactggtttcctacatatacaatcatatgacctgcaaaacaagatgtgccctttactttctaattatttgcaactaayctgtactggtttatacatctaggaaactgatgagcaactggtgggagtgtgtatctttttcatatgaagcatgcttctagtggtttactattagacaataatgggttggcctttgcaataatattccaaccaattatattaaggatttctgctgctttttcatgagacacccagatgatacattatttctagttagttcaataatatgaga

SEQ ID NO: 765689 - DNA, 646 bp, Homo sapiens
catcaatttttgacacgcccaatagtgcttttctaaagctcttcggaaacataaagaattagctaacaaaattactcattgctttttaaaaaaagtgttacatctcttacagaacaaagcatttccattaggcctgctgcttcttccatttgtgaaatcctcaaggtgatgcaccataattattgtgggcaaacaaattgtctcacgtaattatccctgattaaaggtatttctgctatcacaactctcctctgggtctcttggtcactacagtccagtgacgacaaattcctaattagcttgtaataatcgtgatggcttttcttatatcagtgtgctgagtatactgatactgcagagtgtaaaaggtgaagactgaagtctggaaagacatgggttctctatctttgtccctcatccaatggctcctggtgaattttgttttcctgggtwggtgctgatattttaaggccagggacagagattgagtcagaacagaacagagaccagagacagtcagttatcctccgtattgttttaaattaatctttgaatattctacacccattttacctatttaccattgtcccaatacctaactctgaagagtgactgctgccatcactttactaaaaccaggtgtttt

SEQ ID NO: 765690 - DNA, 586 bp, Homo sapiens
caaattatctggcattaaaattcaatttaaaaaattagctcagctcctattgtgccaccaggatgatttaaattctgttttttcttaaaagaaaaggagcagaacatctctaaatctttgcatttcaaatatttggtttcagttttgggtctggttctcaacactgaccactagtattaacatacagtttactagaggaaacttgtgtcaaattttctataacaatagtcacaacaacatataatgaaaagaaaaaaatgtaacatcaactaggatgggatgctagcgtygacagtttatttttactcctggtattacaacctatattttcactgttttaaaaaagattcaagttccacatgaacctagcggtacactaacaatatgacaacaacgtagccacttatctcagtaaaacaaaaattttactacttttggtggtgccttgcagactcatttttttcagaaattgcttatcatctgtttatttataatattcaagatacccataggtgatatggaatgaaatgatagccaattgtattcattagattttgctccatattaagccacctcaaaatttatt

SEQ ID NO: 765691 - DNA, 618 bp, Homo sapiens
gtagactgatttcatcttggtagtccaggtaggtcactccagccaacactgtaactcccttcttagcctgttgacttaaaggtaggaggagcccaaagtgtccagggggcaatcttaacttccagtttaatggaattgttgtttctcctggtggcagtgtttctttctctggaattaagacctctacaccagaagaacatcatgtcatkggaacaggaagcaaaaattttgctagtggatcactaggggtgatggtgagtggtgccacttccacttccaccccttgactactggacctgtgaatcctggctatgggagaaagagtaccatatattggatgctgattcagagcatacatgaccttctggagaactttgacccagccctgcaaagtaatgtcacccagttggtgttgtaattgtgacttcaaaaggccattccaccattctatcaatccagctgcttcaggatgatgagaaacatggtaggatcagcgaattacatgagcgtgagcccactgccacacgtctttagctgtaaagtgagtgccttggtcagaggcaacgctgtgtggaataccatgatggtggataaggcatttagtgagtccacagatgg

SEQ ID NO: 765692 - DNA, 705 bp, Homo sapiens
gtcattcagttaaaaaacttttaaatttccatctcgatttcatttttcacccaatgccattcagaagcaagttatttaatttccaggtctttgcatgattttgaaggttccttttggagttgatttccagttttattccactgtagtctgagagacacttgatataatttcaattttcttaaaatttttgaggctcattttgtgacctatcatatagcctaccgtggagaaagttccatgcgctattgaatagaatatgtgtcctgyggttgttggatgaaatgttctgtatgtatctgttaagtccgtttgttccaaggtatactataaatccattgtttcttcattgagtttctgtcttgatgacctgtcttgtgctgccaatggagtactgaaggctccctctattattgtgttgctatctcatttcttaggtctattagtaattgttttataaatttggcagtgccggtgttaggtgcatatatgtttagaattgtgatattttcctgttggccaagacattttaccattatataatgtccctctttgtctcttttaactgctgttgccttaaagtttgttttgtctgaaataaggatacctactcctgttcccttttggtatccatttgcatgaaatgcccttttcaacacttttcttgtaataatgacttttggatccatgacagtaataagaagcaat

SEQ ID NO: 765693 - DNA, 593 bp, Homo sapiens
ttctgggtttttaattaaggttattgtattttctatttctagaattattttagattcatttgtaaatttactacagcacttttcatagtttcctattctctacagagatcttcaaacttgtctttcactttttaaacctatagccagcctcgttgtttaaaatctaaaatctttatgagtctgtttcccttgtctaatgtttttgctagctcctgctctgcagtctggtttctttgcgagccgtgtgtgtgtgtgtgtgtgtgtgtgtgtgtgtgtgtgtgtgtgtgatggacattgtatttgaaaaaatatttgtgggaataaatttagacttgcaatgaaagttctgtagagaggatttgcrtttgcttctctttatagagaaagttcttttctctagagaggaattgccaagtacctggtagttcaactattttaaggcttgaaattatctggtgctcgggtgaccctatgttggctgtaattctatgtaaaatatttctcttctagtttatagtttacttggattgcatagctctttggggttccaatattgtgagaagtttctcctgttagaccctcaagcttacgca

SEQ ID NO: 765694 - DNA, 554 bp, Homo sapiens
tgaaccataaattctctaaataagatgagaaaaaccacaatttaaaaattgtatacagaattattgtacaatacaaaaacccaaagaagatgaaagctatatttgaacaagtatgtatttagcattttctttctttctttttttttttttttgagatagagtctaactctgttgaccagactggagtgcagtggcacaaactcagctcactgcaacctccactgcccgggttcaarcaagtctctgcctcagcctcccgagtagctggggctacaggcgtgcaccaccacacttggctaatttttgtatttttggtagagacgaggtttcatcatcttggccaggctggtctcgaactcctgatctcatgatccaccggactcggcctcccaaagtgctgggattacaggcatgagccaccgtgcccagcgtatttaccattttcaaattgatttaaatagtaacttccataagaagattagaattgccctgctggctactttctctgataaaaaaaattttttcattatttttaagacaacatatgctttgta

SEQ ID NO: 765695 - DNA, 634 bp, Homo sapiens
gagtggtcatgcctttttatatccccaccagcagtgtatgaggagttccagttgctccacttcctgaacaacatttggtatagtctttttttatctttttttttttttttgagacagagtctcactcttgttgcctaggttggagtacagtggcccgaacatggctcactgtagcctmaacctcccaggctcaagtgaccctcccacctcaaccttttgaatagctgggactaccatgcccagctagttgaaaaaaaaattttttttggagacagggtctcactatgttgcccagactggtttcaaacttctgtgctcaaatgatctgcccacctcagccttccaaagtgctcggattacaggcatgagccccatgcccagctggtatagtctttctaattctagccattctattctagtagaaatgtagtagtttttcatccaggttttaatttgcatttccccctaatggttaattatgttaagctacctattcatgtgcttatttgccatctttatatcttctttggtgaaatgtttgttaaaatctttttgactgctttttaaaaattaggttgtcttcttgtagagttgtaagagttctttatatatcctggaacaagtcctttgtcag

SEQ ID NO: 765696 - DNA, 634 bp, Homo sapiens
gagtggtcatgcctttttatatccccaccagcagtgtatgaggagttccagttgctccacttcctgaacaacatttggtatagtctttttttatctttttttttttttttgagacagagtctcactcttgttgcctaggttggagtacagtggcccgaacatggctcactgtagcctaaacctcccaggctcaagtgaccctcccacctcaaccttttgaatagctgggactaccatgcccagctagttgaaaaaaaaawtttttttggagacagggtctcactatgttgcccagactggtttcaaacttctgtgctcaaatgatctgcccacctcagccttccaaagtgctcggattacaggcatgagccccatgcccagctggtatagtctttctaattctagccattctattctagtagaaatgtagtagtttttcatccaggttttaatttgcatttccccctaatggttaattatgttaagctacctattcatgtgcttatttgccatctttatatcttctttggtgaaatgtttgttaaaatctttttgactgctttttaaaaattaggttgtcttcttgtagagttgtaagagttctttatatatcctggaacaagtcctttgtcag

SEQ ID NO: 765697 - DNA, 634 bp, Homo sapiens
gagtggtcatgcctttttatatccccaccagcagtgtatgaggagttccagttgctccacttcctgaacaacatttggtatagtctttttttatctttttttttttttttgagacagagtctcactcttgttgcctaggttggagtacagtggcccgaacatggctcactgtagcctaaacctcccaggctcaagtgaccctcccacctcaaccttttgaatagctgggactaccatgcccagctagttgaaaaaaaaattttttttggagacagggtctcactatgttgcccagactggtttcaaacttctgtgctcaaatsatctgcccacctcagccttccaaagtgctcggattacaggcatgagccccatgcccagctggtatagtctttctaattctagccattctattctagtagaaatgtagtagtttttcatccaggttttaatttgcatttccccctaatggttaattatgttaagctacctattcatgtgcttatttgccatctttatatcttctttggtgaaatgtttgttaaaatctttttgactgctttttaaaaattaggttgtcttcttgtagagttgtaagagttctttatatatcctggaacaagtcctttgtcag

SEQ ID NO: 765698 - DNA, 658 bp, Homo sapiens
gcatgggacattttggttgaggctgggatcctaggctcagtggatgggtggagtttgggcgaccaccccgcccccgccaccataattatttgcatttggggcttggctgcttcagggtctctgcccccacataacaatttgcatccataaatttacatggaagtgaaggagcttcctgaaagaagagaccggcctctgtcgcctctccatattcctcccttatcattcaaagtcatgtgtggtgaacatggggatagaggtgcaggcggtagagcaggacgtaragtcatacggctgcacccctgaaggatgcagcttaagggaggatgggaatgcctggactccttcctgaggctctcagtgattttagtcccacaactccatggtggcctatctaccccagattctccctccgcagacatctgcccacctatgcttgaagcagttgaggccagcaagtagggctgtgtggagaggggacaccatggatattttctcataaatgtaaatgggacatcccttgtaggctcaagaagatgaagctgccacattcatgctgttcccagatcccctactgcagttccctctgcctggagtgccctctcctctggcggctgcctgataaatctttggggatggcctggctggactccccaag

SEQ ID NO: 765699 - DNA, 493 bp, Homo sapiens
gtggcctgtgagccaggatggaggaaaggcattctaggcaaggagccttgcgaaacaactgcccagtagcccgggatccctgcacaccttttcctggcagtctcccagcgcagggagatgagctatagtcagaacgaggacccaagcaagcgaggaattaatctcaggtactgactggtccatggagggctgcagtggtctctcaccaccccaaatctcaccctggccagggccgagatgtttgcggatctaggctgctccccacagcagtgctggaggggctgtcccattgtccctgcatccacacatcctatccccagattarttaatggaacttagtgggctgccattacgttttgcttgggtaaaatatccaaattgtttaacctctctgcacgtgttttctcatctacaaaataaggatgagagctagcttgcaaggctctggggtggagatgaagattcagcaaagaagttaagtttcataaagcta

SEQ ID NO: 765700 - DNA, 618 bp, Homo sapiens
tttttcactttattttcttcactttgtcttcctaaattttccgcaagtaacattgttagatttttagattacaaataactttaagacaaaaattatttctaattatccggtagataaaggaatgtcattaacagtgctgtggctgaaaaatgttgaatacattttctacaggaacgtttaaaattagtctgagtattctaaaattctacctgtttttcttctgagttcacttcttacaatcaacacttactgaattacacttaaaaaaattgtttttcttggttgagcacaatggttcatgcctataattccagcacttttggaggccraggcagacgggtcacttgagtccaggagtttgaagccagcctgggcaacacggcgaaaacacatctctgctaacacaaaaattacaaaatacaaaaattagccggacgtgatggcatgtgcccgagtcccagctactcaggaggctgaggtgagaggatcacttgagcccaaggggtagaggctgtagtgagccaagatcacgccactgcactccagcctgggcactggagcgagaccctgactcaaaaaaaaaaaatttttttttctactccagcttacttctaacat

SEQ ID NO: 765701 - DNA, 645 bp, Homo sapiens
gacctgctgaggtcaggagttcgagaccaacctggccgacatggtgaaaccccacctctactaaaaatacaaaatagtggggcatgcctgtagttccagctactcgggaggctgaggcaggagaatttcttgaacctaggaggtggaggttggagtgagttgagatcttgccattgcctccagcctgggyaacaagagcaaaactccatctcaaaaataaataaataattaattaaaataaataaacttcaggattggggcccagcaatccgtgtttaataagccctccaaggtgattctgatgctcactactatacagaggaagccatgtacaggaagccatctgaagactcaggaaaatgaggatgttggaatggattcacagttgtccctgggtatctgagaaaaactggttccaggggccaggtgcggtggcacaggcctgtaaccccagaactttgggaggccgaggcgggtggttggttcacttgagctcaggaattcaaaaccagctgggcaatatggcaaaaacccatctttacaaaaaatataagtattagccaggcacggtggcatgcacctatagtcccagctacttgggaggcaaaggcgggaggatcccttgagcccaggatgtggaagctg

SEQ ID NO: 765702 - DNA, 645 bp, Homo sapiens
gacctgctgaggtcaggagttcgagaccaacctggccgacatggtgaaaccccacctctactaaaaatacaaaatagtggggcatgcctgtagttccagctactcgggaggctgaggcaggagaatttcttgaacctaggaggtggaggttggagtgagttgagatcttgccattgcctccagcctgggcaacaagagcaaaactccatctcaaaaataaataaataattaattaaaataaataaacttcaggattggggcccagcaatccgtgtttaataagccctccaaggtgattctgatgctcactactatacagaggaagccatgtacaggaagccatctgaagactcaggaaaatgaggatgttggaatggattcacagttgtccctgggtatctgagaaaaactggttccaggggccaggtgcggtggcacaggcctgtaaccccagaactttgggaggccgaggcgggtggttggttcacttgagctcaggarttcaaaaccagctgggcaatatggcaaaaacccatctttacaaaaaatataagtattagccaggcacggtggcatgcacctatagtcccagctacttgggaggcaaaggcgggaggatcccttgagcccaggatgtggaagctg

SEQ ID NO: 765703 - DNA, 508 bp, Homo sapiens
gggtttgagaacctccatctagatttcagaggatatatggaaatgcctgaatgcccaggcagaagtttgctgcaggggcaaggccctcatagaaaacctctgctagggcagtgcagaagggaaatgtggggtcagagcccccatgcagagtccctgctggggctaggagctgtgagaagagggccaccatcctccagacccagaatgatagatccactgacagcttgcacgtgtgcctagaaaagctgcagacactcaacgccagcccataaaagcagctgggagggaggcagwaccctgcaaagccataggggcagagctgtccaagaccatgggaacccacctctcacaacagtgtgacctggatgtgagacatggagtcaaaggagatcattttggaggtttaagatttgactccccttctggacttcagacttgcatggggcctgtagcccctttgttttggccaacttcttccatttggaatggctgttttcactcaatgcct

SEQ ID NO: 765704 - DNA, 572 bp, Homo sapiens
agtgaggtttatttgctgctgacagccaagctccaaggcaagatgggacagctattgtcatggggggagacattcagatccctcttatgacttgccataaaaatgatgggcctctggtgggatccattcccaactctcttacctcatttcaggtaggttcagtggtgacatccaatcatagctctcttacctaactcacctctccaagggcaagcttctcactattctctaatcaaaatttaraaaacctgccagtacaaccttggagaagaggggctttagccaaaagcaggtgctatattctctccttcctggaagtgtcatctcttttctgggctaagagcacacagattttgatgtaatttgccaagaacaataggaagaagcactgtttctggatgccacatgcttcctgaaagaggaaaattgtaacatgttgatatgatagtggagggtcttggaattttcttggaatcttctcatctcttccatggtgacagagatccagtgagtgcctggtgagataggacttatttgtaaatccttgtgagcctctctctgcaggcactgga

SEQ ID NO: 765705 - DNA, 656 bp, Homo sapiens
ggagggctctgcagaaggaagaggcaggattggactgattgcggtaactgagcctcgttctgtcctctgggcattgaactgcctgttccatctcctccctcagcgggatgccagtctgagctcctaggagcatgctctcccagtggccttaccccccaggccctatggcaccaggcacatctcctctctcatcttcctggagctccagccctgttgccccagcttctgaaagggagaggggctcctgcctcccatctccacagctgggaaaatggaagcaccgagtactgaattgggagaaaattctcgcctcccagctctggtccgggagtggtccttctgctccatggaaaatggccaccactaagaacagaaaccacagaagctttgtcaggagggttcttgctcccacttctggacttttctcagtcttctcggcgggttgagttcttcyagactgtgagcccagtgcaatgtaggtcttccccagtccactctctgaagtccagagcccaagtcccacaggaaagaaccatttcctgtctgcccctccagccccagggccacctcttgactttggattaaacctctgtcctcacagccccctgagcccccacctcagtccacagaaatctcttcagccagcttcaaatacc

SEQ ID NO: 765706 - DNA, 473 bp, Homo sapiens
ctacaaccctataaagtaggtatatcattattattgcctttatagggacaaagaaactgaggcacagagaaattaaatgacacccccgataacttagctgacaagtatagtcggcattcaaatcaaagatagtagcacatttytagaattcccctatctacaatgaatgccatattccaaggatgtaaaacaaaacgtattagtataagggaatttgcggcagatacattcaaataaatgttgctagttacctctgctagtcctgccctaaaatattattaaatacattgataaccctgattaaaccactctacgtaaagaaggagttaaggaatcagcaaagggtctctataaggtagtacaaaacaaaaatgaagaggagaaaaccagctaaaggcaatgcacaaaatatcagaaaaaattatcaagaacatactttttaaaataaaaatccctaataaaagatacactag

SEQ ID NO: 765707 - DNA, 544 bp, Homo sapiens
actaagacaattccccaaagagaaacagcagtggaaaagcacagataccaattcttgaaaaatgagcttttgtttgcataaagagttaagttgcagaaataataaactaagttataaccgtacaaacctcatgtgactgtacacaggcaaagagaaattctttttatggttgctaatattattactttgtttcttaagtacttcaggagtccctgtttccagtaagatgcaacacatagaaacattccattttgaggcaggagaattgcttgaacccgggaggcagaggttgcagtgagccgagattgcaccattgcactccagcctgggcaacaggagtgaaatctgtctcaaaaaaaaaaaaaaaaaaaaaaargaaggaaggaaataaaaaaagagaaacattccattttaaacaaattttacacaaattttttcaagcacaaaggtacacattgatttcaggcatgaaattgaattaataattctccaccatcacataacttgaatgtggtaaaacaggttttacttactttactgcata

SEQ ID NO: 765708 - DNA, 625 bp, Homo sapiens
catctaaggaaattagagaggctccaaagcctggtaagtctcagtcctgcttttctttagcctgcatataattagtcagtatcgtgtctcatctctgcacctagctcaggaactgaatgaagtattcatggttaattggcagagaaacccaaaattaatctgtctgctcattgcttccgtgcagagattatataatttgactttttcttagtaaattagacaagattttctttctttacttgtttcttactctttctcaaaacataattacttaaatttgaatggaataaaaacaactctttaaacatatgtaaattaaagtgattttagttggcatcagaaactttatgaatgaaaataatgaaaacacttactcatagaaaggcaaaaaaagttcsgtgaatctgaataatgtatcatttagagcaaaacatcaataattttagaagatcctttatcttttaaatataataaatacttttttgttcattatagaaacacttgaaaattcagagagcaacataaattaagaaaactgaggcaagcctaggcaacatagtgataccctgtctctacaaaaagtaaagcgaaacaaaacaatttgtatgtggtggcatatgtctat

SEQ ID NO: 765709 - DNA, 585 bp, Homo sapiens
tgctttagtttgctcatctatgagctgaagataatgatggcatgtgttccttagaattattatgaggattttattagtttcctattgctgctgtaacaaattaccacaaacttagtggcttgaaccaacgcaaatctgtcatcttacagytctggagttcagaaatccaaaatggtctttactggaatagaatcaaggttttgacaaggctgcatttcttttttttttttttttttaatttttccataagtttttggtggtacaggtggtatttggttacatgagtaagttctttggtggtgatttgtgagatgttcatgtacccatcacccgagcagtatatactattttttgcccccctcccactcttccccccaagttcccaaagtccattgtgtcattcttatgcctttgcatcatcatatcttagctctcacatatcagtgagaatatatgatgtttggttttccattcctgagttaattcatttagaataatagtctccgatctcatccaggtcactgcaaatgctgttaattcattccttttatggctgcatagtattccatcatatatatatatatc

SEQ ID NO: 765710 - DNA, 621 bp, Homo sapiens
tgtattttgaacttattacaaagtttgttgaaaaaaactttgaacaaagttacctacatttttagcagaggaattatattgtgtggcattggggaagggcaagaagtgagaaaggtaaaaaacatttggatcagttrtactgttgtttagagaaaaaaatgtcagaactcaagcctctgaatacactaagatataagacatgagaggagggtagtgtcacttggaaaaaatgtcatgaaattctttctagatgctctaggtattgagcatcaggagatctgtcagaacagagaaaacagctcctccatgtagcacagaagagtttccaagtactctttaccttagctctgtctgagaaactgagatgctagcagtgattctaaaggatgggcaattagaagaatatgatgctttggccacatcacatttatgttaaatggattccacagccatagatgtgttttaatctcctttaagagagaatgttctttaaatgaaaataggaaaaataaatatgacaaggtcagaaattaagctctcaaagagataaaattatcatttaaaatgagttcagtgttcatattcggagacgcttaatgccaggttttgcaggtgaggtaa

SEQ ID NO: 765711 - DNA, 621 bp, Homo sapiens
tgtattttgaacttattacaaagtttgttgaaaaaaactttgaacaaagttacctacatttttagcagaggaattatattgtgtggcattggggaagggcaagaagtgagaaaggtaaaaaacatttggatcagttgtactgttgtttagagaaaaaaatgtcagaactcaagcctctgaatacactaagatataagacatgagaggaggrtagtgtcacttggaaaaaatgtcatgaaattctttctagatgctctaggtattgagcatcaggagatctgtcagaacagagaaaacagctcctccatgtagcacagaagagtttccaagtactctttaccttagctctgtctgagaaactgagatgctagcagtgattctaaaggatgggcaattagaagaatatgatgctttggccacatcacatttatgttaaatggattccacagccatagatgtgttttaatctcctttaagagagaatgttctttaaatgaaaataggaaaaataaatatgacaaggtcagaaattaagctctcaaagagataaaattatcatttaaaatgagttcagtgttcatattcggagacgcttaatgccaggttttgcaggtgaggtaa

SEQ ID NO: 765712 - DNA, 652 bp, Homo sapiens
agattgttccatattattttaatcttcacaataagcttataaatcagaaaggccaaatagcacttttcccatttgaaatgtcagctctttgtagctgacagttaagaaatacatatttattatataattttttaaaatatgcaatctcctttttgaccaggtgtggtaggcagaataatggtactcaaaaatgcccacttcctaatctctggaacctataagtatgttattttacattgaaaaaggactttgctgaagtgatgaagtatcttgagatggggagattatcccggattatctgagtgggcccagtataatcataaggatctttataaggcaggcagaaaggtcagaatcaaaggaaatgtkatctcagaagcagagagagacagagacaattaaagagatttgaagataccatgttgctggctttgaaaagaaaagggccacaagccaaggaatacagatggtatggaacagctgagagtcaaggaaataaattctcttctagagcctacagaaggaaagaggagggcaggactactgacacctttactttagtacttctgacctctagaaatgtaaaagaatgaatttgtgttgtcttaagccactaaatttgtggtaatttgccatagcagcagtaaggatc

SEQ ID NO: 765713 - DNA, 641 bp, Homo sapiens
aaattttcactgagaatataaaagaactgaatagagacttacaaaatgtctaaatgatgtttcaatatggtaaaactgtacattcaatccaaatgaatttaggaatttaatgcgattgcaatcagaatctcaaagagtttttccccccgcagatgttgacagaacaatgtaaaagtttatctagagaattgagtacttaaggaaccatcacaaaagaagaatgagagggaatgtccactgccagacaccaaaatgtgttytaaggtgaaagtgttaaaacagcatgttgctagtgtcactccggcaaaatcctcaagtgctttaagagcttgggcaagtatcttgctctaagatagccctgactttgtgagctgcctaaaggcatgaaaatccacaattttcaaagacacttctgaccaaaaccaaaacaagaccaaacacaaatctggatctggaggcctgaaacgggttacagggtcccagtttatgatccttgatacaatcaagagaatagaaagttcagaataaacccaagtttctataggaatgcattaaatgctgtcatggcatatcccagtggggaaagtagagattaagccacaaatcatgcgatcacaactagctcattatttggaaaacag

SEQ ID NO: 765714 - DNA, 579 bp, Homo sapiens
agtgaggtttatttgctgctgacagccaagctccaaggcaagatgggacagctattgtcatggggggagacattcagatccctcttatgacttgccataaaaatgatgggcctctggtgggatccattcccaactctcttacctcatttcaggtaggttcagtggtgacatccaatcatagctctcttacctaactcacctctccaagggcaagcttctcactattctctaatcaaaatttaraaaacctgccagtacaaccttggagaagaggggctttagccaaaagcaggtgctatattctctccttcctggaagtgtcatctcttttctgggctaagagcacacagattttgatgtaatttgccaagaacaataggaagaagcactgtttctggatgccacatgcttcctgaaagaggaaaattgtaacatgttgatatgatagtggagggtcttggaattttcttggaatcttctcatctcttccatggtgacagagatccagtgagtgcctggtgagataggacttatttgtaaatccttgtgagcctctctctgcaggcactggaatataca

SEQ ID NO: 765715 - DNA, 657 bp, Homo sapiens
gggtatttgaagctggctgaagagatttctgtggactgaggtgggggctcagggggctgtgaggacagaggtttaatccaaagtcaagaggtggccctggggctggaggggcagacaggaaatggttctttcctgtgggacttgggctctggacttcagagagtggactggggaagacctacattgcactgggctcacagtctrgaagaactcaacccgccgagaagactgagaaaagtccagaagtgggagcaagaaccctcctgacaaagcttctgtggtttctgttcttagtggtggccattttccatggagcagaaggaccactcccggaccagagctgggaggcgagaattttctcccaattcagtactcggtgcttccattttcccagctgtggagatgggaggcaggagcccctctccctttcagaagctggggcaacagggctggagctccaggaagatgagagaggagatgtgcctggtgccatagggcctggggggtaaggccactgggagagcatgctcctaggagctcagactggcatcccgctgagggaggagatggaacaggcagttcaatgcccagaggacagaacgaggctcagttaccgcaatcagtccaatcctgcctcttccttctgcagagccctcc

SEQ ID NO: 765716 - DNA, 507 bp, Homo sapiens
ggtttgagaacctccatctagatttcagaggatatatggaaatgcctgaatgcccaggcagaagtttgctgcaggggcaaggccctcatagaaaacctctgctagggcagtgcagaagggaaatgtggggtcagagcccccatgcagagtccctgctggggctaggagctgtgagaagagggccaccatcctccagacccagaatgatagatccactgacagcttgcacgtgtgcctagaaaagctgcagacactcaacgccagcccataaaagcagctgggagggaggcagwaccctgcaaagccataggggcagagctgtccaagaccatgggaacccacctctcacaacagtgtgacctggatgtgagacatggagtcaaaggagatcattttggaggtttaagatttgactccccttctggacttcagacttgcatggggcctgtagcccctttgttttggccaacttcttccatttggaatggctgttttcactcaatgcct

SEQ ID NO: 765717 - DNA, 567 bp, Homo sapiens
aactctgtttgtagaatcttcaagtggatatttggagtgctttgtggcctgtggtggaaaaggaaatatcttcacataaaaactagacagaagcattctgagaaacttatttgtgatgtgctcattcaactcacagatttaaacttttcttttgattgagcagtttggaaacagtcttttagtagtacctgcaaacggatatttggagygctttggggcctgtggtggaaaaggaaatatatacacatgaaaactagacagaaacattatgagaaactgctctgtgatgcttgcattcatcaccagagttgaacctttcttttgattgaacagttttgaaacattctttctgtggaatctgaaggggatatttggagcgctttgcggcctatggtgaaaaacgaaatatcttcacataaaaactagacagaagcattctgagaaggtggtttgtgatgtgtgcattcatctcacagagttaaacctttctttggattgagcagttttgaaacactcttattgtacaatctgcaagtggatatttggagagtttgaggccactggtgc

SEQ ID NO: 765718 - DNA, 567 bp, Homo sapiens
aactctgtttgtagaatcttcaagtggatatttggagtgctttgtggcctgtggtggaaaaggaaatatcttcacataaaaactagacagaagcattctgagaaacttatttgtgatgtgctcattcaactcacagatttaaacttttcttttgattgagcagtttggaaacagtcttttagtagtacctgcaaacggatatttggagtgctttggggcctgtggtggaaaaggaaatatatacacatgaaaactagacagaaacattatgagaaactgctctgtgatgcktgcattcatcaccagagttgaacctttcttttgattgaacagttttgaaacattctttctgtggaatctgaaggggatatttggagcgctttgcggcctatggtgaaaaacgaaatatcttcacataaaaactagacagaagcattctgagaaggtggtttgtgatgtgtgcattcatctcacagagttaaacctttctttggattgagcagttttgaaacactcttattgtacaatctgcaagtggatatttggagagtttgaggccactggtgc

SEQ ID NO: 765719 - DNA, 552 bp, Homo sapiens
  misc_feature 82: n = A,T,C or G
tggatatttggtgccctttttggcctatgaatgaaaaggaaatatcttcaaagaaaaggtacacagaagcattcagagaaantttttcatgatatgttctttcaactcacagaggtgaacctttcatttgattgagcagttttgaaacactctctttgtagaatctgtaagtggatacttggagcgttttgaggcctactgtggaaaaggaaatatcttcacataaaaactacacagaagatttctgggaaacttccctgtgatatgtgcattcctctcacagagttgaatatttcttttgattgagcagtttggaaaccctctttttgtagcrtctgcaagtggatatttggagcaattgaggcctactctgaaaaagaaaatatcttcacataaaaacaacacagaggcattctgagaaacttctttgagatgtgtgccttcatctcacagagttgaacatttcttttgattgagcagttttgaaacatctttttgtagaatctgcaagcagatatttggagccctttgtggcctaaggtggaaaaggaa

SEQ ID NO: 765720 - DNA, 547 bp, Homo sapiens
cacagaggtgaacctatcttttctttgagcagttatgaatccctctttttgtacgatccacaagtagacatttggaaccctttgcagcctatggaggaaaaggaaatatcttcaaataaaaactacccagaagcattctgaggaacttctttgttatgtgtkcattcaactcacagagttgaacctatcttgtgattcagcagttttgaaacactgtttttgtagaatcttcaagtggatatttggagcgttttgaggcctactgtggaaaagcaaatatcgtcacataaaaacttcacagaagcattctgggaaacttctttgtgatgtctgcattcatctcacacagttgaacctgtcttatgattgagcagtattgaaacaatctttttgtagaatccacaagtggatatttggagtgctttgaggcctattgtggaaaacgaaaaatcttaacataaaaactacacaaaagtatcctgataaacttatttgtgatgtatgcatttatctcacagatttgaaactatcttatgatttagcagtt

SEQ ID NO: 765721 - DNA, 525 bp, Homo sapiens
aaatatcttcacatgaaatctccacagaagcattccgagaaacctctttgtgaagtgtgcattcatctcacagagttgaacctttcttttgattgagcagttttgaaaaactctttttgtagaatctgtaagttgatatttggagcgcttaggttcctattgtggaaaaggaaatatcttcacattaaagctgcacagaatcattctgagaaagttctgtgtgatgtgtgcattcatatcacagtgttgaacctttcttttcattcagcagttttaaaactttctttttgtagaatctgcaagtggatatttggagctctttgaggcctatggtggaaatggaaatatcttcacataaaaactacaaagaagcattctgagaamcatctctgttaagtgtgcattaaagtaacagagttgaaactatcttttcattgagcagttttgaatctctctttttgtagaatctgcaagaggatatttggagccctttgccacctacggtggaaaaggacataccttcac

SEQ ID NO: 765722 - DNA, 400 bp, Homo sapiens
gaaaattgaaaattgccagttttctttgctttaaccaatatgtttgctctccctctgaaaatcccttgttacaagtccttagttttagtttgccacattatgacacgatgggaataatgcacagcagtgatcctcagttggtttgggttttcaatacacaattgatccatggttgtggcatgcattgtagmatgtccagctagaacacctattctttcagttactttcattactttcaatggcaaaaccacaattacttttgcactaacctgatagctttgctacaagtcagttgttcagtttttttttttgttgttgttgtttgtttttatttttgcaaacactttagatactgcatagtggatggattagtttgtggttcctgggatcttctgtgttt

SEQ ID NO: 765723 - DNA, 549 bp, Homo sapiens
tatactttaagttttagggtacatgtgcacaatgtgcaagttagttacatatgtatacatgtgccacactggtgtcatgtacccattaactcatcatttagcattaggtatatctcctaatgctatccctccccactcccccaacaccacaacagtccccagagtgtgattttccccttcctgtgtccatgtgttctcactgttcaaatctcacctatgagtgagaacatgtggtgtttgattttttgcccttgtgatagtttmctgagaatgatgatttccaatttcatccatgtccctacaaaggacatgaactcatcatttttatggctccatagtattccatagtgtatatgtgccacattttcttaatccagtctatcattgttggacatttgggttggttccaagtctttgctattgtgaatagtgccacaataaacatacatgtgcatgtgtctttacagcagcatgaaaccaacgagaacaaagacacaacataccagaatctctgggacacattcaaaacggtgtttagagggaaatttg

SEQ ID NO: 765724 - DNA, 573 bp, Homo sapiens
ataaaaataagtgcactttcccctcctttcttcagtgactagaaaacttccatacttttaaaataatcaaataataatttagagagcaacagccctcaactctttgctggtgcttatcacactgcctttcttcactccattcttagctctgctagtttcttcttgtctgtaatgataataagggaatgtgggtgggtcagcactyctgtgcctttccaaatttaccttccaaaaagccaaccaaataaacaaccaaaaaattgtgcaacaaaacacaaatagcattccaacagcttggcaagtgatgcattcacctgagattgagtggttttaggcggtcagtaacaaaatgcttctttgctgtctcagtagaaaggcaacaaattcttcaaagaaaccaagaaggttactaccttgacaacgtctctcattaccgtcctcctcttatgtcctttctctccacattatctgttgtgtgtccactatagaaggctacaaaacatacagcagaaaggatggcttgaaggcaattggtgtttgtaaataaattcacaacaaggtccaagctgaaga

SEQ ID NO: 765725 - DNA, 605 bp, Homo sapiens
aaaaattgtgcaacaaaacacaaatagcattccaacagcttggcaagtgatgcattcacctgagattgagtggttttaggcggtcagtaacaaaatgcttctttgctgtctcagtagaaaggcaacaaattcttcaaagaaaccaagaaggttactaccttgacaacgtctctcattaccgtcctcctcttatgtcctttctctccacattatctgttgtgtgtcyactatagaaggctacaaaacatacagcagaaaggatggcttgaaggcaattggtgtttgtaaataaattcacaacaaggtccaagctgaagaggtgaacacatcagccgggtgggacaattctcagcatgtgcaaacataggcaaattctagcctatgttacattgaaaacaatgtcagtgcatttttttcatgttaaagattttttaaaagctaaagcgtgttctttgctgtgctgaccacaaacaagttttaagagtttcggaagtctggcaaaaatagaaaaaaaaaaaaaaaaaaaaagctgaagcaacattgaaccgcacaatgtaagctttgggcatgcacaaattttcaaaacaaaggaaggaaatcatccc

SEQ ID NO: 765726 - DNA, 605 bp, Homo sapiens
aaaaattgtgcaacaaaacacaaatagcattccaacagcttggcaagtgatgcattcacctgagattgagtggttttaggcggtcagtaacaaaatgcttctttgctgtctcagtagaaaggcaacaaattcttcaaagaaaccaagaaggttactaccttgacaacgtctctcattaccgtcctcctcttatgtcctttctctccacattatctgttgtgtgtccactatagaaggctacaaaacatacagcagaaaggatggcttgaaggcaattggtgtttgtaaataaattcacaacaaggtccaagctgaagaggtgaacacatcagccgggtgggacaattctcagcatgtgcaaacataggcaaattctagcctatgttacattgaaaacaatgtcagtgcatttttttcatgttaaagattttttaaaagctaaagcgtgttctttgctktgctgaccacaaacaagttttaagagtttcggaagtctggcaaaaatagaaaaaaaaaaaaaaaaaaaaagctgaagcaacattgaaccgcacaatgtaagctttgggcatgcacaaattttcaaaacaaaggaaggaaatcatccc

SEQ ID NO: 765727 - DNA, 760 bp, Homo sapiens
tgcagaggaaaatagatttcaattggatccccaaactataatgacaagtttttaattaggtgtgatcaaggcttctaaaagtgaaatgcaagatgttaccagtaaagtttatatcttccattcagcccagctcatttgccagaaaattcaggtgagtggattggccagactatctggcaaggatgaaaattttagtttaaaaatgtgtcatttgtctgtattggcattcctcccacctgataaaattccaggagcttttgataaattaaaaccataattgcctgaagaagacagaaatattacatactggtttgaaaataatgatgtgcaaggtagtataagaagtcatttaggcaacggtgttgctgttcaatcaagagtattgtttctgccaaatgagtggtctgtatatgatggyctgcaaaatggatttccacatactcaaaacaatagacaagaatggcatagaagattggaaaatgtaataggaaatacttatgtcagtgtgtatcaaattatagaagaatttcaaaaagagcagtgtcacgtagaaaatgaatgtgaatgtattttatgaggagagtcaaatcctaaaaacaaaaaaggcaactattcatcgtgatgcatgacttcaaaatatagctaatgatcatgaaagtcagccagctatgatgaactctgcaattgcccataatctatccatgtaatatactttttatgtgtcaattttctttttagttgtttctttttccattttttc

SEQ ID NO: 765728 - DNA, 605 bp, Homo sapiens
acaaagggctccaaatatccacttgcagattctacaaaaagagtgtttcaaaactgctaaatcaaaagaaaggttctactctgtgagttgaatgcacacaacaaagaagtttctcagaatgcttccgtcaattttttatgtggagatatttccttttccaccataggcccctaagttctccaaatatccacttgcaaattctacaaaaagagtgaaaactgctgaatcaaaagaaaggttcaccactgtaagatgaatgtacacgtcacaaagaagtttctgagaaagattctgtctagtttttatgtgaagatatacccttttgcacygtagacctcaaaatgatccatatatccatttgcagattctacaaaaagagtgtttcaaaactgctcaatcaaaagaaaggttaagttctgtgagatgaatgcacacattacaaagaagtttctcagaatgctgctgtctagtttttatgtgaagatgtttcattttccaccatacgcctcaaagcgctctaaatatccacttgcagattcctcaaaaagagtgtttcaaaacagctcaatcaaaagaaaggttcaactctgtgagatgaatgcaca

SEQ ID NO: 765729 - DNA, 589 bp, Homo sapiens
attctgacaaacttatttgtgatgtgtgcattcatgtcacagttttgaaacttacttttcattgagcagttttgaaacactctttttgtagaatctgcaagcagacatttggagcgccttgattcctatggtggataacgaaatatcttcctttaacaactagacagaagcatggtgagaaatttctttgtgatgtgtgcattcatctcacagagttgaacctttctttagattgagcagctttgaaacacgctttttgtaggatctgcaagtggtcatttggaacactttgaggcctatggtggaaaaggaaatatcttcagataaaaactagacagaarcattctaccaaacatctttgtgatgtgtgcattcatctcacagaattgaatcttacttttgattgaggagttttgaaagacgctttttgtactatttgcaagtggacatttggagtgatttgaggcctatggtggaaaaggaaatatcttcacatgagaactagacagaagcatcttgacaaatttcttcatcatgtgtgcattcatctcacaaagttgaaccttacttttcattgagcagttttgaa

SEQ ID NO: 765730 - DNA, 661 bp, Homo sapiens
acagaattgatcctatcttatgactgagcagttttgaaacactctttttgttgaatctgcaagtggatatttggagcactttgaagcccattgtgtaaagggaaatatcttcacataaaaactacacagaagcattctgagaaacttctttgtgatgtgtgcattcatctcacagagttgaacctatcttatgatttagcagtttggaaacactctctttgtagaatctgcaactggatatttggagcattttgaggccaactgtggaaaagcaaatatcttcacataaaaactacaaagaagcattctgakaatcttctttgtgatgtgtgcattcatctcacagagttgaacctttcttttgattgagcaattttgcaacacactttttgtagaatctgcaagtggatatgtggaggcctttgaggtctcctgtgtaaaaggaaatatcttcacataagaactacacagacgcattctgagaaacatctttgtgatgtgtgcattcaactcacagagttgaacctgttttttgattgaggagttttgaatttctctttttgcagaatctgcaagtggatatttggagccctttgctgcctattttggaaaaggaaatatcttcaaataaaaactacacagaaacattctgagaaacatc

SEQ ID NO: 765731 - DNA, 661 bp, Homo sapiens
acagaattgatcctatcttatgactgagcagttttgaaacactctttttgttgaatctgcaagtggatatttggagcactttgaagcccattgtgtaaagggaaatatcttcacataaaaactacacagaagcattctgagaaacttctttgtgatgtgtgcattcatctcacagagttgaacctatcttatgatttagcagtttggaaacactctctttgtagaatctgcaactggatatttggagcattttgaggccaactgtggaaaagcaaatatcttcacataaaaactacaaagaagcattctgataatcttctttgtgatgtgtgcattcatctcacagagttgaacctttcttttgattgagcaattttgcaacacactttttgtagaatctgcaagtggatatgtggaggcctttgaggtctcctgtgtaaaaggaaatatcttcacataagaactacacagacgcattctgagaaacrtctttgtgatgtgtgcattcaactcacagagttgaacctgttttttgattgaggagttttgaatttctctttttgcagaatctgcaagtggatatttggagccctttgctgcctattttggaaaaggaaatatcttcaaataaaaactacacagaaacattctgagaaacatc

SEQ ID NO: 765732 - DNA, 615 bp, Homo sapiens
cgtaattttctaattaatttaagaaattcacccatctaagcatatggttgtcttctttgttatatttgaatcaatatttgccaataaagtgacactcagttgtatactgatcttttactggacatttgaaatatcagagaatttggaaaggaaattctgatctggcatggcatcttagagaatggccatgaaactgagctctgaagtgcactgacctgtgtcgtttataatatttwaaaatattctatagagcttattttaataagatttttaaggggtgggtttaagtttcctaattaggtaaaccagtatgattatgctcaatttagattattttcagaatattacatcactaagatagtttagaacaaattagaattcttgtcattgaatataagctccccaagccatgaatttgaggaatacataagacccaatctcaatccttagaacaacatgtgagttttaataggacataactaaggggagcccagcaaaatgatatcctacagatgagtaactgtacgtaaatattttgtgtctgattttaagtgcactgtaaaactttaaacatagctgttttcaatagtagttgctgaagttatgaatgagcat

SEQ ID NO: 765733 - DNA, 645 bp, Homo sapiens
tggaagcataggctgggtgacaaaaaaacagataccaaagagtacatactgaatgcttccatttgtattgaattttagaaatgaaaatgaatctttagtgagtgaaagcacattacagtttgcttggctgcaagactgaagagaattggcctggacagaagtttttggagtcctgaaaacattcaaatctttattggattgtccattatactaaagtatatccttattaaatttcatcaaactgcacactaataatgtgtgcatttaattttatgtaaattgatattagtttrtttatttatttatttatttatttatttatttatttttgagatggagtctcgctctgtcaccaggctggagtgctgtgacacgatttcagctcactgcaacccctgcctcccgggttcaaacgattctcctgcctcagccttccaagtagctgggactacaggcacgtgccacaaggcctggctaattttttgtgtttttagtagagacgaggtttccccgtgttagccaggatagtctccatcttctgacctcatgatccgcccacctcggcatcccaaagtgctgggattacaggcgtgagccaccacaccaggccattttattttaacttttattttaagttcagggtaa

SEQ ID NO: 765734 - DNA, 645 bp, Homo sapiens
tggaagcataggctgggtgacaaaaaaacagataccaaagagtacatactgaatgcttccatttgtattgaattttagaaatgaaaatgaatctttagtgagtgaaagcacattacagtttgcttggctgcaagactgaagagaattggcctggacagaagtttttggagtcctgaaaacattcaaatctttattggattgtccattatactaaagtatatccttattaaatttcatcaaactgcacactaataatgtgtgcatttaattttatgtaaattgatattagtttgtttatttatttatttatttatttatttatttatttttgagatggagtctcgctctgtcaccaggctggagtgctgtgacacgatttcagctcactgcaacccctgcctcccgggttcaarcgattctcctgcctcagccttccaagtagctgggactacaggcacgtgccacaaggcctggctaattttttgtgtttttagtagagacgaggtttccccgtgttagccaggatagtctccatcttctgacctcatgatccgcccacctcggcatcccaaagtgctgggattacaggcgtgagccaccacaccaggccattttattttaacttttattttaagttcagggtaa

SEQ ID NO: 765735 - DNA, 645 bp, Homo sapiens
tggaagcataggctgggtgacaaaaaaacagataccaaagagtacatactgaatgcttccatttgtattgaattttagaaatgaaaatgaatctttagtgagtgaaagcacattacagtttgcttggctgcaagactgaagagaattggcctggacagaagtttttggagtcctgaaaacattcaaatctttattggattgtccattatactaaagtatatccttattaaatttcatcaaactgcacactaataatgtgtgcatttaattttatgtaaattgatattagtttgtttatttatttatttatttatttatttatttatttttgagatggagtctcgctctgtcaccaggctggagtgctgtgacacgatttcagctcactgcaacccctgcctcccgggttcaaaygattctcctgcctcagccttccaagtagctgggactacaggcacgtgccacaaggcctggctaattttttgtgtttttagtagagacgaggtttccccgtgttagccaggatagtctccatcttctgacctcatgatccgcccacctcggcatcccaaagtgctgggattacaggcgtgagccaccacaccaggccattttattttaacttttattttaagttcagggtaa

SEQ ID NO: 765736 - DNA, 633 bp, Homo sapiens
  misc_feature 1, 2, 3, 4, 5, 6, 7, 8, 9, 10, 11, 12, 13, 14, 15, 16, 17: n = A,T,C or G
nnnnnnnnnnnnnnnnnaacacacattttttttaatggggtttggctgtattacccaggctagccttaaactcctgggctcaagtgatcctcccaactcagcctcctcaggaggcttcaaactgtaaaataaggccaggcacagtggcttacccctgtaatcccagcactttgggaggccgatgcgggcagatcatttgaggtcaggagtccgagatcagcctggttaacatagtgaaaccccatctctacaaaaaacmcaaaaattagccaggcgtggtggcgtgcacctgtagtcttagctacttaggacgctgaagcagaagaatcacttgaacctggaaggcagagattgcagtgagccgagatagtgccactgcactccagcctgggtaacacagcaagaaaaaaaaaaaaaactataaaataagtttagagtggatggtataactggaaacttgaacagcatgtatttgatattaaggaattactgtcattctaaggttattaataatgctattataacttatctttgttgagtccttattttttagagccaagtagcaaaatactcatagatgaaataatatatttcgaatttgttttaaaataaaatagaagaaaatagggtaaa

SEQ ID NO: 765737 - DNA, 600 bp, Homo sapiens
gaagctgcttctttccaactctaactctgcctatttcttctatcatgtcatcagaattccttaaacatcttatttaacagaatatacaaatttaagccagttctacagtgaaaaacctgagagtgagtcacgacaaactttaactgtaatcttgtataatggaaatggagagagacaaatattggggaaagatcttaagaaaaytgatgaatccaataggtaggtcagataagtgtttcttggctttctgctttccatttgtaagcatgtctctgtgtgtgtatgtatgtgtatgtttatacccatgccccttatttagagctctaaatctcctaaggacgggaaccatctgccacctgacaagagagaagtaaactccatgcattcgttcttctacactcaagagggatcctcttcagcctaggatggtatgggcatagaatattttggaaacaaagggatagattctgtggctttctgtccccttttttccttttctctttccacattcctggctctaacttggttctttctgttgccatggtaaccaacagtctcagaacacagacttctgacagctggacttttagccacggagac

SEQ ID NO: 765738 - DNA, 630 bp, Homo sapiens
agtatttaccaaaagttcagggttttcagcaaatcttaaccaaatcctctcccaacccattccattctgccctctgaaactcctttgcaattgtcattgaacgttccactaaatgtcaacttctttgaggaaggctgccctcagccttcttgtcctgactctcacctccccagcatctctaccatcctcctcattcaaccacaggttcactcaacgtccttcttcttctgctggcactaccatcctgtgtgaccttcagagtttacgtggcaaagcatatgactcttcagtttcaaattccttcctttcctcaatttcaattcygtatccctctccttcctctcttcttccttccttctacaaatatttaacaaataggagtgccagatacttttcaagcttgccaaaaaaacaaaaacaaaaacaaaaaaacctccaatctttaggctcaagcaacttatttaagacataaggtcaggcaaacatatgattataaagggtatgagtgataatactctatagtgagtaaacgctgagttctaatgaaaaaaataacccattcagcatgggggggttggttgtaaaaggtttcctgtatgagattctttgggttacaaatgagattattta

SEQ ID NO: 765739 - DNA, 573 bp, Homo sapiens
cttctcaggacttggcattgcttaataggaagatccatcttcgatataagtgacaaaaaagcctaaggaatgtttcaatcaaatatactattaatacaagtaatatccagaggaaaaagggggataactaagtaaaggcagtaaaatatctctgacgatgacaaattcacctaagaaaaaagtgacacaggaaattcatgagccaaatatacaccactttttattatcttaatatttcaataaaaaataaagaaaatcagaaaacaggaataaattccacaagcatacagcaaaatatggccagataacataagactgtggccaaatgttgaacctggtagaactggttaaattttgaaagragtagaagaaaatacaaagtaattggaaagtaaaggctaagctacaaagaacaaaatgaaaaatagatgctaaaaatgtgcaaaaaagaatgtaaactttataataaaaattatgatcagaatgaatcacaaagagatataaacaaatttttaaagcaatagctagataagacctcagagaagcggcaacatattcgtattaaaatccctg

SEQ ID NO: 765740 - DNA, 643 bp, Homo sapiens
aactaaaaagcacagtttaaaaaatataaatatagagctgaaataacattatttatgagaatttttctcctgtatacaatgatatgttaccaaggatgcatttttttttttttttggaactcaaaaggcagacaaaagagtgaatgctgacaacattttgtctagatcccctttagccacccattgccctcatgtctaacttctttgggttagtctctaacagctcacagctgctctctcttctgaagaattttccttgactgtatggtaggttcctcacccaggaggtgaaattcaccattcaggggaaacctacaaccaatgactgactgatggaggtataaacagaacagccctcttgtccaaaggggtattttttcccccagagtttgccatgaaattttaatggagctgaacgcactcccactgaaataataattttgtttagtttttattctacttcccttactcttttattccttggattattctctayaaattatgcacacctgaatttctgtctcagccctcgctgctgtagaacctgacctaaaataattaacctatctctctttcactatgagagagaagctgacttaactgaatttgataaatcatcttggtttgtccaaacagctatgac

SEQ ID NO: 765741 - DNA, 580 bp, Homo sapiens
aaaatagtgtaatggaaaattatttaactgacatagttgaaacatatctttataagaaaaaaaagaaagcgtttttgttttaaagactttaatgcaaaagcaagactatcctcaaaataatttagtttgaatgctctataaatttctaatgctttttcagtaaaagctttatttagtttaacacaatgcatcatctttcaacagggtctcctttttttgaaaagctkaagctaataataaatcaagcactataatataatatcatcaatgaagatgtcacaatacaaagaattgtaaagagatgaatagccaaataggcttaaaaggttatacaaagaaatacactatcttattaattcaaaatttgctgcgatgtattgttagctcagtgttaaccagtttggccagaagtatgcattttaacaattacaacaaaataataacacattggactatttgatctggtattagcttttttggtttattaaacacatcactgaacacctagtcaaatttatttaacctctacattgtttactgttacaaaataaaatattaaattgcatatgttaaccaagtg

SEQ ID NO: 765742 - DNA, 497 bp, Homo sapiens
aataaataagtgactcaggtgccatagcctcatttcttatgttgggatgttaatgatgtctgaaatagaagatgcaatgtgaagaaatatattaaagtttctaaataaaatagtaatgtatggttacaggctatattcatcattactcaaaatttatcatgtaaaatattccaagtaaattgatgaaatttaaataaatatctagaatattagagcagatgcttgttccctgtgatctaatatactcaccaaataggaaactgttgactttttaaagccatctattatttcatttgcgttttcttcattatctttctgtcggaccataatttgttttamtcatcttgaaaagatctaaacagccagcaacaccctgtttggtaaaagttatgagaagtcattaattcttttagtgattttcatagcaagctccagagcaattggaaattaatgccaaaggtcacttcacattaaaaatattccaataacttaaaaat

SEQ ID NO: 765743 - DNA, 600 bp, Homo sapiens
catgtatacgtatgtaactaacctgcacaatgtgcacatgtaccctaaaacttaaagtataataataataaaaaaaaattatagaagaaaagataggagaaaagctatgagatcttgagtttggcaatggatcttaagattacattcaaagcatgacataaaaaattgataagttgtactttattaagattgaaaacttctccatgaaatactgttaagagaataaatagatataccacagattgggagaatatatttgcaaaacacrtatctgatgaaaaatgtggattcaacatataaaaataacttaaaattcaacaataaaaagaaaaacaataaattttttaaattcacaaatacacgaattgaccttttactaaaaaatataaagatggaaaataggcataagaaaagatgctttagtttgcttgtaattagagcattgaaaatcaaaataacaaggtgaaaccctacacacctgttagaatagtaaacatgaaaaaaaactgtcaatactaaatattactgagaatgtggagctatagcaacacttattcattgctggtgggttgcaaaattgtacagccactttggaaacag

SEQ ID NO: 765744 - DNA, 600 bp, Homo sapiens
catgtatacgtatgtaactaacctgcacaatgtgcacatgtaccctaaaacttaaagtataataataataaaaaaaaattatagaagaaaagataggagaaaagctatgagatcttgagtttggcaatggatcttaagattacattcaaagcatgacataaaaaattgataagttgtactttattaagattgaaaacttctccatgaaatactgttaagagaataaatagatataccacagattgggagaatatatttgcaaaacacatatctgatgaaaaatgtggattcaacatataaaaataacttaaaattcaacaataaaaagaaaaacaataaattttttaaattcacaaatacacgaattgaycttttactaaaaaatataaagatggaaaataggcataagaaaagatgctttagtttgcttgtaattagagcattgaaaatcaaaataacaaggtgaaaccctacacacctgttagaatagtaaacatgaaaaaaaactgtcaatactaaatattactgagaatgtggagctatagcaacacttattcattgctggtgggttgcaaaattgtacagccactttggaaacag

SEQ ID NO: 765745 - DNA, 481 bp, Homo sapiens
atgaatgtttggcctcataaatttttctagaactctgtattgctggatttttattaaattgtctttattgatcatggtgtagaaataaagcatagtgattaaaagcatgaagattgaagtcaggaagcatagtttaaaccagctttgtaaatgtgggtgactttcataatttctgatcagggtgtattggggcagattcttaatgtatttcacattcagttcttcatcaggaaatgaaaataataacaatacataccatataggaatattatggggattaacttagataatatatgcataattcttagcacagcttgtcacatagtaaatgccccamcattgttattattaaacgagcaaaaataaatagcaagtagtatataaatccttaattattcagagtagataaagtttataatttccaaatttctaacatctttctggggacagagtgtcttcattttattttcttcttcttttt

SEQ ID NO: 765746 - DNA, 662 bp, Homo sapiens
tatatatttgtatctataactataattttggattttaattgctataattgttaaggtatgttatcaattttgggctattctcagttgagaaactgggaaactcttcatctttttctattgtctacaacagtttaactgcataagcatacttgttgcttaaaagatgggcttcactcatctatatgttggttttgtttcaagacttttacaaacgtatcatccaaaacatttttttaaatcagatttattgatccaagtatttggaatggaaaaaaatcaggtttattgagttatgatttaaatcragtaaaatttacccttttttcatatatagttcaatgagttttgctatatacatgcagtcaggtaaccgccaaccaatcaagatacaaaatattccaatattcccccaagagtcctttcagggtaccccttggtaactctgagcctgttcctgtagttttacctttttttaaatatcatataaatggagccacacagtttgattccacaatcttttgtatctgactttttttacttagcacaatgattttcagaatcatacatgttattacacatatcagtagtttattctcattattgagtggtatttcattgtatggatgtagcaaaattcatttatctgttcaccagttaatgga

SEQ ID NO: 765747 - DNA, 600 bp, Homo sapiens
ctaataaaataatcaaaaaaggcctcagaagtgtttataaatttcaattatcttttgctctctatcccaggattggactagacgggatgaggttgccttcaagtagtacttgagtcagggctgcattttctcctccctgggcccctagtcaccgatgtctcttctttgaggctgaatcgccttagcggggctggtgtttggaggtgctcagggccagaggagacaaagcaggcctgcttcacaaaggcragggagccaaagaaagcaaaattgaatctctagcaccctgctcctgagtaaacagacaaaactaatgggtctgccatttctcctcccatccaattactgggctccagtagagagaatatggcaacatcagctcacacaaattctaatactcttaatctcttccatacatataaacctcacatccacccacatgacttcattaccaaagccacccaggcaggcagtgtgaaggaatgggcccgccagctgcaaaaacctgccttcttcaagttttaatcagctaatgaggtacatgcaaatgaaaagcttatgggattatggcttgtcggacagcagtgcacccctagtgat

SEQ ID NO: 765748 - DNA, 600 bp, Homo sapiens
ctaataaaataatcaaaaaaggcctcagaagtgtttataaatttcaattatcttttgctctctatcccaggattggactagacgggatgaggttgccttcaagtagtacttgagtcagggctgcattttctcctccctgggcccctagtcaccgatgtctcttctttgaggctgaatcgccttagcggggctggtgtttggaggtgctcagggccagaggagacaaagcaggcctgcttcacaaaggcgagggagccaaagaaagcaaaattgaatctctagcaccctgctcctgagtaaacagacaaaactaatgggtctgccatttctcctcccatccaattactgggctccagtagagagaatatggcaacatcagctcacacaaattctaatactcttaatcycttccatacatataaacctcacatccacccacatgacttcattaccaaagccacccaggcaggcagtgtgaaggaatgggcccgccagctgcaaaaacctgccttcttcaagttttaatcagctaatgaggtacatgcaaatgaaaagcttatgggattatggcttgtcggacagcagtgcacccctagtgat

SEQ ID NO: 765749 - DNA, 573 bp, Homo sapiens
tcaaaagtgatcttgtagtattcccaacgtacttgcatcacagacactgtgaggatcaatcctctttattatgtgacatgcaaatctgaaggctacttaaagacaggaatacacagcagagaagctgtataccttatctatattcctaacacatgtggagcattagttttccacaaatgtytaccgagataggttatgtggactatttatggaggctatcacagccactgtaccactggtgctcaataaatattttatgacaactagaatatatacaggcattctatctacccaatggggctacagatgagaacactaacgcaccaccactcagcaccatgcccagatacagggaacactggaaaatgtattaaagtaacaccggccaatgccaaccgggcctctttcatgcctacttgcctaggacaggagccaaagcttcccaagactaacaggcagaattttaagtggcaagaatgtgagtttggaaataagcacaccacagctttgtgaccttgagcaaattattgatactacagtctttttccttaagtgaaaagtcctacttaagta

SEQ ID NO: 765750 - DNA, 552 bp, Homo sapiens
aggcatggagatttttctattttacataaatataggccattctcactcttgacaaagtttcttgttattttaaaatatccaattcattatccaataattccagttgtctctaaaatattgttttctagttttgtttgaatccgtaaccaaacaaggtccataaattgtatttggttgttctatttcttgtctcttttaatctagatagaacaatagtcaccctttcccttaccctcatgctttttctgatgccactatacattcaagaaagatccagattctggatttgcctgtttgattcttcataatgtttagaagtaacttyttatatttttttaagcaagagtaaataaatgttgtattcttaatagatcgtttaggattcttagagtatttggattgcagatcttggttttatgctgtgttactcttaaactcaacagcacaaactatgaaggcagatagaaccacgtttaaatcccagcttggctgtttaatagctgaatattcatcaatctgagcctcaatttctttatttgtaaagcagatgtc

SEQ ID NO: 765751 - DNA, 603 bp, Homo sapiens
aggatgcctttcaagggtgagcctgttgatgactgagtgtttcccatctgaaagaaaaaaccacctgtggttttggtttgttttccccctcttacctaagaactcacaatggtccctggaccctgctgatcagaatagttgcgctcaccgaygcagcaacagaaacactagtattcctcctagaccacaaggaggaccaaggaaggtcggatttagtggcccttactgacacattctcaaaaacctgcacccttgcttgtcctcctagaccacaaagaggactgagaaaaatcagatttagtggcccttaccaatgcattctcaaaaacctaagaatgttagagtcctaagcattctcctgttagtattgggacattacccctgtcctataaagatgttattccccaaaaataaagtggagggccataccctgaagaagggaagggatctccagggttggaagagtgacatgttttgtcctcacttctcatcatgtgaataggaaggatatcacttctgaggctccccatatcttagcttcaggaatagcctttgttaggcccacttgtctgaggacggatcctaaaattccagatagtcccc

SEQ ID NO: 765752 - DNA, 603 bp, Homo sapiens
aggatgcctttcaagggtgagcctgttgatgactgagtgtttcccatctgaaagaaaaaaccacctgtggttttggtttgttttccccctcttacctaagaactcacaatggtccctggaccctgctgatcagaatagttgcgctcaccgatgcagcaacagaaacactagtwttcctcctagaccacaaggaggaccaaggaaggtcggatttagtggcccttactgacacattctcaaaaacctgcacccttgcttgtcctcctagaccacaaagaggactgagaaaaatcagatttagtggcccttaccaatgcattctcaaaaacctaagaatgttagagtcctaagcattctcctgttagtattgggacattacccctgtcctataaagatgttattccccaaaaataaagtggagggccataccctgaagaagggaagggatctccagggttggaagagtgacatgttttgtcctcacttctcatcatgtgaataggaaggatatcacttctgaggctccccatatcttagcttcaggaatagcctttgttaggcccacttgtctgaggacggatcctaaaattccagatagtcccc

SEQ ID NO: 765753 - DNA, 588 bp, Homo sapiens
  misc_feature 1, 2, 3, 4, 5, 6, 7, 8, 9, 10, 11, 12, 13, 14, 15, 16, 17,18, 19, 20, 21, 22, 23, 24, 25, 26, 27, 28: n = A,T,C or G
nnnnnnnnnnnnnnnnnnnnnnnnnnnngttattctggtggatttatgaatgagaaactggttatctttatatataattttatctaattttttttctttttaagaaaaacagaggtactatcccttgggtgatcatggaaaaccatagttaatgctgagaatccatattcataccataggaaaaaaaattgaataaaattctaactgttgctctgagtgggatcaaggaatgctgaaatgcttaactgtcactttttttaaacctttttcggccaacctgtgcgaaatatcaggaagaaatgtcaacctagagacactgtccttcagactatagcaaagtacaagcatctggtaaatgtatttcaagccccatggggaatcactttaggcattggcactttatatttttgcacatatgctaaaggctaaatgttaaatsaaattcatgcaggtatttgtttatatgtatacaacaatctaaattatttgggaaaagatgaagctgaatcaaatatagagagctgtaacacatatttaatgctgtgacaagggataagtactggcctccttagcagaatcagactacca

SEQ ID NO: 765754 - DNA, 588 bp, Homo sapiens
  misc_feature 1, 2, 3, 4, 5, 6, 7, 8, 9, 10, 11, 12, 13, 14, 15, 16, 17,18, 19, 20, 21, 22, 23, 24, 25, 26, 27, 28: n = A,T,C or G
nnnnnnnnnnnnnnnnnnnnnnnnnnnngttattctggtggatttatgaatgagaaactggttatctttatatataattttatctaattttttttctttttaagaaaaacagaggtactatcccttgggtgatcatggaaaaccatagttaatgctgagaatccatattcataccataggaaaaaaaattgaataaaattctaactgttgctctgagtgggatcaaggaatgctgaaatgcttaactgtcactttttttaaacctttttcggccaacctgtgcgaaatatcaggaagaaatgtcaacctagagacactgtccttcagactatagcaaagtacaagcatctggtaaatgtatttcaagccccatggggaatcactttaggcattggcactttatatttttgcacatatgctaaaggctaaatgttaaatcaaattcatgcaggtatttgtttatatgtatacaacaatctaaattatttgggaaaagatgaagctgaatcaaatatagagagctgtaacacatatttaatgcygtgacaagggataagtactggcctccttagcagaatcagactacca

SEQ ID NO: 765755 - DNA, 632 bp, Homo sapiens
tccctcaccttgccctctacccctcgacaggccccagagtgtgatgtccccctccctctgtccatgtgttcttgttgttctacactcacttatgagtgagaacatgtggtatttggttttctgttcctgtgttagtttgctgagaatgatggtttccagtttcatcaattgccctgcaaaggacatgaaatcatacttttttatggctgcatcgtatcccatggtgtatatgtgccacattttttttttatccagtctaacattaagggaatttgggttggttccaagtctttgctattgtaaatagtgctgcagtaaacatacatgtgcatgcgtctttacagtaraatgatttataattctttgggtatatactcagtaatgggattgctgggtcaaatggtatttctggttttagatccttgaggaatctccacactgtcttccacaatggttgaactaatttacactcccaccaacagtgtaaagacgttattgtataatattaaagttaataaatggagaaattttgagaataataactgatagcaaatatgtggtggacaagaaccctcatatgctgttatctgcaaagtaaattagtacaaacactttgataagcactttatcaa

SEQ ID NO: 765756 - DNA, 501 bp, Homo sapiens
ctctgctcacctccaaatcttcctgcactttttccatccacatgagaactggtgccagaattctcctttgcaactgactctacatgcaactctgagtgaatgctttcacctctccaggcctcagtttctccactcatcttatggagctggcacctcaccctacctgttccaccatgtgcatgaamttaaaaaattggcaagtgtgggaataatgtgatgaatggtaaaaactgctctgttttcttgagtttcactatgtgccaagggctgtgcctggggacaccagcccaacctcacaaatcctctcaaagccctatgagctggctctttatcactaggctcagagaggttgagtgactcgtccaagatcacacagccccaggtcttcctgctttgggagctcaaccctgtttactcctttctagggaagattactattattttccacatttctttcaagtctgttattcaccgaatcaagttgagtaacagaggctttat

SEQ ID NO: 765757 - DNA, 514 bp, Homo sapiens
tggggaggagtgaggagaagatagaaaagtgatcttactcttagttgggcactcaccaggaacaataagcatttaacagcctaatcttagatatattttaaataggtttctaaatttatttgaaaaacttttttgcaacccagagaataattatccttcatcttgggtttctgagcctctgtctcacttaaaagattgaaaacttataaacgatgattagtccatttcttcctgttgtatctttttctcatcattggaattcactgtacctccctaagactcaactaaaccaagcaagatagatggaatttattcgtggttctaaataaactggagacatagagacagttctgtcctcatgccygagtctgccaagagcaaagacaggagatgggggcagcttaggaattgggaacaaagtttttcctgaccggggacagcaaggacccaggattcctgggttgcgttactacccctctgtctagaagatattgtctcctcaccttgcttggag

SEQ ID NO: 765758 - DNA, 592 bp, Homo sapiens
ctcaacatcaaagtggggtgatcataactgccctccctacctccacaggcctgttgtgagactcaaggctgatgatgctgttgagaagcaggagcaccctgtatactgaaattttataaatcagtaaattgtgattaatataaatgtgccatcctcttacctcccacttccaatcaaacaayggaactcatttagaattcagaagagactgaatagcacctcattcagaaaaacaaagcattaggtggacaatcggcttgcagaaaactcagtgtgatcaaggaatcagaaaatcatcagcagatgccacaggctacactaataggagtatgtggttggctttgttctattcaatagagtttaaaaattattttttactatttctgacctatttgcaatatctgagaccctaccctggtgctgtttgtttgcggcatttcctctgcataatctgttctccaactgctacctcctggtagctgtgtgacattgggcaagtgacttctctgtgtctgtttccacatctgcaaaatttggataataataatacttattcctcacagggctgttgtgaggatccagtgaggtgtta

SEQ ID NO: 765759 - DNA, 592 bp, Homo sapiens
ctcaacatcaaagtggggtgatcataactgccctccctacctccacaggcctgttgtgagactcaaggctgatgatgctgttgagaagcaggagcaccctgtatactgaaattttataaatcagtaaattgtgattaatataaatgtgccatcctcttacctcccacttccaatcaaacaacggaactcatttagaatkcagaagagactgaatagcacctcattcagaaaaacaaagcattaggtggacaatcggcttgcagaaaactcagtgtgatcaaggaatcagaaaatcatcagcagatgccacaggctacactaataggagtatgtggttggctttgttctattcaatagagtttaaaaattattttttactatttctgacctatttgcaatatctgagaccctaccctggtgctgtttgtttgcggcatttcctctgcataatctgttctccaactgctacctcctggtagctgtgtgacattgggcaagtgacttctctgtgtctgtttccacatctgcaaaatttggataataataatacttattcctcacagggctgttgtgaggatccagtgaggtgtta

SEQ ID NO: 765760 - DNA, 592 bp, Homo sapiens
ctcaacatcaaagtggggtgatcataactgccctccctacctccacaggcctgttgtgagactcaaggctgatgatgctgttgagaagcaggagcaccctgtatactgaaattttataaatcagtaaattgtgattaatataaatgtgccatcctcttacctcccacttccaatcaaacaacggaactcatttagaattcagaagagactgaatagcacctcattcagaaaarcaaagcattaggtggacaatcggcttgcagaaaactcagtgtgatcaaggaatcagaaaatcatcagcagatgccacaggctacactaataggagtatgtggttggctttgttctattcaatagagtttaaaaattattttttactatttctgacctatttgcaatatctgagaccctaccctggtgctgtttgtttgcggcatttcctctgcataatctgttctccaactgctacctcctggtagctgtgtgacattgggcaagtgacttctctgtgtctgtttccacatctgcaaaatttggataataataatacttattcctcacagggctgttgtgaggatccagtgaggtgtta

SEQ ID NO: 765761 - DNA, 601 bp, Homo sapiens
ttgtgacatagatgatgaaagatcctcacgtgccccatgcactccctgtggcttatctccaacgtctccgtaatcccatcccttcccaggatgggcaggcaaggagcgagggtgaaagtgtcagagataacttggattactttctaacttattaagaaaggcagtcatttctaaacctgagttttaggcatttgctttcttttttcaaaaagttgactgcttcttatgtgctgagtgctttcactatatgaatccaatgakccctcatcgtagataggagactgttatctccattttcagttgaagagacaaactcagggggttaaacaaaaggagtagagccaggattcaaaccccaggcaacttgacaccacggccagagccctcagtcgtcatactctcctttctctattattagttacagattgcaagccgcacaacctgtaaggactgggacacacccagtaagcgactgggagaatacatccctactctttggaaggacatggaggccccatgtcacctccatctgctcttttgggctctcggcatgctgccccgctttgctttctgagcatgcttctgggctcttctttccacg

SEQ ID NO: 765762 - DNA, 601 bp, Homo sapiens
ttgtgacatagatgatgaaagatcctcacgtgccccatgcactccctgtggcttatctccaacgtctccgtaatcccatcccttcccaggatgggcaggcaaggagcgagggtgaaagtgtcagagataacttggattactttctaacttattaagaaaggcagtcatttctaaacctgagttttaggcatttgctttcttttttcaaaaagttgactgcttcttatgtgctgagtgctttcactatatgaatccaatgagccctcatcgtagataggagactgttatctccattttcagttgaagagacaaactcagggggttaaacaaaaggagtagagccaggattcaaaccccaggcaacttgacaccacggccagagccctcagtcgtcatactctcctttctctattattagttacagattgcaagccgcacaacctstaaggactgggacacacccagtaagcgactgggagaatacatccctactctttggaaggacatggaggccccatgtcacctccatctgctcttttgggctctcggcatgctgccccgctttgctttctgagcatgcttctgggctcttctttccacg

SEQ ID NO: 765763 - DNA, 601 bp, Homo sapiens
ttgtgacatagatgatgaaagatcctcacgtgccccatgcactccctgtggcttatctccaacgtctccgtaatcccatcccttcccaggatgggcaggcaaggagcgagggtgaaagtgtcagagataacttggattactttctaacttattaagaaaggcagtcatttctaaacctgagttttaggcatttgctttcttttttcaaaaagttgactgcttcttatgtgctgagtgctttcactatatgaatccaatgagccctcatcgtagataggagactgttatctccattttcagttgaagagacaaactcagggggttaaacaaaaggagtagagccaggattcaaaccccaggcaacttgacaccacggccagagccctcagtcgtcatactctcctttctctattattagttacagattgcaagccgcacaacctgtaaggactgggacacacccartaagcgactgggagaatacatccctactctttggaaggacatggaggccccatgtcacctccatctgctcttttgggctctcggcatgctgccccgctttgctttctgagcatgcttctgggctcttctttccacg

SEQ ID NO: 765764 - DNA, 553 bp, Homo sapiens
tcatagtatatgagtcaatgttcttttttgcataagctggtttaaactgagtttccatcacatacaaatgaaattatccccaataatacattaactaaaacataattctgccaggaaatggaaataagaattttgtgattaagaatgctaagtctggccgggcgcagtagctcacacctgtaatcctagcactttcggaggccaaggccagtagattgcttgaggccaggagttcaagaccagtctggccaacatggygaaactccttctctaactaaaaatacaaaaattagctggacatggtgtcacttgccggtaatcccagctactcaggaggctgaggcatgagaattgtttgaacctggaggctgcagtgagctgagatcctgccactgcattccagcctgggtaacagagcaagactctgtctccaaaaaaaaaaacaaaaaataaaaaaagggctgagtcatctcagcccgatgatatatctgctgttctgcttcttctatagacaacatgttgggagtctaatgagcttggacaccgtggcaga

SEQ ID NO: 765765 - DNA, 612 bp, Homo sapiens
tcgatcttttggaatagatgactgaggatcacatcccatcatcccacgctttccatgaacaaacgtgcagatgagagagtggagcccacctctcactggccacggttacacccggcatcaggcaggcctgccccagtctctcatgtgtgaacctgggcgaatcttggtaacctccgagcctcaggtttctcctctgttatgatggggacactaatgctgtctcacaagccggtctgtyttccaggagatgatgccaatgggctcgtccagcacaatcagtgggccccctgcagtagcctcttccctgaaaggaccaaggcctcactgtatgagtcagatggcaccacaccccagcctgcagcacagcagcggccccgctgtcctgagatacaatccttcattctggcctaaaggccctgcgtgatgagcccggtcccccttgtatccctcctggtgccctggcctcctgccagttgtccaggcaggctctttctacctcagggcctttgcaccacctgcctctcctcctggaacacccttccccagatagtctcaggcctggatctcctcctctgcaggtcccagctccactgtcactcctcagcgaggccc

SEQ ID NO: 765766 - DNA, 612 bp, Homo sapiens
tcgatcttttggaatagatgactgaggatcacatcccatcatcccacgctttccatgaacaaacgtgcagatgagagagtggagcccacctctcactggccacggttacacccggcatcaggcaggcctgccccagtctctcatgtgtgaacctgggcgaatcttggtaacctccgagcctcaggtttctcctctgttatgatggggacactaatgctgtctcacaagccggtctgtcttccaggagatgatgccaatgggctcgtccagcacaatcagtgggccccctgcagtagcctcttccctgaaaggaccaaggcctcactgtatgagtcagatggcaccacaccccagcctgcagcacagcagcggccccgctgtcctgagatacaatccttcattctggcctaaaggccctgcgtgatgagcccggtcccccttgtatccctcctkgtgccctggcctcctgccagttgtccaggcaggctctttctacctcagggcctttgcaccacctgcctctcctcctggaacacccttccccagatagtctcaggcctggatctcctcctctgcaggtcccagctccactgtcactcctcagcgaggccc

SEQ ID NO: 765767 - DNA, 621 bp, Homo sapiens
agcaaacttctgaaaagtaaagacaagtaaaaaatcttgaaagaagctaaagagaaataacattttacctgttggagaacatcaattcaattgcctgtggattttttatctgaaaccagagaggacagaaaagagtagcacaatatttttcaagtgattgagagaaaagaagtgtcaaccacaaattttatatccagtaaaaatatccttccaaattgaaggggaaatagattctcaggtgaagaaaaactgagagaatccatctctcaacaggctcactcttaaaaaatgactttgggaagttgtctaaggaacttaagaagggaaagaagaatggataaacgtaggagtaaatataacagatattacttctcttcttgastttcttaaatcttatttgatagttaaagcaaaaatcatagcactatctgaggtggtattcaatgtatatacaggaagtagctaagacaattttatcttaaaagtggggagcataaggggacccaaatggaagtaagttttctaaacttcactcaaagcggtaaaacctcaatactaatagactttaataagttagttgatacagtatctaaagcagccactaataaaaataaaaaagtc

SEQ ID NO: 765768 - DNA, 504 bp, Homo sapiens
atgatattgattcttcctatccatgaggatggaatgtttttctgtttgttcgtgttctctcttacttccttgagcagtggtttgtagttctccttgaagaggcccttcacattccttgttagctgtattcctaggtattttattctctttgtagtgattatgaatgggagttcattcatgatttggctctctgcttgcctattgttgatgtaaaggartgcttgtgatttttgcgtattgattttgtatcctgagactttgccgaagttgcttatcaattcaaggagtattggggctgagatgatggggttttctaaatataaaatcctgtcatctgcaaacagagataatttgactttctctcttcctattttaatatcctttatttctttctcttgcctaattgccttggccagaacttccaatactatgttgaataggagtggtgagagagggcatctttgtcttgttctgttttccaaagggaatacttccaggttttgc

SEQ ID NO: 765769 - DNA, 631 bp, Homo sapiens
tatggcacatgtatacctatgtaacaaatctgcacgttctgcacatgtatcccttttttttgtttgtttgtttgtttttgtagaagaaataaaaaaacagagacacacagcaaaggagatgcaatttattgcaaaagaaaaataatattttgaaagttaagtacagaatagacaggacaccctaagaaagattggattcagggtgggctactcataagaataagacagcagagaatggcactaggaagactccctttatgggagtcctacatgattattcataagggggtgggaagaggctttactagtaagcatgttctgggtggtgctctgggtgcacatgarcagtagctgtccatgcttgttcatacgtcgcatgtgtcattagcatcttaaatcttccatctgttttagaaaaaaagtgctttctaattgtggggtaaaagagtaagtatatcaattaccagccttgtttattgtcttatttgattctttttaaattactgttatatactgttatatatttttttaccagcttgatttatcattttgatatgaatatgataaattctctaaaattatgatctggatttgtcaattttacttataattttgattttagaattagtct

SEQ ID NO: 765770 - DNA, 631 bp, Homo sapiens
tatggcacatgtatacctatgtaacaaatctgcacgttctgcacatgtatcccttttttttgtttgtttgtttgtttttgtagaagaaataaaaaaacagagacacacagcaaaggagatgcaatttattgcaaaagaaaaataatattttgaaagttaagtacagaatagacaggacaccctaagaaagattggattcagggtgggctactcataagaataagacagcagagaatggcactaggaagactccctttatgggagtcctacatgattattcataagggggtgggaagaggctttactagtaagcatgttctgggtggtgctctgggtgcacatgagcagtagctgtccatgcttgttcatacgtcgcatgtgtyattagcatcttaaatcttccatctgttttagaaaaaaagtgctttctaattgtggggtaaaagagtaagtatatcaattaccagccttgtttattgtcttatttgattctttttaaattactgttatatactgttatatatttttttaccagcttgatttatcattttgatatgaatatgataaattctctaaaattatgatctggatttgtcaattttacttataattttgattttagaattagtct

SEQ ID NO: 765771 - DNA, 579 bp, Homo sapiens
atgtaccccataaatatgcacaaatgtttatatcaataaaaaagggagaatcacacacctgcgagcagcatttcctgcctctgaaatgggtatgaatgctattgaaagtggagtcaggggtctactgacctagagatgaggcaggaatttaaacagacaccagacaactgagaggggagtgttcgttttgcatcaaagcagcagtaaatattcagtgcaaagtcaggattttaaaagatgtttaaactagctctatttccatattcatgaagagtgcatgaagagtagagatggttgcctagtatgtggatttctaaactgcacatctgcgtgattactgccattttttaaatctcgaaaatgtcatatatatatgtgtgtgtagagcagatatacagtatgaacaaagcagtgttgcccggtgttgaaaagcggaggggctagtgcccgaatgccmgatttcaaatcctggctctaccaattactcaccatgtgatttctggttatcacttacatctctaagccacatttgtaaaatggggaaaataatagtatcaactagagaagtaaaaattagag

SEQ ID NO: 765772 - DNA, 518 bp, Homo sapiens
ataaggcaaaacaattcagctcatcactcctactaaatattgtactggagatcctagctagtgcaataaatcaaagaaagaggtggaagggagagaaaggcagattagataggaagagataaaattgtctttatttgaaggaagtctatgaaaaatatcacaaagggtgatcaaacatattacaaaagcttataatttaccatagcaaatttatgggtacaagttcaatatacagaatcaawaaccttcaaatatattagcaatgagccattaggaattaaaatttaaaagcttcatttattatagcatcaaaaacatgaagtacttttgtataaatcaaatatatggaagatccatatgttgaaaactacaaaacattattgatataattcaaagatggcttaactatcgagatataacatgttcatggattgcaaaatttaatattgttaatgaaaattcaccccaattgacctatagaatttatatcaaaattatagtaattgtatataaataaa

SEQ ID NO: 765773 - DNA, 588 bp, Homo sapiens
ttgacactgagctaagagggattaggaagatttggggcattctaggatcccagctggaaaagaagaggtgaccctgttagattctcctacctgggtaattgctaaactttgtctactatcctctgggtctcaaaaggctggaaaaactttgagatccaggcttgatttagttaagtgccacaaagataaaaggtgcttcactgcgctgtttacatctttggtttctatttccacttagcttcttttatttcttttctttctttctttctttytttttttctgatgcggagtttcgctgttgtggcccaggctggagtgcaatggcgcaatatcggctcaccgcaatctccgcctcccaggttcaagtgattctcctgcctcagcctcctgagtagctgggattacaggtgcccgccaccacgcctggctaatttttgtatttgtaatagagaaggggtttcaccatgtttgtcgggctggtctcgaacccctgacctcgtgatctacctgcctcgggctcccacagtgctgggattacgggcgtgagccacggcgcccgtcctccacttagtttttaggctaaatatt

SEQ ID NO: 765774 - DNA, 617 bp, Homo sapiens
atatcaacagttggaatttttgttttttattatatttatacattacatataatgtttacttaccttttttggtaatatgtgttacttccctactttaaaactgaaaaaagtcattcagctatgttgtcttccttcccactatttgattttgggtagtcatattatcattcaagagttctttcaaggcatcgctcatcttttatcacatgctgtrgtcctctaaggcaaatatcctttggggagtactgggtgggtgggaggaagggaggctaagtagagcatgtgttggctaagcacttcagctgcctgtcgggattttaagcagcattctctgaacattttcctattttgtgtctgcccaaggctatgcctccattcaggtcccaggaagtctcctggctcaccctcaagctccatattttgctagttaggggtgattacacagtaacttcaggtggtgaggatcgctggctgcctgatttgatgctgctcagtgttttctcctttatttactctgtcaaactaagagcaaaaatggtgcattgagaattcatgtctccgtgacccttcctcctacagcgaaccaagcattcccctgtagacctggacttttgcat

SEQ ID NO: 765775 - DNA, 526 bp, Homo sapiens
ttccctttgaaaagaaaaactacaaagtttgcaacttttttaaaaattcaagataaaagaagatagccactaatttcatcatctcaggagaaataagttgataacagagccaattaaattactcatgtttgaaatcttctaggaacctctctgatccaaatttattatcacttagacaatagccttctaacaaatcctcaattttttctccttgaatargaaagcagaagtccttggcttaggccattggaaatctcaaagttctacccaatttctaatcttgaataaattcccatgcttaaatacattaagacagaccaataggataaaatcttaggcagtcttgaacattcgagtttacttaaaataatcaaggataccaggaaatatttctaattttataaattgggatgcaacacaatatatggtgacaccaattgtgttaaatattaataatcacatgggtacacatgtgcacacacacaaaaagaaaaaagacagcaaggaattaggagacttcaaaaag

SEQ ID NO: 765776 - DNA, 611 bp, Homo sapiens
caagttagaaacaaccactagaagaatttagaagagaatttgatcatcattcaaaaggataatgatagacaagggagatctatacaacctgtttatggacatataccaggttcccaaagatctctttttgcttagaggatgagtatagaggacctaaaacccaccaaggggaccatgaagaaatactacagaatgacagaaagcaaaaatcatcctaaagttttggaaraacagatttctgaaaaagattttatgtagaacttagaaaaaaattttagaatattatgtgacatcattaataggatgctagagggtatgctgttaatgaaacaggagcagaaagttatcaagagaataaaccaagatgaaaacaggatgaagtaaaaagatagtgagccgagatgaaaaggaagctggataatataattaagagttgcaaggagactaaaattataataaggtaatcaaaatttttactggagacagaagaaaaggcttgtctgttcagtataagagttgaatcactagggtgaagaactctcttggaaatactctctgaggatacaagagaaaaatataaagagataaaaggatgaaagaaaaggtggtat

SEQ ID NO: 765777 - DNA, 562 bp, Homo sapiens
aaaagtttcttgagatatggggattttttttttttttttttttgatggagtctcactctgttgcccaggctggagtgcagcaatgcgatcttggctcactgcaacctccacctcccaggttcaagcgattctgctgcctyagcctcccaagtagccaggactacaggcacccgccaccgggcctggctaatttttgtatttttagtagaggtgaggtttcatcatgttggccaggctggtctcgaacttctgaccgcaaacaatctacctacctcgacctcccaaagtgctaggattacaggtgtgagccactgtgaccggctagggatttttttttttttagacggagtctcgctctgtcacccaagactggagtgcagtggcgccatctcgactcactgcaaactgcgtctcccgtgttcgtgccattctcctgcctcagcctcccaagtagctgggactacaggcgcccaccaccacgcccagctaatttttgtattttttttagtagagacggggtttcaccgtcaggtgcactccagcctgggcgacagtgggaggc

SEQ ID NO: 765778 - DNA, 627 bp, Homo sapiens
ggcaaaatgttacctcattgttattgaaatttttcttgattattagtgaatttcaaaatttttcacatattgatagcctttcctatattgtctatgattttaaaattcatgacatactgcttttattgaaccgttctgttgggatattttggaagtttatttaaatatctttatacttacaaaacaatgccaaatctacttagcttcatctgaaggcttgcacaaayttgaataaatgaacttgctcctaaaagtttgtgtttagtcactgattccccctgactttggatggctctaagacttctcatgtaaactaggacacttttgagagtgaaggagggtgccattaataattatgccaggacaacaagtataaagcaggaccatcctgcccaagccaagatgtacagtctccctgactctttcatgttcatgtagacttggaactctggaaatctggagctaagagctggggtccaagtggtgatctagggatgaattgaggatgaaacctgcttttcattccgatttttaatttggatgctgtattagtccgttttcacactgctgacaaagacataccggagatgcgcaatttacaaaagaaagaggctggccgggtgcggt

SEQ ID NO: 765779 - DNA, 671 bp, Homo sapiens
ttttttctactatcacctggctctgcaagaccagctgagctgcctcttgattacacctcaacagttttaatgaacacagagaattctcactatgcacatctatagttgctcatcttttttgttttgttttggagacagggtctcactctgtcacccaggctggggtgcagtggtgccatcatagctcactataacctcgaagtcacggsctcaagcagtcctcccacctcagcatccccaaagtgctggaattacaggcatgagccattgtgcttggcctcaagcccatcttcaaaagaacctttatcagatctgtgtccattattctagttatttcacaaacctgtgaaagctctagtaattagggcaggaatattccaaataaatcttatctgtctgttgtgtttatttcatctcctcttttgaatccacagtttttgtgctattcgcaagcaatccaatatttccactcacccaggtctgaactcccataaattgtcctatttttcactttctctacaagtctgttacaagtcccatttcctcattgaagattatttcatccaagtgaaagaaaagcagtcttcagagactaattcacactgagaaatgaatgattgatagtccccttcttactatttcaagtacaattgactatttcaaaaagctct

SEQ ID NO: 765780 - DNA, 671 bp, Homo sapiens
ttttttctactatcacctggctctgcaagaccagctgagctgcctcttgattacacctcaacagttttaatgaacacagagaattctcactatgcacatctatagttgctcatcttttttgttttgttttggagacagggtctcactctgtcacccaggctggggtgcagtggtgccatcatagctcactataacctcgaagtcacggcctcaagcagtcctcccacctcagcatccccaaagtgctggaattacaggcatgagccattgtgcttggcctcaagcccatcttcaaaagaacctttatcagatctgtgtccattattctagttatttcacaaacctgtgaaagctctagtaattagggcaggaatattccaaataaatcttatctgtctgttgtgtttatttcatctcctcttttgaatccacagtttttgtgctattcgcaagcaatscaatatttccactcacccaggtctgaactcccataaattgtcctatttttcactttctctacaagtctgttacaagtcccatttcctcattgaagattatttcatccaagtgaaagaaaagcagtcttcagagactaattcacactgagaaatgaatgattgatagtccccttcttactatttcaagtacaattgactatttcaaaaagctct

SEQ ID NO: 765781 - DNA, 598 bp, Homo sapiens
ttaaccattatgttacagctggatttctggctgggtctctctccgagggttggagtgaacccagtagaagcaggtaacacccaggaaggagtgttgagtgaagtcatctgggatgtttacccacaaaatgcagacttgagaggtgagcaaggaagggagaaccaagattatgctggagggctgtgcaaactgtggttgtaaggctgtgggaagtatcacatccacacagggtgaggcaaggatggatatgggaagatgagcagtgacattggtagcctggagaatcttagcttcttagtactggatcttagcagaattctctccaagtcttcatcactaagatgaggtatgacaggattaygtgaaaattctccttcaaacactacctagtgatggcataagaaaatagagtgagaatatctttaagatactcttgaagaaacaggtggcaagcagtttgtgctagagcttctcccagtgactcatgaaaggcacaatagaaaggatttccaagttaggcaaagaaggaaaggagagctggagaaggtatactaggaagagatctcatgtgcctgaaaattataactagaaagataca

SEQ ID NO: 765782 - DNA, 634 bp, Homo sapiens
agtgctttaccacatacaattctttaacagccttgcagtaccagtgttcatcctcacatccaggatgaagcaactgagctccacagggtgagactcttaggcggtagaactggaattcaaagccaagtctgtcctatgccccaagccatgctcttccacaccgcctgagtctcctctgcctccatayctttgaggcacagcctggcacttgacaggccccctaataaagactcattgaactgagctgaatacaatacaaggagggcactatcagtaccaactccattatctccaggaatgaacaaacaaaggaattgtaccaaaaagagatgcccatggaattctaatctttagaagaaaatgagtcattttttttctaggcccaagatagacacacacagatgaaaataattattatgggcacacacgttcataccccaaatagaacatgactttttaaaaaatgtcaaaagttaaataagaatattacccggcattccattttccaggattttaaaaataaattgagatttttcctcattaagataaaagtattttctaataatcactggggaataatctgtatgataatcaaaagggattaatggattcctttccttgttctttatcagta

SEQ ID NO: 765783 - DNA, 580 bp, Homo sapiens
taattaatagcaacatacaattatattggtagcacttctctttcttagtgatatctcataatcaacttttaatttgataaaatattgtatctgatattataatgtatccatctgaatttattagagttcagggctgtcttaaagagttgtttgacaggggaacttcgttttctaatcaatttttaaaakgtttttcattttattttattgtatttttagagtcttgctctgttgcccaggctggagttcaatggtgtgatcttggctcactgcaacctccacctcccgggttcaagtggttcttgtgcctcagcctcttgagtagctgggattacagccatgcgtcatcacacctggctaatttttgtatttttagtagaaacggggtttcgccatgttggccaggctggtcttgaactcctggcctcaagtgatcctcccaaagtgctgggataacaggcatgagctaacgtgcctggcctctaataaaattttgtagggagttaagagtggaagagataataatattgaatgtccagtatagtctggacgtatgcactttgcgaatatgatgtattta

SEQ ID NO: 765784 - DNA, 580 bp, Homo sapiens
taattaatagcaacatacaattatattggtagcacttctctttcttagtgatatctcataatcaacttttaatttgataaaatattgtatctgatattataatgtatccatctgaatttattagagttcagggctgtcttaaagagttgtttgacaggggaacttcgttttctaatcaatttttaaaagktttttcattttattttattgtatttttagagtcttgctctgttgcccaggctggagttcaatggtgtgatcttggctcactgcaacctccacctcccgggttcaagtggttcttgtgcctcagcctcttgagtagctgggattacagccatgcgtcatcacacctggctaatttttgtatttttagtagaaacggggtttcgccatgttggccaggctggtcttgaactcctggcctcaagtgatcctcccaaagtgctgggataacaggcatgagctaacgtgcctggcctctaataaaattttgtagggagttaagagtggaagagataataatattgaatgtccagtatagtctggacgtatgcactttgcgaatatgatgtattta

SEQ ID NO: 765785 - DNA, 580 bp, Homo sapiens
taattaatagcaacatacaattatattggtagcacttctctttcttagtgatatctcataatcaacttttaatttgataaaatattgtatctgatattataatgtatccatctgaatttattagagttcagggctgtcttaaagagttgtttgacaggggaacttcgttttctaatcaatttttaaaaggtttttcattttattttattgtatttttagagtcttgctctgttgcccaggctggagttcaatggtgtgatctyggctcactgcaacctccacctcccgggttcaagtggttcttgtgcctcagcctcttgagtagctgggattacagccatgcgtcatcacacctggctaatttttgtatttttagtagaaacggggtttcgccatgttggccaggctggtcttgaactcctggcctcaagtgatcctcccaaagtgctgggataacaggcatgagctaacgtgcctggcctctaataaaattttgtagggagttaagagtggaagagataataatattgaatgtccagtatagtctggacgtatgcactttgcgaatatgatgtattta

SEQ ID NO: 765786 - DNA, 509 bp, Homo sapiens
gaggtgattggatcatgagggtagtttcccccatgctgttctcgtgatagtgagttctcaagagatatggtggttttgtaagacagttttttttttacctgcttttgcttgctctctcttgccagctcctgtgtaagacatgcttcttccccttctgatatgattgtaagtttcctgaggcctcctcagctgtgcagaactgagtcaattaaacctcttttcttcataaattacccagtccagagtatttccttataacagtataaaaatggagtaatacacatatgtagtgtgtgtatatgygcataagtatattacacacgtgtatattcatgtatacatacacacatataatgttaatacaacttagaaagtaccacatatctttatagtcatgatcaaatgctatgagaatttggaggatgaatctaagctgaaggttcaagacagggaaaaggcattcaagctggattcttgataggcaggatttagtgaggtagaggagaaag

SEQ ID NO: 765787 - DNA, 539 bp, Homo sapiens
ctgtgtctagaccctctcagtgaatagtgctagggaatattttatgcatactaacatacacatttacatttgtgtatctttctagtgatacgttaaaagaaacatgaatttatactatttgtaattctaatgcagcataacatggttcactcagatctccccctctgctttgtttatttgtaatctcttcctgctataatgagaaacctggctcccattatctataaattatttatttgttcatataagtgaataaattcaaataagcaaggtatatgacatatgtataattttagaattgctaacccagtcccggtgtgaaaaatggttagagaacaatggctgtgttcagttctttttatctttagctttgccatmtcaagtaaaattaccatttccacagttgcttaggtcagctccccacctcctgccccaatcccccaaccccgcaccttagtgagtttatatcatagacatgtgtgatacaattagactaattttttacagtctgcattccatcctgaatccctcaacatcct

SEQ ID NO: 765788 - DNA, 660 bp, Homo sapiens
tgacttgtatttttattttcttttagttcacacacttttttttagatggactctcattctgttgcccaggctggagtgcaatggcacagtctcagctcactgcacctctgcctcctgggttcaagcaattcttgtgtctcagcytcccgagaagctaagattacaggtgcatgccaccaagcctggctaaattttgtgtttttagtagagatgaggtttcaccatgttggccaggctggtcttgaactcttgacctcaggtgatccacctgcctcggcctcccaaagtgctgggattacaggcgtgagccaccatgcttggcctagttcacaatatttttaattgttttgagccttctgtgtctcacagattattttaaagcatgctgtttaatttccaaatatttggtcatttccaggtatctttccattatttattttttgtttaatcaattatagtctgagaccacattttgtacagtttctattccttcaagtttattttcttgtttcatgcccccactcccgacccaaaaacaaaaagcaaaatctatcttggtgactgtttcacatgcacttgggaagaatgtgtattctgctgttgttgggtggcatattttataaatatctgttaggttaagttggctgatggtgttggtta

SEQ ID NO: 765789 - DNA, 614 bp, Homo sapiens
gtctcacagattattttaaagcatgctgtttaatttccaaatatttggtcatttccaggtatctttccattatttattttttgtttaatcaattatagtctgagaccacattttgtacagtttctattccttcaagtttattttcttgtttcatgcccccactcccgacccaaaaacaaaaagcaaaatctatcttggtgactgtttcacatgcacttgggaagaatgtgtattctgctgttgttgggtggcatattttataaatatctgttaggttaagttggctgatggtgttggttaagtctccaatttccttactgattttctgcctacttattctgttaattactgaaagaaaaatgttgaagttcctaactctagttgtgagttcatctattgtctatttacttttttccccatytcttagtacttgcctcatgtactttgaagttctattgttaatacacatttacaatttgtgccctttgtagaattgatttcattattatccagtgtccctccttatccttaataatatcccttgttgtgaagtttatctgaaattaatatagtcattccgggtcacttttagttagtggttgcatgctataatt

SEQ ID NO: 765790 - DNA, 614 bp, Homo sapiens
gtctcacagattattttaaagcatgctgtttaatttccaaatatttggtcatttccaggtatctttccattatttattttttgtttaatcaattatagtctgagaccacattttgtacagtttctattccttcaagtttattttcttgtttcatgcccccactcccgacccaaaaacaaaaagcaaaatctatcttggtgactgtttcacatgcacttgggaagaatgtgtattctgctgttgttgggtggcatattttataaatatctgttaggttaagttggctgatggtgttggttaagtctccaatttccttactgattttctgcctacttattctgttaattactgaaagaaaaatgttgaagttcctaactctagttgtgagttcatctattgtctatttacttttttccccatctcttagtacttgcctcatrtactttgaagttctattgttaatacacatttacaatttgtgccctttgtagaattgatttcattattatccagtgtccctccttatccttaataatatcccttgttgtgaagtttatctgaaattaatatagtcattccgggtcacttttagttagtggttgcatgctataatt

SEQ ID NO: 765791 - DNA, 622 bp, Homo sapiens
actaaatgaggtgaaatattttgtcagtagtccgctgtctaaagacgtttttgaggttattgaattaagtttcttttccccttgtcttcatgtccccattgatctgaatccaaatacttactttataactagtgaagctcaaatagtaagtgattcttttcagcttaaagcctagtaacatgtgtactcttgtttctcactctttatcaaagtatttatgacctgattatttatttgaatatagtcttcaaatacttaacaaaatcttactaaattatacagttttctttgatgctaaaacagaaaaaagaaacctgaatataaamaagcatgtcccagcttgtatcagaataaagattaaataatcatcttcttgttcttttcactatttgactctactttaaataaattaatgtagattaacagtctctttttctgttagcagcatccaaaaccatgatgtgtcttttcccatattaaatattaatacatagatttaatatggaaaagttggctttttctgaccactccttcaaccacaatcatacatatccagtccctacttacaatttatgatttttctttgaaaataattgaacacttctgttgcaatcctgttcca

SEQ ID NO: 765792 - DNA, 631 bp, Homo sapiens
atttccatattgattctcttttgtcttttcacataggaaataccaagcaattttttgtcacgtgaccttttcccatgaaggtttataaaattagataatgtaaattggcaggtaaataggaaaggaaggaagaaaagaaggaaacaatgatgtggaaataagcaatggtttgcttagaaagaaatgaaattccatgttmtatcttgagataaatacaggttcatctcactatcctgcccgtttgtagttagagttggaggctatactagctaacattgattgaacacttgctgcgatccacataattctcaggtacctcctatgtcttatctcatttacgtctcacattaaccctgcaagtagatattattatcaacccattttatagagtagaaactgaagactctagaaattaaggaatttaccacatgtccatctggctccagagccagccagggctcctaacatcactctgctactaaaggctgggtggggcatgccgtgaatgtgtagggattgtcatttctagaaacaaaagccagagcactgtaagttcctgggatcaatgaagattccttcatgccagctcactatggacaccccagaagcatttttgaccctctttacccca

SEQ ID NO: 765793 - DNA, 634 bp, Homo sapiens
caaactagaaggaaacccagggattagacagcatccccaggcccagcacagcacccaggatttaggtgcaatctcatcgttgatggatgagaatagcaaggcgtggggagactacaggatgggtcaaggtcacagaaacaatgagcaggcaggtctgctgctcccaacccgctctatctagcacatggctccttcttcaattctgttctacaaaccagagcatgtggaaaggggcaaagatgaaaaagacacagtccctaccctcaagagaccagggcataaaaaatttctgtgatgttaaaaaataatactttgagtccaaaccttggaaataaggccaagagagaacagcatgtccttccaacgtcattctgggcatttcttcacaagcctacccaaggattgcttaattacctcagggaaagtatctccctgtgacttggctatttattattcattaagggctcagactctgtgaagwtatgtgttaacttacagatcttatccagtaagtataaataatttctatctaataaaaaagataacaccaaagattatgatgttttaattgccctgtagggtgttagccagctttgttttttaattggtacaaagtttaccatcttaacctttt

SEQ ID NO: 765794 - DNA, 628 bp, Homo sapiens
acctcccatgtggcaaggacatgtgagccagctatcatcctcttcctacttgatttcccttcaaaggccttccttatagcttaaaaagcaatcgccagtctttcggagaatccttttttttttttgagacagggtctcattctgtcacccaggctggagtgcagttgtgcaatctcagctcactgcagcctcaacctcccgggctcaagtgatcctcccacctcacacaaagtacttgagaccacaggtgcgcatcaccatgcccagctaatttttgtgctttggtagagacagggtctccccacgttggctaggctggtctcaaactcctgggctcaagccatcygcccacctaggcctcccaaagtgcggggattacaggcgtaaaccaccataccaggcctgaaaactaccatgcctggcctgagaatcctttaatcactgatctagctttgagataatttgagatatccttgggctacactggccaatactgtggccactagccacaggtggctgctgagcacttgaaatgcggctggtctgaattgaaatgtgctgctaactgaaaaatataccctggattttgaagacagtactggagaaaaaatataaaatatctcattag

SEQ ID NO: 765795 - DNA, 460 bp, Homo sapiens
tttcatcacttagaaaattctcagcaattatgacttcaaattaccttatgatcttcttttgggactctgattacttgtatattaagccttatgttatcatttacctctcttaattttaatttcatgttttatatcttcttgttaatttgtgctgcatactaatttttcagttatatctttcargaaattatctctgtattcaatctgctgtttaatccattcactgatggctttgctcaacaattatattcccacttctggaactccattttgtctcactcagatctatataatcattcctgacaatctcctgtagctgcttactttcatgtgattccatccttcagttcttcatgtatttcatatatgactattcaattctgtttgtgatgaatcaaatatatgaagtccatgggagtctatatctgttgatttttaattttcctttttaaaaaatgcc

SEQ ID NO: 765796 - DNA, 519 bp, Homo sapiens
ttggagatttcctttcttccactaggtagaggagtacattcacaagtatgttttgcagaaggaagttccctcagtttatctggtataccaaacttctgaaaagggaagacctctctttaaatcttagcaggaaaattatactcattgaatataaaaataagaataaaattctagttgttattgtgtgaaatgcaaataagatccagttctgyctgatgcaacatatgttgaaacacagtaacaaatcatttaactctgcctgaatgaaaacataaaacttactccctgtgataaagaagtacctctacttacaaatagtttagatttcaaaaggcttttcccagttccatttgttagcaaatccaatgtgacatatttcaattgatgagggcatggtatcttggtaaagttgaggttcacttctaggtctatcattatcgtttacctcttccaacctactcaacattgtcacattttttacacttgtattacagcgaataacctcaaataagtagaaaa

SEQ ID NO: 765797 - DNA, 703 bp, Homo sapiens
tgacactatggctaaaatccttgcactatgcaaattttgtcatccttctttaacctcaggaggcaagacttgcttaatgcttcctctggctggaatttgtgtgcttcagaaatgtaaataagctgaattaagtctgaaaaagcatacaagttctcacrgaggcggggtgttctgaaaccaattcacattaatcagtatttgtagatgctccctgcaaataccttctctaaccttctgttagaattttttcacatgggttcaagtaatgcagagcctttctcaggaatctggatcttaatagttagcactatctggctgttttggcatgcaaaataaaggacaaagagccaggatgttcttggtgacacacctgagtgagcaggggccaggcctggtctttctgtgcttctctgtctgtagagattaaaacaatagcagtgcctcactgaagatcacaaatagagtgccctaaaaatcatttagcaggataaagcaaactggattgtgtctcatttttactgtgtctaattaaacgcttagtatcatcacgtatcgcgctaggcatggaagagcagtgccacccttagatttaggtaaaaggtttctcctccagctttcatctggccacaccccaccccaggcaaagagttatggggccacctggagtccacaccttccctctagaccatgttccaggcatagt

SEQ ID NO: 765798 - DNA, 703 bp, Homo sapiens
tgacactatggctaaaatccttgcactatgcaaattttgtcatccttctttaacctcaggaggcaagacttgcttaatgcttcctctggctggaatttgtgtgcttcagaaatgtaaataagctgaattaagtctgaaaaagcatacaagttctcacagaggcggggtgttctgaaaccaattcacattaatcagtatttgtagatgctccctgcaaataccttctctaaccttctgttagaattttttcacatgggttcaagtaatgcagagcctttctcaggaatctggatcttaatagttagcactatctggctgttttggcatgcaaaataaaggacaaagagccaggatgttcttggtgacacacctgagtgagcaggggccaggcctggtctttctgtgcttctctgtctgtagagattaaaacaatagcagtgcctcactgaagatcacaaatagagtgccctaaaaatcatttagcaggataaagcaaactggattgtgtctcatttttactgtgtctaattaaacgcttagtatcatcacgtatygcgctaggcatggaagagcagtgccacccttagatttaggtaaaaggtttctcctccagctttcatctggccacaccccaccccaggcaaagagttatggggccacctggagtccacaccttccctctagaccatgttccaggcatagt

SEQ ID NO: 765799 - DNA, 644 bp, Homo sapiens
ttaagcttagcgaatatgttggtgcttgttaactcattctaggacctagataatttgagttggtcctgctgatggaatttcagtggacataactgtaggtactctagtcctaagagaaaaggatggcgcaatccattctctggatttcaagtgagcacagggaggtaaccacttgtgagtgggaagggttgagtggcaaatgacagcaacagatataggagaacaaaggttaagaaaatcatttaggttctygagagctcttgaaggaagataaaaacaaaagatggcattaccagtctccagtctggaatgcatctgaccctaactttccaggggctagtaagatgtaagccatggtatgtctccccctcaccacctcattgactaattcattcattcatccctcatatttttcagccattatcatgtaccagccttggactgacaatgaggaataagatattcttcttactcataagaaaagggcctacgtcagctttttccctagcagaccaagtgattaagagaatatagagtgaggtagttcccagttgaatagtcttcagatgcagtagggcaagactactccatcttgcatcctaaaggcttatatgctatactgaatgatgcgttaacctgaattt

SEQ ID NO: 765800 - DNA, 644 bp, Homo sapiens
ttaagcttagcgaatatgttggtgcttgttaactcattctaggacctagataatttgagttggtcctgctgatggaatttcagtggacataactgtaggtactctagtcctaagagaaaaggatggcgcaatccattctctggatttcaagtgagcacagggaggtaaccacttgtgagtgggaagggttgagtggcaaatgacagcaacagatataggagaacaaaggttaagaaaatcatttaggttcttgagagctcttgaagraagataaaaacaaaagatggcattaccagtctccagtctggaatgcatctgaccctaactttccaggggctagtaagatgtaagccatggtatgtctccccctcaccacctcattgactaattcattcattcatccctcatatttttcagccattatcatgtaccagccttggactgacaatgaggaataagatattcttcttactcataagaaaagggcctacgtcagctttttccctagcagaccaagtgattaagagaatatagagtgaggtagttcccagttgaatagtcttcagatgcagtagggcaagactactccatcttgcatcctaaaggcttatatgctatactgaatgatgcgttaacctgaattt

SEQ ID NO: 765801 - DNA, 424 bp, Homo sapiens
gtgtgtaactgaagggtgaggattgtgctcgcgaatctgctgctttcccagcattccatgctgcatctcagcaccttactctcatcttcccttgttaagttgaatgccagatgagggcagaaagaaaactaaatgaacagatwactctccaaatctccaaatactgacagggtttacatgaacgtatagcagccccaaacatttcccacacagatttaaaccctcaattttatgaatcattgtttaccttgtacatgtatccaaatcccgtcctggttaaccatgttccataaaaatgaccttaggctcagcagatagacaggttgcccagtgatcaaggacttgggaattcagttactagcaaagcatttggattaaacaaaattcaggaaggactccgctgccaggcagggtcaacatggat

SEQ ID NO: 765802 - DNA, 597 bp, Homo sapiens
atcatgtaggcatttttttggtagttaatagaaaggttaactttttcttcattgtccatttctgcttgctttaaatgtgtcataacatacaagaatgaaacactcattttcatttcaaaaactcaattaaaactcacaagagtccttgagaagaaaacccactgatattctgacatcagcctattgctgcagattctctcttggccaccatttggtactttctcttcaaagatgtcttgcttggccgggcgcggtggctcacgcctgtaatcccagcactttgagaggccgaggcgggcggaccacgaagtcaggagatagagaatatcctggctaacacggtgaaaccccgtctctactaaaaacacacaaaaaaattagccrggcgtggtcgcgggcgcctgtagtcccagctactccggaggctgaggcaggagaatggcgtgaacccgggaggcggagcttgcagtgagccgagatcgcgccactgcactcctgcttgggaaacagagcgaaactccgtctcaaaaaaaagatgtcttgcttccttcatatggtatgcttcatgctttatctaaagcctagagggactgctag

SEQ ID NO: 765803 - DNA, 645 bp, Homo sapiens
tgattttggtgtcaacaaacctattatgctatcagtcttataaaagtatagcacttatgattatgtacagtacataatacttgacaatagtaataaacaactaagttaaaggtttatgtatttactatactatactttatatcattatttaagagtgtattccttctattcattaaaaaataagttaactgttaaacagcttcaggcaggtccttcaggagacatttcaaaagaaggaattgttataataggagataacaactccatgtgtattaatgcccctaaagatctacctaaagatgtgtaggtagaagacagtgataccgataatcctgaccctgtgtaggcctaggctactgtgtgtgtttgtgccttagttttcaacaaaaaatctaaacagtaaaaaataaaaataagaaaacttaaaataaaaacatttagaataaggatgtaaagaaagaaaatayttttggacagctgtacaatgtatgtgttttaaaatgtattattacagaaaaggtaataggttaaaaataattaaaaattgtataaagtaaaaaagttaaaataagctagggctcatttattatttaactccaataactggggacttcaacatcaataattggggatttcagcattgga

SEQ ID NO: 765804 - DNA, 599 bp, Homo sapiens
cccaggtctaggatccccaaagggccacagctcttctctccttctcttcacctgcaacatggtgagcaaggggcatgtttcagccctgtttgtgttatagtgactcttttaccctcatctttcagtttgtagcaagttcttgtcctgcgaccaggaagaatgaggtagacagacaagtggagggtgagcaagataaagaggagttttattgaacaatagaacagctcagagaaaaccctcagtgggcagcacctctccatagccagggtgccccaacaggtattcagctcctagcagagagggtagctcctctctgtagctgatcaatctaacaattgttcagctgtcaggagagagggcaactcctctctgcagctggttatcccattgtctgcagctctcagcagagagtgtagctgctctctgcagctggtcctcctatcatctcyccatcctctactattctcttgctgagcccagggcttttataggcctcagagggaaggaagtgtgaaccaattggttcatgggcagccatgggtgggcctggaaaaggaaccacaagtgcccacgcaggtcagcaagactggcagcccagg

SEQ ID NO: 765805 - DNA, 623 bp, Homo sapiens
tttaatctctgtgtgtgtgtgtgcacatgcacaaacaactattacaaaaaatggaataattcaatgcagagacttttgaaactcatgttttctatttataatgaatcattgacatctattcataccaatatatatagttaatatgatttccaatggccgcagagagtattacagcatggacactagcaatttctaattatgatgtcttgtaggtaaaccatgtttcactgatatttaaaattttatttttctatgtataggacatgtgtttttttgggaattggcaatttatatcatttgctcatttttagaaatcatttttatagatgtataagaacttttaatatgctttttatatacagatawgcctgtatctttaacatatattccaaatatttccccaggtctcatttgtctttacaaaatgtagatcttattatgtcaacctcccaaaatacaattttcaatagcttctcattgctctacggatgcaaaattatactcttaaaatatggccatttccttgcccctacttaccattgcaaatatttcagtcttttgtattcccacatataacgtttttgttttttcctagtcagtcaccaacactccatctgattttc

SEQ ID NO: 765806 - DNA, 520 bp, Homo sapiens
ggttccattagaaagcctgtctgaagactctctccagaaaaagcaagttttgagagttgcagcctattaaagagttgctaaggcaaccattgcttgctactaatgtagtgattagaaaagaaaaggcaatttgaggaacaatgcttctcaaaattcagaagagaaatatagctgaacaaacctccaattgaaaaaaaaagtagccatgggcagctttgtttcttgaaatagcagagagagagagatggcattcagcaygatggaaagcaatagaggccagcacatgtttgacctctttttaattccattgcattgatttttcatcattagtttctcatgattttaaaagcaaagaaattagagacccaccataataatcttaacaccagattcttgcattttggtaatgatattaaagtatctattgccatatggttgtagcataccccaatgatcagtttatttcttttaatgaatcaataaatacttagaggttggatttaaaaaccgaaacttgtac

SEQ ID NO: 765807 - DNA, 592 bp, Homo sapiens
ggtgtctgcatgttgctcctcctgaactctttatgagctccttgatggaggtgtcaaattaaaattatgagctgattttcccacaaagcattacaagaaatgatggttatattctaaagcagaaatttacaagaaaatatgatatgcttkttaccaccttctacttttagctcgtatgtattagtctgcccaggctgccacaacaaaacaccattgactaggtgatgtaacagtagaattttattcacatttctggaggttgtaagtctgagatcagggtgccagaatggttatgttctggtaacaacatctctcttcctggctagcagacagccactttcttggtctgtcctcacatggcagagaaaataagctaggtctccagagtttcttcttataagtgcaatgatcccatcgggagggctccactctcttgacctaattacctcccaagggccccatcttcaaataccatcagttctgaggttagggcatcttaggggaacacaaacattaggtccataagaacatggcagacaactggatgacctcagcatctgttattgttaaactcagatcaggttcctagttt

SEQ ID NO: 765808 - DNA, 599 bp, Homo sapiens
cccatgagctcaggccttgccctcaaacagcttgttagtggtcagccattctgtgtctacaaatgagaaattgaagtcacaccttaaagactgcaagatggcccatggatggccctgaggattggagcaatcctggagacttcctggaggagatagtgctagagctcgcctgaagactgaatgggcttggataggctgagaagaggggtgaggtggaaracctgacaggcgcagaacaggaggcagtcataggccgtgaggagcatggccttgcaggaaagctgggaacctgtcatggagggctcgaatgccagacattgggctttaggcatcaaggagcctgtgagaatgacagaatgacgagcacgctcgacatgaggaaagccacgtgaggcggacaggacaggtgtcatgagacttccctggatggtaaggaagtcagcccaaagaggggatatctcatcttatgggtccccaagctaacttgacaggcagccagggcaatttcagaatcctccctctgcagaaggaggaatgaaaacccagagagctcctggctcccaagcctaccctctctccagacaactgcaatgtcccac

SEQ ID NO: 765809 - DNA, 627 bp, Homo sapiens
aaatttttttttaatttttttaaataaaaaatctgccaggtgtggtggcacatgcctgtagtctcagctacttgggaggctgaggcaggagtatcatttgagcccaggaattcatagccacagtgagctatgatcagaccactgcgctccaacctgggcaacagagggaaacactgtctcttaaaaaataaataaaggagatgaaagatctctacagtgragaccagatgcgatggctcacgtctgtaatcccagcattttgggaggccaaggtgggcggatcacccaaggtcaggagttcgagacgagccttgccaacaatggtgaagccctgtctctactaaaaatacaaaaattagccaggcatggtggcacacacctgtaatcccagctactcgggggactgagggagaagaatcacttgaacccaggaggcagaggttgcagtgagccaagatcatgccactgcactccagcctgggctacacagtgagactctgtctcaaaaaaaaaaaactctacaatgaaaactataaatcattaatgaaagaaattgaagaagatataaatgaaaagatcccatgttcatggatcagaagaattatggtgacaatgtccatactactc

SEQ ID NO: 765810 - DNA, 537 bp, Homo sapiens
tggggggaagctgcaaggtgtgtcatgatctagtctcagagtcactgttgaaatgtcactaaaaatgactcagattcaagaggaggaggttagactctacctttgaatgggaggagtagcaaaaattggtggccttctttcatttaccacaacgtctcaaaatcctgtggatcttaaatacccatatatgttagtgtctccaggtgtagcctcttctccagtgagctccaggcctgagttccttgattcctctctttaaatgtttaataggatctcacaaattcttgtcccctacttatttctacastgatctccccaactcagtaaccagtaccaccatctgccagtcactcattctaagcttggatcctcctttcttatttatttattttgacttttttccttttttttttttttgagatgcagtctcactctgtctcccaggctggagtgcaatggcgcgatctaggctcactgcaacctctgcctcccaggttcaagcgattctcctgcctcagcctccggagtagctgggat

SEQ ID NO: 765811 - DNA, 607 bp, Homo sapiens
ctttttttatttttatcttttagagacagggtctcgctatgttgtccgggctggccttgaactcctgggcttaagcagcagtctccctgcctcagcctcctgagtagctggtactacaggtacagcaccaccaaacctagctcctcccttctttttaacgaacattcttgctgtggttccctgtaggggctgggagtgtactctctgtgtgactctcagcctcctcatttcaatttcctctgaccatggtttatttcctaagcctcgtggccgactcaatggggaactcctactaatkcttcaaagcccaactcaaaagtgccctggaagtagagagcttttcctgcttcagccccttgggcagaatgagttcctgtttcctgaaggcatctgggctttctgtgcgttctgtagctcaaacgtttgcatagtttaataagcaggtgtgtaccggaccagtggatgtggttattctcacagtatctagtttatctatcagaccctttctatctctgtcggggggattaagatcactacttagcacacagggaatgctctggctcagctaaatcagctaaagactcgggtgaacagtgaaacaggatct

SEQ ID NO: 765812 - DNA, 512 bp, Homo sapiens
attcacacctcatttaatcatgccctgcatcaccttgttgagttgttaatgctgtttatttctcaatttttcttttacactacattgctaagtccccccatcttcctcttcatagtgctttccctaccctctgagtacttgcttcttcatgctctggccaagragagtggtgttttggcagactgttttatacatgtacacttatatgccaatcatcattagttagaaaggaattggtgaaaatgctcttatgttatgagagacatgttcaacatcacaatagtctgagaagatgaattaacaatttatgagtgttgctggaaagtatgatttcaggcgattagactataggggcaaagccattgccggcttatgctgttggaatcacatcttagtagttacataatgccatcaggaccagtacgagactggtttggtgattgagcccatttcctgggatttgttcctatgtattgcagacagatgtccacgcttaggtgtgcatgctcctg

SEQ ID NO: 765813 - DNA, 568 bp, Homo sapiens
gccaaggcaggaggatcgcttgattccaggagctcaggaccaacctgggcaacatggtgaaaccctgtctctacaaaaaatacccaaaattagctggacatggtgatgtacgcctgtagtcccagctactcaggaggctgaggtgggaggactgcttgagcctgggaagtcgaggttgcagtgagctatgttcgagcctytgcactccagcctggatgacaaagtgagaccctgtctccaaaaaaaaaaaaaatggctcaaggctgtggatatcctccacagggacatcaaggtgctgaaaagctcaataagaataataatcggtcaaacagctgtcaaaaagtataatgtctttttagcctcagagtctctgatcaagcagatcccatgaatccttggcccaggcctaaataaggtgggtaagttccctcccctgctgacacacaacaaaaacatggtggccaaagtggatgaggtgaagtccacaacccagtttcagatgaagaaggtgctatgtctggctgtggctgttggccatgtgaagatgacagacgatgagcttgtacat

SEQ ID NO: 765814 - DNA, 619 bp, Homo sapiens
agttaataattttaagtatgcaatactgcacacttgaaatttgctgaaaaagtagatcttaaatgttctaaccacacacacacacacatgcacacacacacaaggtaactataaaaaacaaaagacatgaaggaaactactactattgaatttttatgtattatcaaagaagaatatatgcaattatctgaaatggctattaaaatatttctcacttaggcaatcttctattggcatgatgccagaatttcttcatctacttaaaacaattgcaatggaatgcaatggactgaatgcagacacagatatgggaattcaactgttttttttaattaatctaaatcttaaattgttttttattaatctaaataataaaaaggtttcccaaaatgtaaaataatgytattcttaccaataatcttttggttttggaaaatgtagttatttttcataaaatatgtttcttctattaatggacaatgggtttattatttttaatcaataaacattttaatttctcagttttaatttctgattgatagattgacaattataactcatacaaacaaaagctctatggggttctcaataatttttaagaatgtaagaaggtactgag

SEQ ID NO: 765815 - DNA, 621 bp, Homo sapiens
tctagcctgtaccatgtgacatcactgcaagaattttggcctggaaaaaaatgttaaagttcatgtaactcaaccccttccttggattaaaaaaaaaacaacaaaaacagtaaaaaggtttaacagaagtttaaccttgagaagcgtagaaatatttttattcactggtaccttggatacatgtcatcagcctacactgaaggcattataagaaatcgttttttatgacccctctaccctgcattgctctaaagatgctgctgagggcatcgttcacacaatgactgactgtcctctttgtacaggsccgtgggagaaattaatctttgttgtcaacaccgggaatagtagtgctgctcctgaacaactggctcatctgatcacgtggacactgaatgttactgattgcatctctctcttgctgagctgacaccaaaaggcttagatccaaattgatggccttcctctggcaaagacagaattgtacagcatgtgttttgtataaattcagtcctgccatcatcttattttacctattcttaatttttctctgtcctgattttcttacccacttattttttttcattttggtttatcttattatagtgcacatattttata

SEQ ID NO: 765816 - DNA, 505 bp, Homo sapiens
agtgtaattttgaaatttaaacaattgccaaaagcttataagataaatttaaaaataaaacaaatattatggaaagataagagttacaatagctacaagttcagcagtcttctaataggtcttacttttgttattatcaggcagttttgacttgatccaacatggtgccagttgagctaaaatttaattcaacaattatactcctactgatagtaaagcactatactagtcaaacgcaaaaatatatttaatttgaaacagtttgatataagaacaataatagaggtacgcaaaatatttcagagggacgatagctatagagtgagaataatgttaagtggtaatmgttggatatggttcatagaattggaattggagttgggccatgaaaaatgatccagtactttgactaacagttttgggagtgaggaagaggttttcaagcatcagagccatttgagcatcataaggaagactctaacggcaggaaaacacaaagctattt

SEQ ID NO: 765817 - DNA, 669 bp, Homo sapiens
caatatgcacatggaaactatgtcagaacaaaattgttaacaatgaatacttaatctaattcttcatttttggcttaatacattttttctttttttaatacaaattttgtttttaaacattattaaaatgacctttaaaagttatttattttgggccaggttcggtggctccctcctgtaatcccagcactttgggaggcaaggcaggcagatcactaggtcaggagatcgaggtcatcctggccaatatggtgaaaccccgtctctactaaaatacaaaaaaaaaaaaaaaaatagctgggcctggtggcatgagcctgtagtcccagctactcaggaggttgaggcgagggaattgcttgaacacaggaggcgggggttgcagtgagccgagatcacgccactgcactccagcctggtgacagagcgaaactccgtctcaaaaaaaaacagaaacaaaaacaaaaacaaaacaaacacacaaaaaaaakttatttattttgaaaacattactcaatgatattttaagccctcccccaaacaaatactagtctataaggagttttgattccaaattgcagaagcattaccacttgggatatattttcaaaactaaggatgctgataaggctactgcaattagaagtgctttcatatagcagttaaagg

SEQ ID NO: 765818 - DNA, 580 bp, Homo sapiens
cttggtagtcaattttatgacaaagaatctcataattccccaccctcaaaaaaaagaaaggaaaagaacccagaaaatatatttaaagaaaataaaacaccaccaccaccacaagagctaggattccaagctcttcaatactgtgagtaaaagtgttaaaaaataaaatttactatttaagttttcacaatatgtcattacgaaaaatatggagaaacctcagccaagataagagcacagggttaataatataactgcatattgaaactgataaaaatctttgggagcattgtaacatgcttttactcattgcttctcatgttacttaggatgtatttcttttacattttactttttaaaaagtaatacagtaartattttgagagaattaatcacagtctaattttgattatagtttctaaaaataggattttattttattaaaaatggtatttttacaaaaaaaattatcctgcttaataaatttacagtatacatccttataggatggcatataaaacatctactcttgttgaagacaaatattaaataacattatttctctcagtagatttagttg

SEQ ID NO: 765819 - DNA, 474 bp, Homo sapiens
atggggttattacacattggaattctaaagaagcaaccaaaccagggttggcagatataagacagggaggtcattttagcatggatcaagcgtttatttattaaccgtttacttattttactagttattattatttattatttatcttaaattagattttatcccagttaaaagtgaaatttccttaacaaacacatttttgatctaacaacatatattcacaatcacgcagaaggcagaatacttgaaaatttgttttaraaaacataaatcactttaagacacatggatgatggaaatacctaagtatagtagtttgaaagaccttaaaatgatagtgcttccacttacccactaaaggaagatataaatttatttttatttctccatgaacctctgaaaatcttttcaaaaacaattatgttgtcttccttagcagaacggccacagctgaatgctgacagaatagtccct

SEQ ID NO: 765820 - DNA, 626 bp, Homo sapiens
agatactttggtgtggggagtggtgaatcagtgatatttgaagtagtagtcaagcgaggatagcaaaggaaaatttttaagattttcttaaaaaaattatcagaatactttggtgtggggaatggcagatcaatgatactggtagtagcagtcaagggggtagcaaaggaaagaatatacatatgatgctaacagtattcttatttgtgaartgaattgatttggagaggctggctaaggcttagttttagagccatgatatatttattaatatataggtcattagtctagggagctggccaactaagtaattaccctgtttaataatggctctacaaatccaggtaattcctacatatctcactacttagattataagttaagctggccacagggcccgccttactgttctctgtcagcttgtatgtgtatgtgtgtgattaggcacttgtaaatttttacattgaagatattaatcacgtggtagctattttttcttttctcatatcagcttacatgttagtaggctgtaagtaaacacctgatccaagggtgactgtgaatattccttttagattaaattaaggattctgaggctatttctccagaaccaggccttgagacaa

SEQ ID NO: 765821 - DNA, 601 bp, Homo sapiens
catttcagtgtgtcttgcaacattttaattagtttgcttatggaaccaaacacatgcataaaacactgacagcaaaggaaagtctccctcaccgtaattagtttttgcaaatgattacttacattttcataattattcaaatatttttgtacaaggaattttacattttaaatagataattatacctccgtaacaaaccactgcaaattaraagctttgatataccattctaattcttggtacagtgcactgttggtattgccattagatcacgcatttgttgtttagaaagatagatccgctgtatcaacctgttaaatgtgagttattgccagaagatttgttgtcctcacatgtagcattctgttttcaaaggaaatccaagctatacagttttcaatagttaaagaagttcagaattttcccatctgagttagcaataagtgtttcagctcatacagtttttctgtagatgttgtagaaacaggctgagctctctaaaaagaaagtgagggaaagactcaagatttctgtaactaaattagagttaattgataactttatatattctagtatccctgtgccagatagagttattatt

SEQ ID NO: 765822 - DNA, 601 bp, Homo sapiens
catttcagtgtgtcttgcaacattttaattagtttgcttatggaaccaaacacatgcataaaacactgacagcaaaggaaagtctccctcaccgtaattagtttttgcaaatgattacttacattttcataattattcaaatatttttgtacaaggaattttacattttaaatagataattatacctccgtaacaaaccactgcaaattagaagctttgatataccattctaattcttggtacagtgcactgttggtattgccattagatcacgcatttgttgtttaraaagatagatccgctgtatcaacctgttaaatgtgagttattgccagaagatttgttgtcctcacatgtagcattctgttttcaaaggaaatccaagctatacagttttcaatagttaaagaagttcagaattttcccatctgagttagcaataagtgtttcagctcatacagtttttctgtagatgttgtagaaacaggctgagctctctaaaaagaaagtgagggaaagactcaagatttctgtaactaaattagagttaattgataactttatatattctagtatccctgtgccagatagagttattatt

SEQ ID NO: 765823 - DNA, 589 bp, Homo sapiens
ctagaaatgatagctgtaaagataaaaatgttacatacctccctcacaaggaatttccttgtggacaaaggacagacagaactcaaagtcatccttctgctcactgagataaatgcatatctcctcctttggaaaggcttatcagaaactcaaaagaatgcaaccttttgtccttatctacctattacctggaagtcccttcmctgctttaaattgtcccacctttcaggactgaacaaatgtacatctcacatatattgattgatgtctcatgtctccctaaaatgtgtaaaaccaagctgtgccctgaccactttgggcacacgtcatcaggacttcctgagacttttcacagatgggtgtccttagctttggcaaaataaacttcctaaattgactgagacctgccttagatatttggggttaatacaaggaactcaaaccactcagcagcaaaaaaaaaaaaaaaaaaaaaaaaaaaaggcagaaaagcagataatcccattaaaaagtgggcaaagaatatgaatagacatttctcaaaagaagacatacaaatggcccacaggtacatgaaaaaatgttcaac

SEQ ID NO: 765824 - DNA, 589 bp, Homo sapiens
ctagaaatgatagctgtaaagataaaaatgttacatacctccctcacaaggaatttccttgtggacaaaggacagacagaactcaaagtcatccttctgctcactgagataaatgcatatctcctcctttggaaaggcttatcagaaactcaaaagaatgcaaccttttgtccttatctacctattacctggaagtcccttcactgytttaaattgtcccacctttcaggactgaacaaatgtacatctcacatatattgattgatgtctcatgtctccctaaaatgtgtaaaaccaagctgtgccctgaccactttgggcacacgtcatcaggacttcctgagacttttcacagatgggtgtccttagctttggcaaaataaacttcctaaattgactgagacctgccttagatatttggggttaatacaaggaactcaaaccactcagcagcaaaaaaaaaaaaaaaaaaaaaaaaaaaaggcagaaaagcagataatcccattaaaaagtgggcaaagaatatgaatagacatttctcaaaagaagacatacaaatggcccacaggtacatgaaaaaatgttcaac

SEQ ID NO: 765825 - DNA, 636 bp, Homo sapiens
ataaagcaaatgggaaacctgcaaataattagtgaatccaggtaaagtctagataagagttctttgtactattcttgtaaattttctgtaagtttgaaattatagaaaatgaaaatacactttgagggaatgtagaaaagtttacaagtattcattttcttctttcctagatctttactccttgtctctctagagtaaattttgcaaatcttattttgaatttcagcaatagatacagagacatttttgtaggttctccatactgagtagtgcagttctatctcaatggatttgatgaaaccaataatktatagtataggactttaggtagaatgatgttacaggcttgaatgagctgaaaaacatcccctaacatctagcacagcttttaaagcttgtattttgtttggaaaacaaactgaactggtagtaaattttaaaaagcatgtagacattttaaagctaaggaactaacttcaccttcatttcctaccatacctgaaagagaaactttaggctggtaaagacgcatttgtggctttcattttaattaccctaacatttcttggactggtttggattcatcacatccagcagaggctttataatcagaaattgttcactgtattcatttcc

SEQ ID NO: 765826 - DNA, 507 bp, Homo sapiens
gacattatcacactaatactctaatccataccttttagaaacgaatacatgtacttcatatctttttaagtcaactcttagaaatccttgttaataggaagtgaagactgtagacacagataatcccaaactgaaagaagcaagacaagacatttcaaagcatgttataaaatagytttaatataaatgttgtttaataattaagtataatattgagaaatcaaacacatttgataattaacagtaatagtattaaggataatactcttgacatattccattatactaagtgacctcaatttgctgaatctataatgaataaagaattatctgattattcacagctgggtttcatttagtttattattcccaaatacattttaaaataaattctgatttccttaacactcttctcaagcttactttgaacatgtatcttaaataaactttaattggttaataaccagaagatcagtgcagatatagaccatcaatgcaagtaagtcc

SEQ ID NO: 765827 - DNA, 591 bp, Homo sapiens
ctgaatggctgtgaatgaaacagggaaataaaatgagcctagtcacttatatattttgaaaagatttacttaatatttctataaagaagaattcaatcttcacctaataagaatgacagttttatattcattttcttcctaatccaaaagttttacatgagaaagtattactatagtagcaagtacactatctttggagacaatcagaattagaataaaatccaggctttgacactattttagaaactgcaaattaatcacccagattttcactgtctttgtctgcaaaatgaggataatatctatgtcayacagttcttttgaggattcaaatatctatgtaaactatgtgtgtatgcctaaaatgcccagtgcattctctaccattggatcacaatacatgactgtagggaaaagaaagagagatcagactattactgtgtctatgtagaaagggaagacataagaaattccattttgacctgtaccttgaacaattgctttgctgagatgctgttaatttgtaactttgccccagccactttgccccagccactttgccccatctttgagctcacaaaaacatatgtt

SEQ ID NO: 765828 - DNA, 606 bp, Homo sapiens
gaaataacttgtatacgactgtagatttatggtttgaattttaacatctgaatatgtaacactattaaacttgtattcagtgagccaggtggtcacctagacaatgagtggacctccagaaggagcacgaactctacttccacagttacacagcaacagccatttatgtcacctgtcaggccgtgggatgtatttttaatggaatacccaggtccaactattctctgagatcttttctagcgctagattttatgtctccwcttaattttcttcagtgatatgagattatggtgtaaaaggggctgattgaggccggagagagatggtacagaaaataccaattgtcattccaaagttttgcaaccttgttcttttgaaagagacatccctgttcaacaggcaaagggaaaagaatgagtttgaggtaaaccagaagttttgaggtagaaaaagatgactgttctttatgcctccttctactggttctttgaaggttgctgacttcattttgtttaaaacgtgaatttacaacctatcagcatgtaggtgcaaatataaatataaaaatacagtccaaagacaaataaaattattttaattagttgc

SEQ ID NO: 765829 - DNA, 606 bp, Homo sapiens
gaaataacttgtatacgactgtagatttatggtttgaattttaacatctgaatatgtaacactattaaacttgtattcagtgagccaggtggtcacctagacaatgagtggacctccagaaggagcacgaactctacttccacagttacacagcaacagccatttatgtcacctgtcaggccgtgggatgtatttttaatggaatacccaggtccaactattctctgagatcttttctagcgctagattttatgtctccacttaattttcttcagtgatatgagattatggtgtaaaaggggctgattgaggccggagagagatggtacagaaaataccaattgtcattccaaagttttgcaaccttgttcttttgaaagagacatccctgttcaacaggcaaagggaaaagaatgagtttgaggtaaaccagaagttttgaggtagaaaaagatgrctgttctttatgcctccttctactggttctttgaaggttgctgacttcattttgtttaaaacgtgaatttacaacctatcagcatgtaggtgcaaatataaatataaaaatacagtccaaagacaaataaaattattttaattagttgc

SEQ ID NO: 765830 - DNA, 636 bp, Homo sapiens
gtcagatctccctcagaggcctatttaagggttcccagcaaaagaggccatcatcagaggctctggttgcatgactgtttggagtttgatggcccgaaagcaagaacagacaaacatggttattagaaaatatgtatgaaaaggaaacaaggggaggggtaaggacagctcaaaaatcyggagggcttttaccagtttgcaaagggagaggaagtccaaaagcccaactggttaaaaaaaactttacccttttgctggcatatcaggcttctgggttttcttcccagagtccaatcctaaaccaactagtttaaggtttgggaaactaactctttccagtttggaggatgcatctgaggcgagtatctcatagtagggagacataattaatcagtaaagagagaaccaaggaggagagagggaaaaagaaggcaccttttaaaggagtcccaggggttaaggatgcatttgaaaggggtaaggactgaagatgaatggctacccatctagaaagaggggagcaggtgtccctggttcccttctcttcctagtagataaccagggtaagtgggggagagaaggaagagtgtcctctttcccttcttcggtccttggatccctaagtcccggtgacct

SEQ ID NO: 765831 - DNA, 636 bp, Homo sapiens
gtcagatctccctcagaggcctatttaagggttcccagcaaaagaggccatcatcagaggctctggttgcatgactgtttggagtttgatggcccgaaagcaagaacagacaaacatggttattagaaaatatgtatgaaaaggaaacaaggggaggggtaaggacagctcaaaaatccggagggcttttaccagtttgcaaagggagaggaagtccaaaagcccaactggttaaaaaaaactttacccttttgctggcatatcaggcttctgggttttcttcccagagtccaatcctaaaccaactagtttaaggtttgggaaactaactctttccagtttggaggatgcatctgaggcgagtrtctcatagtagggagacataattaatcagtaaagagagaaccaaggaggagagagggaaaaagaaggcaccttttaaaggagtcccaggggttaaggatgcatttgaaaggggtaaggactgaagatgaatggctacccatctagaaagaggggagcaggtgtccctggttcccttctcttcctagtagataaccagggtaagtgggggagagaaggaagagtgtcctctttcccttcttcggtccttggatccctaagtcccggtgacct

SEQ ID NO: 765832 - DNA, 556 bp, Homo sapiens
ttctgtcttgttttgcatgtcataattgacattcagtttgaatttttacttgtgctttgcagattttctatagtctaacttattttttggtctgcttgttttatcagccacaaagagggattgttaaaatatctcttcccatatgttgaagctaccttttggattacatgcaaatgtatctttctggtggatttgtttttttatcattatgaaacgtccttctttatatccaraattgctttatgccttgatgtctactttccatgatatttggatagttatataagcattctcttggtaaggtgatcctgatttatcttttttcaattcatttacagtcagtctttctttgtcctttaattaaagacgtgtatcttagaagcatcatatagctgggttttgttttcaggaattctactcggctgtgcacaggggtattttcattgtgttcattatgcttgggaatttgtagagtttattattattgttgttgttgttatacatttttacttcaaattgaaatgaaaaatacatacagaaaagcaagtatatcttt

SEQ ID NO: 765833 - DNA, 575 bp, Homo sapiens
aagcataaaaggcagaaaagcagtagtgaccaagcagagctcaggattgcggggagattggatcagatagaagagccagtgcctgagctacttttaaaaacataaagcactttcctatcatctaccttggtggtaactaggatctggtctcccacggatatttattatttcatgtgtgtgtgcaccatgatgtgataatggctggcctttactaacgaggacacagcatttcccaaatggttttaccttttaatatataagtttcttgaagatccactccccattctgtttactttatatttttaactgctgatctttatgtatatacataatatakgaaaacaatatgaaaataatgtatcttattatgaaacattctctcttcattatataataatttaatttataaaatcttgaataccttaattgcaataatctcctaaaccaaaataaatttataatattttacccttccgttaaaggaaataatgtggcttagacttttagagagatctgagatttgtattgccaaataatagcttaggtttcaaattttaatataatgtatatgaaag

SEQ ID NO: 765834 - DNA, 589 bp, Homo sapiens
aggcctggaggggcacggtggctcatgcctgtaatcccagcactttgggaggccgaggcaggcggatcacaaggtcaagagattgagaccatcctggccagcatggtgaaaccacatctctactaaaaatacaaaaattagctgggcgtggtggcrtgtgcctgtagtcccagctactcgggaggctgagacaggagaatcacttgaacctggcaggcagaggttgcaatgaaccgagatcgtgcccctgcactccagcctggcaacagagcgaaactccatctcaaaaaaaaaaaaaaaaaaaaaaaaaattctaggcctgtgggacagctagaaatccaacaccagaaattcctgaattagaccatagatctgaggagataattcataggtgattatagaattacagattgagataaagagtatatgacacaacctcacagattgggagcagagaaaagtcaaatataagaaagtcttatcatgaagtcatgtcctcccaagattaggaattatcagaagtatcatttgccaaatcttaagccaaatttcagatcatttcacttcactcataacagggcaggacacg

SEQ ID NO: 765835 - DNA, 633 bp, Homo sapiens
tatttgcagatgcaatcaagttaaaatgagttaataatggattgaggtaggccctactccaatgtgactggtatccttacgagaagagggaaatttggacacagagccagagacacacagggagaattccatgtgatggcagaggtagagtttgtagttatgtttgcacaagtcaaggaacttcaagggttgctggcaaccacaagaagctagggttcctccaagaaggaaccaaccctgacaacaccttgatttcagagttctggccgcctaaattgtgagagagtaaatatctgctattttaagccactgcatttggggtattttgttacaacactagaaaactaatatagtagtctttctaaaactcatttcttttctcagaattatccaagaggctcctacagtctgtaatataaatatgaactctttagaaagatattctagttccttcaatttttgkgtcctacctatcagtcccctctcttctctcttgtatatatcaaaccatttgaaattctgtgattttgacccatgctgtcaccctgccatttctttgcacatggtgatccctctatcagacatgtgagctccatttctgaaatgcaaccacctggaaacactcactttgaa

SEQ ID NO: 765836 - DNA, 621 bp, Homo sapiens
ttgtggtgggcacctgtaatcccagctactcaggaggctgaggcaggagaatagtttgaacccgggagacagcagttgcggtgagccaaaatcatgccactgcactccagcctgggcgacaaaagtaagactctgtctcaaaatacatatgttttaagctttaggaccaggaaagttaatttctgtatatccaaaaacaactatttatgggactactgggtggatttcaaacagaaactgtgcaaaccagaattgagtggaatgacatccactaagtgctaacagaaaacaaattgtcagtctagaattataagcttggggaaaatatattttttaaatgagggtgaaataaagactttttcagactarcaaaagttgactgaattggtggtaagcagacttgttttaaaagaaatgtaaaaaaaattcagactgaaagtaatatcagatggaaatgtggatttatacatggagagttttggaaatagtaaccgtgtacataaatataaaatactgttatctaattttaaattttatttaaaagattaaaaaatcaactcaagatggattaaagacttaaatataagacctgaaactataaaaatgctagaagaaaactta

SEQ ID NO: 765837 - DNA, 621 bp, Homo sapiens
ttgtggtgggcacctgtaatcccagctactcaggaggctgaggcaggagaatagtttgaacccgggagacagcagttgcggtgagccaaaatcatgccactgcactccagcctgggcgacaaaagtaagactctgtctcaaaatacatatgttttaagctttaggaccaggaaagttaatttctgtatatccaaaaacaactatttatgggactactgggtggatttcaaacagaaactgtgcaaaccagaattgagtggaatgacatccactaagtgctaacagaaaacaaattgtcagtctagaattataagcttggggaaaatatattttttaaatgagggtgaaataaagactttttcagactagcaaaarttgactgaattggtggtaagcagacttgttttaaaagaaatgtaaaaaaaattcagactgaaagtaatatcagatggaaatgtggatttatacatggagagttttggaaatagtaaccgtgtacataaatataaaatactgttatctaattttaaattttatttaaaagattaaaaaatcaactcaagatggattaaagacttaaatataagacctgaaactataaaaatgctagaagaaaactta

SEQ ID NO: 765838 - DNA, 512 bp, Homo sapiens
tatcttaagtgaaacaactcagaagcagaaagtcaaatattgcatgttctcatttataagtggaagctaaatagtatgtgcacatggacatagagtgtgaagggacaggcatttaagacttggaagggtaaggagcagaaaggggaaggtgatgatgagaaattacctaatgagtacaagatacattatttgggtgatggatgctaaaagtcaagacttcaccactaggcaatgtatccatgtaacaaaattgcacttgtgccccttaaatttatacaagagaatgtagtttaggtgctgtgctagggggcaaaaaggacaaatataggtgagatagttgcaggaaaggggaagatatcaaaraagatttttgcaacatttcatgacaacgtgaggtgggaaattaaagaaaaaattgaaagagaaataagcttttctgtattaggctgacttgacccagaggcggcaacaagcacaggccagacccaggaaaagtcttaataatattatct

SEQ ID NO: 765839 - DNA, 587 bp, Homo sapiens
ctatattttaaatatgcataattaattgtttgacgtcataaagccagtatagcaaattgcttacatactttactgatacttgacacagggcatagcagagaaacttaagtcctggctcattatagagaaggctttgggcaagacagtttatctctctgggcctcagattcatctgtctacataaggggttaaagtagataatctcagtgccaatttttatcctgctcatggtgccttgctaaaagtgctgaactgatttacttagcatttatgtactgtctccttcaatacagtgccaactyaacttaattctagagcaggaagatactttccaacagcttaaatctagcagttttatgcacgcaatatgaggatggcaggcagacctgtgggataccctcccttctaatggtacctttaaaatcctaactggggcagtgaagcaatatgaaatggcacttaaagacatgttatacttcctaaacattaactgtttatgttagaatttctctcacctcatagtctgtattttcatcacattcctcggtgcttgtatatctgcactttaggtatcttcttttcttttt

SEQ ID NO: 765840 - DNA, 569 bp, Homo sapiens
catgttatacttcctaaacattaactgtttatgttagaatttctctcacctcatagtctgtattttcatcacattcctcggtgcttgtatatctgcactttaggtatcttcttttctttttgatagcgacagggcttcactatgtcagccacactggagtgcagtggctattcacaggtgcaatccctttgttgatgagcacagcagttttgacctgccctccttccaacctgggtcagttcacctctccttagacaaactggtggtcccctgctcccaggaggacaccatattgatgccgaacttaaggcagacaccagaatggcatagcacactataacccagaattcatgggctcaaacaatcctctggcctcagcttcyccagtagttgggactacaggcatgtgccaccacacccagcacattaggtactttctaattgctgggcttcatatactattgcacctccctcaatatatttaccactaaactagtggttttcaaatttgtttaaaggagaaaaacccattattcaaaggaaatcttcggaacaccaatatttaaaac

SEQ ID NO: 765841 - DNA, 707 bp, Homo sapiens
caggctttggaacacagtgcctgtgtctctcctggaaggccaccacaagcgaaaacggggccgcagagtggcgtggatgggccgcagaaactcaggagatcatttaggcaggcagagaagaaagcggcgagacggcagggaatgctgatagcctcccagggaggcaggtcccatttcagaagagaccagggctgtcctgggcgtgctgtgaagctccaggctttggagcagggaggatctgtatcttgtggaaggcccccacaaatgaaaacaatgccgcaggttggtgtgggcgggccaaagcgtctggggggatgttgaggcaggcagaggggtgaagcagcaagaccrcagataatgctgggagcctcccaagaaaaccgctcccatcccagaagcccccagggctgacccgggagggctataaagccccaggctttgaagcaaggtgcctgtgtttttcgcggaaggccgagacaagagaaaactgccaaagggtggtgtgggcggacaacagagactcaggggaatgttgaggtaggcagaagggaagcggcaaaaccgcaacaaatgctgcaagcctcccatgaggtctctcccatcccagaagccctagggttgtcctaggcgggctataaagcaccaggctttgtagcagggtgccagtgtcttgcagaggatccccacaagtgaaagtggggccgcag

SEQ ID NO: 765842 - DNA, 607 bp, Homo sapiens
tttaactttgtgagatgaatccagacatcacaaagaagtttcacagaagcctatttctagtttttatactgggatatttggtttttcacaaggtctaagtacactcagaaatgtccctttgcagattctatgaaagagtgtgtccaacctgctcaatcaaaacaaagttttaactctgtgagctgtatctgcacatcacaaagaagtttcagagatagctattttctagtttttatcagaggttatttgatttttaactttaggcctcaaagcactctgaaatrtcccttcacagattctacaaaagagtgtttccaaactgctgaatcaaaagaagtttaactctgtgagctgaatccacaaatcacaaagcaggttccaagatagattatttctagtttttaccatgggatattctgtttttcactataggcctcaaagcactctgaaatgtccctttgcagattctacaaaatgagtgtttccaaacagctgaatgaaaagtaagttttaactctctgaaccgaatgcacatggcacaaagcagtttcacagatagcttttttctagtttttaccacaagatattcagtttttaactatagacc

SEQ ID NO: 765843 - DNA, 597 bp, Homo sapiens
tttgggaactacaagtttaaataaagacaagtagactttccattttcctgaatgactgaacaatgtcataacacttcaatacctgctcagtatacatataacacacacagaggaaatctatacttgcttctacacacatcttatacctagttaaaagcactgtcattccaggttaggttacaattttaaaggcaatacttttatggcagtacctacccaaatgcatttttaaactgtattccattaaatttcacctttgctttcacaattttatatctggcatgtgattccatttaggttatactaggaaaaaacatttttattttctcaaataactaacgttttgtgttgtaataaaacctaatgtctagtaccaacaatgtcatggactytaccatgttagatgcccatccatctcaaatgtgtaagatatcacatatttaggcacaatggctgtacagtattggtacattgcatgaaaaggtcacaggccagccacagtggctcacgcctgtaatctcagcactttgggaggccgaggtgggtcgggagtttgagaccagccagaccaacatggagaaaccctgtctctactaa

SEQ ID NO: 765844 - DNA, 559 bp, Homo sapiens
agataggctacactgcaagagagggtatacattgccacaaccacctggaagaacaatttggaaatactatttatttatagattgattgatggagtctcactctgtcacccaggctggagtgtagtggtgcagtctaggctcactgcaacctctgcctcctttgttcaagtgattytcctgcttcagtctcccaagtagctggaattacaggcatgctccaccatacccagctaatttttctatctttagtagagatggggtttcaccatgttggccagaatggtctcgaactcctgacctcaagtgatccaccccccactggcctcccaaagtgttgggattacaggcgtgagccaccacacccagcctggaaattcttttaaaatgggaaatgattatatgctatcacctacagggacacattttagggagatcctcacacatgtgctcaaagagatgatgcaacatttattgcagttctgtttgtaagagaaaaaaaaattaaaaatgtaaccatcactcagaggtgaatggtggtaaacatacatggtaaaatagc

SEQ ID NO: 765845 - DNA, 536 bp, Homo sapiens
aggcccggtggtttaataaaaggaccacaggccttttgatccttcagactgagtccagatgccagatcttctgcttacaagctgtgcaaccttgagcaggtgacttagttggagcctcagtttcttcatctgtaaaatgggtatatgaaagctaacaaaggggatcctagacctttytgagacctagccccctagttcaggcccagtgacttcagaattcactcccctgtttcaggtcggcactgactgggatgccaaggagaggctattccgcaactttgggggtcttctggggcccatggatgagccggtgggtatgcagaagtgggggaagggacctaatgtgaccgtgaccgtcatttgggtggatcccgtcaatgtcatcgcagccacctacgacatcctcattgagtccactgccgaattcacacactacaagccccctttgaacttgcccctgaggcctggggtctggacagtgaaaattctccaccactgggtgccagttgcagagaccaaattcctcgttgcgcctc

SEQ ID NO: 765846 - DNA, 498 bp, Homo sapiens
cctcttttgcaagattaggaaaatattcctgaattattccctcaaatatgttttccaagttgcttactttttcttctgtctcaggagtgccaataagtcataggttttttgctttgtgtaatctcatatttctcaaaggccttatttgttttgtaaaattcttttttctttatctttgtctgactaggtaaattcaaaagaccaatctttaaactgaaattctttcttctgcttcrtctagcctattcttaaagcttccaatggtattttgaaattccatttgtgaaattttcaattccagaagttctatttgtttttttcttaatatagctgtctcatctttcatatcctgaatcatgtttttggtttctttgtattgaatttcaactttctctcagatctcattgagtttccttgcaatccatattttgaattatttatatgttatttcagacttttcaatttggttaggatccacttttagagaactagtgcaat

SEQ ID NO: 765847 - DNA, 498 bp, Homo sapiens
cctcttttgcaagattaggaaaatattcctgaattattccctcaaatatgttttccaagttgcttactttttcttctgtctcaggagtgccaataagtcataggttttttgctttgtgtaatctcatatttctcaaaggccttatttgttttgtaaaattcttttttctttatctttgtctgactaggtaaattcaaaagaccaatctttaaactgaaattctttcttctgcttcatctagcctattcttaaarcttccaatggtattttgaaattccatttgtgaaattttcaattccagaagttctatttgtttttttcttaatatagctgtctcatctttcatatcctgaatcatgtttttggtttctttgtattgaatttcaactttctctcagatctcattgagtttccttgcaatccatattttgaattatttatatgttatttcagacttttcaatttggttaggatccacttttagagaactagtgcaat

SEQ ID NO: 765848 - DNA, 624 bp, Homo sapiens
aagcccaagtggcatggactcactttcactagcagtgtagccactaggaaaaacataaaaaattttttctctgagtgcaaacatgctgaccctcagcatgaagaaccactgttgcattcacaacagtgtgctgtgaaggtggtagatgactccctcttccrtgtcccttcctagacatagatactggccccttccgcaattggtgttggccatttcttttgtcccaaaggggatttagtagtcttgcctgccttcccttagaagagacccactctgagggttagatctccaggtaactgaggacccaccagtcccctatgcttgccaatatcagagtgggctgtggagtatgtttgcagagcatctggtggtgtgctgactcaaaggcagagaatccctggcagggcagtggcccacattggatgtacagccagtatggtgcccaccttctcagcttggctctgaggagagcgtgtgtacattttcttaggttggctacctggttctctgtccccagaaatttccccaattaccagtgatagcaatgtcttaggccatgagggcagagggtctctttagcagtttggcagtaagcagattgtcagaggggtaagggaagcaggg

SEQ ID NO: 765849 - DNA, 632 bp, Homo sapiens
taaactagggaggctagaaaaccctggagtagcatctttgtggtgctgaaggaaaataatttcaacacagaagtctatatccagcaaaaataaccttcaaagcaatgatagattctaagatacaggaaaactaagttcatcacttgttttttgttttttttgtttcgttttgttttgttttacaagaaatactaaaggaagttcattaggtggaaaggaagtgatagaagagagaaactcagatcttctggaataaaggaagaacaaaataaatggcaaatattgggtaaatataaacattgtttctccatttgggttttttaaaatacataattctgttgaaagcaataattaaaccatcgtctgcttgggttttcaaaatatgyagatgtaaacataagatgactataatataaaggtcagtgacaggaggaacctatgtggctgcaagatttctacattttatttgaagtggtacaatattaactcaaggtagaatctgtaagattaggtaatattgtaatccttagatcaagcaccaaaaatagtataccaaaagatacagccatagtaagaggtcctaacaccctctctcagcaattgctagaataattacacacagaaaaggaagc

SEQ ID NO: 765850 - DNA, 569 bp, Homo sapiens
ttctccagagaggacaaaaatctttgtcctcacatggcagaagagcagaagagagagaactcactactacaagcactttgtagagtggcattaatctatttatgagggcagagccctttggatctcccattaggcttcacctcccaacactatgccattggggattaagtttcaatatgagttttggaagggacaaaaacattcaaaccatagcaatgaatctccrtaattcctcagtttagccaggcacatagtgaatactcatgagatagcaggttgatcataggctggactagataataataagcttgtattattgaacatctattaagtgtcaggactagagtaagtatatcatatatgttacctcattaaatctatatttcccattaaaatgtgggagtctaccaaggtgtgaatccataaagttttagaaatacttattaatattttttaaagtggacaatttttttctttgaagaacaggaaaagaaaaaactggtagaaataaggctgtcacatacaggttcttgcctctatctgtctgtttcctgaagactaggttagct

SEQ ID NO: 765851 - DNA, 626 bp, Homo sapiens
ccatattaataagtacattaaatataattggtccagacagaccaattaaatgatagagaagaacagattgaataaaaatggaatattgaactataacctatcagcaacccattttaaatataaagacataccttcattaaaagtaaaaagaagggaaatatataccatgcaaaagaaatcaaaagaaaktcagaatgattatgtcaatactagacaaagcagaaattggagcgagaaatgttaatagggataaagacagacatcacttaatgataaagggttatttctctaaagagacataacaatcttaagtgcatatgcacctaaaaacagagcttcaaaatacaggagacaaagttgacataaaagaaaggagaaatagaaaaatccaaaattatcattggagattttatactcatttcttaatatttcatagaaaaaataagcagaaagtcagtaaagatatagaataactgaacaatgctatcaagtaacttgactaagttacatttacagaacactccacccaacagcaggaaagtacataatttgaaactgtattaattctatctactatatttctctctctgtgaacaccatgttcttctccacttactcatctcttg

SEQ ID NO: 765852 - DNA, 626 bp, Homo sapiens
ccatattaataagtacattaaatataattggtccagacagaccaattaaatgatagagaagaacagattgaataaaaatggaatattgaactataacctatcagcaacccattttaaatataaagacataccttcattaaaagtaaaaagaagggaaatatataccatgcaaaagaaatcaaaagaaattcagaatgattatgtcaatactagacaaagcagaaattggagcgagaaatgttaatagggataaagacagacatcacttaatgataaagggttatttctctaaagagacataacaatcttaagtgcatatgcacctaaaaacagagcttcaaaatacaggagacaaagttgacataaaagaaaggagaaatagaaaaatccaaaattatcattggagattttatactcatttcttaatatttcatagaaaaaataagcagaaagtcagtaargatatagaataactgaacaatgctatcaagtaacttgactaagttacatttacagaacactccacccaacagcaggaaagtacataatttgaaactgtattaattctatctactatatttctctctctgtgaacaccatgttcttctccacttactcatctcttg

SEQ ID NO: 765853 - DNA, 624 bp, Homo sapiens
gggattggccgggcgcggtggctcacgcctgtaatcccagcactttgggaggccaaggcgggcggatcacgaggtcaggagatcgagaccatcctggctaacacggtgaaaccccatctctactaaaaatacaaaaaaaaaattagccgggtgtggtggcgggcgcctgtagtcccagctactcaggaggctgaggcagragaatggcgtgaacccgggaggcggagcttgcagtgagccagtcgcgccactgcactccagcctgggggacagagcgagactctgtctcaaaaataaataaataaataaataaaaaataaaaaatgcagggattacctacggaggaactaaacatagtaagataataaaatcacaagaaagatgtcagagacctaatttttggtggtttaaattatctggtttcataacaggaagtcaatggatgtctaaattaatacccccacatacaaaaacatacgcatattactgttaaagtcattgaactggggataatgacagtggaggaaaggaatggcgtgaagggctcttgttttcattaaaatacatctctattgtttaatcttcaaactatatactgatatcccaatacatttaaaatagtaa

SEQ ID NO: 765854 - DNA, 634 bp, Homo sapiens
aaggaaaaaatgttaagagcagcaagacagaaagctcgggttacccacaaagggaaccccatcagactaacagcagatctcttggcagaaaccctacaagccagaagagagtgggggccaatattcaacattcttaaagaaaagaattttcaacccagaatctcatatccagccaaactaagcttcataagtgaaggaagaatcaatatcttgaaaatggccatacttcccaaggtaatttatagattcaatgccatccccatcaagtaccaatgactttattcatagaattggaaaaaactactttaaagttcatatggaacaaaaaagagcctgcatagccaagacaatcctaagcaaaaagaacaaagctggaggtatcatgctacctgacttcaaactatactacaaggctacagtaaccagaagagcatagtactggtaccaaaacagagatataaacmaatggaacagaacagagtcctcagaaataacaccacacatctatgaccatctgatctttgacaaatgtgacaaaaacaagaaatggggaaaggattccctatttaataaatggtgcttggaaaactggctagccatatgtagaaagctgaaatgatctgttccttacacc

SEQ ID NO: 765855 - DNA, 504 bp, Homo sapiens
aatccagttttcatcctggatattccactgactgcaaatatcaactccaccaaacccagcatttgcttctgttttacattctcacttcactctcctcttagtggcactcaccacaattgacctctcctgtctccttgaaaaaaatctattttccttgactgacatgcattatgttctcttggtttttctccaacatccctgggctctttttcagtcctttgctggcctgtgccctcttttttctccacacaatctatctcgctgtcacctcttccactccctggaatttaacacagtacacgtattgatgccgccaacataaatacytccagccctggcctcaccatgagtctcttaaatgccattgatcttctgattgctccacataagtatcaataaatcatctcaaacttaaacaaaacttttatttccaacttttattccaataaatatttccaaaatatttattttttatttccacccacttcaaatcatttcctccca

SEQ ID NO: 765856 - DNA, 512 bp, Homo sapiens
ccccacaataaacataactgaacctatctgcaggattggttgtgaggtctagggacaaaatattttaaaagagccagcatagtccctggtgacgtaactggccctcaataaagggcatctcacgccataatactgaagcccctggataatgaaaatggtgacagtcacttttcgtttagtgcctattcctgtgttatgtgtcctacaccctttggytctttcttactccatacagcagctctttaaagcggggattcctacccctccattttggagacaagacatggaggctcagggaagtgagtttactcagccaaggtcacctggccaatatatggcagagcaggggcttgaacccatgtttaggctgactccaacacctgggcctttaactgctctgctctgtggcctccctggggtcaatagcccaagaatcccctcagtgcaatggcagatgcgtaatttgtggcctaaccactgcctcccaaatgctgcgaaatgtgtcagaggtg

SEQ ID NO: 765857 - DNA, 534 bp, Homo sapiens
atgtggaaattaaacaacacatttttaaacaaccatgggtcaaagaatagctaacaagaaaaattagttaatatctccagatgaataaaaatgaaaacacagcataccaaaacttataggaagcaacaaaaacagaactaatrgagaagtttatagctgtaaatgcttacattaaaagaagaaagatctcaaatcaacaacccaactttacacctcaaggaaaaaaataagaacaaacaaaacccaaagttagggaaggaaggaaagaataaagattagagcagaaataaatgaaatagagaatagaaaaacaatagaaaaaatcaatgcaactaagagttcattttttgaaaagataaacaaatttgcaagttcttagctggattaactaagaaaaaatataaaaaatcaaataactaacgttagaaatgagaggccattgcaactaatgcaacaggaattcaaaggattataagagaatactatgacaattatatgtcaataaattggataacctaaaagaatggataatcc

SEQ ID NO: 765858 - DNA, 592 bp, Homo sapiens
acacactggccatgcccttgaggatctcagaccaggacaatgaccactcactgggatgccctgttagcagggggaggggatgagcataggggctgctttccatcccccacttcctaccctgcactttgtgccccagcaacactaaccagcttgtcaattcctacactgctgatacagtctcttccctccacaccttcgctcatgctgtgtccactgcctaaaatgccctctcccctgccttgcctggctacctggcaaactcctctgcattcgtcagcatcccaggcaaaacgccatctctctgggaagcctgccttcttgctccaaggtggagttagcatcttatgcagtccttggaatggtccttatcaccggtgttgctgtcatctgtgtgtctgctcctccactagaaygtgaacactgtgggacaggcactgcgtcttatgccagcaagaccaggcatggtctaggaggggccagagcatgggcactaagggtggaagctccagagtccagctccagcatcgccacttactaaagcatgatgtggcaggtgactttatccttctgtatctcagtttcatcatgtttc

SEQ ID NO: 765859 - DNA, 546 bp, Homo sapiens
ggctgtgcagttctcagctgatgaggtgctttgcagcaattgtctgtgtggctggtggggctgactggctgatggaatgtggtctaatggcctcatcagaagcacttgtgagaccatggtccccctcacagcagatgggcaaaggcgctgctcccattcaggtgcacctggtccggaaaccaagtgaacaggaagttcccagtagctcctgctctacccaacccaccacctctacctgggagctgcctccctcccatcctgcctggatgtagctccacctgttctggggagagggtcttggggagatccaggaagaccttgactctctttgtggagaaatccagagtcctaaagatttgggagcagcaaactgcaggctrtgcctccctccctgcatgctcttcctctccagtgtgtccttcagggcccagattggggtctccctcctccagcaagccctccctgatgcctccagcccacgctggcctcttcctttccaaactctgtccccttgctctgtggggcagtaggggggtggggaggaga

SEQ ID NO: 765860 - DNA, 662 bp, Homo sapiens
gcaactcatgcccatccttgccactttagcagccctgaagaaaagcagtggcctcttactcactttcataaagaaatcaagggctaacttgaggacccatctgggccatgtgcccatctctgagcataacactgtttctaggggatggaagtcgttgattggtcaggactggctcacatgctcacaccgcgagctgggtgtgtgctaaaccttggtcaaaccacatagacgaagactgagggaggtggggaagtcctgayggaaaatcagaagaaggaggatagatgctgaaaggcaaaatcagcagcttctcaagaccagtacacttcaaatataaagacacaaacaggttaaaatttaaaaatgattaaataagaacaaaaaaggaatggagaaaataaatgaaaccaagagctgggtttttgagacaataaaattaataaatgcctagtcagactggttaggaaaacagaaagaaggcaaaaatgatcaacatcaggaatgagagagattcacagatgttaaaactatcatagtattcataggtgttaaaagtataattaagggaatattatgaacaacttgaaggcattaaattcaataacttagatgaaatagatgaattccctgaaagacacaaactactaaagctcactcatgaa

SEQ ID NO: 765861 - DNA, 656 bp, Homo sapiens
gtctatatatctatccttatgtccataccacactatcttgattacttttacagtaagtttttatatcaagtagatgagccttcaacattttttttcaaagcagttttggttttcctattcattacacttctatgtaaattgtcaaggcactttgttaatatccacacaaaaaaatagcctccttggatcttgattgagatttcactgaatctacagataaactgcggagacttgacttcttaagaatgttgtgtcttctgatccatgaaaacaatatatctctatttctcagcaatgttttatagttttcagtgtatagttcttgaacatattttttaaatttatccttaagtatttcaagtttttatctgatgctttttcaaatggtatttttaactttattttccaatttttgttgctattatacagaaatacaatttgtgtatatgtgtatagatatgcagtaatttcttagagattttctgcrtaagtgattatgtaatctgtgaataaaagcacttgtatgttttcttttccaatctacatgccttttactccttttcatagccttactacattgtctagagccctgagtataacggtgaatatgttttgggaatggatatttttgtcttatttccaaacttagggggaaa

SEQ ID NO: 765862 - DNA, 646 bp, Homo sapiens
tatgcctgataatatctgtagaattaatccctaaatatagaactttggggataaaattttgaaatttttagccccagggagcagagaaacaggcttattaaacttattttttcgattttaatgatgtttgagagttatcagccctgctgggaaaaatratcaatggattttatttccctttaaagttaaagttggacattaatggcacttggcacttaaggtgggataatactagacaatcagtctcagctctgtacatgggaaccatttaattttaagtgtaggaaagactttgtggaaaatctgaaagacttcctggaataagaatgtcaggagaccatcttactctctttggaaaattcatcttaaacgtgacagaattgatagaaatgtgatttttttccagttatttcatgtgttatttttcctttagatgggcttgtctttttttcctaaatagaaatgattaattgttttcttcagcttttcctctcttcctggtttattttctgtacagctgtaagaggatagtaatcataagaaaatttacatgcattagctattcaatagagaagaaatgttcatacatgggaacacttatgggtatatataaatacaattgatgagcatgattttccactttgtt

SEQ ID NO: 765863 - DNA, 543 bp, Homo sapiens
tccaatcatctcctaccaggtccctcccttgacatgtgggaattaaaattccacacgagatttgggtggggacacagaaccaaaccatatcattcagcctctggcccctcccaagacacatgtcgttttcacatttcaaaacacaatcatgccttcccaacagtcctccaaagtcttcactcattccagaattaacccaaaagttcaagtccagagtttcatttgagacgaggcaaatcccttctgcctatgagcctktaaaatcaaaaacaagttagttacttccaagatacaataggggtacaggcattgggtaaattttccccttctaaatgagataagttggccatagcagagggattacaagccctatgcaagcctgaaacttggcagggcattcatgaaatcttaaagctccaaaacaatctccttggactccatgcctcacacccagggcacactgatgcaaggggtgggctcccaaagccttgggcagctctgctcttgtagctctgcaaggtatgactcctgcggctgctttca

SEQ ID NO: 765864 - DNA, 613 bp, Homo sapiens
ttatcaactaagatgacccaaagtcatgggggttggttcagggcaatgcaatttctagctggcattcctggccatcgttttctactttccaggttttccaagaatagtggttgagaggggtagtcaaaattggggaataaatatataggtcatttgtatctgattctcccacccagcctcaacctcactacacagcaacagcaacaaatgtcagtggcaggaagtacacaacaagaagaattamccccaatttttttaatccaaacttacaaacatagtcagtcacacatacacatacagttggtttaaagtggagtgaggggcggtagccacccttcttactttttaaccaataggatctcatgttagccatcaaagcaacagactttcagtcagttgacctttcatgatagagggttttgtggggagaagagagagaaaggagagaaaaaaaattgaggtttttgcatcatttgtcattctaatagttgaagactgaatcagtcttatgttgcagacacattaatttgattaagatacaatccatgggtcattcaggcatgtaaagtactcttgcttaattgcaaaattaacaatagaataggataaatca

SEQ ID NO: 765865 - DNA, 613 bp, Homo sapiens
ttatcaactaagatgacccaaagtcatgggggttggttcagggcaatgcaatttctagctggcattcctggccatcgttttctactttccaggttttccaagaatagtggttgagaggggtagtcaaaattggggaataaatatataggtcatttgtatctgattctcccacccagcctcaacctcactacacagcaacagcaacaaatgtcagtggcaggaagtacacaacaagaagaattacccccaatttttttaatccaaacttacaaacatagtcagtcacacatacacatacagttggtttraagtggagtgaggggcggtagccacccttcttactttttaaccaataggatctcatgttagccatcaaagcaacagactttcagtcagttgacctttcatgatagagggttttgtggggagaagagagagaaaggagagaaaaaaaattgaggtttttgcatcatttgtcattctaatagttgaagactgaatcagtcttatgttgcagacacattaatttgattaagatacaatccatgggtcattcaggcatgtaaagtactcttgcttaattgcaaaattaacaatagaataggataaatca

SEQ ID NO: 765866 - DNA, 493 bp, Homo sapiens
tcaaaacgggagggggtgtacaaacagggagtagctcacaaagatcacatgcttcaaagggcaaaaaggagagcaaagatcacaaggcaaaggacaaaagcaaagatcacaaggcaaagggcaaaagcagaattactgataagggtctatggtcagcggtgcacgtattgtcttgataaacatcttaacaacagaaaacagggttcgagaacagagaaccggtctgacttcaaatttactgggatggggttttccccaccctagtaagcctgagggtactgcaggagaccagggcatatctcagtccttatctcarctgcgtaggacagacattcccagagcggccgtttatagatctccaccccatcaggaacacaattcttttcacagagtattaatatcaatattccttgctaggaaaagaatttagcgatatcttccctacttgcacatccatttataggctctctgcaagaagaaaaatatggctttt

SEQ ID NO: 765867 - DNA, 587 bp, Homo sapiens
taaccaagataataaacacagggagaggaaccaatttcagaaagaagttaatgaatgcagtttggaatatgttcagtttaggatgactctgaaatatccaagtgaaaaaatttagtcactagttaatatgcgcttgcagttcaaaacaaggaatgagatggaaatataagaactttttttcattagatgtaaaactcttgctaaagacatattcattactcttctaatgaatatactcagataatgtactcagtgatacattccttttcaaaattaatattaggaaaaatgtctctcaaataatcaggacacatacttcaatcagaaaaagaatattatgtacgtcatcatgtttacttttttgtcctgcctgccaggaagctcagtttatatttcatgctcagttgcagtaactacaccaagccttasaacataacacattggctttctcgctattgttctagttttatcttcttatttgcagtgtaacatcccattgcatgtcccgtatattgaaagctgcctctacttctctctggtaataaaaagtatgtatgttttcacttgatattattaagttaaggttg

SEQ ID NO: 765868 - DNA, 589 bp, Homo sapiens
ttagttcatatcccaacctcctaccttattcattccatggtttttaacccatccaagcttcagttttattctggtaaagcacggttaaaaatttttttacaggatcttggtaaactcaaatgaagtactatgcataaagcaattaatgtagtgacaataaaatcagtataatattccaaattaaattttattcgttttttttttttttttttttttgagacaagggctcactctgtcacccaggttagaatgtagtggtaagattgcagctcactacatttaccttaacctcccaggctttggkgatcctcccgcctcatcctcctgagtagctgggaccacagccacacaccaccacaccaggccaatttttgtattttcttgtagagaaggggttttgccatgttgcccaggctggtctcaaactcctgggctcaagtgatcctcccgctttggcctatcaaagtgctgggattacagatgtgaacccccgtgtctggcccttatttgggtcatttgattttacttgggataatatttgacacaccttggttactgagttaataacaacacacaacaatatcctatg

SEQ ID NO: 765869 - DNA, 630 bp, Homo sapiens
aatcctacattatcataactacacatattatcatcatgtatacttattttgaaagcccatttaagggaaagttaatgtacaaactcaccaggtttcactggacacatggtaatttgattctcaggaaaccatatacagcaaacttggtcactgcaaaatgatggtactgtttgtttagaaaagaaaacacacacacacacacacacacacacacacacacacacacacacaaatagagaagatactaccaaaaaagacaactcttaaaattggacaggagaaaactaaaaaacttatatttrttctcttaacaaaagttggaaaaattttattactagaaggacttcatttaggaaacatttctctatgttttattgggtatgtaaactttgggatcagttaagtttcattgagttactagattttaaaaactagatagctaaaaaggctaaaatcttcatatcattccttattacatagtgtcttttctaaatttgctcagaagctgaatacttaaatcacaaacaccaagaaaataaatggtcttatatatgttttttatagaaatgcaattatttctagttggtcactagtaagtaacataagtaaaaatattagggatattataac

SEQ ID NO: 765870 - DNA, 603 bp, Homo sapiens
tttaaaagtaatgagtttgtctgtgactttaacaagaatagtttcagcagagtagcatggccagaagtcagatttcagaagtttgcatactcaactagaggatacaagtagagaaagcgcttgtagatgactctttatgaaatttgattataaaatagaagagaraataaggggaacagctagaggaggatgtagatttggttatttgttttattacaaggaagaaaaatgtttaaatgttgttgtaggtggtggccatctaggacacaggctagaaagtgtgtatattagggagggtggtcccagagaaggctgtatgtgttaggcaaacagaaatatagaagcaaggtgggaaacttttacatggtgtattagttcattttcacactgctataatgaagtatacgagactgggtaatttatcaagaaaagagatttaattgactcacagttcaacatggttggggggtcctcaggaaacctacaatcatcatggaaggtgaagggaaagtaaggcatgtctttcatggtggcaagagagagaaagcatgcaagggaaactgacacttttaaaccatcagatcttgtgagaacttcctcact

SEQ ID NO: 765871 - DNA, 587 bp, Homo sapiens
gcctcccaagtagctggggcaacaggcagtagagacagggtttcaccattttgcccagactgttctcgaactcctgagctcaagagatctgccagcctcggcctcccaaagtgctaggattgcaggtgtgagccaccatgcccagctgattttaggacatgtgcaaaggtggatatagaagagatttattgatgttctggtccctacttttctttaacttacctctcaacccatctaaatacgatatgtatttcttttcatgtctctcaaaactttttccccattaagcattcttattttattctgtctaaagaaatgtgctattgacatttttgtggtataatttattactagataatgtcttattccataaacaacttacaactgacaattatayattctgatatatattcttatcaggaacaaactatgtaaagaatgtatgctactttcctcagagttactaaagaaaatgaaagaggaattaagaacattaagagtcccttatcttaaagaggttaccattaagttgattacatatggaatttggtataaactaaggccctgttataaatttacttcatctt

SEQ ID NO: 765872 - DNA, 630 bp, Homo sapiens
aagtttccacagaaaaatagattttgagaagtgttaatctagtccaaaactttaaatgtacacaatacatccccagttataagccagtatatggcggaatcaggaccagatattgatttgcatacttgttttatccgtcttccccttatttcctccccctccctcccttccttctttcctttctttctggcattcattcaccgaatattagataaacacatcttgtttgacaggtacattgcttgccagagaaagcgctgagatttcttgygaaaagacacaccataaacaaataatcacaaaacaatatgatgaatactataacaaaatatgaaaaagagatctggagcacacagatgactagattactgtaagatgagcaataactttttcccactcacagtacgatggttaagcatttgaactctgcaatcagatttgcttttgaatctcttcactgctgattagctgtgtgacctttgctaagttccttaacgtggattgattcataagttttagagaagggacatgtaatcagacaagcactacctcttctctctacttataaatccatgggatgtctgtttacctactatctttttgcaagagaagagcatagcgttcccttct

SEQ ID NO: 765873 - DNA, 566 bp, Homo sapiens
tcttcagtctggaacatgtgtccttaactagattatcaaatgaattttcccctcagtattaatttccacagtggtgatttcaatattcaataaatgcatgacaagacttcccattagagaaatcaattctattctcgattgacagataaacactttascatgagatcatttgatagcttctgtcttaaactatttggtctcccaaggcagaagtattttttagagccagcccttgcaccgtggcattgtaatgacatcgtaaaacagttctttttatactttccaataaaacagtgtgacatcttaaatctgagttgctttactttttaaaggatgaagaatgcatgattccttccgtccacctccctctagccaggcaatcatcaggtacaaagaagaaagctcaggggaaacacagtctcactctataaatgtattcaaggtaaccatatagataggggaggaattgttcacattctgagaagataagaagacaaggtgacaataacctagaattagtccaagatagagtttaggtttttcaatgggtaaagataacacattcc

SEQ ID NO: 765874 - DNA, 566 bp, Homo sapiens
tcttcagtctggaacatgtgtccttaactagattatcaaatgaattttcccctcagtattaatttccacagtggtgatttcaatattcaataaatgcatgacaagacttcccattagagaaatcaattctattctcgattgacagataaacactttagcatgaratcatttgatagcttctgtcttaaactatttggtctcccaaggcagaagtattttttagagccagcccttgcaccgtggcattgtaatgacatcgtaaaacagttctttttatactttccaataaaacagtgtgacatcttaaatctgagttgctttactttttaaaggatgaagaatgcatgattccttccgtccacctccctctagccaggcaatcatcaggtacaaagaagaaagctcaggggaaacacagtctcactctataaatgtattcaaggtaaccatatagataggggaggaattgttcacattctgagaagataagaagacaaggtgacaataacctagaattagtccaagatagagtttaggtttttcaatgggtaaagataacacattcc

SEQ ID NO: 765875 - DNA, 566 bp, Homo sapiens
tcttcagtctggaacatgtgtccttaactagattatcaaatgaattttcccctcagtattaatttccacagtggtgatttcaatattcaataaatgcatgacaagacttcccattagagaaatcaattctattctcgattgacagataaacactttagcatgagatcatttgatagcttctgtcttaaactatttggtctcccaaggcagaagtattttttaragccagcccttgcaccgtggcattgtaatgacatcgtaaaacagttctttttatactttccaataaaacagtgtgacatcttaaatctgagttgctttactttttaaaggatgaagaatgcatgattccttccgtccacctccctctagccaggcaatcatcaggtacaaagaagaaagctcaggggaaacacagtctcactctataaatgtattcaaggtaaccatatagataggggaggaattgttcacattctgagaagataagaagacaaggtgacaataacctagaattagtccaagatagagtttaggtttttcaatgggtaaagataacacattcc

SEQ ID NO: 765876 - DNA, 528 bp, Homo sapiens
tttgatttcctgccatggtaatgggttatcttttatgactgtgcagatgggcgctttcatttggggaaactctacaccattcctgtcggcctctggatagcagcttagaagctctattcatcgagtttcttagctgtgtcactagtttagaacaccttgtcatctattttacagggtctgaagatattttccattcgtaaccagtacaggtttggaatgttactgagttaaacagctcakcaagttttacaactgggcacagaagaggatggcatctataattatagactataattataaggttcttgaaaaggtgggatgagacagcttcagtacacaatgttgtcatattctggcatcagaacatatttggtgcttgacctggatggagttggagaccgttattctaagtgaagtaactcagaaatggaaaaccaaacatcatatgctctcatttataagtgggagctaagctatgaggaagcaaaggcataagaatgatacaatgaactttgaacttggagagga

SEQ ID NO: 765877 - DNA, 529 bp, Homo sapiens
aatagagaaagggaaagaaaaaatatttcgagaaataatggccaaaaacttcctaaatcttatttaaaacattaatatacacatcccaaagtttaacaaattctcaagtagaataaacacaaaagagatccataccagccggacgcagtggctcacgcctgtaatcccagtwcttcgggaggccaaggtgggcagattatgaggtcaggatatcgagaccatcctggctaacacggtgaaaccctgtctctactaaaaatacaaaaaaaattagctgggcatggtggcagttgcctgtagtcccagctactcaggaggctgaggcaggagaatggcgtgaacccaggaggtggagcttgcagtgagtcgagatcacaccactgcactccagcctggggacagagcgagactccatctcaaaaaaaaaaaaaaaaagagagagccatacctatcgtagttgtgggttgaacttgaatttgtgtccccaaaagtatgttaaaggcctaaccccttatactactaaatatga

SEQ ID NO: 765878 - DNA, 552 bp, Homo sapiens; identical to SEQ ID NO: 737772

SEQ ID NO: 765879 - DNA, 598 bp, Homo sapiens
tgaaataattttgcataatgtggcagataatatgcatgttaagtcgactgcacttagaaattgatgtgaaaaaatttgcaaggagacacaatttgtatgtatctttccttctttaagcttatttttgtgagtacattatattgcatctcatatagacactcattataactttatctgtggcaagattttatggaatgacaggaaagtgagttatggagctgtattaagatctccagtaaccgaagtttggatttcttggtctgctgagttttaagtttgaaagttttgcatgcattacctatttttatagacttgaaacccttagaatgttaaaacatgtgagagctayatctatataaaactaaaaatgtgactaaagttatcaatacatcaattttgatgacggtttgagttttttcttgataatactttcttatcccaatgtttggaaatgtgtaattcaaggatcaattgtttctagacctaaaggttttgtgcagtgcataaaagttctgctatcatgaatttgatgtatgtagacatagtccatgataagctttggctctgtgtccccactcaaacctcatcttgtggctcc

SEQ ID NO: 765880 - DNA, 540 bp, Homo sapiens; identical to SEQ ID NO: 748406

SEQ ID NO: 765881 - DNA, 540 bp, Homo sapiens; identical to SEQ ID NO: 748407

SEQ ID NO: 765882 - DNA, 600 bp, Homo sapiens
aggggtaagtgaaagtcaaggggaggcaagtttgttaaggataagttaaaaattagcagtaaagtagtagttctaaaacaaatgatcctctggaatctgtgcactgccaaatatcaaggaataaaataagtaagaaacagaaaagaaataagtaaaaaataaagtgaacccaaataccagagggcaagtatggccaaaccaaaccaaagtcagaagtcaagagttcaggagatgatcttaagctgaaacagaaaaacagttcaggttggtggtaacaccaatgtgatggactttaatcatcacagagggaggcttttttgctctctatgaactaarctgaacagtaatggagaatagcactggagagggagatggaagaacctagaataagacatttcctgactgtatgctcacttaagaataactcaaactcaaagttgggtgcacttgtttctatttaaaatgaagtttaggcatttgtaaaaaagaaagatattacaaagttgatcttaacataaacttgttttatttattttagaaattaaataactgttagaatcaccaaaccaagaataatagtgtgggagaataaacacttac

SEQ ID NO: 765883 - DNA, 571 bp, Homo sapiens
aaggaatcttttttgctgagcaccaggtctcaagagtggagttaaaatattcagtaaagcatgtgtaaacagacgtgttgtcatccaggctttgttgctttatttctagagcaaaggaagagtagatttcttataattcttgaggactcttaagatttttcgaatggcaaatgtgcattgacttcaacctaaaatcaccaggtgtcattccccaacaagaaagccaggctgtcctttgaagcttttaagccaggcgttgacttctttactccagctctgaaagtcctaaatggcatcttctttcaatagaacgttgttttgttttgcttacattgaaaatctgctgtgtagtagccaatttcagcatttaatcttaggtttcctgggaaactygcttcaacttctacatcggcacttgtgcttcatcttgtatttttagattatagagatggtttctttccttaagcctcatgaaccaatccctgccaatttccaacttcaaatttttgttctgtagcttattattattattattattattattgttattatttacctctcctagccttca

SEQ ID NO: 765884 - DNA, 430 bp, Homo sapiens
tgaatcatggatccttactcctttgaggctctccattgcagtgagtcttcaagctccgagtcctacctgagccctgtccctccaaaacaccctcagtgagctagaggacacacaggactgaatctcatcagatgctgcattaaactaagggaagatgctcatygactcaggcactctgtcccaccaaaaaatcactgagcttgaacccacagaaaagtccatgccccaaactccaaccgtgtggggaggaataaaggagtaaactaaagtttcacaggcacaggccattatctgtgaaagtactttgaactagtggactgtataaaaatggagaaaacctaaggtttatggaaggcctatgatttatagaaggtgtaatatgtaaacagcctcacttaatccttatcctactcctacaacgtagatacga

SEQ ID NO: 765885 - DNA, 513 bp, Homo sapiens
tctgaaagacaaaagcatttctgaatcaaatgaaaagtgccctgccaatgccactgacaaccatcggcaagatggaggagaaaggaatgggaaagtggacacacttaagtgcatgcctactgggctaatgtgaaatcacaagaggctggacacacgcagaaccttctgagtcaagcgtggtgaaagcaatgtggctgaatcctttgttggagaggsagcaaattgtcagggggagtagagaggtggcaagtgtaggcagataacccagctgctgaggaatcccctggggctaggatgacaatataatttatcatccaaactaggtcacttctgagggtgaagggatcgctataaataatcacactacgacaagtataaactgagcaaaccaggacatatggttaccctcgccaatttcttttttctggagaggggaagggatcatagaggtcattatttgccacaatggattttcctagtgcaaactgttggcttgttttagaaaaagtaaaa

SEQ ID NO: 765886 - DNA, 649 bp, Homo sapiens
ctaataaaagactaaactgattttttcacagcctcttttttaaaaaacattgccagtccttttaatgttttgttttcagagtcaaaaaacttttttgtttcagctattcgtagcttataacaaattgggtaaagtatacttttgtcagcaaaatttaaaacagatatctttctctttacctggtttatttggaatttagaaactatttgtgagtattcttaatttatgacaatatagttatttacataagttcagtaagaatctgttttcttttgtaacatgacacaattagagaaactggttatgttaccaaggctttgactggaatgacctattttcagatatgaccagactatgttgaggaattgacatcgactttacagtgctaataaaaagccccttgaagagaytggcctaggctaggcatggcagctcacccccataatcccagcactttgaaaggccgaagccgtaggatcacttgaggccaggtgttcaagaccagcctgggcaacatggcaagaccttgtctctaccaaaaaaaaataaataaaagccaggagtggtggcatacatgtttagtcctacctacttgagagattgaggcagaggaatgcttgagcctaggagttcaaggctgcagtgagct

SEQ ID NO: 765887 - DNA, 620 bp, Homo sapiens
tgcactttacactcatagcacagatcacagtttgtgtctcacagtgaaaaagactgttcatatctttgggccacaccctgaaacacaaactgaatgatcccaccctcaacacaaaggaagttgagtccataatcgcatccacagataggatactcttagatctgacaaataacacccatttattttattccctttttcttctttcccctaagcccccggagagcctttctccagtttcatcacacactcctgactaagtagatgggggtgctagggggccagctstccgaatgaggcacatttgtcttgtcatttcaaaagctttcacagagcacctgctgtgttctgggtcctgtactaggtgacagggccacctaggtgaacagggcaaggtccctgtcctcaggaagctcccagtccaggcagaggcgtgggtgaatcggcccacacgtactgcacagtgtgttgagtgagcacagatgctgtggggccaccctgtgggtccagggaagcacttcctagagaagaaatccaaacagggattccaagtcaacgaggcagaaagtgatgggaacagcatttgtcatagtcagacaggtgcctttcacagtgacatagag

SEQ ID NO: 765888 - DNA, 631 bp, Homo sapiens
agaacatctcagaagcttataaagtgattgcccctgtaggagacaaaccaggtgcctagaggactgagaagaagtgagagttatttttcactggatacccttctatatgttttgaattttgtatgacacatgtatattacctagtccaaaaattttttaattaaaaaaatgtgttgattggggatccaagaaaggggtgggaggggagataaaaaaatatgctggttgttcaaagtcacagtccagtatgaattactgccataaggtagcactaaagatacaaaygagttaaagttatgattccaatctaatctcttccttttgttttattttatttatttatttatttatttatttatttatttatttatttattttgagatagagtctcattctgttgcccaggctggagagcagtggcacaatcatggctcactgtagcctcaactccctgggctcaatggatcctcccacctccgcctcctgagtagctaggattacaggtgtgtgccaccacacctggctaatttttgtatgtttttgtagagacagggtttcaccatggtgcccaggttggtctcaaactcctggcacatgtgattcgcctgccttggcctcccaaagtgctggg

SEQ ID NO: 765889 - DNA, 653 bp, Homo sapiens
ccaaggtgaatatacagatagcgaataagcacatgaaaaagatgttcaacattagcaactattaaggaatgcaagttaaagccactgtgagattccactgcacacctattagaatggctaaaataactgacaaaggcaaatactggggaggctgcagggcaactagaatgctcagctactgctgctggaaatgcaaaaaggtcagccatgccagaaagcagtttgttggtttctcataaaattaagtatgtgccaaatggtccygcacccaaatcctagatatttaccctggagaaatgaaatcttatgtttattaaaaaatcatttagtggccaggcgcagtggctcatgcctgtaatcccagcactttgggaggctgaagcgggtggatcatgaggtcaggagttcgagaccagcctgaccaacatggtgaaaccccatctctactaaaaatacaaaaattagctgggtgtggtgcgtgcctgtaatcccagctactcaggaggctgaggcaagagaatcgcttgaacctgggaggtggaggttgcagagagctaagattgtgcaactacactccagcctgggtgacagaacaagactctgtatcagaaaaaaaataaaaaataaaaaccattcagccaggcacggtgact

SEQ ID NO: 765890 - DNA, 592 bp, Homo sapiens
tgagaatgatagagaatgaatctctctgaggacaaccagggcactgttggcagaagacagggccaaccctggagggccaccagcgtatttcctccagagctgcatcctccttaccttgaactgaccggcttacccccgaagtgtgtcaagtctggacaytgctcaggccttagattgtgaaactccctgccgcacttgccactgctgatccttcttgaaattctctactttaatggttcttgaccctgtctgtcttctgactacgttaatgtggagaattttgcacttatcgatagccagggggttcagatatgctgggtatgagactggggtaggggtcaggtgtctgtttgcttacagagagtcctgggtgaccttgatgcaagtagctccaactaggaaccactaggcttctgtggcatcaccctctcctggtccactgtgcaggtatttactgagtatgtgagggacactcaggcaggtgctaagcatcagagatgaacaaaacaaggtcattgtgtgtccggagttggttccttccggtgggtttgtggtctccctgacttcaagaatgaagctgcggaccttcgcg

SEQ ID NO: 765891 - DNA, 592 bp, Homo sapiens
tgagaatgatagagaatgaatctctctgaggacaaccagggcactgttggcagaagacagggccaaccctggagggccaccagcgtatttcctccagagctgcatcctccttaccttgaactgaccggcttacccccgaagtgtgtcaagtctggacattgctcaggccttagattgtgaaactccctgccgcayttgccactgctgatccttcttgaaattctctactttaatggttcttgaccctgtctgtcttctgactacgttaatgtggagaattttgcacttatcgatagccagggggttcagatatgctgggtatgagactggggtaggggtcaggtgtctgtttgcttacagagagtcctgggtgaccttgatgcaagtagctccaactaggaaccactaggcttctgtggcatcaccctctcctggtccactgtgcaggtatttactgagtatgtgagggacactcaggcaggtgctaagcatcagagatgaacaaaacaaggtcattgtgtgtccggagttggttccttccggtgggtttgtggtctccctgacttcaagaatgaagctgcggaccttcgcg

SEQ ID NO: 765892 - DNA, 583 bp, Homo sapiens
gtgaaggatacagatgaagaggctccaggaacctccatgtgttcagctattaggaagtttgtctgactttcatgtgatgctttgaggagtttgcatttcctgttcctttattttatttttttagtttttggggtaaggtctcactctgtcacccaggctgcagtgcagtggcatgatcacatctcactgcaactttgaagtcctgggctcaggtgatcctccagcttcagcctcccaagtagctgggtctacaggcatgtgctaccacrtctagctggttttaaaatttttttgtagagatgagatttggccatgttgtccaggttgttcttgaactcctggcctcaaactatccttccttcttggcctcccaaagtggtagaagtacaggcatgagccaatgcaaccagccctctggttcctttattaaatcattttgcaaattcttgttggaccttccccaccctaattggattgaactggcgaacattgctgattttttaggagtttgttgttaactatttgcctgtttataaggcccatcatcatctttttagaaataccttaaggtatctcagaaaac

SEQ ID NO: 765893 - DNA, 555 bp, Homo sapiens
tggaatgttgaactccctgcctgaatttctacacctttttttttttttttttttttggctaagaacacatctttaacatggtaaaatacagctctaattttcaagttctaaaaaattaaccagaggtctgggcgtggtggttcacgcctgtaatcccagcactttgggaggctgaggcatgcggatcatgaggtcaggagattgagcccatcctggtgaacacggtgaaaccccgtctccmcaaaaaatccaaaaaaaaaaaaaaaaaaaaaattagccaggtgtggtggcaggtacctgtagtcccagctactcgggagactgaggcaggagaatggtgtgaacccgggaggcggagcttgcagtgagccgagatcgtgccactgcactccagcctgggcgacaaagcaagactctgtctcaaaaataataataataataataataataataataataataataattagaggatgcatatgtccttagacttttaaataaaatctttattatctctggttttctatttagaggcacttgtacatgatgtcatat

SEQ ID NO: 765894 - DNA, 624 bp, Homo sapiens
aggaggtttgttttgggaaaaggactggtatcctctttgtttcaaagctaaactatgagttcctcccaaagttggttctacctgtgtccaggaatgaataaggacagcttggaggttaagagcaagatggagtcagttaggtcaaatcttttttcaccgtctcagattttctgggttcacaactccttctggaccttctgtctggaacacttttcccttctctgccaaccacccctttgccctctgatcccagatggactgacttcttcagggccacctcyctagataggtgggctaagttacccccttggcccctggcattttccacccatcacaatttgtagtcactgatttagtgattgattaccagcagtctctgtcattggactacacagctccaagagggcaaagacagggtctgctcagggccagagcagacactgaataaatgctgcaggatggaatgagcagccatctggttcttcacaagcacctgcagtgccctgcgctgggaaaatcgaccctcacaaacactgagcagagcggccaggaccttcactgaacacctgtgggagacctggggcttttgccaaaatgatgcctttctcctggtcacaaaaatac

SEQ ID NO: 765895 - DNA, 608 bp, Homo sapiens
gtcccaacaaagaacccccaagtcaccacatcctatagggtttgaagtttcagcactacattctgccacttctttgttgtgttttttgttgttgctgtttcgttttgtttttttgagagagtctcactctgtcgccaaggctagagtacagtagcactgtgtcagctcactgcaacctccatctcctaggttcaagcaattctgcctcagcctcccaagtagctgagattacaggcgtccgtcaccatgcctggctagtttttatatttttagtagagacggggtttcaccatgttggccaggctggtcttgaactcctgacctcaggtgatctgcccgcctcggcctcccaaagtgctgggatcataggcgtgagccaccacgcccagctgtgaagtttcagcggtacattctgccatttctttaccctccactgtcacattcaaagaaagtgaaascactttaacaggctggatgcttcctggatttcactggtacagatgccactagaatcccaaggatcaattcatgtgtttggacaaatgtagatgcggttgggtcatcgcctcctccacaaagccctcgtggtcttctcctgtcctttcccc

SEQ ID NO: 765896 - DNA, 545 bp, Homo sapiens
gaggaacttaaacaaatttacaagaaacaaaaacgtttaaaaatgcgcaaaggaggctgcgtgcagtcacatgcttgtaatcccagcactttgggaggctgaggcgggtggatcacctgaggtcaggagtttgagaccagcctagccaacatcatgaaaccccatctttactaaaaatataaaaaattagctgggtgtggtgakgggcacctgtaatcccagatactcgggaggctgaggcaagagaactgcttgaatctgggaggcagaggtggcagtgagtcgagatcgtgccactgcactccagcctgggcaacagagcaagactctgtctcaaaaaaataaaaaataaaattttaaaaattttaaaaatgggcaaaggccatgaacagacacttctcaaaggaagacatacacatggccaaaaagcatatgaaaaaaaagctcaacatcactaatcatcagagaaatgcaaagcaaaaccacaataaaacaccatctcacactagtcagaatggctattaaaaagtcaaaaagtaatggat

SEQ ID NO: 765897 - DNA, 642 bp, Homo sapiens
ctggaagaatttgagcaacaaaataaataaagtagtattggattataactcaaagtacaaaataaatatccatgaatccatgttgacataaatacataaatgaataaatacatggggaagaagaaaaaaaatctcccatacagaagaattccaaataaagtatgtagaactccacttctaacagatggagcataactcccactctgtctgtgtgggctgtgcttagtgacttccttcaaaagagtacagtatggcttgggcatcgtggctcatgcctgtaatsccagcactttgggaggccaaggtgggcagatcacctgaggtcaggcgttcgagaccagcctggccaacatggcaaaaccctgtctctgctaaaaatacaaaaattagccgggtatggtggtgcacacctgtagtcccagctactcgggaggctgaggcagaagacaggagaatcacttgatcccgggagatgaaggttgcagtgagctgggattgcgccactgcactccagagtgagactctgtttcaaaaacaaacaaacaaaaaaagagtaccttcacagtggagacagttgacaaacacttcctcaggcagtgaggtgatcaagattgactcaacagtaataagtcatgccaatag

SEQ ID NO: 765898 - DNA, 509 bp, Homo sapiens
tgcattttaaataaatattgtatgttgaccatttcctttggcattaaatttcttgaaaaacacaattttcagcattgcttaatattctgtcatttatatttgaccattcatctattattaggaatccaggctatttctrtttcttccccaaataacacatgggtgaatacccttttacttctggatatcaggccagatagtacttacaagcaatttgcctgaaaacactgaatttggttatttaagaagcctgaacacatcctaaagatttttttatccgatacctgaggagggatgtcttacctctttcttagtttgtgcaggttgttattcattagtgaatgtttggaaaataacaaacaggtaatggtcaggaaggtgatgactaaagtttatgtgaatatggcatatcatttcaagaaagatgggttttttcccttaaactcaaagttatcaagagatcaacttctcaaactttggaccaagggcagttttgtgggggaaagcag

SEQ ID NO: 765899 - DNA, 509 bp, Homo sapiens
tgcattttaaataaatattgtatgttgaccatttcctttggcattaaatttcttgaaaaacacaattttcagcattgcttaatattctgtcatttatatttgaccattcatctattattaggaatccaggctatttctgtttcttccccaaataacacatgggtgaatacccttttacttctggatatcaggccagatagtacttacaagcaatttgcctgaaaacactgaatttggttatttaagaagcctgaacacatcctaaagatttttttatycgatacctgaggagggatgtcttacctctttcttagtttgtgcaggttgttattcattagtgaatgtttggaaaataacaaacaggtaatggtcaggaaggtgatgactaaagtttatgtgaatatggcatatcatttcaagaaagatgggttttttcccttaaactcaaagttatcaagagatcaacttctcaaactttggaccaagggcagttttgtgggggaaagcag

SEQ ID NO: 765900 - DNA, 484 bp, Homo sapiens
ctgagtccagagggcatggtggaagggagacacagtggaagggtgtgtgggagagtgctgtacagactgtttcaggatagaaatacaagagaggaataatggcctagaggcttccatttcttctggatgttagtccctgcctataaatcatgctgctctttacctcagaccttctctcatccaggaaagtggatttgctattcaraatcccctcactgaaaggattttctttcctttagtcttcaatggccatctcattcgctctctctcttttttttttttttttttttttttttgagacaggatctcactgggtcacccaggctgaagtgcactggtgtgatctcagctccctgcagcctccacctcctggggtcaagtgatcctcccacctcagcctcccaaatagctgggactacaggtgcacgctaccatgccaggctaatttttcgtattttttgtagagacggggtttcatcatgtt

SEQ ID NO: 765901 - DNA, 607 bp, Homo sapiens
taagaaatctcagaataatgtctcacttatgagcatgcttccagttgcccaaaagttgagacttgacccgtccttccatgtttccagggctgaaggtcaacctatttacagtgtgggtccttgtgcccatgtgatatctttttccttaaagcatatgaccagtgagataaagtatcaaaaggtaaggctatgaaaaaatgcctttttaaaaaactctggcccaggcgcagtggctcacacctgtaatcccagcactttgggaggctgaggctggtggatcacttgaggtcaggaattcgagacctgactggccaacayggtgaaaccctgtctccactaaaagtataaaaattagccaggcatagcggcgcacgctggtaatcccagctactcaggaggctgaggcaagagaatcacttgaacccgggaggcagaagttacagtaagccaagatcacgccactgcactccagcctgggcgacagagcgagactctgtttttaaaaaaaaaacaactgtatatttgatttttctgtgacatgaccagccttataaacattagcagcaaattttcagatgctttaaaggcccaaagaattaggacatgg

SEQ ID NO: 765902 - DNA, 607 bp, Homo sapiens
taagaaatctcagaataatgtctcacttatgagcatgcttccagttgcccaaaagttgagacttgacccgtccttccatgtttccagggctgaaggtcaacctatttacagtgtgggtccttgtgcccatgtgatatctttttccttaaagcatatgaccagtgagataaagtatcaaaaggtaaggctatgaaaaaatgcctttttaaaaaactctggcccaggcgcagtggctcacacctgtaatcccagcactttgggaggctgaggctggtggatcacttgaggtcaggaattcgagacctgactggccaacacggtgaaaccctgtctccactaaaagtataaaaattagccaggcatagcggcgcacgctggtaatcccagctactcaggaggctgaggcaagagaatcacttgaaccygggaggcagaagttacagtaagccaagatcacgccactgcactccagcctgggcgacagagcgagactctgtttttaaaaaaaaaacaactgtatatttgatttttctgtgacatgaccagccttataaacattagcagcaaattttcagatgctttaaaggcccaaagaattaggacatgg

SEQ ID NO: 765903 - DNA, 652 bp, Homo sapiens
agggcaaaggaaagggaggaaggatcctgttacggaggccccaaaatgtcacaactaaaaaaaaacaggcgataattacagtacaggttattagtgttagattgattctaatattaaaacacaaagcaaaaattgtacacaaatttattttaaacgtraaagttaacgtgtataagttcagcccagagttaaatctccaggagaatactcaaaaaatagactattactgtcgatttgaatttgttttgctaggaaataaaaagataaaatacttttgatttccaatagtcttggtaacttctcttaaaagcatatgttggctgggcacagtggctcacgcctgtaatcctagcactttggtaagcggaggcgggcagatcactagaggctaggagttcgagatcagcctggccaacacagcaaaaccccatctttacaaaaaatacaaaaattagccagacgtggtggtgcacgccagtaatcccagctacttgggaggctgaggtatgaaaatcgcttgaacccaggaggcagaggttgcagtgagctgagatcgcacgattgcactccagcctgggcaacagagggagactctgtctcaaaaaaaaagaaaaaaaaattaagtatgttacatgctacaattatcaaataa

SEQ ID NO: 765904 - DNA, 613 bp, Homo sapiens
ataaaaagaaaaaaattatctgagccaaggtatattagccaatccagagaacacaagggacatagtggtaatcctgaaataagcctaagagaaagaaagacaatttaaatgaaattatagcaggcttatcagcaamaatagaatccagtatacaatatatcttcaacaaaacaatagtggaaaaattcatcctagaatccttcacacacacagaaaaaaatggtaattcaacaaagaagaaaaaaatgaccattcaagatcaaatacaaaaataaatcagtaaaggttctacataaacaataaggaaatcaaactgggaggaagaaggggatagaagcaatcaacaacaaagatattgataaatgtgtgtaagtctaagcaagagtgaatgtttaaatgattttagcaataaggacccatctggaaagtactttataaaacaaagaaacaaaatgctagacaaaaataatgtgaacaaagagaaagtaattagtgtttaaatatcctaaggtttttgtattgtttagaactgtaaaggtatcaactttaaactttatgaagtatatctgttaaaaataaatagagtacagtcatagttcagtaaaaagcaaat

SEQ ID NO: 765905 - DNA, 594 bp, Homo sapiens
atatgcaggacgtcaattaatttattaattaagcacatgcattaaaactcagcattatcatcctatgtttaaggagtaaacacattaatcatcatgcctgttttcaaaaaaataatctgagtttcaaataatataatgtatctcaggtacttttccctatcatgtaataatttacccaaacagatttggtacacagttttcaagacaacttggtgttaatttcattgtacccaccctgagaacgaatggctaattttgagcatcttataatttcacccgataaaatgatcccctaaaatgaacataataggcatcttttaagtataagcattatatacaatgagttggtttttattttctctatcaagaaaataaaaatcttcttttgtaacatacttatttgtactgatttgaataataattctacacaaaaatgcctcaaaaaaacttcmaatgtcactttatgacttcttgttcttggaagaagctgtgaggattaaatgagatcatccattttttcaactacaaagttattttatataaggcattagtagctttgctcaatctgttattagacaatgctatatttacatt

SEQ ID NO: 765906 - DNA, 633 bp, Homo sapiens
acatgtgagctggaccttttgaagccaaaagatggatggtcttggttattcatccaaattgccactctgtgtcttttaagtgagagtgtttagagcacctacattcaagtttaattttgatattacattcaaggtgaagttttgatccggttgtgatgttgttagctgtttatatygtagtctcaattgtatagttacttttaagggtctgtcactaagtacttaagtgtgtctttgtggaagcaggtatcattattttgtcttgatatttagaactctcttcaggatttcttgtaaggctggtctagtggtaggaaattcccatagcagttgcttgtcgagaaaagatttttttcttctttacttatgaagcttaatttgctgggatatgaaattcttgtttggaattaattttctttaaggatgctgaaaatagggccctgatctcttcaggcttgtaaggtttctgctgagaagtccactgttagcctgatggggttccctttgtaagtgatttgacacttttctctagcttcctttaagattttttctttcactttgaccttggaaaccctgatgactatgtgtcttgtgggtagtcatcttgtatagtgtcttacagagattttctag

SEQ ID NO: 765907 - DNA, 616 bp, Homo sapiens
tacatagatgacatatatacatatatacatagatgacatagatgtacatatacatgtatatttacatgtatacatatagataagtatatatatacgcatacactatacatatttatctaaataatttcaacagtaaacatatgtgaacagaatggcattataacattattgcgggcaaatgtaacctggattaatccataatagatgtacatatttgatcaatgcaaatttgagattttaaattttcctttttttgtgatatgcagtacattatcatgtcagtcttgatctttaccamcttctatcaattatttaatggaattacttcttcaatttctttctctatagttacattacatgcctaatttatatagtcttcagaaccgacagttaaaatatgagataatgagttaatgtgtttatcacaatacaaagatgaaaatgaccatgagatgaaatgatacttggtttttgagttagctgtcaagtgaatgattttagaaattaagatgaataaaaatgtatttgtaaatggtattacacttttcacatgaaaagcacatcataactcactaagaaatttagcaataatacaaagacataaaattagcaataa

SEQ ID NO: 765908 - DNA, 558 bp, Homo sapiens
atgaggtcatactgatagttgaagggtagtgaaggcagagaattttattgagtgaccaaacagctctcagcggagaagagatgggagagttgggttgtctctcttgaagtcaggtcatctctctgtgtggctgagtctgcagcttttataggcataggataaagaagtatgtactgatccattcaagagtttggaaaaaggttaaaacaaaggcaccagtcaaaggtgggaacagtgtaaaaacaattaggaaagggtaggtatatgtaaaataggtgaagggtgaagctcaatcaaaggaaagcactacaaagaggaagacaggttctctatctggtctgtgaatttgacttgtagcttggtcttcaggctttgaactgtctttggcttgaagatgaggtttcatgggatrcccacccctggtatgcctaggatttctctgcctcctgcctgtgtcatttcctcctctgaagaggtgcatctaactgctgttagaatagggatcatgaccgatattagctactccctgctgacaggggatgctgttttgggaaaacg

SEQ ID NO: 765909 - DNA, 474 bp, Homo sapiens
ttgtggagtagtggactgatttcatcttgatagtctgggtcaatcaccccagccaacactgtaactccctccttagcttgttggcttaaaggtaggagaagcctaaagtggcagtcttaacttatagttcaatggaattgttgctatgtctcctggtgtcagtrttcctccctctggaactaaggcctctaggccagcagaatgtaatatcacagtaacaggaagcaaatattttgctagtggatcactaggggagatggtgtgtgttgccacttatgcttctattccttgattcccggatccatgaatcttcgctatgggagaaacagtacaatatagcggatgctgattcagagcatacccagccttctggataactttgcctcagccctgcaaagtattgttacctagttggtgttgtaattgtgacttcaaaaggccattccaccattctatcaatccagctacttcagg

SEQ ID NO: 765910 - DNA, 629 bp, Homo sapiens
cctggcaactacctcaggggaggccatcactgttgccgttgcctcaggcagcacagagtttatgttctcagccaaaggtagaaaggctgacagcagcatgggttggggagtggatgtcgccactactggggatggggaagctcttcattctggccaaaaaatattcaccagagtttacaaacycagcatccccaggtttattggggtcctcccacatgtccccattccaagtttcagggtccccttcttttccagtcaatgccctcaatttaacagtagatacctggcgaggtcgtgcatgcatctttcactgcaggtcagccactcacatgataagagcttatgtctgtttttccgcaatttcagctgtttctctacaggagataagaatctcactcagggcaatcttagcaaatttgaggctcagtatctgcttctgaagccaggagatagaatctctcagttcataattttctttcatcactttgtgcactgaacttaggagtaaccaaccagcttcattatgttccttggatctccacatatagtcaaaggtattatgtatagagtcactaaacttcttgcctcttctgagcagtaaatcaggcgtttcaaatgcatttattttg

SEQ ID NO: 765911 - DNA, 613 bp, Homo sapiens
agtagaaatggtggaaaaacaacctccaaattatttcttccattaaagcaatgaaaatactgccaaaaattgtaataagtaactgtttccaaacttgggaaattgaccaaaatcttgcagcattccagggatgtatagaagaaaaatgtatatgagaaagaaatgtatataagaaagaaaaatgtatataagaaaaatgtctgaatcttcatatcttcaacaatgagctttgagttatgttaatttgctctattcccctccctccacctccactgcagccttgaaaaccaagatccacaaatcaaggtcaaaatcagcagcctggtagccactggagggaacagaattgagctggagttccttcaagctacatacccctaaaattctaattatgtgaactctgatggttcctcggaagaccccactctcaagtttgytgttatttgttctgactcagaatttacctaatgcaaatagcttttaccacagaggtttttcagaaacaatcagaggaaattcttgaatagcaaagctgcctgaaatggtgaataacaaaacaaacaatagaataactaaaaaagcttaaaaggaaaagctagggaattagagattt

SEQ ID NO: 765912 - DNA, 438 bp, Homo sapiens
catgccatgatacctccttctcaaaatgccccagcgctgtctcatcatgcacctttcttccatgtggtggcagaataatgccccttcctcagagatgtctatgccacaatccctggaacctgtgagtatgttaccttacgtggcaaagggggattaactttgcaaatggaattaaaggagaggatcttsgattatgcagctgggtccaaagcaatcaaaagtgtccttaaaagggaaagaaggaggcagaaaggtcagagagggagatgtgacgagagaagaatggttagagagaagcaccgttgctggctttgaggatggggaagggatcatgaatcaagggctatgggtggtctccagacactggaaaaggctgggaatcagattctcttctagagactctagaaagggctacagccgtgccaacaccttggccgg

SEQ ID NO: 765913 - DNA, 656 bp, Homo sapiens
gtaaacatggtagatatggtaattttaaagtttgtgtctcataactcctatatctggagtcccaatagatctttttccattccctgttgattttgccagttctcgttcctatcgtcttatgtccttatatgcctagttgttttcttattatgcaatagtttttgtatttcagaatttgttcatagaattaatttgaggtctaggatgatgttatcttccccagagaggattcccatttgtctctgccctcaagccataatcacttcaatccaatttaaaggtgattcaagactgatcttagttcctgtggggcctctctatttctggttcacccacactcccagggttcagaccttcccagcgttgtaactcaggcctcccaacctgagcaggcactgatgtttaatttctgttccccaaccttaatccttagccactctctctagaatgggcaaataaccctagtggaaattaggcccaaatgctctagatactggmcacataattcttccctaccttgctagttctccaatgccttaaggcggatgtttttatattcttatcagcttttctcattgtcctcagggggatgatcagtccaaattaccttgtcaccattactagatagatgtacactctgctctgttgattttgtt

SEQ ID NO: 765914 - DNA, 633 bp, Homo sapiens
gcctataattttcttttcttcctgatgcttatgtctagatttggcagtaagattttatagtgctttcataacatgagtgtgagtgtttggtaaaactctcctgcaaccatctagacttagcttgttttgcagggggagcctctttattacagatttatagataatgggtaaagataaataggtgtgtataactagatatattcgtatgtctttgcatttcttcttgaaccactttttttctagaaatgtttctattttatctagtttagaaattgtttttggaataaactagttcayattgttttcttgggatttttaaaaataagggtctaactgtttatgtcccatttttcattctgaatagtgttcatctttattgttccaatcttatcagtcttgccagaggtttgtctactttattattttttaaaaagttttgtgaatttttttatttcattgattatatgaattctttcctttttttttttttacttttgttactttgtaattcttttactagccacatgacttgaagtttagcttctttgcttttaatatttctttttgaagaataattatgtgtggctgggctcagtggctcacgcctgtaatcccagcactttgggaggccaa

SEQ ID NO: 765915 - DNA, 626 bp, Homo sapiens
ggtggcacaggcctatagtcccagctactcaggaggctgaggcaggagaatcacttgaacctgggagaaggaggttgcagtgagctgagattgtgccattacactccaacctgggcaacagagcaagactctgtctcagaaataaataaataaataaaataattatatttaaggttgtacttacctttctataggactttgctccatccgacaagttttgtcatgtggtacttttgttgtctttacttttaaatatttcatgacattgtcatttcttctttaaccaatragctatttttagtgcattttttgtttccaattaaaggttgctattttttttaccatctttttagtgttgtttataatttatatgctttgtagacagagattatattaaatcttggaaattgttttaattttttgtgacctaatatgtgatttttctctttttattcttttttttttttttttgacagtatctttctctgtcacccaggctgcagtgcagtggcttgatcacatctcactgcagccttaatctccccagctcaggtgatccttccacctcagcctcccaggtaggtagaactataggcagacaccaccatggctcatttttatttttt

SEQ ID NO: 765916 - DNA, 619 bp, Homo sapiens
aaaatgttgccattattctagaaaattgcttgttctttttgtagtcatcaccccctgcccagtcctgaggtagccactattccaatttctgtacccacagaacccacagacaagttttggttgttcttgaacttcatagtaattgaattttaaagtatatattcctttgtctcttaactccttcttttactctataatatttcagacattcattcatgtctattcctttttgttgctgagcagattccagcaccatttgttgaatagattgtccttttctcatcaatttgtcttggcacctttgtcagaaaacatttgattgtaattttttttctgtcctattgatctatttgtctattttaacaccaataagacactcttagaaactgataaattaatactaacatktatatggaaatgtaaaagaccaaaatggtgtttaaaaatatgataaaactggccgggggcggtagctcctgcctctaatcccagcactttgggagtctgaggcgggtggatcacttgaggtcaggagttcgagatcagcctggtcaacatggtgaaaccctgtttctactaaaaacacacaaaaattagccgagcatggtggcatgcactt

SEQ ID NO: 765917 - DNA, 635 bp, Homo sapiens
ttgtctgtatttgtaattaatcatttttattgctaagttgtattcccttgcataaatggaacacggtttgtttatccattcagacattaatgctaatttggttgtttcctgtgttttggtgattatgaataatgctgctataaacacttgtgcacagatttttgtgtaaacatgtttttatttctctaggataaatacctaaaagtgggattgctgggtcatctggtaaatgtacatcaaactttataaaaaactcccaagcaattttccagaatggctgtaccatttcacwttcctgtcagcagtatagaagagtttttgttgatttacattctcaccagcacttaaaattgtcatttaatttgcatttcactaattgattatatttaagcatcttttcattcatcttattaattttattaatcttaagcattatatttgctatccatatatcttctttggtgaagtgtctgtcaaaatcttttggctattttaaaataggttgcttctaatcactgaattttgagttctttatatattctggatacaagtccttcatttgatatgtgattataaatattttctccttgcttataacctgtctttttattgctttaacagtaaattaattttga

SEQ ID NO: 765918 - DNA, 606 bp, Homo sapiens; identical to SEQ ID NO: 763321

SEQ ID NO: 765919 - DNA, 600 bp, Homo sapiens; identical to SEQ ID NO: 763322

SEQ ID NO: 765920 - DNA, 600 bp, Homo sapiens; identical to SEQ ID NO: 763323

SEQ ID NO: 765921 - DNA, 600 bp, Homo sapiens
atataatcttttttaaccattgagaatgagtagcagattgttttcctttattcctaaatatttccgtgtatatttcctaagaacaaggacatagccatagtacagttatcaaatcggagaagttaatgttgattttgacagcagaatttaaagatcttgacttaatctgatcagataataaacttaaaactgaagaaaaaactaagaataagtccaatgtatttacctgaattgtctcatctgtgatatagaaactaacacccactgggccaggtgcgatggctcatgcctgtaatcctagcactttgggargccaaggtgggtggatcacgaggtcaagagtttgagaccagcctggccaacatggtgaaaccccgtctctactaagaatacgaaaattagccgggcgtagaagtgcatgcctgtaatcccagccactagggaggctgaggcaggagaattgcttgagcccaggaggcggaggttgcagtgagcagagatcatgccactgcactccagcctgggcgacagagcaaagactctgtctcaaaaaaaaaaaaaaaaaaaagaaagaaactaacacctgctttacatactcaa

SEQ ID NO: 765922 - DNA, 600 bp, Homo sapiens
atataatcttttttaaccattgagaatgagtagcagattgttttcctttattcctaaatatttccgtgtatatttcctaagaacaaggacatagccatagtacagttatcaaatcggagaagttaatgttgattttgacagcagaatttaaagatcttgacttaatctgatcagataataaacttaaaactgaagaaaaaactaagaataagtccaatgtatttacctgaattgtctcatctgtgatatagaaactaacacccactgggccaggtgcgatggctcatgcctgtaatcctagcactttgggaggccaaggtgggtggatcacgaggtcaagagtttgagaccagcctggccaacatggtgaaaccccgtctctactaagaatacgaaaattagccgggcgtagaagtgcatgcctgtaatcccagccactagggaggctgaggmaggagaattgcttgagcccaggaggcggaggttgcagtgagcagagatcatgccactgcactccagcctgggcgacagagcaaagactctgtctcaaaaaaaaaaaaaaaaaaaagaaagaaactaacacctgctttacatactcaa

SEQ ID NO: 765923 - DNA, 457 bp, Homo sapiens
  misc_feature 174: n = A,T,C or G
atacaaggtggattgtgatgaatgctatattagccatactgggaatgaagttcatgagagcacaaagaatggagatgtgaattccacctaggagaatcaggaaaaggttgttaatatgatacttgagcaggtagtaaaggctgctaaggagttaatgaaacaaaactcaggaanagaattatttggtatagcaatagcccaatcagagtcaggaaagtaaagaatatatctttacataactgggaagaattatatggstagctcagcttttccctaacttcagtcatctgagtaccccttgctagttttcacatgcccattttctgtctgctagtatttactcaatagtcttctttaaaatcaattcaaatgttttaattttagtaaattaacataaaatagaattttatatcaattcagacatcacttggcaggtggaactacaaaaatatgcaca

SEQ ID NO: 765924 - DNA, 607 bp, Homo sapiens
agaatatgtgtcacatagtatacactgttctgcttttttttcacttaacattgtgttttagaaattcctccatatagtcatatatagatctagttcatttatttcagacgttgtattctattaaatttataccacatcttatccagtcttgttttgaaagtcaggtggttctaacttttgttataatagacagtgttgcagtaaacatcttacacatatctccctatgcacgtgctcaagggacaatgtgggatgtgtacctaggagttcaatgctaggttttaattctactagatggtgccaaattgttctctaaatggggtatagtttctatttatcatttcatcacacttgtactgttagattgtttaatgtttgctaatatagcaagtgtgaaatggtatttcatakccattttaatatgcctgtcccagatgaccactgaagttaaaacatcttttcgtgtgttgactattacagtttcctcttctgcaatcattctactttctaaaatgctgagaaaagctatttattgcatggataatattaatgcactggtcattccaggatctaaaaaataaggttattaagtatatatatatactta

SEQ ID NO: 765925 - DNA, 636 bp, Homo sapiens
atgagtttgtcagtaaaatgaggattataacacctacacctcaggaaacttgagagaattaagtgagatcactcgtgtatgtcagtccttggtatagtttctgtcattatgtgttccaaaaatgatagttattggagtttaattttctataaatctgagtttcacttggcattgattaatttcaaagtaaaatgtttttataaagtttgaaaatgtaacaaagttcaactatacccattcaataatatggatgaatctaataaatatttagcaaaagaagccatacacaagagtacatagtgtattatttagtgcgtatgaagttcaaaatagacaaagcaaatccatgtattttgaaaatcagggtagctacactttagagaagatgggggttggtagtgggtagtgaccggcagagggcttgagacrgaggaatttctgattttaaagtgctgataatattctttttctgtatctggaagctggttacatgagtgtatgcacttgatgaaggctcactgacctttatacttatgattggtactcttttctgatataggttagacttcattataaagttcactaaataaagttttaaaaagataacaaagtcatcacttttcctactatggacaa

SEQ ID NO: 765926 - DNA, 644 bp, Homo sapiens
tcctggtttagtcttgggagggtgtatgtgtccaggaatttatccatttcctctagattttctagtttatttgcatagaggtgtttataatattctctgatgctagtttttatttctgtgggatcagtgttgatatcccctttatcattttttattgtgtctatttgattcttctctcttttcttctttattagtctggctagcagtctatctatattgttgatgttttcaaaaaaaccagctcctggattcactgatgattttttttttttgaagggtttttggtgtctctgtctccttsagttctactctgatcttagttatttcttgttttctgctagcttttgaatttgtttgctcttgcttccctagttcttttaattgtgatgttatggtgttgattttagatctttcctgctttctcctgtgggcatttagttctataaattttcctctaaacactgctttacctgttttccagagattctggtattttgtgtctttattctccttggtttcaaagaacatctttatttctgccttaatttcattatttacccagtagtcattcaggagcaggttgttcagtatccatgtagatgagtgagtttcttaatcccgagttctaatttgattgcactgtg

SEQ ID NO: 765927 - DNA, 535 bp, Homo sapiens
tttaaatacagttttctttcattatttgggcatacatgaaatagctgacttaaagtctttgtccagtggcctaacatctggactttttcaggaatagcctctattgactactttataggggccatactttgtttctgtttctcttaattgtttagmcattttaaactaatgtaatggctgagagcagtggctcgtgcctgtaatcccagcacgttgagaggccaaagcaggagcatcacttaagcccaggagttcaagactagcctgggcagcatagtgagaccctgtctctacaaaaataaaaataaataaaataatataatctggtaaatctgaaaatcagattctaccccctgcccagaatatgttactgtttctggtggttgttgtttatttctttttaactactcctataaagtttgtattgtttctcatagatagccatcgaagtctttgcttggttaacttagaggtcagctaaggattagacagaattccttaggtgcctgagatcaataagtcagtctttgacaaa

SEQ ID NO: 765928 - DNA, 552 bp, Homo sapiens
tcatctgggggaaagggctgtggttctcacaaatcatcttaacaaatgattgcgccagcttttaaggcatccagtatttcaagtggttactgcacattttcctcagagacaaagctgttgtcgctaaatcttttcctcaggatttacatttagaagttgtggctcataggatctcgagttctttcttcttctttttttaaggggaaaataatcttaaattgcaaagctgctggaggcttttaacttttccaaagaaagaagttttcaaagtgatgttaacaaaggcttgaattttccatgaaaaataagcagataaagctcctgcttgatgttccagggcagagctatgacttttcctgtaattgtcacattctggaaaagaccaaaatgctgaccttgcatagcsgactgcgggactgcagcgaagggagcagctccttatttcccctggatataaatattttcacatgttgtgatagggggccctcttgggtaaacaaataattccacgatcttggaataaaaaactacattgcttcagggatctcctaa

SEQ ID NO: 765929 - DNA, 614 bp, Homo sapiens
ctaaggcagatggtggtagattccatttttaaaggtttctgtggacagatatccaaacctcccttgccaaacacttcttccccttttttttttttttttgagatggagtctcattctgttgcctaggctaaagggcagtgcatagtcttggctcactgcaacctccacctcccgggttcaagcaattctcctggctcaaccttctaagtagctgggattacaggcgcacaccatcacgcccagtatttttgtagacaagggggtacgccatgttggccaggctgggtcttgaactcctaacctcaagtgatctgtycacctcggcctcccaaagtgcttataggcgtgaattcacgcccagcccacttttccttttgtccaagcaaacttttccttactgtaacagaagttcccttacatttgtttatggagttcaaaattataggttagtcaaatgaattataaatctagatgatcttactaaaacagggagtctatttaaaaaaaaaatgataggcctgtgtaaagaatcaacagaatcttaatgtgggtatctgataactctcttttcttggtagtgacttcacactcattgcaaatagaattattcatgc

SEQ ID NO: 765930 - DNA, 614 bp, Homo sapiens
ctaaggcagatggtggtagattccatttttaaaggtttctgtggacagatatccaaacctcccttgccaaacacttcttccccttttttttttttttttgagatggagtctcattctgttgcctaggctaaagggcagtgcatagtcttggctcactgcaacctccacctcccgggttcaagcaattctcctggctcaaccttctaagtagctgggattacaggcgcacaccatcacgcccagtatttttgtagacaagggggtacgccatgttggccaggctgggtcttgaactcctaacctcaagtgatctgtcsacctcggcctcccaaagtgcttataggcgtgaattcacgcccagcccacttttccttttgtccaagcaaacttttccttactgtaacagaagttcccttacatttgtttatggagttcaaaattataggttagtcaaatgaattataaatctagatgatcttactaaaacagggagtctatttaaaaaaaaaatgataggcctgtgtaaagaatcaacagaatcttaatgtgggtatctgataactctcttttcttggtagtgacttcacactcattgcaaatagaattattcatgc

SEQ ID NO: 765931 - DNA, 603 bp, Homo sapiens
ggtttgcgctcaataaacagcttgctgaatttcacagaatataattacttttatcttttaagtgtccctgtaatccactccattaatcttcattttaaattgggcttcctttmtctaagaagccatgtggttcccccaagccctggactccttctatgtgttcacactgatatagatgctacaaagctccttggagccacacatgacctgtgtccttcccaatggaccaccccattagaagtatgagagatggcagctcttagaaagtggcctttggggcccaactttggctaccgttagactcttacgggtacaggcattctaaagccaagtctacactggccactaaggaaagctggtctaggaaaggcagggaagtaataaaaggagtccacaggaggtatgtctgggctaattcttagccacccagaatattcaggcaagactttgtttcatgaaagtagctctttcgagggagagggatagctaattttcatacttgaatctttcaacacttctgtgaacctatggaaaacaaaaataattgcgggggatgtgctaactggagtaggaagtgataagatggcagtcccaagcttgggc

SEQ ID NO: 765932 - DNA, 641 bp, Homo sapiens
cgctgccattctcctcgtgtgccttctggtctcatgccctggggccctgctcctcgccagcccaacccagcagacccctacttgtcctttgtgactcatctgggaagccctccctgactcccagggtttgggcagtttatccctcctctgtgctttgagagcccctagccagaccactcaggttcccatcacatggtgctactgtaggtctgtctgtgagcaggttgtgagcctcttagatgcaggcaccacatcttcatctgtgcctctctcatacgttactaactcggtgcctgcttcagaggaggccttcagccagtgtctgctacagaagggagtaaaatgactgaaattctatgagactgttgctgtttcccagagcccagagaacatgttaggaaggtaacaatcaagtccttctcagagcagatacattttcctgattgctttaattataaaaatattttaaayacaataaaagaaatgcttaaatgaaaaaaatcacacagccccaacatcttcatatagcaaacgttatcattgctttctgttcgtttttatctacatataaaataattttgtccagttgtaatcatggcgagatacattctgctttcttttcacttaacattttatcatat

SEQ ID NO: 765933 - DNA, 641 bp, Homo sapiens
cgctgccattctcctcgtgtgccttctggtctcatgccctggggccctgctcctcgccagcccaacccagcagacccctacttgtcctttgtgactcatctgggaagccctccctgactcccagggtttgggcagtttatccctcctctgtgctttgagagcccctagccagaccactcaggttcccatcacatggtgctactgtaggtctgtctgtgagcaggttgtgagcctcttagatgcaggcaccacatcttcatctgtgcctctctcatacgttactaactcggtgcctgcttcagaggaggccttcagccagtgtctgctacagaagggagtaaaatgactgaaattctatgagactgttgctgtttcccagagcccagagaacatgttaggaaggtaacaatcaagtccttctcagagcagatacattttcctgattgctttaattataaaaatattttaaatacaataaaagaaatgcttaaatgaaaaamatcacacagccccaacatcttcatatagcaaacgttatcattgctttctgttcgtttttatctacatataaaataattttgtccagttgtaatcatggcgagatacattctgctttcttttcacttaacattttatcatat

SEQ ID NO: 765934 - DNA, 436 bp, Homo sapiens
tgactgttttctacaggactgagctggaaggtctctcggcaccagtgagtgtagtctttaccagccactgcttcagctgagtcagcacctccacagcaggtggtcttttcctcactgagggtgaggctctgagatacaatagagtgtgaaaggcctcagatccataaaaccagatgggtttgcagtgctgcagacttgctaatatgtaaatatttagtaaatcacacagctgggatataaaactacgatckaatcaaggtaaatgacaaagctgccaatctatcatttatcccatggcacttctgagtacagctggcagaataaaagaattttaaactaagtgctttttatggcagaggagaagcccagaagagaaagcacaaaggtgaacaaagctaaggtgaaggagagaaacaatctgaggagaatggtcatt

SEQ ID NO: 765935 - DNA, 650 bp, Homo sapiens
atgcatgtagataaaagggaacataagaataaaatagactttctaaaacctttgacaatatttgcataaaaagtattaaaagtcactgtagcattgcctgtattattttatcaaaggtggcaaccagtttaaagcatagaaaaagtaacagagggatatttttctgagagaaaaaataattcataggaattctaggatgaattagaggtaatctctaaagtcactggataagctttgaagataataccttgctcttccaaattccaagttggtttgggtattttgaggctacatgaatgctcagaaaattggcagaatatgtgtgcatacttacatgggaatatattttggaatgaatttccatatctgattttgaggaaatccttggttgaacaaaattaaactggggtatacattgtggaccattgtgaatatgtgagaaaaagatagagtatatagtgtttctcaaatttatttgatcrtggaaccctcttgcctcggagtactttcaacagttcaagaaacactagcattttttggagtcacagttttaaaatgctgatctaagttattagaggggctatcataatttttaagagtgattacagtatgctaactaaaattatagtcctgaacattgtatgataaac

SEQ ID NO: 765936 - DNA, 571 bp, Homo sapiens
tgaaatcatcaatgccagtaagaagagtctcagatttacttctagtttccctccatcacattatatcccatgtatagatatagatattaacacacagtgagaactgatcctactcgaaacattttcagcttagagagcttttccagtaaaatcctaagtgactcacattctttcagcttcctaccttactatatcttcagatatccttttagtttcactaaggattattaatgcaaaggaagaaagaagtatttcaacctaacaaagtagtaggtaggaaacacaacctttcagcgtgattggtttatatcwtggcaaaggcctgagagaaagttaatctgattacatagtgaaaaagaactagttgaccaacatgaatgaaatacagagtacttctctcataaagtaagcaccagagagcaagtattcagtttgtttcattcattactttattcctataacttagagcagggtacatagttggttcttaacaaatgtttaatgattgaatgaatactaatgtgatagaattttggtatctagtctattagatgaagaaaaattttttagt

SEQ ID NO: 765937 - DNA, 600 bp, Homo sapiens
taaaggtttacaacagatacctattaagtccctatgtgctacatacctgagatacaaataagtgagcttcaaggccaaaacagcaagatgtccaacactgccaaacacttgccaacacaaacatcctctcaccctccttcaaacagtgaagatgctgagctgtccatttrtagcatcatttgttctttcacagctgcttatagaaagtgcagttctcagcttcagacactgaagtccaatgaatcaaacataatgagtctgacatgtcactgactaaaacccaggcaaaatgctgtgggttccacaccattgcctcaattaaagtcatgtcttagattttcattattttgttgctatagacactttaacaaattgttggacgttatgtttccattaaaagttttctttgtgcttttcctgttttctcaggattcactggtaaatatcttcaatgatatcatctcccaaaagtaaagtaggtttgaagataataaaaataacttaaatattttaacatgtaatattaatacacaaagtcttatataatgtaaaccgcagtattgtatacattccattgttatcctccccttcacattttta

SEQ ID NO: 765938 - DNA, 510 bp, Homo sapiens
caacaatctccctctttcctggatgactgactactttacaccttctcccctctcctcacacatccaacgcctctgttcacactctcagctgatgacctcctcatttccctgggaaatcgagcaatcacgagcaaacctccacatgctcccccrtcacagcctccctcttatctgcagcgtctccatctcctgacctcatgatccgcccacctcggcctcccaaagtgctgggattacaggcgtgagccacgcgccgggcccccaacttctaaatgctcacgtttctccatccgctgccctggaaatctcaccacatctcgagacatatcagcgctgtccagtagagtttcctgggatgatggaaatgttctatgtctgcacagtccaataggtagcccctgctcatatgtggctatggtgcacttgaaatgtgaaacgtggcttgtgcaacgtgtgggactgaattttacagtttatttagttttaattcattttgaatttaaagagcca

SEQ ID NO: 765939 - DNA, 510 bp, Homo sapiens
caacaatctccctctttcctggatgactgactactttacaccttctcccctctcctcacacatccaacgcctctgttcacactctcagctgatgacctcctcatttccctgggaaatcgagcaatcacgagcaaacctccacatgctcccccatcacagcctccctcttatctgcagcgtctccatctcctgacctcatgatccgcccrcctcggcctcccaaagtgctgggattacaggcgtgagccacgcgccgggcccccaacttctaaatgctcacgtttctccatccgctgccctggaaatctcaccacatctcgagacatatcagcgctgtccagtagagtttcctgggatgatggaaatgttctatgtctgcacagtccaataggtagcccctgctcatatgtggctatggtgcacttgaaatgtgaaacgtggcttgtgcaacgtgtgggactgaattttacagtttatttagttttaattcattttgaatttaaagagcca

SEQ ID NO: 765940 - DNA, 552 bp, Homo sapiens
agcttatgggatttagttttccatgcagttgttttctggttttactgcagtcaaatctatcaattttttttaaaagcccttcaagttcgagtcatagttttaaaaaagactttccagccaggtgcagtggctcatgcctgtaatcccaacactttaggaggccgaggtgggtggatcacctgaggtcaggagttccagaccagcctggccaacatggtgaaaccccgtttctactaaaaatataaaaagtagccaggtgtggtggcaggcrcctgtaatcccagctactcaggagactgaggtgggagaatctcttgaatctgggaggcagaggttgcagtgagccgagatcatgctactgcactccaggctggcctcctgagtagctgggactacagatgtgtgccagtgtgcccagctaatttttttatttttaggtcttactatgttacccatactggtcttgaacttctggtttcaaatgatcctcccatctcggcctcccaaagtgctgggattataggtataagccactgtgccaagtctctattt

SEQ ID NO: 765941 - DNA, 522 bp, Homo sapiens
acttgaagtatgaggaagattctaccatcacaatagccttaattatgcttcatatattttgcttattaaagacagggagatggatagttttctttcctatttgtttctgtcctgtccccaggcctgtctttttcttcttttcttttcttttctttttttttttttttaatttgagacggagtstcaatctgttgcccaggctggagtgcagtggtgtgatctcggctcactgcagcctccacctcccaggttcaagtgattctcctgtctcagcctctcaagtagctgggattgcaggcatgcacaaccatacctggctactttttgaatttttagtagaaatcgggttttcccatgttggccaggttgccctcgaactcctaacttcaagtgattcgtctgcgttggccttccaaagtgctgggattacaggcgtgacgtgccatgcctggccccccaagcctgtcttttcatcatcccagctcaagaaccatctgtcactttacatatttccaacactga

SEQ ID NO: 765942 - DNA, 601 bp, Homo sapiens
caacacatttcattccttagggctaatcaaatctttgctgtaatctgaaaaacaaaagtggcttttttgtttttagagtttgggtttcagtcactgattacttcaggctggctgtactttatatcatttcagatattcaaagaacacaactatgtgatttgacrcaatgtcctaaaagtttaaaaaatgaggatggttacaaaatgcaacaggcatagcctccctaacgtctggtcttcgcacagcagcctaagagatcccgttaaaaccaaagtcatatgctgtaactcttctgcatcaaacctgctgagggcttcccgtttcacatgaaatgaaaaccagagtccttccagcggcctccctgaccttgtccctctccccgacaagcctggctcttttcctgttcctagtatacgccaggcacagctcacttcctgcagcgtttgcatttgctgtttcctctgcctggatttctcttccccagatatgggcgtagtctgtccacttgttcccaatcggtttcacttcctgttttatccctagtgcctaggcagtgcccacagcagaatatatgctcaggaaatatttatgaattaatgat

SEQ ID NO: 765943 - DNA, 532 bp, Homo sapiens
tagatgatttcgtttgaggtcagtaaatctggttgaatgtaatattcatatttagcatgaaacatatgcaagatagttaatgctactgatgctgaaatacatgatgatataatgtctaaaattagggcttctaatcatacctgccatttaaagaccctctggaacagactccaaacttgggacttttctcattggtcctgagattatggtggggttgccctagttacatttctgatggggaaggtatagatctcaagacttctttttgttcattgttccctcttcaaattgcaagggttggttaaaatatgtactcttgatatgtagatttgtagcacagacctcaataaaaggctcggtgcagcgwgcttccggttcagcaggcatggtgccagtgtcccgcacggtggggcagcatagctatgccttgtgaggaacagtatagcgatgcctccacgtgaccactcctcctccctacctgccgctcctgtcagaccagagatactaggcataggactctgctccccgcatc

SEQ ID NO: 765944 - DNA, 602 bp, Homo sapiens
atctattcatccatccgtccatctatccctctatccatccatccatccatccatccatgcatcagaatcacccatggagctttgaaaaacataggtaaccatgtaaaccttcagagatgctgatttaagggtctgggctaggcttggatgtctgtatttttaaaaacttctctgagacatagtgctaaaactgcagatacagtacgtgttgaaaagcagcactgaaaacaaacaaacttggggccagtatatgttcaatataaaatgtgtataacttttagataacaaaatgttggagaaaatagaagagaagtggtaaaaaamaaaacaaaacttggtgtttggtttgctatatttcaagttgaaatgtgaactggtggtgatgatattacttcaaacattcagattgtattggttatgtaagtatgtatttgaattattggtcctatcagtacccatctcagcagtgggaaatcaccatctgtacacagcttgtaagttttctacactcctccttagagagctcataaaaagacaatgaatacaagcggcgtggggcatcggcttgaacagatccttgagagtgggttctcagtatctct

SEQ ID NO: 765945 - DNA, 627 bp, Homo sapiens
catattatggaagaccaggagcagataaatataagaaagtgcacctttatgacgtctgttgggggggggattatttatcgaataaaaaattaagagaatgtgatttttttttttttttttttttttttgagacggagtctcgctctgtcgcccaggctggagtgcagtggcgggatctcggctcactgcaagctctgcctcccgggttcacgccattctcctgcctcagcctcccaagtagctgggactacaggcgcctgccaccacgcctggktaattttttgtatttttagtagagacggggtttcaccgttttagccgggatggtctcgatctcctgacctcgtgatccgcccgcctcggcctcccaaagtgctgggattacaggcgagaatgtgatttataacttgaggataataagtttataaacacaaattgatactgaatctttcccgagggggcacctctgcttgtaaaaggatgtagaaggtgcagcaggatttcacggtcacttctgatgagtgggcagagggctgcaacttgaggttctgaaaaggaatatgagtcttgtctttaatgctgaaaccttgcatcaaagtgaattgtattcacatgttacatgggtaa

SEQ ID NO: 765946 - DNA, 554 bp, Homo sapiens
caaaattaaaaatcaggctgaaagctgagacctacaaagaagctgcctttccttttgttcctaagcagagaggtacakataaaaggttaaatatttccacaggtagctactctatctccaccttatcttatataaagtgtggatttactgagctccagacaaatacaaaattgaccattcccttacctgctcctttatcttgcaacatgtggattccataatgtaaccatactctctttccctcccctccagtccacttgttcccgttaaatattgaagccgtcaaaatcatctttcaagaaaggcacagacctgtctcctggtcacatcctcgaccttggcaaaataaacttcaaaactgattgagacctgtctcatgaattcctgagaaaaacctatttgcatgaattcatgagcagtttaatttattaaatcatgaatatataacattacatcaatagaaccaataagaaaaaacatacaatatcctctatgctgagaaagtggcagaagaatttaatacccatttcttggaaaatgaaatattggaatat

SEQ ID NO: 765947 - DNA, 629 bp, Homo sapiens
tgtttatggaggtctttttcttgcatgttctgagttacattcgaatcattcgaatgcctcttgatttttttctttttcttcttatttttctttttgagacagagtctcacgctgtcagctaggctggagtgcggtggcacaatcttggctcactgcaacctcgcctcccgggctcaggcaattctcctgccttagcytcccgagtagctgggattactggcatgtgccaccacgcctggctaactttttaatttttagtagagatggggtttcaccatgttggccaggctggtctcaaattcctgacctcaggtaatccatccgcctcggcctcccaaagtgctgggattacaggtgtgagccaccacaccctgctgatttttaaaatctgtacgtttgtttacggaggacaaaatgtttagaatgggtaattacggagtttcctcagcagccatgaacggtcttttcctcgaagggcgtgtccctatggagaagagcaaactccagggctggagatagatgaggtgaaggtgccaagggaagcctgcttttcctggggctggcaggggtgtaggcacaggagctggagctcagatgagcaccgattgccttcacttcatggcaggtca

SEQ ID NO: 765948 - DNA, 582 bp, Homo sapiens
atttggaccagactaacccgaggagaattgcctatcacagtggtcacaacttgagtttctcagcaaacctcgccaccatgggccaagtgctctagggtcctaggtaaatttgaaaggcagtctaggacacaactgcagttctwaggcaaccgctagcactggatagggcttagagccagtggactaaggtggcatgtgacctagaaagacaccagtggggttgctaaggaaatgcttaacccacccctcccccaaccccagacagcacaactcacagcaacaaaagtgactccttccttctacttgaggagaggggagcaaagaataaagacggctttgtcttgtatcttggataccagcttatccacagtaggaacactgggtagagttgtgaggcttgttgtataagaaatgctaaaggacgttctttaatctgaaacaaaatgatgttaatgagcaagaagaaattatctgaaggtccaaaactcactagtaatagtaagcacgcagaaaaacacagaatagtataacattgcaattgtggagtgtaaactgctcttcacttaaatgatgaatcaatca

SEQ ID NO: 765949 - DNA, 582 bp, Homo sapiens
atttggaccagactaacccgaggagaattgcctatcacagtggtcacaacttgagtttctcagcaaacctcgccaccatgggccaagtgctctagggtcctaggtaaatttgaaaggcagtctaggacacaactgcagttcttaggcaaccgctagcactggatagggcttagagccagtrgactaaggtggcatgtgacctagaaagacaccagtggggttgctaaggaaatgcttaacccacccctcccccaaccccagacagcacaactcacagcaacaaaagtgactccttccttctacttgaggagaggggagcaaagaataaagacggctttgtcttgtatcttggataccagcttatccacagtaggaacactgggtagagttgtgaggcttgttgtataagaaatgctaaaggacgttctttaatctgaaacaaaatgatgttaatgagcaagaagaaattatctgaaggtccaaaactcactagtaatagtaagcacgcagaaaaacacagaatagtataacattgcaattgtggagtgtaaactgctcttcacttaaatgatgaatcaatca

SEQ ID NO: 765950 - DNA, 503 bp, Homo sapiens
gtattaatccaaagaagttatttaaaattatagttcacattttttttctccatttctcagaattgtttaaagagaggaaagagaggaaaaggaaagggataatttataggatgtaccttaggaattattattagaagaataaaaaagactactactggcaaacctaagtgcattagaaatgaagtaattaaaggttctataagaaaatgagcaaattagagctagcagtcatctattaacctactgtracttataactcacattttacttttttctcccagtgcaaagctcccttattaccgtgtatgatgttcacatgcaattttctattgtcgtaaccacatatatgtggtgatgagtggatcttaatttgttcttctatgtgcctctagttcaccagctttaattgtagggcacagtttttctgtgctttgaaaagtgcccagcattgctaacctgtgtcagcatttgatgtctatttttgtaatatagcagttatcata

SEQ ID NO: 765951 - DNA, 538 bp, Homo sapiens
gagttattcctttatgctagtttattcgaatcttaccatagcaatgtgacataaacaataggtggttttattccggctatatgaagctcaggaaagttaagacagtagtccagtctctcaactagatcacaaggagttgggatttgaacctgaatcttccgtttaaaaatccaatgagttgggccaggtgtggtggctcatgcctataatcccagcactttgggaggccgaggcaggcagatcacctgaggtcaggggtttgaaacccgcctggacaatgtggcgaaaccccctctctactaaaaatacaaaattagccaggcrtggtggtgcatgctggtaatcccagctacttgggaggccgaggcaggagaattgcctgaaaccgggaggcagagttgcgatgagccgagatcgtgccattgcactccagcctgggcaacaagagcgaaactctgaaaaaaaaaaaaaaagaataatccaatgagttggccaggcacagtcgcacgcctgtaatctcagcactgcgggcagatca

SEQ ID NO: 765952 - DNA, 692 bp, Homo sapiens
gtagggtaatacccacaacaactgtagtttcttacttggccgtgagaatgcttacttatgtgttagacttccactctggcaacatcttgtcatatcaaaagacactggaaagagggattccctttgttgtttggtcttctacttagaaaatacctattggaattagagtttatcttgtagtattcatatttgtattttgaaaataataaggtttgaattaaattgatatgcacagaggggaaccaatttttttgatccaatgtgaattataamtgagataatccagttgttcattgtggagttgttgagactatgaaagacccattgtctttgtattcagctcttccttaaatagtgtaatcctacccccacctccgcttgctttctttccctcccctccaatgataaagaaaatgataaattttctgttgtgcattcaattcttattttaaataagactatgtatagacatcgtacctgacattgctatgtttctaacaatgtttcaatttaaagtgctagtgcttaaaaacattttcatgggataagaccttgcatactttgcttatttgaagaatcagtggtaggtgcagtgaagtaaattctatggagtacatttctaaaacagcacatttctggaataataaataagtttattcaggttctaaccctttgctgtacacaagcagaca

SEQ ID NO: 765953 - DNA, 605 bp, Homo sapiens
ctcgggaggtgaaggttgcagtgagctgagatcatgccatttcactccagcctgggtgacactgtgagactctgtctcaaaataaataaataaataaataaataaataaacttgcatttgagcttgtgtgttatgttaacatatgttctcctttctcaaaattgccaacgtgtacttggtttaactcargaacagtttcttctggattccttatctgatttatttaactgaattatattctaatattgcaaatatcaccataagtgggtaatagtaaaattcctcttctgaaaatgtgtactgtgcttttagatttttaaattccacaatgtaaaatacattcttaattttcaaccccctccaaaaaacacaaaaattagctggacatggtgcacgccggtagtccccgctagttgcggggctgaggtgggagaattgcttgaacctgggaggcggaggttgcagtgagccgagatggctccactgcactccagcctgggcgacagagccagaccatgtctaaaacaaaacaaaacaaaacaaaacaaaaacccaaaaaccaaaacaatccgcaggtgtctttaggcactgttgattcatgatct

SEQ ID NO: 765954 - DNA, 605 bp, Homo sapiens
ctcgggaggtgaaggttgcagtgagctgagatcatgccatttcactccagcctgggtgacactgtgagactctgtctcaaaataaataaataaataaataaataaataaacttgcatttgagcttgtgtgttatgttaacatatgttctcctttctcaaaattgccaacgtgtacttggtttaactcaggaacagtttcttctggattccttatctgatttatttaactgaattatattctaatattgcaaatatcaccataagtgggtaatagtaaaattcctcttctgaaaatgtgtactgtgcttttagatttttaaattccacaatgtaaaatacattcttaattttcaaccccctccaaaaaacacaaaaattagctggacatggtgcrcgccggtagtccccgctagttgcggggctgaggtgggagaattgcttgaacctgggaggcggaggttgcagtgagccgagatggctccactgcactccagcctgggcgacagagccagaccatgtctaaaacaaaacaaaacaaaacaaaacaaaaacccaaaaaccaaaacaatccgcaggtgtctttaggcactgttgattcatgatct

SEQ ID NO: 765955 - DNA, 624 bp, Homo sapiens
aatgcaacccatattttaaagatttatcctgcatctagatgtcaaaggaataaaggagtgaacaaaaagggaactatattgattcagtgattaaggaataaatgttttgtagaaaacttaaaggttttctttttttttttttgagatggagtcttgctctgtcgcccaggctagagtgcagtggtacgatttcggctcactacaacctccgcctcctgggttcaagcaattttctgcgtcagcctcctgaatagctgggattccaggcacctgccaccacacccggctaagttttgtatttttagtagagatggggtttcaccatcttggccaggctggtcttgaacttctgaccacctgcctcggcctcccaaygtgctgggattataggcgtgagctactgcgcctggctgaaaacttgaagtatttttagaaaaagagaagaattaagttttcataaaagaaaatctaaaactagaatgggataaaagattcctagggcaggttgataatattccaagtgatgctaaatacctatttatggaaacaaatggtttttttcttctgtcgagttgcacctatgcaagacagatgagacaatgactatgcacatttacattttat

SEQ ID NO: 765956 - DNA, 586 bp, Homo sapiens
gatcttttggcacttagtgacactaatggatgtggtcctatcctgacctggcttggtaccagccagaccagtaatgcctctgcctttggcaggatctaagagggagggaaaaggaggtcaagaccccctgctccctacacgcctccacagtccaccttagatggtttctgtttggcccacacgtaacaggtgtaaaatgcctgattgtcaacacccagggctgcagtcctcccataatggtttttcacagraaatgttgagacccctgtttttagacctattcctaagggagactatggggagggaaattgggtggggagggagggtgggataggatatgagaatatagaatccttaatttttttttaactttttattttgagattattttagatttatagaaaagctgcaaaacagtacagagcttacataaccacagtactattatgaaattaataggtaccacactgtttactgaactacagacctttttcagatgttaccagttttccccacagtgtcccttttctgtttcaggatccagtctagggtccctcagtgcattcagccattgagtctcatcagt

SEQ ID NO: 765957 - DNA, 544 bp, Homo sapiens
ccaggccttggcattgactgactagggtttgcacctcccagtcctgccactaactcacagcaagtcacattacctcactgtgcttccatttccctgaagtctgtagtctttacctcatggggctgttgtgacgattaaatgagctaatcatgtgatgcttagccgggtgccttgcacagcacctgcactcactttagtgctggtggtggtgtgtggagcggagccacccagtgaagctgaagaagtgggtagcgtggtggtgcccttcaratgggcagagggtgtgcgccgatggccagtgacagaagagggcctgagggctgtgttgaagggctgtgagacttgagaattcagttgttaggaaagcagggagagcaaggcctctcgtttgggccaggctgagcagtttgagctcgctccgtgtctgggctccccttgggaagagctacagagtgccaggcacacccagaaaggagtcaagcccacttcagcctgggcctgagataggctggatccactcaaagaggatcaagctggctgtctt

SEQ ID NO: 765958 - DNA, 544 bp, Homo sapiens
ccaggccttggcattgactgactagggtttgcacctcccagtcctgccactaactcacagcaagtcacattacctcactgtgcttccatttccctgaagtctgtagtctttacctcatggggctgttgtgacgattaaatgagctaatcatgtgatgcttagccgggtgccttgcacagcacctgcactcactttagtgctggtggtggtgtgtggagcggagccacccagtgaagctgaagaagtgggtagcgtggtggtgcccttcagatgggcagagggtgtgcgccgatggccagtgacagaagaggrcctgagggctgtgttgaagggctgtgagacttgagaattcagttgttaggaaagcagggagagcaaggcctctcgtttgggccaggctgagcagtttgagctcgctccgtgtctgggctccccttgggaagagctacagagtgccaggcacacccagaaaggagtcaagcccacttcagcctgggcctgagataggctggatccactcaaagaggatcaagctggctgtctt

SEQ ID NO: 765959 - DNA, 544 bp, Homo sapiens
ccaggccttggcattgactgactagggtttgcacctcccagtcctgccactaactcacagcaagtcacattacctcactgtgcttccatttccctgaagtctgtagtctttacctcatggggctgttgtgacgattaaatgagctaatcatgtgatgcttagccgggtgccttgcacagcacctgcactcactttagtgctggtggtggtgtgtggagcggagccacccagtgaagctgaagaagtgggtagcgtggtggtgcccttcagatgggcagagggtgtgcgccgatggccagtgacagaagagggcctgagggctgtgttgaagggctgtgaracttgagaattcagttgttaggaaagcagggagagcaaggcctctcgtttgggccaggctgagcagtttgagctcgctccgtgtctgggctccccttgggaagagctacagagtgccaggcacacccagaaaggagtcaagcccacttcagcctgggcctgagataggctggatccactcaaagaggatcaagctggctgtctt

SEQ ID NO: 765960 - DNA, 594 bp, Homo sapiens
cagcatcccaatctccctaagcgtttggatcctctacattcaaccaaaagagatcaggcttttccagcttgcacacagtgggctttcttttaatccgtattttagctaaccaagcaaataaactattagaacctttttcagctccccaagctgcaacattaaatgcaragtccctacttagtgggcccaaatcaataaattcagcctgattcaatcctatgttccttttatcattatcccaaacccttaatatccattcctttgtctgttctccagatttctgcttatataaatttaaaacttgaagcagttaatggagttttagctcaggtctgacttacagtgggtgcagtgcatccctgggctcatcctgtggtcattttctcagtgtcagtatgcataattggcatagatatacttagcacctggcagaacctccacattggctccctgactggtagggtgaaagctattatggtggtaagggccaaatggaagccattagagctgcttctacctaggaagatagtaaatcaaaaacaatatcacatccctggagggattgtggagattattgccaccatcaaggacttg

SEQ ID NO: 765961 - DNA, 491 bp, Homo sapiens
attacaggtgtgagtgactgtgcctgacctgggcagaaaaaattaattgagaaatttctcaaaaatttatcacacttaaaacaaacttgcagatccatggccctcagcaaatccaaagcaagataggcacaaaaccatatgtaggcagtcatatcttagtcaaagtgctaaaaccaaagataaaaagaaacttttaaargcagacagaaaaaaatgtcacattgcacaacagtgacacagatgatggctgaccttgtatcaggacagtgaaggtcagatgacaaaggaatgacatttataaaatgctaacaaaaataaaccatcaacccagaattctgtatgcagcaaaaagctttattaaatgaagacaacatgacttcaaaagctgtaccctaagcaatacttaaggaatttcttcaagttgaaggaaaatggcattagatggaaactgatcaatgaaaagcactggaaatagtaaatattgagatgaa

SEQ ID NO: 765962 - DNA, 431 bp, Homo sapiens
ggtataaagaggcttctgaaagacaaaatgactctagaatcacctctctaaaaaatccttacagcatgctaataagaaagtaaagaccaaaattcagattgactgtactgatgcaacagaaccgcctgttaaatctctctgcttctctatatcatctattccctaattattstgaaactactaactgttgatcctttgctgtttcctccaaaccgtttcaccataaaatgccctttaaaataagactttctaatgaacctggggtaccaatctcagcagaatttaaacttttatctctagctgaactccaagccacataattttccagaccttaaaagagactaaactaaatttaaacaagaattttaaattcctttgggtgcttatgatccaggaatccctgatttatatcaatttgtttacgtggtact

SEQ ID NO: 765963 - DNA, 431 bp, Homo sapiens
ggtataaagaggcttctgaaagacaaaatgactctagaatcacctctctaaaaaatccttacagcatgctaataagaaagtaaagaccaaaattcagattgactgtactgatgcaacagaaccgcctgttaaatctctctgcttctctatatcatctattccctaattattctgaaamtactaactgttgatcctttgctgtttcctccaaaccgtttcaccataaaatgccctttaaaataagactttctaatgaacctggggtaccaatctcagcagaatttaaacttttatctctagctgaactccaagccacataattttccagaccttaaaagagactaaactaaatttaaacaagaattttaaattcctttgggtgcttatgatccaggaatccctgatttatatcaatttgtttacgtggtact

SEQ ID NO: 765964 - DNA, 603 bp, Homo sapiens
acaatcctttcttcttagaatgttagaatgtatctcaatgtactcattaataaaacaagaagatgaagttagtactggttgatctaagtccagctctaaaatactatctattagtgatatcttttactgaaatttcatttttttttctttttatgctgggttgactctattttattttaattttaattttttattttttgtagagacgggggcctcactatgttgcccaggctggttttgaactcctgggctcaagcaatcctcccaccttgacttcccaaagtgcagggattacgggtgtgagccactatgcctggctgatggctctcttttgaatagcattcttttccatataattatttatttccaatttaaatataattattcctttccagttttaatgatcatgatcatgtgtgaattcgtaaagaaaygatcatgaatttcataggaagatgccataagtaaactcttagcatctgaaatgattaagaggatttgagcctgctgaggaattacttactttagttgccagtcctagaggtaataactgattaagaagtgctgaaaaatgagtggttatactttagcttaaaagaatga

SEQ ID NO: 765965 - DNA, 517 bp, Homo sapiens
gttaatcccgttatctgagaaacatatttaccttgcaggaacatagtactttctatatcataatcttgattaagttaacatctggtagttagaacgttttattctcatactcttttaatccccaatttgttgaatttaagaaacttaacatttatgtatcactgtgagggtaaggaatgcaatatgattggaattttaaataagacagttttaaatataagtgtatataagtctactcccccgtcttagtccatttgggctgctgtaacaaaacactacaggctaggcagcttataaacaacagaaatttatttctcacrgttctgcaggttgggaaattcaagatcaaggcatcaacagatttggtgtctggtgagggcctgcctagtggttcatagacagcaccttctgcatcttcacatggcaaaaagggcaaacaaactcttaatgccatcaccttgtggggttgggatttcaacatatgaattttgggggctacaaatattcagaccatagc

SEQ ID NO: 765966 - DNA, 620 bp, Homo sapiens
gtgcagaatgtgcaggtgtgctacataggtatacatgtgccatggttttttgctgcacccatcaaccagtcatctacattaggtacttctcctaatgctatccctcccctagccccccaccccctgataggccctggtgtgtgatgttcccctccctgtgcccatgtgttctcattgttcagctcccacttacgagtgcaaacatacggtctttggttttctgttcctgtgttagtttgctgagaatgatggtttccagcttcatccatgtccctgcaaacaacatgaactcaccctttttatggctgcatagtattccatggtgtatatgtgccacattttctttatccaatctatcattgatgggcatctaagtctgtgctgttgtgaatactgcagcaataaacatatgtgtacatgtgtctttataaaagaatgatttataatcctttgggtataaacccagtaatgggattgctgggtcaaatggtatttctggttctagatccttgaggaatcgttgcactgtcttccacaatggtcgaacraatttacactcccaccaacattgtaaaaacatttccatttctccacatcctctccagcatctgttgtttcct

SEQ ID NO: 765967 - DNA, 620 bp, Homo sapiens
aaaaaaaaaaagtgttgattacacaaggataataatgattccttcctaggactggctatagggataaatgagaaaacatatttcaagtgcctgactgtgtctagcatgttgtcagcagtcaataaacaactgataaatagagtaagaatgaatgtgcctagtccagtgtctgcctcatggwtgtcacttaccagaaggcagcaggcagctcttaggagaagagagaaacggaaaatccgagtttgaaggaggtgggtcaagaacagcaaagaactgtagagcagagggttcttgacaatatctgtaaaaataaatttttataaaataaattcatctggggaatctctttattttgataaagtgatttcttacttgataaaaaagtcattatagaattgctttaaaaagtaaatctttttcaagatatcattccacgtatcacaattttacttacacgccacttccctgagcaaatttatttcttgcagtgactcacatctatattaatattttaaatatcttaataatataaaaatggtgaatggacgctcactacttccctggggaagattagaagaaattagcttaattctagtaagaagggcttagcataggcatga

SEQ ID NO: 765968 - DNA, 641 bp, Homo sapiens
aaaatacattatacgttacagcatatggaagaaaaaaatgcacacaatgatggcttttcttgttaactttgtactataaatatattcatcattcactttgtatataatcccaggccacttttgaaccccaggctggctggcttccttgctacacaggatgcctttgtatcattcactggtgggagtttaatcagttaaaaattatttaaaggctatcctaaacaaaacaaatttctaaaggcaagtctaccatccttaagaatcacatgccttcaaataccagatgttggagttaatctgtggggttgaaggctgcattactttggataattaaaagatacactcgtttcatctgtgggctttttaagatttaccatttaaaataacccaactaaacatgtgacttccagatgagtaaattctactaaagaaagatttaatatgaacctatgayattcagaaccccttcttcaatgatggaagtcttcaggggtatcaattgtgctaaaatgttgtacaatattagtaaatagaagttgttttattcaaaatgagaggataagacttctaaatatttgaatgctaatattctcacttgtattacattgcttaaattggagtttgtagaaattcgggttgca

SEQ ID NO: 765969 - DNA, 641 bp, Homo sapiens
aaaatacattatacgttacagcatatggaagaaaaaaatgcacacaatgatggcttttcttgttaactttgtactataaatatattcatcattcactttgtatataatcccaggccacttttgaaccccaggctggctggcttccttgctacacaggatgcctttgtatcattcactggtgggagtttaatcagttaaaaattatttaaaggctatcctaaacaaaacaaatttctaaaggcaagtctaccatccttaagaatcacatgccttcaaataccagatgttggagttaatctgtggggttgaaggctgcattactttggataattaaaagatacactcgtttcatctgtgggctttttaagatttaccatttaaaataacccaactaaacatgtgacttccagatgagtaaattctactaaagaaagatttaatatgaacctatgatattcagaaccccttcttcaatgatggaagtcttcaggggtatcaattgtgctaaaatgttgtacaatattagtaaatagaagttgwtttattcaaaatgagaggataagacttctaaatatttgaatgctaatattctcacttgtattacattgcttaaattggagtttgtagaaattcgggttgca

SEQ ID NO: 765970 - DNA, 662 bp, Homo sapiens
tcattcttaatgaaaactatctgtaagctagaaatagaagtgaattttctcaacctaataaaggttatttacaaaaactatagcttacattatatttatttatggtgaaagagtaactgctttgccctaaaatcaggaaaaagacaagatgtctgttcttatcacttttattcatcattgtactagaagttctgaccagtcctatcagacaaggaataaaactaaagtcattcagtatagaaagaaagaaataatactctttattcacatacaacatgaacacctaggtggaaaatctgatggaatgtataatacaaacaaagctactagaattacagaaagagattagtaagctgcaggatataaaacaatatacaaatatcaggtgtatttctatatgttagcaataaatgatcagaaataacaattaaaaaacaataccatttacaataacataaaatatcacagaaattctacacactggaaattacaraacactgtcagtttccccctaattgttctatagattcacttcaatctcaatcagaaacccagcagtctgctttgcagaaattgagaaaaactgttctaatatctatatgtaaatgtaagacctagaatagctaagacaattttaaacacaagaacaaagttgaaagact

SEQ ID NO: 765971 - DNA, 524 bp, Homo sapiens
tagaaattgtaaacagaggggagtgaatgcagggagctgattatgaaagtggtgaacaggctgaaagggcaaaaagaaaaagataggaaggcccggcgtggtggcgcacacctgtaatcccagcactttgggaggctgrggcagacagatcacttcaggtcaggagttcgagaccagcctggccaacatggcgaaaccttatctctattaaaaatacaaaaattagctgggcgtggtggcaggcgcctgtaatcccagctactcaggaggctgaggcaggagaatcatttgagcccaggaggcagagattgcagtgagccgagatcacgccactgcactccagccttggcaacaagagcaaaactccatctcaaaaaaaaaaaaaaaaaaaaaaaaaaacagtaaagaaaagaaaagataggagccctagtcctggaggcacaaaccagaggaggtggtgctgcagagctcaagactgcgtgtcctgctgatgtaatccatcactaggcccactgctgccagag

SEQ ID NO: 765972 - DNA, 667 bp, Homo sapiens
ctgaatgtgaaaaaaaaaaaagtattcactttctgcatcaggacacttcattttaagcagtggcattacaaatagcattttaaatcttaaaaaataaaagtttcctaatgtatttttccaatagctattaatgttaattgccacttacagcatttaaatcctattgttttctacaaatgttcattgcaaatatagattattcactgtaatattgttaatagggatgtatgtacttgcttacaaatcgaagtgccagctataacccaacacgtttctccactttcttcaaaacctgttctgtactcattttctttcatctcagtaaatacaatttcttttctactagttgctgaagctaaaattcctggttacatccttatgcacgttgtttccctcacaccctgcaacactatttcatcctgctgaacstgcagtggctggagtcacctaaagtcagcagcaggggagttcccacaagggagtgccccaaaccatcctgagatgggcctgattagaattccaaagaaagattgctaagcaccaggcgattagaccaaagcatttattaaggacacttacagagtactgcagcattcctcactacagacggcaaggaaaaagggatttatgtctactccgatacgtccatggcaaggaaatcagagta

SEQ ID NO: 765973 - DNA, 594 bp, Homo sapiens
atttacctgacaatctcttttgttatattattaaatcatgctcacttgctgtggcatagtctctcctagttaccactactttttttttatatcccatgtataaatattacattttaataaaaaacgcatgtcaagaaacaagctcaattcagaggcaactgggattatcaggagatacagtcataagtatgttcctggtaacaaatctagtaaggattttcaatcaaatctggcttcttctaccacagacacctttatttacacaatatcttaatttattacttcaatttacttgctggtctgttttatttgtaggcttagtctaattttaacactgtcaagaataattcacagagtatcaggtgagtctgcttagaagagggaacctacgttaatcttttctgacattaatagaattggaccttattaattctgacatgatttatttcatatcgtgtaaatactaaatgcaagcatcatgttctcattgaaacaagtgttttacatgcttcatatactgcaatttgcaacatgaattgaaartgagccttgaaaaccatttgaaatgacttaattcttgtcaaacttagaaag

SEQ ID NO: 765974 - DNA, 584 bp, Homo sapiens
cagtaatgcaatccagcatattaacaagccaagctaaagaagaaaagcatatgctcttaacgattgacccagaaaaaagcctttaacaaaagtcatcacttattcatgttaaaaattctctgaaaaatgttaatggaagggaacttcatcaactttataaagagtttctactgaaaaacataaatgaaaacaactctacagcttgttctacttgatgatgaaagactgaatgttttccccctaagatgaggaacaagccaaaatctctattcttgccactgttatttcgcatattactagaagttcctgttaatgcaataatgcaagaaaaaattgatgggacacaaaacaaaaatgaaaaaataaaactctctattttacasacgacttcattgtctacatagaaaatctcaagatatctaaacaaaacaaaatgaaactctagaactagttactgaactcagttattacagaatacaagataaacatacaaaatttatgtgtatttttaaggctaacaatgcacacaatgaacaagaatattgagaataagataacatttcagcttgtttaaaagagatagg

SEQ ID NO: 765975 - DNA, 555 bp, Homo sapiens
tgagtaaggacttagacattgtcagagtagagtttcataaattattgcaatcatgaccgtgatatacatataatatagatgtacatacaggcaattttctgtaaatagccagatagcaaacattttaggctttacagagcatacggtctctgtcacagctactcaaccaggccattctagagcatgagttgccatagatagcagacacatgagtaggtatggctaygtttcaataacactttatttacaaacacagagagtgggcagaatctatccctcgggccataattggcagattccttttctagttaactacgtcggtacagtgtataatgaccacgatgcacgctttgttaattggcattcacacatgatactcctcagcagacaacttccaattaaataaaacagcaaaatcatgcattttgtttaatattatgcaattgttttacatacaaccatgtacctcttaacgctcttcaaaaaatgggccacaaaatccttttaggtgaaagttcattcatctagctgagtcctctcagtcctccattgata

SEQ ID NO: 765976 - DNA, 653 bp, Homo sapiens
tttgcttccattttcttctctgaaaatggagatacttacaacaatcctaagagtttttgtatcaaaacaaaacaatacaagaagattgtttttaaggtgactaaaaattaaaaaccttaacacagtgtttgcgcatgatagaaaatgaatgtgtactatagacgatagatatataccaccagcacttgaacatgttcagtgttcggagccaacaccaaactgatgtgtgctgcagccaacaccaccagtgtcactgcacgcacagctgccagcaggccctccaccccagctgcattgccgctgacaccatcgtgaacgaccttagggcggcaggcatctggcacccgccagcaccccactgccgctgacaagtgtgcacctccctggagctgctgctaccgctgctcctggcacgtgcaaacatgggcggatcccatcgtcaccgcactrtgaaacgctttggctgacaccaccctttggagtggagtgaccagcagtcagggagcacctcagccacacccagcacagtagactcctaaactggaggagccagagaacaaagtcagggcccaatacaagtccccagagttagagcccacagtccaggaattgggagctaagagctgacccccaaaaatcttccaggaatgaaa

SEQ ID NO: 765977 - DNA, 545 bp, Homo sapiens
ttctttacattttagtttccagtttaagatgcctcacttcccccttgctccagaatacccatgcaacagagaacatatggcacagaatacgatatactgtggcttcagtgttgatcgtatgaatcacactgtctcattataaactattaagtgaatgggtgcatccctgtgataggtaagagttgtgtcctttgaaaccaagatcctaaagtattttctgtgcgaaagcattttggtaattcccaacccccccaaatcaatcagatgagtaaaaaccaaaacaaaaataaatacatgccacaaactgtrgaaactgaaaatactctattttaacctatctttggctctcagttggaatgggactactggtggtatttagaagagaatggctcagcagtaagccacagacactggctcatgcatctgtgtatgctgcttctagaataggcagcagggagctaagtggaaaggacgagatacaccaggaaataatcaggtgggtccaatacccagccccaggcacacacctgccagcaagcggaaat

SEQ ID NO: 765978 - DNA, 545 bp, Homo sapiens
ttctttacattttagtttccagtttaagatgcctcacttcccccttgctccagaatacccatgcaacagagaacatatggcacagaatacgatatactgtggcttcagtgttgatcgtatgaatcacactgtctcattataaactattaagtgaatgggtgcatccctgtgataggtaagagttgtgtcctttgaaaccaagatcctaaagtattttctgtgcgaaagcattttggtaattcccaacccccccaaatcaatcagatgagtaaaaaccaaaacaaaaataaatacatgccacaaactgtagaaactgaaaatactctattktaacctatctttggctctcagttggaatgggactactggtggtatttagaagagaatggctcagcagtaagccacagacactggctcatgcatctgtgtatgctgcttctagaataggcagcagggagctaagtggaaaggacgagatacaccaggaaataatcaggtgggtccaatacccagccccaggcacacacctgccagcaagcggaaat

SEQ ID NO: 765979 - DNA, 620 bp, Homo sapiens
ggatttgtattgtttcttgaatactctgaagatgtagagactgaatcctgttataatccttaatagagtattgattttctaaattttagcgggcaattattttagactcatgaacattgtgttttgaacacagctcaaaattcattccaaagtgctttgatcctgccttgtgtatgcatggtttaaggttggttagttaattggctgaaatttgtgcatgggatctgggctccccstctctggccatctcctttctggaatatctccctcactttctggtggaaatgattatttcaaactctgttctccagttctttagaacagaaaaagtatgggttttctatcaaggatttacttattaatgctgactgcaatctgcattgaggctaaaataattgagaacacaggaaaattaccccatgccattctttcttccaaattgattccctcctataatctttcagccttgctcaatctgcactgcctccaggctactattcaaaaaatttatccaggtttcgagtggttatttgtggggaaattggcctggcaggagcatctttggccatgcctgaagtggaacacatacaaaatgcttttttgcattgtctttggctgaa

SEQ ID NO: 765980 - DNA, 625 bp, Homo sapiens
  misc_feature 625: n = A,T,C or G
acaaaaagaaaagacaactaggctaggcatagtgactcacacctgtaatcgcagcactttgggaggacaagatgggaggatcgcttgagcccaggaattcaagaccagcctgagcaagatggtgaaaccagtctctaccaaaaatacaaaaaaaattagtcaggtgtggtgatgcacacctgcggccccagctacccgggaggctgatggtgacagcatcgcttcagcacaggaggtggaggttccaatgagccaggactgtgctactatactccagcctgggtgacaaagtgagacctcttctccaagaaacaaaatcaaaggccaggggtggtggctcatgcctgtaatcctagcactttgggaggccaaggtgggcggatcacaaggtcaggagttcaagaccagcatggccaatatggtgaaaccctgtctctactaaaaatacaaaaattagcaggacgtggtggtgcrcacctgtaatcccagctacttgggaggcagaagcacaagaatcgcttgaacccgggaggcagaggttgcagtgggccaagatcatgccactgtactccagcctgggtgactgagtgagactctgtctcaaaaaaaataaaaaataaaaaan

SEQ ID NO: 765981 - DNA, 625 bp, Homo sapiens
atttgtaatatcaaaaagagagcaaaacactcaacatctgtcaataacatgtggtttaaataaattatgggatgtttatatagtggtatacaataaatctattgaaacaataatatttataaaacatttagacatccacaatatcattatattaaaaaaccaagtagaaagattgttttaaatttttgtaaaaatggaaacaaaattaaaatcaataatgttcttttgtatagaatgggagtataggaagatgtttgcgtcgtatttctgcaccacttgaatttttgtgagcatgaattttatgtttcttaaaaaatgctatttttaacttggccccttagactcatgtgtartaagaattactggggaatttctgcgtttcatgaatttctagccatggtatacctacaccaaaaagtcattttcactggatgtcaaatactaggggaattacttctgtggcttcctttttcacctttattttttattattatttttttgagatggcgtttcactcttgttgcccaggctggagcacagtgatgagatcttggctcactgcaatcttcgcctcctgggttcaagcgattctcctgtctcagcctcccaagtagctgggattaca

SEQ ID NO: 765982 - DNA, 625 bp, Homo sapiens
tgagaattttatgttttatgcaagttccaaaattcaggcttgttttttgatgtatgcagtttcccattcttattcacagggaaataaagttaattgagcacgataagctaaatataactaaacaaatttccagacagttcacctaaatgcctccaatcatataaaggcaccatcagtgagaaatggctacagggagagagggtttacgatcatagctaaagggtggagacagctgtgagctctggaaggtgacatacctgtccttctagtttagcatcaaggataactctgtgctagattacaygaaccatccagcctctgggtatcccagtcatattcccaatatcaaccaaagttaataatttagtgtacatttactatgggtcaagtacttcgatattcattctctcatgtaaccctcatcacttgggaaacagaggaaaagaggggttaaggtctcacagctggtaagtggctgagacttgggcctggctttatataaatccaaaaccgatgctataatgaacatctttttaaaatctcatatttttaaatatacaatttcccaccttttaaatgtgggggaaagaagaatactttatttctagcactataatgaggagtt

SEQ ID NO: 765983 - DNA, 534 bp, Homo sapiens
actttgcaaagcaagagttacagtgttctcctgggggaaaagatgggcagtgggcttttatttttttttttctcagctattcaccactatgagagaatttttgaaaagaacaaaatggaatacattgtaagtaattcagaatgcctccagactttacaattctccctagagaaaaaactcaaacaatttgaagtcttcacaaactgcatccaaatcctttttctaacttcattaagctccagtacttaaaaatcgttcatagcaagtactttaattagagacgagccagtgcagaatagctggacaggcagtgcgtccacccagcgagcagactgcccaggggggacagtctccacctcactgatgcaactggtgaagggacagacaggggcgtggawacatttcttccttccccaaaacaaaatgggaggatgcgtgtgggttggtgggttacagagaaagattcaaacatcattctggcctgatcagtattctggcagtttaccattatacatacagaaaaagaacagaaag

SEQ ID NO: 765984 - DNA, 595 bp, Homo sapiens
aattaccctccagtcccagagaaaatagtcatctttctttacaatgctgctctcaacttctatttatatcccttgatgtcatccagtatcctttttgaccttgttttttcaattgcttcctctctatattttattaacttatgtaagagtagtaatccactgctggcaaaatgttttcacatatactgagtcytcataacaatcctaaagttagaaataataccagccccctatattcaaaatcagtcttaactgtacctttcctatcgtccaagctctgtggataccagaaaccaataaagaggaaattcagttattttcttgcccctcattaccatttccaaaccccctttggggttcttgtctggtagaatcactattgtttcctcctttttttgcactatcatctgccaaccacaggggcttaaggtatacatatggcctagagtcgtctattccatctctagtttcacaagtgttttgggtgatgtcaaagtctatgatcaaggcttattcagccgcctatctttttgtccaatgaccttccccaaatccacttacacagccacaccctggaacttatcacaactcatat

SEQ ID NO: 765985 - DNA, 595 bp, Homo sapiens
aattaccctccagtcccagagaaaatagtcatctttctttacaatgctgctctcaacttctatttatatcccttgatgtcatccagtatcctttttgaccttgttttttcaattgcttcctctctatattttattaacttatgtaagagtagtaatccactgctggcaaaatgttttcacatatactgagtcctcataacaatcctaaagttagaaataataccagccccctatattcaaaatcagtcttaactgtacctttcctatcgtccaagctctgtggataccagaaaccaataaagaggaaattcagttattttcttgcccctcattaccatttccaaaccccctttgkggttcttgtctggtagaatcactattgtttcctcctttttttgcactatcatctgccaaccacaggggcttaaggtatacatatggcctagagtcgtctattccatctctagtttcacaagtgttttgggtgatgtcaaagtctatgatcaaggcttattcagccgcctatctttttgtccaatgaccttccccaaatccacttacacagccacaccctggaacttatcacaactcatat

SEQ ID NO: 765986 - DNA, 466 bp, Homo sapiens
ggtgagccgagattgcgccattgcactccatcctaggcaacaagggcaagacactgtctcaaaaaacaaaacaaaacaaacaaacaaaaaaggcatagagtggcaaaatggatgaaaaacaaaatccattgttctattgcttacaagaaacatcttgcacctaaaattgcacacatagactaaaaataaagggatagaaaagcatattccaggccaatagaaaccactaaaagagcagaagtagctatacttrtatcagacaaaatatattacaatatacattatatataagcatattatatatcataataatatgaaaatatattatattgtatgttatttcaagactaaaactataagaagagacaaggtcactacataataataaagggaccaatttagcaagaggacgtaaccattcttaatatatatgcacccaacatggagcactcagatatagaaagca

SEQ ID NO: 765987 - DNA, 511 bp, Homo sapiens
ttcttttgagtatatcattagaattagttttttttagttgtatagcaggcatatatttagctttattagatactgccagttttctaaagtgcttataaacattttatagtcccaccagtaatatgtgagcatcccaaatattttrtatatttaccaacacttggttttgtcagtttttaccattctggttggtggcagtattcactgtgattcaacttgcagttttctttatgactaacgatgttgagtatcttcccatgtttacagccaatttgtatatctttctttccccttttgtgagaaatcttttgcctatgctgacattttttgactcctcttggactggacatcatcccagtagattattttccattcttgtggtggctgttcttctccctttcaggttttcaacatccacacagatttaaagtttcctaaacttaaatgtgcataggaatttcttagggtagaagggaagtttattgaaataaagaatcctaagtcccaccat

SEQ ID NO: 765988 - DNA, 557 bp, Homo sapiens
gggagctgtccgtctgtattaattataccaggggtcagccaagtgcaacctgtggctaaatttggactgctatgcatacatgtatggcttgtgagctaacaaagttttttatggttttaaatacttgagccaggtgcggtgctcacacctgtaatcccatcactttgggaggccgaggcgggcgaatcacctgagtttgggagttcgagaccagcctggccaacatggtgaaaccccgtctctattaaaaatacaaaaattagctgggtgtggtggtgcatgcctgtartcccagctactcaggaggctgaggcaggagaatcatttgaacctgggaggcggaggttgcagtgagccgagatcatgccattgcactctagcctgggcaacagagtgagactctgtctcaaaaaataaaataaataaatacttgaaaaaagcaaaagaatagcatttaataaaaattatataagattcaaatttcacggtccataagtgaagttttattggaatacactcatgcccacttgtttacatattgtctgtgactgctttca

SEQ ID NO: 765989 - DNA, 481 bp, Homo sapiens
tccaccctgctgtcaagggactcagagtcctccaaaagtaagtaccaaggctgaagaggaaaaaaagactatttggaaatagactggatattttatccactcagatgggtggtggagacatttcgatagctgttagatgtctttgcagtgactcatttaacatttagtccacagccttcaaaagggcttcacagggcaaatgaagatcttaaaaaccttctccatgaatattggtaaaaagcattaggcctaatatttagtacatagccttaacttgtcccatttaccagggacaatagggaaaaaatatgaaatggagaaaatatgagagataactgttayatataaaacagtgactttgtattactatgtgtttctgattcatggctaagattttagaatgatagctagaagatctcttttgatatttgcctgtatgtttatgtatgtctctccatctgtgtgaaatttttctgcctct

SEQ ID NO: 765990 - DNA, 485 bp, Homo sapiens
ccaccaatgcatgccagcccaccagcactctccctctactgcagcctccctcatgccactttgacagggctcaattgcccatggccacagccctgctgctttgtgggcatgtgcacacagacctcacctcccctacctatccagtatgcgtgtgcaggtgcaacccactgtgcaaattttgccagtgtaagtggagcygaatccaccatcccttacgccacactgccattgcagacccaaatgggcacatggagaccagcaaccccatcccctctgtgccaacattgccaccattgtgaacacacatatgaatgccaaggcctggtgcctctctctgtgccaccactagcatgaacacatgtacagatgccaaaaactgccaccactgcaaacacacgctcagaggctggcagccctgtgcctgccagcagtgtgatatagtgccccacttctactggtgtgagtgtgagcaagaacactgaaac

SEQ ID NO: 765991 - DNA, 591 bp, Homo sapiens
aggtctcgtggctcacacctgtaatcctagcactttgggaggtcaaggcaagaggatagcttgagtccaggagttcgagaccagcctgggcaacatagcaagacatcatctctacaaaaaattttaatagttagctgaccayggtggcctgcacccatagtcctagcacctcaggaggctgagatgggaaagatcaactgagtccgggatgtcaaggctgcagtgagccatgatcgcaccactgcaccccagactgggtgacacagtgagactctgtttcaaaaaaataaaaataaaaaatcccagccgggcacagtggctcactcctgtaattctggcatctttgggaggctgaggtgggcagattgcttgagcccagcagttctagaccagcctgggcaacgtggtgaaaccttatctcttattcatttatttttaaaaactagaaaggtgtcttcctatgttgaccaggctggagttcagtggctattaacaggcatgatcagggtgcactgtggcctcaaacacctggccttaagtgatcctcccatttcagcctcccaagtagctgggactataggcaagtaccac

SEQ ID NO: 765992 - DNA, 591 bp, Homo sapiens
aggtctcgtggctcacacctgtaatcctagcactttgggaggtcaaggcaagaggatagcttgagtccaggagttcgagaccagcctgggcaacatagcaagacatcatctctacaaaaaattttaatagttagctgaccatggtggcctgcacccatagtcctagcacctcaggaggctgagatgggaaagatcaactgagtccgggatgtcaaggctgcagtgagccrtgatcgcaccactgcaccccagactgggtgacacagtgagactctgtttcaaaaaaataaaaataaaaaatcccagccgggcacagtggctcactcctgtaattctggcatctttgggaggctgaggtgggcagattgcttgagcccagcagttctagaccagcctgggcaacgtggtgaaaccttatctcttattcatttatttttaaaaactagaaaggtgtcttcctatgttgaccaggctggagttcagtggctattaacaggcatgatcagggtgcactgtggcctcaaacacctggccttaagtgatcctcccatttcagcctcccaagtagctgggactataggcaagtaccac

SEQ ID NO: 765993 - DNA, 423 bp, Homo sapiens
tacgttgtaggagtaggataaggattaagtgaggctgtttacatattacaccttctataaatcataggccttccataaaccttaggttttctccatttttatacagtccactagttcaaagtactttcacagataatggcctgtgcctgtgaaactttagtttactcctttattcctccccacacggttggagtttggggcatggacttttctgtgggttcaagctcagtgattttttggtgggacagagtgcctgagtcratgagcatcttcccttagtttaatgcagcatctgatgagattcagtcctgtgtgtcctctagctcactgagggtgttttggagggacagggctcaggtaggactcggagcttgaagactcactgcaatggagagcctcaaaggagtaaggatccatgattca

SEQ ID NO: 765994 - DNA, 622 bp, Homo sapiens
ctctatgtcactgtgaaaggcacctgtctgactatgacaaatgctgttcccatcactttctgcctcgttgacttggaatccctgtttggatttcttctctaggaagtgcttccctggacccacagggtggccccacagcatctgtgctcactcaacacactgtgcagtacgtgtgggccgattcacccacgcctctgcctggactgggagcttcctgaggacagggaccttgccctgttcacctaggtggccctgtcacctagtacaggacccagaacacagcaggtgctctgtgaaagcttttgaaatgacaagacaaatgtgcctcattcggasagctggccccctagcacccccatctacttagtcaggagtgtgtgatgaaactggagaaaggctctccgggggcttaggggaaagaagaaaaagggaataaaataaatgggtgttatttgtcagatctaagagtatcctatctgtggatgcgattatggactcaacttcctttgtgttgagggtgggatcattcagtttgtgtttcagggtgtggcccaaagatatgaacagtctttttcactgtgagacacaaactgtgatctgtgctatgagtgtaaagtgcaca

SEQ ID NO: 765995 - DNA, 585 bp, Homo sapiens
ttcttcacagaactagaaaaaaactattttaaaattcatatggaaccaaaagagcccgaatagccaaggcaacactaagcaaaaagaacaaagctggaggcctcatgctacccgacttcaaactataaatacagggctacagtaaccaaaacagcatggtgctggtacaaaaacagacacatagaccaatggaacagaacagagaacccggaaataaggctgcacacctacaactakctgatctttgacaaagtaggcagaaacaagcaatggggaaagaactccctattcaataaatggtgctgggaaaactggttagccatatgctgaagatcgaaactggacccttcctcataccatatacaaaaattaagtcaagatggattaaagacttaattgcaaagctataaaaaccctggaagacaacttaggcaataccattctggacataagaatgggcaaacatttcctgacaaagatgccaaaagcaattacaacaaaagcaaaaattttaaatgggatctaattaaactaaagagcttctgcgcagcaaaagaacaagacagtgaagaacagagtgaacag

SEQ ID NO: 765996 - DNA, 591 bp, Homo sapiens
tgagaatgatagagaatgaatctctctgaggacaaccagggcactgttggcagaagacagggccaaccctggagggccaccagcgtatttcctccagagctgcatcctccttaccttgaactgaccggcttacccccgaagtgtgtcaagtctggacactgctcaggccttagattgtgaaactccctgccgcayttgccactgctgatccttcttgaaattctctactttaatggttcttgaccctgtctgtcttctgactacgttaatgtggagaattttgcacttatcgatagccagggggttcagatatgctgggtatgagactggggtaggggtcaggtgtctgtttgcttacagagagtcctgggtgaccttgatgcaagtagctccaactaggaaccactaggcttctgtggcatcaccctctcctggtccactgtgcaggtatttactgagtatgtgagggacactcaggcaggtgctaagcatcagagatgaacaaaacaaggtcattgtgtgtccggagttggttccttccggtgggtttgtggtctccctgacttcaagaatgaagctgcggaccttcgc

SEQ ID NO: 765997 - DNA, 588 bp, Homo sapiens
gattttgtatctgctggtgtgtgaccagttttttctctctggaaactgttgggatcttctgtttgtccctagtgttctgaaatttcaaatgccatgacttgggggtttagaagaaaaagcaactattatattgggcactcagtaaaccccttcaatctagaaactcattcctgggggatatttcttagattccactgatatattttcatatctcagcttcctttcttttcttcttctggcaattgtacttttcagtttttggacctcccggactagtctacttccccccctttccccctttctcccttccggactcgttctgctttttggaagatttttytcaactttattttctaatccttctgtcagtattttcaaaacttctgctattgtgttttttgttttctagaactatttaaaaaatcacaccctgttttatggatactgtaattctgaggtacttggtatatatatatattttaattttcttcttgtatagtctctgtgtcctctgatttgcttttctggtttaacttggtctctatcttccacgttagtagctttcctcagatatctggttgtctgctt

SEQ ID NO: 765998 - DNA, 537 bp, Homo sapiens
cctttatgggaaacagtatggagatttcttaaagacctaaaaatagaattaacctttgatctagcaatcccattactatgtatacatccaaaaggaaagaaatcattatatcaaaaacaaaaacaaaaaaaaccactcgtatgtttactgcagcactagtcacaatagcaatgatatggaattaaccaaagtgtccatcaatggaggactggataacaaaaatgtgtatwtatctacatctatatctcaccttgaatactacttagccataacaaagaatgaaataatgtcttttgcagcaagatggatagaactggaggccacgtgtataagtgaaataactcagaaacagaaattcaagtatcacatgttctcactttaagtgggagctaaacaatgtgtatgcatgagcatacagaatagaatgacactggtgactataaaaagtgtgagggtgggaggagatgagggttggaaaattacctattgggtacaatattcactatttgggtgatgatgggtacactaaaagcccag

SEQ ID NO: 765999 - DNA, 537 bp, Homo sapiens
cctttatgggaaacagtatggagatttcttaaagacctaaaaatagaattaacctttgatctagcaatcccattactatgtatacatccaaaaggaaagaaatcattatatcaaaaacaaaaacaaaaaaaaccactcgtatgtttactgcagcactagtcacaatagcaatgatatggaattaaccaaagtgtccatcaatggaggactggataacaaaaatgtgtatatatctacatctatatctcaccttgaatactacttagccataacaaagaatgaaataatgtcttttgcagcaagatggatagaactggaggccacgtstataagtgaaataactcagaaacagaaattcaagtatcacatgttctcactttaagtgggagctaaacaatgtgtatgcatgagcatacagaatagaatgacactggtgactataaaaagtgtgagggtgggaggagatgagggttggaaaattacctattgggtacaatattcactatttgggtgatgatgggtacactaaaagcccag

SEQ ID NO: 766000 - DNA, 643 bp, Homo sapiens
agttagttgagggtttttaacatgacggaatgttgacttttatcaagacttttctgtatctactgagatgatcatgtggtttttatctttagttctgtttgtgtgatgaatcacatttactgatttgcatatgttgaaccaaccttttatcccagggataaagcctacttgatcctggtggattagctttttgatgtgctgctggatttggtttactaacattttgttgaggatttttgcatatatgttcatcaaggttgagaacagtgtctcacacctatagttataatctcagcactttgggaggccaaggcaggaggcttaagcccaggagtttgagaccagcctggacaacatagtgagatcccatctctacaaaaagtaaaaaatttcctttgtgtggtggcacacacctgtacacgcagctacttgagaagctgaggcaggaagattgctygagcccgggaggttaaggttgcattcagctgtgtttgtgccaccacacttcagcttgggcaacaaagtgtcggatctcagtgccattttccccagacctagggcttatataccataaggaaagagtgactcagagagacgtatagcacaatttaaatataataacatcaagatcattttgacctaa

SEQ ID NO: 766001 - DNA, 426 bp, Homo sapiens
cagttctggaagctagaaacttaaaataaggtgtcagaaaagccatgctccctctgaaacctataggggagaatcctttgcccctttctagcttttggtggtcgctgtcagtccatgatgggccttggctcacaggtttgtcattgcaatctctgcttctattgtcatatggttttcyccctgcgtgtcttcacattgtcgtcttataaagacactagtcgtattgtattaagacctaccttaataacctcacattagcttgattacatttgcaaagatgcaatttccaaataaggtcacactaacagatacctggagttaagacttcacagtatcatttgggggtcacaattcaacccataacatgggataagaaaattgcccttgcctcagggtctgtttctggagaactcaccctaacacagt

SEQ ID NO: 766002 - DNA, 576 bp, Homo sapiens
gttttttaaaggcctggccagaggaaaacgcttacagccagcctttcatgttctgtcaggcctctgcatgttcgaagcctctgttcttgagaacaaagaaacacaatccactcactgccaagcagctgtgctgggctgtgcccgggagggctttctccgctgcttgggcagaatgtgattgctcagtggtggccrggaaacatctcctgggacctccacagtccatgatccttcctgaatgcctttgacctcaaggtctcagagatgcttaaatgaatggacaacacacctggagaccagacgggctgcctcagtgtctggcttgtttttataaatcttggtgtcccgggacttagaaatgagctctgacctgtagaatagtgagcccccagggactgcgcttgttttgctgggcctgtcacctcctggggatgagggacagatggaggaactgacttctcagagggggaaggggtgttgccatgccccttctaggtccctttctggtctgaaggttgttactcctgttagccctagcctcggggagggagccccaggagccaagaccctgtgtta

SEQ ID NO: 766003 - DNA, 619 bp, Homo sapiens
aaatttaaaaattagctgcgcatagtgatgcatgcctatagtctcagctactcaagaggctgaagcaggaggatcacttaagcctaggagttggaggctccaatgagctatgatgacactactgcactccagcctgggtggcagagtgagaccctgtctgtattttttttttttaaaagaatccagcacagtggctcatgcctgtaatcccagaactttgggaggccgaggtgggcagatcacttgaggccaggagttcaagaccagcctggccaacatgacgaaaccctgtctctactaaaaatacaaaaaattagccaggcgtggtggcgcgtgcctataatcccaactactcgagaggctgaggcatgagaatcacttgaacctgggaggtggaggttgcagtgggccaagatcatgccactgcattccckcctgggggataaagcaagactctgtctccaataaataaataagaaaaagaagaggcaaaaggaatttcagaggacagaacgagcacatctgctgggtgaccaggaaggcttcccaaagggtgggccttttgaattgagcctctgggggtggttgcaacaagcagagaggaggaggtggagggaac

SEQ ID NO: 766004 - DNA, 535 bp, Homo sapiens
cggtaggaagtttggcataatgtgtcacatcaattataaatcacagatgattttacttgatatagttagctagagataatccacagggggtaattttatttattattgttttaaatgctattaaattttgtttttatctagcctgctaattttctgaatgaagctgtaattggcatttgattgatttggctgtgtccccacccaaatctcatcttgaattctcatgtgttgtgggaggaasctggtgggaagtaattgaatcatggagcaggtctttcccatgtggttctcatgataataagtctcacaagatctgatggttttaaaaatgggactttccctgcatgagctctctctctttgccggcccccatccatgtaagatgtgacttgcccctccttgccttccaccatgactgtgaggcctccccagccatatggaactgtaagtccattaaatctcttttttttgcaaattgcccagtcttgggtatgtctttaccagcagcgtgaaaatggacttatacagcatttac

SEQ ID NO: 766005 - DNA, 712 bp, Homo sapiens
ttgtttgcatacacttaaatgggatccacgttctgcatcatttgattgataatcaagtgaagatcctgctgaattccttttgcatatgcagaatttagattaaatttcaaaacaacacaaatacaattctcaagtcttagattctgaattaatggggttttatcctaataagacacctggggtccttgtatagtatcacagtcatagaatgatattaaagaatactgagtttcttaggctgggtgcagtggctcatgcctgtaatcccagcactttgggaggccaaggcaggcggatcacctgagctcagggattgaagaccagactggccatcatggcaaaaccccgtctctactgaaaatacaaaaaatttagccaagcctggtggtgtgtgcctgtaatccmagctactcagaaggctgaggcaagagaatcgcttgaatctgggaggtggaggttgcaatgagccaagatggagccactgcactccagcctgggtgacagagtgactctgtctccagaggaaaaaaaaaaaaaggataccaaatcctcttacttcatgcaaataggagtatgtaatagactagaaaaagtgtttagaaaatagaaaggaattatattatcagtgtctctgaataagttttcagaagccaactgttttctggttgaaactcttattctctgctccccctggtggtgctacataggccat

SEQ ID NO: 766006 - DNA, 625 bp, Homo sapiens
ggagatgaggagaggtggcagattcaagactcattttagaggtaggatcagcaggacttgactggtcggtgagggcaaaagaaaagggtgggccgggcacggtgggtcacgtctataatcccaacactttgggaggccaaggtgggcagatcatgaggtcaggagttcgagaccagcctggccaacgtcgtaaaaccctgtctctagtacaaatgaaaaaattagctgggcatggtggtacacacctataatcccagctactcgggagaactgaggcaggagaattgcttgaacccgggaggtggaggttgcagtgagccaagattgcgccactgcactccagcctgggcaacagagcaagactctgtcttaaaaaaataataataataatgcacctcagagtcaccctgccctgtcgtccagggaaaagtgagacagggatgggagggcrtccataaaggctgtgtcaccaagcagattgccaccgtgagcagttgttgcttagtacaaccgaggaagcttttaaagggagccggtgtaaaacacgcacctcaaagtcaccctgccctggggtccaaggagctgcagtatgtctaggccagcttctgtcagtcattgactgaga

SEQ ID NO: 766007 - DNA, 625 bp, Homo sapiens
ggagatgaggagaggtggcagattcaagactcattttagaggtaggatcagcaggacttgactggtcggtgagggcaaaagaaaagggtgggccgggcacggtgggtcacgtctataatcccaacactttgggaggccaaggtgggcagatcatgaggtcaggagttcgagaccagcctggccaacgtcgtaaaaccctgtctctagtacaaatgaaaaaattagctgggcatggtggtacacacctataatcccagctactcgggagaactgaggcaggagaattgcttgaacccgggaggtggaggttgcagtgagccaagattgcgccactgcactccagcctgggcaacagagcaagactctgtcttaaaaaaataataataataatgcacctcagagtcaccctgccctgtcgtccagggaaaagtgagacagggatgggagggcgtccataaaggctgtgtcaycaagcagattgccaccgtgagcagttgttgcttagtacaaccgaggaagcttttaaagggagccggtgtaaaacacgcacctcaaagtcaccctgccctggggtccaaggagctgcagtatgtctaggccagcttctgtcagtcattgactgaga

SEQ ID NO: 766008 - DNA, 460 bp, Homo sapiens
gcttgtagtttaataaaagttgtctttaaaattacatggatgggtatgaaaccaattttgctcattttttgggtttttctttttcttttttttttttaagagacagagtctcgctctgccgcccaagctgcagtgyagtggcgcaatcttgggtcatggtaacctacaactcctgggttcaatcgattctactgcctcagcctcccgagtagctgggaccacaggtgtgcaacaccactcctggctaattatttttgtatttttagtagagacggggtttcaccatgttgctcaggctggtcttgaacacctgacctcaagtgatcaacctgcctcggcctcctaaagtgctgggattataggcatgaaccaccgcacccagactaaaattgttttttagggaaacagggtctcactctgttacccagactggagtgcagtggggctggcacaaccgctg

SEQ ID NO: 766009 - DNA, 638 bp, Homo sapiens
tgagggagttactgacagatccatcattctggtaggtttcttccagtggcaataccttgaagcagtttaactacagtgttgttatccctgtctaggcattgcagtaaaaggaaatttattagaagttttaaaacaagagtgaccatttctaaattttagaatgtccaaataatgggaggcaggagactaagtcagcatggtataggatgyctggaaaatctgtaagtctagcaattgtaatgaccaaggcaattgtgaagtaaaatctataagtgtagcaattgtaatgaccaaggcaattataatgaccaggtaaatctatgggttaagcattcagtaaggcacggaatagacaggaaggtatctcacctttttatgtaaaataattataacaaaaattcctattatgctcaaagtaactattgtagttgtcaagaggacatgtgttttgtctaattttctttaagtttgttatttatatgatatttttcttcaaaagatatttgaggcccatcaaagatgtacttatccattcagatagggttggcctttctacatttcttgatagcactagagtctggcggggtgggttttatatggctgtggtgaatccagggtctaagtccttcacccgaaca

SEQ ID NO: 766010 - DNA, 506 bp, Homo sapiens
taacaggcaggggttagaaccatttggaggggtcagaagaagacaggagaatgttaaaatgtttggaacttcctagggagttggacggctcagaagacaagatgtgggaaagtttggcacttcctagaggcttgttgaatggctttgaccaaaatactcacagtgatatggacaatgaagtccaggatgggktggtcacagatgaagatgaggtgaggaacttgttggaaactggagtaaaggtcattcctgctatgcaaagagactggtggcatattgccctgccttagagatctgtggaactttgaacttgagagagatgatttagggtatctggcagaataaacttctaagtggcaaagagctcaagaggaagcagagcataaaagtttggaaaatgtgcagcttgtaaatgcaatagaaaataaaacttcatttttctggggagaaattcaagcctgctgcagaaatttgcaaaaataataaggagccaaagttaatcacca

SEQ ID NO: 766011 - DNA, 506 bp, Homo sapiens
taacaggcaggggttagaaccatttggaggggtcagaagaagacaggagaatgttaaaatgtttggaacttcctagggagttggacggctcagaagacaagatgtgggaaagtttggcacttcctagaggcttgttgaatggctttgaccaaaatactcacagtgatatggacaatgaagtccaggatgggttggtcacagatgaagatgaggtgaggaacttgttkgaaactggagtaaaggtcattcctgctatgcaaagagactggtggcatattgccctgccttagagatctgtggaactttgaacttgagagagatgatttagggtatctggcagaataaacttctaagtggcaaagagctcaagaggaagcagagcataaaagtttggaaaatgtgcagcttgtaaatgcaatagaaaataaaacttcatttttctggggagaaattcaagcctgctgcagaaatttgcaaaaataataaggagccaaagttaatcacca

SEQ ID NO: 766012 - DNA, 622 bp, Homo sapiens
tagcttaagatccagatggaatactaccatgtggaataacgtatgcattatcaccatgttaaaaacagaaagaaacacaacgatacagaaaatatattcaaaaaaataatgacagaaaactttcaacaactgggaaagaaatagaaacccacacccagaaatctsaaaggaaatcaaataagtttaatgaaagatagtcactttaagacataacacaatcaaattatcaaaagttatagacgaagtattgaaaaaagccaatgaaaagtgaatggttacataaaatggaatttccacaagactatcagtggattactcaacagaaaccttgcaggccataaggaagtggaatgatatactcaaaattctgaaagaaaacaactgccaaggaataattctagattccactattctgtcttaaaaacaaaggagtgataaaggctttctgagattgaaaaaaagctgagagagcataaggacactttcctgccttacaagaaacgttaaagggagttcttgaaggtgaaagaagaggatgctaattagtaacatgaagatgttaaagtataaaacttactagtaaaagtaagcacaatatgaaattcaaacactctaatactgt

SEQ ID NO: 766013 - DNA, 622 bp, Homo sapiens
tagcttaagatccagatggaatactaccatgtggaataacgtatgcattatcaccatgttaaaaacagaaagaaacacaacgatacagaaaatatattcaaaaaaataatgacagaaaactttcaacaactgggaaagaaatagaaacccacacccagaaatctgaaaggaaatcaaataagtttaatgaaagatagtcactttaagacataacacaatcaaattatcaaaagttatagacsaagtattgaaaaaagccaatgaaaagtgaatggttacataaaatggaatttccacaagactatcagtggattactcaacagaaaccttgcaggccataaggaagtggaatgatatactcaaaattctgaaagaaaacaactgccaaggaataattctagattccactattctgtcttaaaaacaaaggagtgataaaggctttctgagattgaaaaaaagctgagagagcataaggacactttcctgccttacaagaaacgttaaagggagttcttgaaggtgaaagaagaggatgctaattagtaacatgaagatgttaaagtataaaacttactagtaaaagtaagcacaatatgaaattcaaacactctaatactgt

SEQ ID NO: 766014 - DNA, 613 bp, Homo sapiens
cattatatcgttctattttttcaggatcctgaagtctcaagctctttcttttatctgttttattttaatttgaagaattcctttagttatctttaggcataggtctactggagacaaattctcttggtttccctttctctgagaatgtctatatttacccctttacttgtaaaagatcgtgtcactggatatcaaatttggagttgacagttctttgaacacttgaaaactgtgccacatggwtatagatgaaaaacttaccatcatttgaattgttgatcccctcaaggaaaagcatagtttttgtctagttgctttcaaggtatttttttctttttttaaagtagttttattttaatgtatattggtataaattccaatgtttttatcctctttggagttcactcagcttcttaaatataagtttatgccttattgtcaaaatgggaagttttcaggcatccttttatttattcatttttccagcccaatatcctttctcttctttttctgcatctgcattatttgttgttgtatttttctgaatgtctcagttcagttttttgttttcagtctattttcagagtgggtaatttatattgctgtatgttca

SEQ ID NO: 766015 - DNA, 609 bp, Homo sapiens
atcttaatcaaacaaaagcagcaatgataagttctaaaatgcagggatcctaaaatgacaactgatgtaatgaatcattgataatacacccctaattctcatacattaaacataaaacctcattttcacatcgattaccattttaagtttatttaaatcaatatgatgtttttacatagtcggtttggacagtgttttgagaaataattcctgaaccatcatataacattctacttgaaaacctgaaagtctatgaagatttgcatactacttaatgttttatgtttactgttttttattttcagatccgtgtgtaatatcccgagaaattatggaaaattataacatagcattaaggtggacagccaaacagaagctttatttgagaacaggtgaatcagctgaatttgtgtgtaaacgkggatatcgtctttcatcacgttctcacacattgcgtacaacatgttgggatgggaaactggagtatccaacttgtgcaaaaagatagaatcaatcataaaatgcacacctttattcagaactttagtattaaatcagttcttaatttaatttttaagtattgttttactcctttttattcatacgtaa

SEQ ID NO: 766016 - DNA, 609 bp, Homo sapiens
atcttaatcaaacaaaagcagcaatgataagttctaaaatgcagggatcctaaaatgacaactgatgtaatgaatcattgataatacacccctaattctcatacattaaacataaaacctcattttcacatcgattaccattttaagtttatttaaatcaatatgatgtttttacatagtcggtttggacagtgttttgagaaataattcctgaaccatcatataacattctacttgaaaacctgaaagtctatgaagatttgcatactacttaatgttttatgtttactgttttttattttcagatccgtgtgtaatatcccgagaaattatggaaaattataacatagcattaaggtggacagccaaacagaagctttatttgagaacaggtgaatcagctgaatttgtgtgtaaacgtggatatcgtctttcatcacgttctcacacattgcgwacaacatgttgggatgggaaactggagtatccaacttgtgcaaaaagatagaatcaatcataaaatgcacacctttattcagaactttagtattaaatcagttcttaatttaatttttaagtattgttttactcctttttattcatacgtaa

SEQ ID NO: 766017 - DNA, 634 bp, Homo sapiens
gccactataagaaattaccataaactggctagtttataaaaaatagaaatttatttcatacagttttagaggctgagattttccagcttaagataccaactgatttgatgtcttgtaagggcttgctccctgttttggtgccttcccactatggtgccttcctactatgtccttacaatgtggaaggggcaagggagttccatgactcttctttgtaaaaagactaatccartgtattagggtggaatcctcatgacctaatcacctaaaaagtccttacttcctgatactatcaccatagtgatgaggacgtaacacacatattttgaaagggtactactatgcagaccatagcacagcatagggataaacaaatatgttccatgtaaatggaaaccaaaagcaagcaggggggctatactaacattaactaaaattgaattttaagtcaaatctgtaaaaagaaacaaggaaggtcattatacaaaggagtcaattcacaaatagattataactattgcaaatatgtatgcactcaacatgggagcaatgaaacttataaagcaagcattaatacatctaaaggaagaaatagacaaaaatgcagtaatagtaggggacttcaataacccac

SEQ ID NO: 766018 - DNA, 634 bp, Homo sapiens
gccactataagaaattaccataaactggctagtttataaaaaatagaaatttatttcatacagttttagaggctgagattttccagcttaagataccaactgatttgatgtcttgtaagggcttgctccctgttttggtgccttcccactatggtgccttcctactatgtccttacaatgtggaaggggcaagggagttccatgactcttctttgtaaaaagactaatccaatgtattagggtggaatcctcatgacctaatcacctaaaaagtccttacttcctgatactatcaccatagtgatgaggacgtaacacacatattttgaaagggtactactatgcagaccatagcacagcatagggataaacaaatatgttccatgtaaatggaaaccaaaagmaagcaggggggctatactaacattaactaaaattgaattttaagtcaaatctgtaaaaagaaacaaggaaggtcattatacaaaggagtcaattcacaaatagattataactattgcaaatatgtatgcactcaacatgggagcaatgaaacttataaagcaagcattaatacatctaaaggaagaaatagacaaaaatgcagtaatagtaggggacttcaataacccac

SEQ ID NO: 766019 - DNA, 571 bp, Homo sapiens
atacagaaatcaataaaaacattggacttgaactctatattagaccaaatggacctatcagacctatatagaacattccatttgacaacagcagaataaacattcttctcaagcacacaaggtataatctccaatatagatcatatgtggggccacaaaacaagtcttaaaaaattttaaaaagattgaaattacataaatttttttaacattgtcatatgaaactagaaaacaatagcagaagaaatgttaggaaattcacaaatacatggaaattaaacaacatgatcctgaacaaccaatggggcaatgaagaaattcaaagggaaatttaaaaatatcttgagaaaaacaaaaatggaaaagcaacatwctaaaaaacatatggtatgcaacaaaagcagtataaagggatgtttagagatatgaatgactccatgaagatcctaataaagcaagtaactttgtatctcaggaaactagaaaatgaagaaaaaaattaacccaaagctactggaaagaaaaaaatagtaaggtacagaacagaaataaataaaacagactggaaaaa

SEQ ID NO: 766020 - DNA, 446 bp, Homo sapiens
caaaaactggaagcattccctttgaaaactgacacatgacagggatgtcctctctcaccactcctattcaacatagttttggaagttctggccggggatttccgtcaagagagagaaataaagggtattcaattaggaaaagaggaagtcaaattgtctctgtttgcagatgacatgattgtrtatttagaaaaccccatcgtctcagcccaaaatctccttaggctggtaagcaacttcagcaaagtctcaggatacaaagtcaatgtgcaaaaatcacaagctttcctacacaccaataacagacaagcagaaagccaaatcatgagtgaactctcactcacaattgctacaaggagaataaaatacctaggaatccaacttacaagggatgtgaaggacctcttcatggagaactatgatccactgctcaacgaaataaaaaa

SEQ ID NO: 766021 - DNA, 595 bp, Homo sapiens
agcagaaagccaaatcatgagtgaactctcactcacaattgctacaaggagaataaaatacctaggaatccaacttacaagggatgtgaaggacctcttcatggagaactatgatccactgctcaacgaaataaaaaaggacacaaacaaatggaagaacatttcatgctcatggataggaagaatcaatattgtgaaaatggccatactgcccaaggtgatttatagattcaatgccattcccatcaagctacyaatgtctttcttcacagaattggacaaaactactttaaagttcatatggaaccaaaaaagagccctcattaccaaagcaatcctaagcaaaaagaacaaagctggaggcttcacgctacctgacttcaaactatgctacagtaaccaaaacagcatggtacagcatggtaccggtaccaaaacagagatatagaccaatggaccagaacagaggcctcagaaataacaccacacatctacaaccatctgatctttgacaaacctgagaaaaacaagaaatggagaaaggatttcctatttcttaaatggtgttgggaaaactggctagccatatatagaa

SEQ ID NO: 766022 - DNA, 595 bp, Homo sapiens
agcagaaagccaaatcatgagtgaactctcactcacaattgctacaaggagaataaaatacctaggaatccaacttacaagggatgtgaaggacctcttcatggagaactatgatccactgctcaacgaaataaaaaaggacacaaacaaatggaagaacatttcatgctcatggataggaagaatcaatattgtgaaaatggccatactgcccaaggtgatttatagattcaatgccattcccatcaagctaccaatgtctttcttcacagaattggacwaaactactttaaagttcatatggaaccaaaaaagagccctcattaccaaagcaatcctaagcaaaaagaacaaagctggaggcttcacgctacctgacttcaaactatgctacagtaaccaaaacagcatggtacagcatggtaccggtaccaaaacagagatatagaccaatggaccagaacagaggcctcagaaataacaccacacatctacaaccatctgatctttgacaaacctgagaaaaacaagaaatggagaaaggatttcctatttcttaaatggtgttgggaaaactggctagccatatatagaa

SEQ ID NO: 766023 - DNA, 595 bp, Homo sapiens
agcagaaagccaaatcatgagtgaactctcactcacaattgctacaaggagaataaaatacctaggaatccaacttacaagggatgtgaaggacctcttcatggagaactatgatccactgctcaacgaaataaaaaaggacacaaacaaatggaagaacatttcatgctcatggataggaagaatcaatattgtgaaaatggccatactgcccaaggtgatttatagattcaatgccattcccatcaagctaccaatgtctttcttcacagaattggacaaaactactttaaagttcatatggaaccaaaaaagagccctcattaccaaagcaatcctaagcaaaaagaacaaagctggaggcttcamgctacctgacttcaaactatgctacagtaaccaaaacagcatggtacagcatggtaccggtaccaaaacagagatatagaccaatggaccagaacagaggcctcagaaataacaccacacatctacaaccatctgatctttgacaaacctgagaaaaacaagaaatggagaaaggatttcctatttcttaaatggtgttgggaaaactggctagccatatatagaa

SEQ ID NO: 766024 - DNA, 557 bp, Homo sapiens
aatgtatatgttcttttctaattagtaattcgaaaacaaatgtaaatggaccaattttactatctgaaagaaaaagaaatcatgttaaagatgatgcatatttataatatagcatttgtcataatcatgagttttctgatctattcttgcctactttcctattaatctcctccagcctctaaactacaatgttcagtttctattgtaaacagctttattttcaatacctacaaagtgcttgacacacaacaatatttattaggtggattaatgatagagttggtgcttatggcaggagaaaaagggacttttctttcaggggcttaggctattgttgaggacagttrctcctataatggtgtaggaagattcccattatctttcgtctcaattattccataattatcatgcggtttctataatggaatgttttgtaaattgcaaacaatacacacaaacaattttcagagtcccctttacttaaaaagtaaaagtcagctgtaactgaagatgagccttaatttaaagcaacagagcactaactaaaaaatagatat

SEQ ID NO: 766025 - DNA, 557 bp, Homo sapiens
aatgtatatgttcttttctaattagtaattcgaaaacaaatgtaaatggaccaattttactatctgaaagaaaaagaaatcatgttaaagatgatgcatatttataatatagcatttgtcataatcatgagttttctgatctattcttgcctactttcctattaatctcctccagcctctaaactacaatgttcagtttctattgtaaacagctttattttcaatacctacaaagtgcttgacacacaacaatatttattaggtggattaatgatagagttggtgcttatggcaggagaaaaagggacttttctttcaggggcttaggctattgttgaggacagttactcctataatggtgtaggaagattcccattatctttcgtctcaattattccataattatyatgcggtttctataatggaatgttttgtaaattgcaaacaatacacacaaacaattttcagagtcccctttacttaaaaagtaaaagtcagctgtaactgaagatgagccttaatttaaagcaacagagcactaactaaaaaatagatat

SEQ ID NO: 766026 - DNA, 588 bp, Homo sapiens
tatattgcacttgcttcattgatttatacactaatattcatgatttcctaccttcttaagttggaacttaggttagtgttttgagatatttcttcttttctaatataccatttaatgacatctcacaattctatggggcatagaattttggtggggttcaaatggataaatcttttattttctgtgtattaatggagacattcattgttattcatctggttaatattctgcggtggagggttcaatatgtcttcagtcacatatttggtgctttgccagcaacaagtgaaatttggggttcaggtgactcctgtcactctcagggcctctctacagggtacccagaattctctcatgctgattagaagctacaagacaccaaggcagaagctgctatttttttaaagcttacatccgtaactggcatagagatacttataccrtaacctattggtcagaaaagtcatgggttagcacaagttcaagatgatggggaaataggtcacttaatcagaggattttcaaattatttgtggacatctttaatctgcaaaacatagtaactatgatacattacatactaatatt

SEQ ID NO: 766027 - DNA, 362 bp, Homo sapiens
cactgtgcccagcccgttttttgtcttttgagacaaggtctctttctgtcacccaggctggagtctattggtgcaatcacggctcactgcatgcagccttgacctctctgggctcaggtgatcctcccacctcagcctcccgagtagctgggactacaggtgcatgccaccacgcctggctaatttttgttatttttagtagagattrggtttcaccatgttgtccaggctgatcttgaactcctgaactcaaggaatctgcccaccttggcctcttaaagtgctggggttacaggtgtgagccactccacctggcccataccacctttccaatggcataactcactacaggtatgctgccc

SEQ ID NO: 766028 - DNA, 575 bp, Homo sapiens
ttcttcatcctcagcttcttctgcttccatagggtcatattcatcttgattgttatcttcttcagtttcatcatcatctttagaatcatcttgtcttttatctgctttctataatttaaaatgccattattatttatttacttatatttagaagacggggttttgccatattgcccacgckggtctccaacccgtgggctcaagcgatccactggcctgggccttctgaagggctaggattataggcgtgagccaccacagccagtagttatattattattatattatcataacaattattatatattattacatatatatatggtttttttttttttgagatggagtctgctctgtcgcccagactggagtgcagtggcacaatttcccttcactgcaacctccacctcccaggttcaagtgatccacccacctcagcttcccaaagtgctgggattacaggtgtgagccactgtgcctggcttaaaatggttttaaattaagcaagaaatcccaccacacattaaattactaaaactgaaaaatagtaaatccactgaagttatttaaaagtt

SEQ ID NO: 766029 - DNA, 637 bp, Homo sapiens
gtccagctcacatacggtccacacataacatcttgcacacctccagatgtcataacacagcaggacagatgaattgggcaggactgcttaaaactgcccccaggaagtccctctgaaaacaagaactgacctgaattatttgggctgaattgggaggggccccaagtttatcagctgatgggagatgagaggacacattaagagtctttttttgttttttttttcctttttttagccaggtgcagtgacttacgcctataatcctgccattttgggaggctgaggtgggaggatcacttaagcccaggagttagagaccagcctgggtaatataatgagatcccatcgctacaaaaaatttaaaaatttgaaaattagcctggcttggtggtgtacatctgaggtcccagctatgtgaggctgaggtgggaggatcgttaagctggggaggtcgaggcmgcagtgaactgagatcatgccactgcactccagcctgggtgatacagcgagacccagtctcaaaaaacaagtctttaagagttaaaaaaatttttttggccaggcacacgtgctcatgcctataatctcagcactttgggagccaaggcgggaggatcacctgaggtcaggagttcaa

SEQ ID NO: 766030 - DNA, 474 bp, Homo sapiens
agctggtcatttgcagaactttgcccctctatctagaatggaaacttttcacttctgcactcagaggtaggcatcttcccttgatcacagcacactttctctcagagcctggatgagacttcacaacaaaactcacaagtagctgttacagagatgaaagctggtaaaggagatgaaacctccttgctgacctatgtgcaaatggaagtgagcttttttcacatgataggaaacatacaaagtaccttctccttcatgtcacattctttcaataaactgaagagaatgctgkgaggggaacttcaggattgagaaatagaccctccccccgacaaaaaaagataaaaagaccaaaagaaaaagaagaaaagattgcacatttgcaccctgtgcatattatctgtattggcaaatcaacgcagaacagcaagatggtcaaaacagaagttctaagtgctcagtgaaatcaggatt

SEQ ID NO: 766031 - DNA, 640 bp, Homo sapiens
tcttcatttaccatcaaaattggcaagggagtatcaagagacacccaggtggatcacatgagtactgaacatattccttcctgaccccagtgtatgacagcaactctctctactcgtgatgatcaaggttaattatccctgctagcatagtaatttctttctttgctcttggtgtcytgacatgcagagaccaaagtgatcaggcagcaactgcagctcaaggcttagtataatgtctccttctgaaagcacttccctttaggtattatagtccctaaacttgcaggtatgggaagcacaaattccccaagtcaataaaagtaatggcagtaagaccactcctgttttctttccttgggtcttggacccaggtattctaaatattaaagacagagaaccatataatggtcattggtttaggttatataactgcatcatgaagtatcctactttatgaaggatagggtcttatcttcacggtctatcatctccaagctggctgtaattgcactattccattattctatcaggccagtttggtggagcagtatgtgatataaccaatggctcccatggccctgtgtccactaccacactttctttagtctagagtgttccttggtccaatgtgatgttatgt

SEQ ID NO: 766032 - DNA, 562 bp, Homo sapiens
tacaacaagtagacaaaaaccagaatggatagaaaggacctaaatggcattaaaaaccacttgacataaataaaatttataaaacattcacctgagaaaagcagaatatacatttcttttacatgtatatgaaacattcaccaagatataccatattttaggctacaaaataagtttcaatatatttaagagggctgaaattaaacagagtatgttctctgactacaattaaattagatgagaaatatcagaaaaatatatgaaaaatgctaagtatttgtataaagcaaaacaaaatatcacttctatatatgtatggtcagaaataagccataacagaaatttaaaaatatttcgaattaagcaaatatatatatrtatatttaagatataccgaaatgtgtaggatgcaggtaacactgccattaggaagaacaaatatagctttaaaaagcttttgtgtagaaatgaaacaagttgcaaaatcaattatctgagctttcattttaaacatataaattagaaaataaattcaatgtaagcagaagacaggaaataatat

SEQ ID NO: 766033 - DNA, 489 bp, Homo sapiens
aaatattgtgaaaattaccaaaacatgacagagagacatgaagtgagcacatgctgttgcaaaaatggcaccaatagacttgcttgatggaagattgtcatgaacacttaattgtaaaaaacacagtatctgtgaaktgcaataaagtgaaacacaataaaatgagttatgccttaagcatatcttaggtatgcacttaggaataaatctaacaaaattatgtacaagatctatatgatgaaacataaaacacactgctgaaagaaatcaatgaattaaataaatggatatttcatattcactgagaaaaatataatattgtcaagatgtgagttcttcccaccttgatctacattcagtgcaatcccagtcaaaattccagcaaatcattctgtgaatatttgtaaactatgtctaaagtttatttggagagacaacaacagacttaccaacacaatgttgaaagataacaaagttgaaggactaata

SEQ ID NO: 766034 - DNA, 610 bp, Homo sapiens
cataaaaatggaaatcatacagttgttctttctttgaaatctggcttctttctatcagtgtaattattatgagattctcctatattgttgcatatatcagtagttcattcatttttattgtatgattctattgtatggctataccactgcttatagattcaatttacctattaatggatatttaggttgtttccaattggggggcattacaaataatggttctataaggaatcatctataagtcttctatacatgtatcatttaattcacttgaataaattcttaagactggaagaacwgggtcatatggaaggtgtgtttaactttttaagaaactgccaaaatattgtcccaagaatttgtattattttacatgtcaacaagcagtacatgagaatttcaaatgctccacatccttgttggcacacagtatggtcattctttttaattttagacattgcgatagttgtgttcagtcctctgctgtggtttcaatttaaatttctctgatgattatgaggaaatacttatttgccatccatatgtattctgcggtgaagtatccataagaaatcgtttgtctacttattattattatcatttcttaaca

SEQ ID NO: 766035 - DNA, 610 bp, Homo sapiens
cataaaaatggaaatcatacagttgttctttctttgaaatctggcttctttctatcagtgtaattattatgagattctcctatattgttgcatatatcagtagttcattcatttttattgtatgattctattgtatggctataccactgcttatagattcaatttacctattaatggatatttaggttgtttccaattggggggcattacaaataatggttctataaggaatcatctataagtcttctatacatgtatcatttaattcacttgaataaattcttaagactggaagaacagggtcatatggaaggtgtgtttaactttttaagaaactgccaaaatattgtcccaagratttgtattattttacatgtcaacaagcagtacatgagaatttcaaatgctccacatccttgttggcacacagtatggtcattctttttaattttagacattgcgatagttgtgttcagtcctctgctgtggtttcaatttaaatttctctgatgattatgaggaaatacttatttgccatccatatgtattctgcggtgaagtatccataagaaatcgtttgtctacttattattattatcatttcttaaca

SEQ ID NO: 766036 - DNA, 610 bp, Homo sapiens
cataaaaatggaaatcatacagttgttctttctttgaaatctggcttctttctatcagtgtaattattatgagattctcctatattgttgcatatatcagtagttcattcatttttattgtatgattctattgtatggctataccactgcttatagattcaatttacctattaatggatatttaggttgtttccaattggggggcattacaaataatggttctataaggaatcatctataagtcttctatacatgtatcatttaattcacttgaataaattcttaagactggaagaacagggtcatatggaaggtgtgtttaactttttaagaaactgccaaaatattgtcccaagaatttgtattattttacatgtcaacaagcagtacatgagaatttcaaatgctccacatccttgytggcacacagtatggtcattctttttaattttagacattgcgatagttgtgttcagtcctctgctgtggtttcaatttaaatttctctgatgattatgaggaaatacttatttgccatccatatgtattctgcggtgaagtatccataagaaatcgtttgtctacttattattattatcatttcttaaca

SEQ ID NO: 766037 - DNA, 472 bp, Homo sapiens
ggcctatcttcagcctcttcaaacaaaacaattatcagtcaagaattttgtatccatcgaagctaagcctcatatatgaaggaaagatatagtctttttcagacaaacaagtgctgagaaaatgtgccattacaaagccaccactacaagaattgttaaaaggagtactaaatcttgaaacaaatcctggaaacacaccaaaacagaacctctttaaagcacacatctcataggacctataaaacaaaaatacaattaaaaaaaaaacaargtacacaggcaacaaatagcatgatgaatagaatggtacctcacatctcaacactaacattgaatgtaaatggcctaaatgctccacttaaaagatacggaattacagaatggatgagaactcaccagccaactatctgctgccttcaagagattcacctaaaggattcacataaggatccacacaaacttaaggtaaagg

SEQ ID NO: 766038 - DNA, 527 bp, Homo sapiens
atataatgagagattccagctaggtacacaaagactgggaccaatttaaaaactaatagaagacaaagacagttcaaagcagataaatgtagcctaatgatggctttgatgagcctttgtctcttatctctttatgcacagtaaaatatraggaattaaaaaaagagcaaaatcgtcaaagacttatctgtatgtgtcactaacgagtgatgagaactggaaagacaaaggatgaatttcagcagttttgatgggcctttatcaggtatgtctgtgtgaattacaaagtatgaggcatgacaaagagtaggagtggagaaaagggaagagatatttgatatgtgaagagtaatacattgaggaggatgtgggttgggagagcgatgactatctgatggtttctatacaaataattagataactgattatctgatgtgaatctatcagtagaatctgtacatcattgccagacatatattagaacccaaagtcgtctatagagaggaaacctgggtatgactccacag

SEQ ID NO: 766039 - DNA, 616 bp, Homo sapiens
aaggatcttgaaaaactttgttactgactaatattatcaaagacaatttagaaataactttcaaaatatgccatattataaatttcttaaatgttagcaaaatgaatttaaaacatcatgagagctagatttctaattgtaatactgatagtaattaataatttaaaaaatacacctctgaatgaccatctttcctaggctcccaaaagttctgttgagaatatttaacagcttgtattaacaatataatatgggtactaataacaaatctgaaataaaatataccaagtgtttacagtttagtcttgacttaatggctttatatatttttgtactttctcaatgttctacagtcaatatatataatttttatgtgaaaaatatcaaagattagtctttttatgagattagactgtgatttacctatttctcctagaagtaggtawagcacctaacctttaaaaaacgtaaagacagaaactattttatattttggaattaaattgtatcaagtattttgctggttcaaataatattctacaattgaatatttgttgaacaatcagaacaaaatgtgttttgatttaaatacacacaatttgtaatgatataagac

SEQ ID NO: 766040 - DNA, 610 bp, Homo sapiens
ggactaggcttcaatgaggcctcttggtttcatgcttagccagctcactgctgtttttctctacctagctcagactcagttgacttctccatctgccggtctatcatttatgtgattaactttctgctctgttattgatacattctcctattagtagttactgcatattccaaagctgaagttattttaaatcatttttggtggggtagacttgactctgttggaaaatatagaacatagatttgcatcttatcttaaaagasatcatatctgaagattttacatcattgcccatccaaaatagtgtttatgtcatgttttgctatgtgatacaaatcgtcacttgccttttctatgatactctcactttaaatccatgaccacagacttcatgtgggcccttggtactcccttgataccctgcccattgccttggcccactcactctccttcgttcttagacaataatttcatcccttcttaatctccaacatatatcactcttaggtgatgattttcctttctttttcacaaaaatataaataatcaaaatgggacattcacaaactctcaccaccaaatgtcccagctcacctgcatctggaccatg

SEQ ID NO: 766041 - DNA, 623 bp, Homo sapiens
atgaaacgaatgaaaggagggaggatagtggaagacagagctggaagggaagttggaactgagaggtgacagcgtgctggcagtcctcacagccctcgctctctctccgcgcctccttggcctgggctcccactttggcggcacttgaggagcccttcagcccaccgctgcactgtgggagcccctttctgggctggccaaggccagagccagctccctcagcttgccaggaggtgtgaagggagaggccgagcgggaaccgaggctgtgcacggtgctgcaggccagctggagttccgggtgggcgtgggcttggcgggcccgcactgggagcagccggccagccctgccagccccggcagtgagggacttagcacccgggccagcggggtactggtcccccagcagtgccagcccaccggygctgagctagatttctcaccaggccttagctgccttcccgcggggcagggctcgggaccagcagcccgccatgcctgagcctcccaccccctccatgggctcctgtgcggccccagcctccccgacgagtgccaccccctgctccacggcacccagtcccatcgaccacccaagggctgaggagtgcaagtgcacggcgc

SEQ ID NO: 766042 - DNA, 623 bp, Homo sapiens
atgaaacgaatgaaaggagggaggatagtggaagacagagctggaagggaagttggaactgagaggtgacagcgtgctggcagtcctcacagccctcgctctctctccgcgcctccttggcctgggctcccactttggcggcacttgaggagcccttcagcccaccgctgcactgtgggagcccctttctgggctggccaaggccagagccagctccctcagcttgccaggaggtgtgaagggagaggccgagcgggaaccgaggctgtgcacggtgctgcaggccagctggagttccgggtgggcgtgggcttggcgggcccgcactgggagcagccggccagccctgccagccccggcagtgagggacttagcacccgggccagcggggtactggtcccccagcagtgccagcccaccggtgctgagctmgatttctcaccaggccttagctgccttcccgcggggcagggctcgggaccagcagcccgccatgcctgagcctcccaccccctccatgggctcctgtgcggccccagcctccccgacgagtgccaccccctgctccacggcacccagtcccatcgaccacccaagggctgaggagtgcaagtgcacggcgc

SEQ ID NO: 766043 - DNA, 634 bp, Homo sapiens
ttcaagacaagtcttgctctgtcactcaagctggagtgcagtggcataatctcggctcactgcaacctccacctctcgggttcaagcgattttcctgcctccgcctcctgagtagctgagattacgggtgcatgccaccacacccagctaatttttgtatttttagtaaagacagggtttcaccacgttagccaggctggtctcgaactcctgacctcaagcaatccacccaccttggcctcctaaagtgctggaattacaggyatgagccaccttgcctggcctgatgttttcaatacttgatcagtgaactgtagtttctactaaaagatttaattcagcaagcacagcaatggtgtgaatagaagcctaaatgtttagcaaagcagatatatatttaaacacacacaacaacaacaacaacaacagcataatggcaaaatatcagggagtaaatattaagtccttaaaagaaaaatgttttaaactagataacaattttaacctacacggctacagagatagcttgcttcttgtgcaaacaactgctggaataagacacaataaaactatcaaaatctaatatcaattttacttctaaattatctttctctcatttgtttggatgaagtca

SEQ ID NO: 766044 - DNA, 626 bp, Homo sapiens
gagggatcctcagatggttcccctggaacttgcttctctaatttcggggaattattctcgttgggcctgcctgatatgattgctaaaagagctgggttgattttgcaatgcttgcaaaggtctagtaaaaaggccatgcccttatgcaaaagaaaatgagctgctttttctttaaagtctcagggtgaaagatgcccccagcacctcagaatgcacttcaggggagtgcaggctgaagacagtacccatctagaaagrgaagcaagaataaaagcgttcttttagtctccttcctttctttgtgacccaggatggaggggaagacagtgggagcatccccatgactgttttctctttttggttcccaagttatggcaccatgttaaatgtgccacccatgattgcaggcatgaccctccaagccacagcaccagaggaactaagatttgggcctagctgtgctcctccaagcagctgtagtcctctgcctatgatttccctttgacttcctagacctgtgtgacctgtgtgcctccctaaaaaaaatgaatctcaagaaaaactaagtaattgggcaaggcccctttaatggggggtatgctagattgaaccctatattctgctat

SEQ ID NO: 766045 - DNA, 603 bp, Homo sapiens
gctcctctttttattacttctttccttctgcttgctttgactttatttttctcttctagctgtaggttcttgaagtaagagcttacattttttatttgagactttttctctcttctaatatatgcatttagagctacagatttccctcttatcactgctttagttgtgtcctatgagttataagttgtattctcattttcattcagtctaatgtatttttaaaatttctttgaaattttttctttgacccactggttacttaggagtatgttgtttactttcaaagtgtttggatatttttttctaactttttattattgatttctagtttaacttcattttagtcagagaacgcacttgatatrctttgattctttgaaatttgtcgagtttctttatggtttttcttgatatattttccttagggccttcaaaagaatgtgtattctgctgttgttggatggagtgctctgtaaatgttgtttagctcttacttgttgatggtgttgttgagttcttatatccttgccaattttctgtctaggtattacatcaacttctcagagaagggtgttaaagtcttcaaccataactgtggatttg

SEQ ID NO: 766046 - DNA, 599 bp, Homo sapiens
agccaccactgcacgcccatggctgcagacagccctttttccaggatccaacaattccctgaggtataagcagagtggatgaggacacctacagggtctcaattttgcatatgcaatttgtgcccataattattttgattgcttcacgggtcacataaggcttttcgaagcaaacatccactaattaaatattattatgcaaaatgtcttgttctgtgcaggcttctatatgtgaagtacatgctaccaaaaaatcttatatcaaatcaaacatgtctgcactggtttcattaagaccctttaagagagtggtagatgtaatttaagaaagtctattttgaggccgaagtgggcrgatcacgaggtcaggagatcgagaccatcctggctaacacggtgaaacctcgtctctactaaaaatacaaaaaaattagctgggcgcggtggcaggcacctgtagtcccagctactcgggaggctgaggcaggagaatggcatgaacccaggaggtgcagcttgcagtgaacccagatagcaccactgcagtccggactgggtgaaagagcgagactccatctcaaaaaaaaaaaaaaaaaaaa

SEQ ID NO: 766047 - DNA, 599 bp, Homo sapiens
agccaccactgcacgcccatggctgcagacagccctttttccaggatccaacaattccctgaggtataagcagagtggatgaggacacctacagggtctcaattttgcatatgcaatttgtgcccataattattttgattgcttcacgggtcacataaggcttttcgaagcaaacatccactaattaaatattattatgcaaaatgtcttgttctgtgcaggcttctatatgtgaagtacatgctaccaaaaaatcttatatcaaatcaaacatgtctgcactggtttcattaagaccctttaagagagtggtagatgtaatttaagaaagtctattttgaggccgaagtgggcggatcacgaggtcaggagatcgagaccatcctggctaacacggtgaaacctcgtctctactaaaaatacaaaaaaattagctgggcgcggtggcaggyacctgtagtcccagctactcgggaggctgaggcaggagaatggcatgaacccaggaggtgcagcttgcagtgaacccagatagcaccactgcagtccggactgggtgaaagagcgagactccatctcaaaaaaaaaaaaaaaaaaaa

SEQ ID NO: 766048 - DNA, 599 bp, Homo sapiens
agccaccactgcacgcccatggctgcagacagccctttttccaggatccaacaattccctgaggtataagcagagtggatgaggacacctacagggtctcaattttgcatatgcaatttgtgcccataattattttgattgcttcacgggtcacataaggcttttcgaagcaaacatccactaattaaatattattatgcaaaatgtcttgttctgtgcaggcttctatatgtgaagtacatgctaccaaaaaatcttatatcaaatcaaacatgtctgcactggtttcattaagaccctttaagagagtggtagatgtaatttaagaaagtctattttgaggccgaagtgggcggatcacgaggtcaggagatcgagaccatcctggctaacacggtgaaacctcgtctctactaaaaatacaaaaaaattagctgggcgcggtggcaggcrcctgtagtcccagctactcgggaggctgaggcaggagaatggcatgaacccaggaggtgcagcttgcagtgaacccagatagcaccactgcagtccggactgggtgaaagagcgagactccatctcaaaaaaaaaaaaaaaaaaaa

SEQ ID NO: 766049 - DNA, 590 bp, Homo sapiens
gcagctgtagggtatattgagttttaggcctgtgagatgaggaacaagtgggctctatggcacacaaccacatagcaaagggaagttttaaccaggctaaaggtgatgggggtacaacacagtttcaaacaacttatgtcagacctaacagtgaatgccaaggcagcaactatgttaaacaaatttccaacaagtgtcccacaccagaacccaaccattctggcactctgatctcgaacttctagcctctaaaccatgaaaaataaatttctgttatttataaacccccaggcctagggtactttgttgcagcagcccaaactgactaagacaaggatgtccctcaacttgataaaaatcatctacaaaaaaactactggtaacattatacctcatgcagaaagactgaattgtttcttacaatcaagaacaaaggcaagaatgtctgctgtcaccactcttactsaatatagtgatagaagttctagcagagcaataaagccaaaaaaaggaaataaaaggcatgtagatcagatagaaaaaaaatgatactgtccctaaatgcagttgacatgattgtgtatgttgaa

SEQ ID NO: 766050 - DNA, 611 bp, Homo sapiens
cttcctctctcctatgtttatcttatgtaaaaatgcagattcactgagctagattaatgcacaagtgactatttctctactccgctatcacatgtgaatggttgatcaaaggctcaaaagaatgcaaccctttgcttctcrcctacccacacctcttaaaaagtattcctcggctggttgcagttactcacacctgtaatcccagcacttttggaggcagaggcagttggatcacgaagtcaagagatctagaccaccctggccaatatggtgaaaccccgtctctactaaaaatgaaaaaattagctgggtgtgatggtggtcccaactactcgagaggctggggcaggagaatcacttgaacctgggaggtggaggttgcagtgagccaagattgcaccactgcactccagactggcgacagagcgagactccatctcaaaaaaaaaaagttattcctctttccccaatatccactctttcccctttaaatattgaagccctcaaactcatctttggagaaagacacagacctgtctcctgggttcacatccctaaccataggaacataaacttctaaattgattgagaactgtctcagatattttttg

SEQ ID NO: 766051 - DNA, 678 bp, Homo sapiens
aatatgatacctcgatttctggcttgttcaactgggaggtagggcggtcatttgctaagaaagggaccaaagaagcagaaatggttctgtcatcagagaaagctactccatctttggatgggtcaaaatcagcatctttcatcaactccagagggacgtctgtattaccatgcttagcacatccacaacataacagctattgagccatgtattaccaaacttcttcccttctttggagatttatagtgcatatcttgacaatgccagttttaacatagcactgcagtagatctatcatcagtggctatggattgggcttctgcacaaccccagggatattcagccaagggacgatccctaccttggatgtcagatggactctggcatgatcctgctatcaccacacttgatgcccctaggtgcaaagtagtcccctcytctaccagctcttaatacctcattagggctcatttagtttgggatggaaggctggcaatacttcagctcattctgtgacctaatggaggcaagttagacagccaagtagctacccagatgaaaaagctcatgacaataataaaagccctagatgtgaagcctgaaattttggggcttattttccccatttgtatattgagagggttggatttaattgttaaaagtcttctctgcacttga

SEQ ID NO: 766052 - DNA, 678 bp, Homo sapiens
aatatgatacctcgatttctggcttgttcaactgggaggtagggcggtcatttgctaagaaagggaccaaagaagcagaaatggttctgtcatcagagaaagctactccatctttggatgggtcaaaatcagcatctttcatcaactccagagggacgtctgtattaccatgcttagcacatccacaacataacagctattgagccatgtattaccaaacttcttcccttctttggagatttatagtgcatatcttgacaatgccagttttaacatagcactgcagtagatctatcatcagtggctatggattgggcttctgcacaaccccagggatattcagccaagggacgatccctaccttggatgtcagatggactctggcatgatcctgctatcaccacacttgatgcccctaggtgcaaagtagtcccctcctctaccagctcttaatacctcattagggctcatttagtttgggatggaaggctggcaatacttsagctcattctgtgacctaatggaggcaagttagacagccaagtagctacccagatgaaaaagctcatgacaataataaaagccctagatgtgaagcctgaaattttggggcttattttccccatttgtatattgagagggttggatttaattgttaaaagtcttctctgcacttga

SEQ ID NO: 766053 - DNA, 474 bp, Homo sapiens
cataggagacacaatatgtaattttccgctctgagttttaatttctccatctatgaggagataataatctgtgttttataatgttattgtgaagcaaaatgagttaacacaagtacagcacctagaataatatataattcaataaataataaattaacaatgtcatgaacaagggattagaaaatattatttttggttgggactagctactatggatgactcttctgtataactcttaatctcaaaaccatccataaatttgcactgctgtcgtctttttctttcctcccttccttcatccwttccttgccttcttctttcctttcatccttccacaaacaagttctaataaagaaaggtcttatggtactgtttcttaaagtgttttcttcagaacatgagtctttgcagatggtctttgaatattttttaaaaaggattccatgatagtagtctctttctttgagattaata

SEQ ID NO: 766054 - DNA, 618 bp, Homo sapiens
atatagccatagtttttctaaagcttctttttattaaaaaacaatgcaggaaattgtaacactctaattaaagaataattaaaataattagtaccaaaacaaatatttaataagaatctatgtctatggaaagcaatccagcaaaaccaagatcaagttcctgctttagataaacaagattctttctgtggctaccctcccctccccaaatctttactagaatatgaaaaaattcaaaagcttccagttgyttgaaatatcagtgttgtttctttctcaaagtttttggcagtaaaacttttgtgtacagacatacagcctgcctcagaattttcaaaagtaagagctagatttcttattttcaatcactcaaggtaaactgcatagacatttgcaagagcgaagagagaagaatttctgaaaacataagatgaaaaggtatcacttttaggatcccagaggcatctgcttccaataagtatgctctgcctgttcagttgtccaatgtgaacaatcacaattagtttataccgtggaatcatcaagtccttgacctgggctttaataacctagaaatttaaaaaaagggagggtcttcattcagctacattgaaactc

SEQ ID NO: 766055 - DNA, 618 bp, Homo sapiens
atatagccatagtttttctaaagcttctttttattaaaaaacaatgcaggaaattgtaacactctaattaaagaataattaaaataattagtaccaaaacaaatatttaataagaatctatgtctatggaaagcaatccagcaaaaccaagatcaagttcctgctttagataaacaagattctttctgtggctaccctcccctccccaaatctttactagaatatgaaaaaattcaaaagcttccagttgcttgaaatatcagtgttgtttctttctcaaagtttttggcagtaaaacttttgtgtacagacatacagcctgcctcagaattttcaaaagtaagagctagatttcttattttcaatcactcaaggtaaactgcatagacatttgcaagagcgaagagagaagaatttctgaaaacataagatgaaaaggtatcacttttaggatcccagaggcatctgcttccaataaktatgctctgcctgttcagttgtccaatgtgaacaatcacaattagtttataccgtggaatcatcaagtccttgacctgggctttaataacctagaaatttaaaaaaagggagggtcttcattcagctacattgaaactc

SEQ ID NO: 766056 - DNA, 594 bp, Homo sapiens
ttgagggaaaattaatcaatctaatcctaccaggaattgacagagatgttagaatgatcaggtaagggctttaagtgttgttgtaactttgtttattatcttgaaaaagttaagtggagacatgtaagaattacaaaagaccaaactgaacttctataggtagcatccacagtgtcagaaatgaatrcaaaggttgtgatctgtggcagattagattttccagaaggaaagattaatgaacttgaggacatagtaatagaaactatccaaaatgaaacagtgagataaaagtatttttaaaaattaaaaaaaaggacttcactgaactatagaactatttctgtatatggaactgggacgtgtgaaaatggagagggggaaacaaaatatttgaagaaataatgcctgaaagctttccacatttaataaaaacaatttgcaagtccaaaaagtccgataaaccccaagcaaagaaacatgaatactacaccaaggcacatgataatcaaattgctcaaaaccagtgataaagggaaaaccttgagattaacagcaggcagaagaaaaaagacaattcatgtatgaacaaagata

SEQ ID NO: 766057 - DNA, 679 bp, Homo sapiens
ttcctatggctgacaggagtgaactgaaccaggattgaacctacgactctggccccattacactaatcacccataacagcagcatttattagacatgttctatacttcagttattttctagtcaatgataagggcctactattttctcacatgctcctcatacacactttaaaaaatcccttcctrctttcaaagcttactcataaccccctcagcagcaaaacacaaaggttttcttctttacattcattagagttaagaaatataccctagaaagtcctactgcacaatgattattctatataacaactttctaaaactcttctcttgaaaatatcctggtacaatttatgggtgagtgggtgaatgagtaatatactttgcttcccaggcgtatttagaaaaataaatacagttcattaaaacacacaggttacaaaataacgcacccaactaaaaaggaatttctgtttcttttgtatttcctcccattaccctttcatgcattagcaattaaaatctttcctctggcaccatcacactgagtcaagtgaactaagaggaaagtaacgggacaagatagaaccaaattgtatcaaataaagcaaaatccgaaagcactgcagacagaagagggcttggggagaacatacaccatggctaggatcccctaagaagc

SEQ ID NO: 766058 - DNA, 562 bp, Homo sapiens
acatcaccagagtaagaaaaatccccatctcatcaaaaatatgagccagtacctacatccctgaagagtctttcttggtactcagattaaacagaacacagatttcaacataactccttccaagtgccaagacataaaatccttgagmtttttatttggctctaataaaaacctgtatctttttggacagccagattatcttaccacgtccctcccccaagatacattcaggtcttcaagccctgtgtgaatttcacttctctagggagttgtccttgtttctcctctcctccatggtgactccgcgtcccctgggcaccaacacaccctgagcatcacagtgcactcatctaagacacaactgtgtctttgttattatagcacgcattcatttttatctctagggactataaacttgccaaagataagcacttatgaattctcagatccactttttctataaaagctaacccaatccattttaataacatacatacaatatttccacttagtcatccgaaaccttccacttcatgtacaagagtcgctagattttatgtta

SEQ ID NO: 766059 - DNA, 627 bp, Homo sapiens
ctatgattgccccagactgggcaacatagtgagaccccatctctacaaaaaattaaaaaaattagctgagcatggtggcatgcacctgtagacccagttatttgggaggctgagataggaggatcgcttgagcctgggaggtcaaggctgcagtgagctgtgattgtgccactggactccagcctgggcgacagagtgagactcccatctcaaaaaatatatatgattgcagaaatgaaaacacaaargaggaagaagaaatggtggaaatttccaataaagtagaacaatttgacaagaatagaagatagaaaagattaaaaattgtagaggatcagtccaggatttcccatatttaaataataggagttcctgaaaaagaaaatagaccaacagaggaggtggaaataatcagagaaacaatttatgaaatttctcattacttattgaatgagcccaccaagagcctagcataatggatgaaaatagatacacattacaagatatcaccatagaattttagcatactggagagaaagagaaaatcatgaagtttccagagggagcagggagtgagtactaagtcacatacatagaacatcagaatggcatttgagttagccacag

SEQ ID NO: 766060 - DNA, 631 bp, Homo sapiens
tgaacacatttgattacagaacctttaacgtctggtgtttcacagaacatattctagagataactgcattgttttggtaatcttgtgttctttatgtacagaggttaaactgacagattcattataataaagtacttcttacctattaaaaatgaaacactaactttattttttttcccatttttcaaatattcaaccattctttcaaaggactgcgactttgcaaggcccagccaattctgtatgtagttcagagtgaaggtcacaagatttatatatttaaactaaatgtgttatgttttagaccaacaccaaattttcttctatatacttggcttttcattccccttttaatttttgccttgatttgcatttattatgaaatatttcatatatatgaaggactataggtaatgtgttcataggcccatagaataataaacsaccaagcttaagaaatagagcattagctgtgcctgtagtcccagctaatcaggggactgaggtggaaggactgcctgagctcaggagttccaggctgtagtgagctgtgattgtgccactgcactctagcctgggtgacagagtgagacttcatctctaaaaaaatttaaaaatgagtaaataaaac

SEQ ID NO: 766061 - DNA, 606 bp, Homo sapiens
cctaaggaaggctctctcggattgctcagttttccttatccttcccctatgtcacccttagctcatattccccactccttccccatgggaattgttggcatgcaaataaataccatgactacccctcagaaaaccacaagaaaatctytgtggacaggaggaagtgaccctgtggttaacgtaaaaaattgacaggagctctttaaggaaagatgatggatgagtataggaggttctcaagcacaagtccctaggggtgttaaacaggtgtttaatttataatttattaaactttacattgatgtgccctgcactttttgtatgggtattgtatttaacaaaaaaatatagtttttaagaaagagtgcggaaaaatttcttgataataacctgacatggtggaaaggaagatcaagagaagaacagttggtgaaagtaagggatgggaaagataagtgatgagtttaggggaggagaaggtgctattagtaagtaaaacaaataaaaagagcaagaactttaaaagtgtctattatttcaagtataaagatttctgggtcctctattttaatcctcatgttaagtgctatcattacccatttacaa

SEQ ID NO: 766062 - DNA, 571 bp, Homo sapiens
tcatttttgaaggatagttttgggaacagtattcttagttagcagtatttttattttcagcacttcaaatatatcattccactccttctgtctgcaaggtttctgctgaaaaatatggggattgtcctatgaaagttcttttgtatttgacaagttacttcttgcttgcagctttcaatattttctttgcctttaaattttgacaatttgattatatggctcaatatggacttttttgggttcaaattatttggtgccttttggacttcttaaacctagatgtcctytttcttccccaaatttgggaagtttttagccattatttatttggataagccttctattcctttcatctattttcttcttctgagactcccataatgtttatatgtctgcttgatggtgtctcacagtttctttatattttcttcactttttacattctttttttctttctgctgttttgactgaattatttccagtgacctgtttttgcatttgctgatcctttcttctgctgttgaatctctctagcaaatttttcagttcaactattgtattcttcagctcc

SEQ ID NO: 766063 - DNA, 626 bp, Homo sapiens
ttttctccccagaaagaggtcggaagttgtggttttgtccatgttctctgttatgacccagaagggaaagctatgccatctaccaacccaagctgctatctccattgtaccccacgtggctagaatgtgccagatctattggtgctccagggttgatgagaaagatgctatttctttgggcagccccaaagaagttggaatgtgggatccatgaatcaactcttctgtccatggggaaagggagaagctgagagctgggatttttcatccactcactctgtattgagcagtggggagagwcgatggcatttaccaggccaagccactgcctctgttctcttccaggtggctatactgtgccagacccatcagagctccaagaccgacacggcacagccactcctctagggagtggctcataaaagtcagagtgctggatgtgtaaaacaacccctgcctccactgagtaaagttaacagtgagggattctcttcttgatcatatgatgctgcaatggggtcagggtctctggtaagaacatatcccaaatctccctactggcttcagtgagttgctattagttcctcccaggatgcaagagcctttcaattagtttctggtttctc

SEQ ID NO: 766064 - DNA, 626 bp, Homo sapiens
ttttctccccagaaagaggtcggaagttgtggttttgtccatgttctctgttatgacccagaagggaaagctatgccatctaccaacccaagctgctatctccattgtaccccacgtggctagaatgtgccagatctattggtgctccagggttgatgagaaagatgctatttctttgggcagccccaaagaagttggaatgtgggatccatgaatcaactcttctgtccatggggaaagggagaagctgagagctgggatttttcatccactcactctgtattgagcagtggggagagtcgatggcatttaccaggccaagccactgcctctgttctcttccaggtggctatactgtgccagacccatcagagctccaagaccgacacggcacagccactcctctagggagtggctcataaaagtcaragtgctggatgtgtaaaacaacccctgcctccactgagtaaagttaacagtgagggattctcttcttgatcatatgatgctgcaatggggtcagggtctctggtaagaacatatcccaaatctccctactggcttcagtgagttgctattagttcctcccaggatgcaagagcctttcaattagtttctggtttctc

SEQ ID NO: 766065 - DNA, 626 bp, Homo sapiens
ttttctccccagaaagaggtcggaagttgtggttttgtccatgttctctgttatgacccagaagggaaagctatgccatctaccaacccaagctgctatctccattgtaccccacgtggctagaatgtgccagatctattggtgctccagggttgatgagaaagatgctatttctttgggcagccccaaagaagttggaatgtgggatccatgaatcaactcttctgtccatggggaaagggagaagctgagagctgggatttttcatccactcactctgtattgagcagtggggagagtcgatggcatttaccaggccaagccactgcctctgttctcttccaggtggctatactgtgccagacccatcagagctccaagaccgacacggcacagccactcctctagggagtggctcataaaagtcagagtgctggatgtgyaaaacaacccctgcctccactgagtaaagttaacagtgagggattctcttcttgatcatatgatgctgcaatggggtcagggtctctggtaagaacatatcccaaatctccctactggcttcagtgagttgctattagttcctcccaggatgcaagagcctttcaattagtttctggtttctc

SEQ ID NO: 766066 - DNA, 601 bp, Homo sapiens
acaagaacttgggatgcgctgaatgcctgggctaaaagagctataacacaaatgggtctgaaatacaccccttgcttaccacgttgtgggcaacaagaaggagagagagctgcagcccttctgggagcccagacctaggagctcyccaagccagggctgtaacaccctctctggggctctgtggttcccggcatctccaagcttccaagttccactgcgttcctcagtgccagccatggaagctgcttgtggtccacctggtccagccacagcctcacagggagctggcgcctgtgctggtgcttggaactgcctgccccaccacagccagtgtgcctggctgtgctcagtggccgggcaccatgcttgctcactcacacaccccttgctgctctgtgcctggctctcccttggcaggcatgagattcaggccagtagtgcaagctgagcacagcctgccaggctgattgggtggaacaagcccagcgggcctaagtaaaaactcagggaaaagcgccactggccacacaggtttccggctggtgaagtgacacccacaggatcccatgacatcagctcactgcagcctcaacctcctgga

SEQ ID NO: 766067 - DNA, 504 bp, Homo sapiens
aaaaggaagaagcattaaagagtgaagagtgattacaatttcaaatacatgccagtaactgaagaacaattcaaataggaaccaagtaggggagaggattgttcactcaaggaggtgaggttgggggatagggcagagcatggaaacagctgaagtcaactggacaggccctgtcacttcagtgacacgtggtrctttctgagatgggcacaaccttggagattttagtttgtttcctcactggtaaacaagaagtcagcactgataacaatccctgagaacacttcctctggaatgtatgacattccatgcttctgctttgtagtcacctccggacatgcatgagtcacactgagaggtggggaatttgcccagaccgctagatccagtgaataaagtcaggcctaagagatgtagtcttgccatgtttctttctctttcaattcatctggtactaagagacatgggtgatttatttatctgtgggtaaagagtacaatgaag

SEQ ID NO: 766068 - DNA, 605 bp, Homo sapiens
aatctctatgattaacccctttctgttttcatcctcctccatatcttagtcctactatttatcacttcttatgtggtaagcagtatttccttattatccttatgtgataagtggtatttccttggtctctgggcatgtagtttcactaatttcgattcccttccctcttctttcaagatactctgaaatgctctcttcatcatgataatcttgtgaggcctttgtagagtctcctcttctagaatgctctctattcttcaagactcattggatcgctgtcccaaaccctcattcttacaccttaaacttaatatatcagctgcatgttcagcctgaatcatttggctrttcatctcttgctttctaattgtgctaagttttttcatgtgtattttattagtccagatatcttcccgtttagactaatcaatgtttgatgtaatattcctctatttcttttgttagtcttgtcatattttgtggtgtaatagttctttttcaaaacttactcattgattaggttagttttaaagtcagtatttacttttcttcttatacatggttaggtaaaactcaagcaaatatctgatgattaaagctgttgg

SEQ ID NO: 766069 - DNA, 550 bp, Homo sapiens
caccaattcacttgtatgctcgtttctgcacctttcatcctttttgttctccatggtttagcctgatattttctatgcagttcattaatcctctcttttgctatgtccaatctgctattaaacccatgtattgagatcttaattccaaataccctatttttcaaaaggaaaaacagaatttctctaaatccatcttgtcttgaatataaatatgagataagtattcaacagttattttctgtagcattttaaaaaatcttttcaaaaacaccattagtgattgataacctgaaagcacagtcttgcttttgttttaaacacaatccttaatattttgtaatataaatgagccaaaagctatcttaagagagtraaataaaaatagcaactttaaaggtattgtttagtccagcctgggcaacatagcaaaaccctgtttctccaaaaatacaaaaaattagccagccatggtgggtcgtgtgcctgtagtcccagctactcgggaggctgaggtggcaggatcacctgagccagggaggtggaggctaca

SEQ ID NO: 766070 - DNA, 618 bp, Homo sapiens
ggacaagttaactccatcaaaggtcccaagaaaatgcagtcatttaactctacagtgctaaagaagccaataaaaattaagcaaataaagtatgtcgatattttacttacacttccagcccaaacttcaggccatcctcttgccagtttatagtaaacatatacaggatcaccttttttaaaattcacaaaacgacaatccgggcctgtgaaatcttcaagagcctcaccgcggtacattaacactgtatataaagagagagaaaaaaaatagccagatatcaggattcwgtgttcacagtgcatattgatttatcaggaaatataagaatcccactataaacaacaaccaagtttttccagtactctctggaatttctttcatatgctcaaagtatctcaaatcctttgagctttactgctataaatcataccttctgcaagcagacaagggaaaggaaaaccttctctatttttctctatggataatactgagaaacaaaaagcaatgtgtcaactaccacacatggcttttctcacccaagtgaaactctcgattccctctctaaccttctagtcctcaatcttttctgtttcatattcataaaaagcttccttt

SEQ ID NO: 766071 - DNA, 615 bp, Homo sapiens
ttgctgatagaaattagagaagacctaaatagatggagagatagaccttgtttatgactcagaagactatattgttaagctcccaatttgatcacttgcattaacatagccccaattaaaatctcagaaggatttttttttaaatgacaagctgattctacaattcatatggaaatgcagaggacctagaatagcccaagcatcatgtaatwtcaagacttactataaagctctagtaattaagacagcagatgaatagaccattggaacaaaatagaaaatctggaaatatacatgtatgacagtggacttctgacaaaggtggaaagacaattaaatgtacaaaggaaagtcttttcaacaaatggtaccaaaactattagatatttatatgcaaaaaattgatccatacctcacatgatgtacataaattaactcaaagcagataatagacttaaatgtaaaccctaaaaccataaaacttctaggaaaaattaagagaaaaattttgttgaacttggattggcaaagatttcttacagttgacatcaaaagtatgattcataaaggagaaatttgattatttggatttaatcaaaataaaaacatctcttc

SEQ ID NO: 766072 - DNA, 615 bp, Homo sapiens
ttgctgatagaaattagagaagacctaaatagatggagagatagaccttgtttatgactcagaagactatattgttaagctcccaatttgatcacttgcattaacatagccccaattaaaatctcagaaggatttttttttaaatgacaagctgattctacaattcatatggaaatgcagaggacctagaatagcccaagcatcatgtaatttcaagacttactataaagctctagtaaktaagacagcagatgaatagaccattggaacaaaatagaaaatctggaaatatacatgtatgacagtggacttctgacaaaggtggaaagacaattaaatgtacaaaggaaagtcttttcaacaaatggtaccaaaactattagatatttatatgcaaaaaattgatccatacctcacatgatgtacataaattaactcaaagcagataatagacttaaatgtaaaccctaaaaccataaaacttctaggaaaaattaagagaaaaattttgttgaacttggattggcaaagatttcttacagttgacatcaaaagtatgattcataaaggagaaatttgattatttggatttaatcaaaataaaaacatctcttc

SEQ ID NO: 766073 - DNA, 656 bp, Homo sapiens
acctcacatgatgtacataaattaactcaaagcagataatagacttaaatgtaaaccctaaaaccataaaacttctaggaaaaattaagagaaaaattttgttgaacttggattggcaaagatttcttacagttgacatcaaaagtatgattcataaaggagaaatttgattatttggatttaatcaaaataaaaacatctcttcaaaacacactgttatacaaactacagactgggaaagagtcactgcaaagcatctatctgataaaatatttgtattcagaatacataaagaactctcaaaattcatctaaaaaaatgtaatgcagtaaaattacactttaccaaggaagatataccaattgcaagtaagcacatttaaaaatgttcaccataattatcagggaaatgccaatttaaagcagaatgagttaccactacacacttactataatggctaaaatttcaaaaactgattttaccatgtgttggagaagatgtggaggaaatggaagtatyatacactgctgatggggatgtgaagtggtacagctatcttgaaaaacagcttgtcagtttcttaagaaggtaaacctacactggtcatatgatccagccattcttctcctaaacatttacctgagacacatttaccc

SEQ ID NO: 766074 - DNA, 611 bp, Homo sapiens
tctctacatgtaaacctataaaagggaaactatttccctataacactcacagaatacttctgcaacaaatggttggaggaattctccaactaatccaacaactggggaacctaacaattaaattcaattctgacactgtctacctggtgtcagacctccctggttaagggctcaatccccaagactgccaccatttcagatgacagtcacaagtcccaggttgtcacctgcacttctgacagaccatctatcatgatcctcrcctcaggtttgataatttgcaaaagtagctcacagaactcagggaaacatttgtttatgtttaccagtttagtttaaaggacacaactcaggaatggtcagacagatggaagatatgcatagggcaaggtatgtgtaagaaggggctcagatcttctatgctcttgccagatataccatcttcctgacatgtgaattcactcaccaacccagaagttctgtgaaccccatcatttaggatgtttatgtagacttcattatgtaagcatgattgattaagtcatttggcctttgatgattaaggtaacctccagcatttctcccctacctggagatcaggggtggaggct

SEQ ID NO: 766075 - DNA, 642 bp, Homo sapiens
ttagatttctggctcacttcagtactcattcattatattcccttttcaccctttgtgtgttgtaggtgtgtcttttgcacatggtctttctctgccccagactatttctttaaactcatctcattttcatactatcttcctctgcagattccatattgatttgtttatagtgactttgtcatacgtttggatatttctttttcttttttttgagatggagtcttgctctgttgcccaggctggagtgcagtcgcacgatttcggctcactgcagcctctgcctccctggttcaagtgattctcatgcttcagcctcgctgggaccacaggtgtgtgccaccatgccaagctaatttcttgtatttttagtagagatggggttttgctatgctggccaggttggtctcgaactcctggcctcaagtgatccacccacctctgcctcccaaagtgctaggattacagrcgtgagccattgcgcccggccatgctgatatttcttttcctggcttccctcaggaatttttcctttgatctaagctttgaggttttttgttttttttttttgttttgttttgtttttttcaagagacaggggctcactgtgtcacccaggttgaggtgcaatggtgccatcatagc

SEQ ID NO: 766076 - DNA, 602 bp, Homo sapiens
gaggtagaggttgtggtgagacaagatcacaccaatgccctccagcctgggtgacagagtgagaccctgtcttgaaaaaaagaaaacaaatcaggcctactatgtacaatagtatttccttaatttgtctgagaagaatcacccaaagagcttattaagagtatagattcacaggttcctttcttagatattatggatraacatctaggataaaacagagtaatctgtagttagtaagtatctaagtaattttaaaaaaacctactagtcacatttgggaaacactattctagatatttgacccagaacatttataaattccaggtattctgaaagtattagaatattatgaattatattaattttgtaaactgataagagaactaaatgatattgcctcaatataaataagttgttaaaaaaaattccaaaactagcacaaagttagtttaaggaaggtgaatatgaacccatgaagaatgaaaatggaactgatttatttagtgtgttctcttcctggctggagaatttaaaaagtaagcaagagaactgcagagatttgtgttttctttcaagtacgtgatttttcacttagttaaatg

SEQ ID NO: 766077 - DNA, 602 bp, Homo sapiens
gaggtagaggttgtggtgagacaagatcacaccaatgccctccagcctgggtgacagagtgagaccctgtcttgaaaaaaagaaaacaaatcaggcctactatgtacaatagtatttccttaatttgtctgagaagaatcacccaaagagcttattaagagtatagattcacaggttcctttcttagatattatggatgaacatctaggataaaacagagtaatctgtagttagtaagtatctaagtaattttaaaaaaacctactagtcacatttgggaaacaytattctagatatttgacccagaacatttataaattccaggtattctgaaagtattagaatattatgaattatattaattttgtaaactgataagagaactaaatgatattgcctcaatataaataagttgttaaaaaaaattccaaaactagcacaaagttagtttaaggaaggtgaatatgaacccatgaagaatgaaaatggaactgatttatttagtgtgttctcttcctggctggagaatttaaaaagtaagcaagagaactgcagagatttgtgttttctttcaagtacgtgatttttcacttagttaaatg

SEQ ID NO: 766078 - DNA, 602 bp, Homo sapiens
ttactaggttgcttgggttacaagatctggcaaaaccgagctggcagaaccaattgccattcgtcctactagtgaaacaggtgagaataggcattggagtgcaggagaatgctcactgaacgttagagacagcctctaaagttgagtctcagcttttgctttgtgatagctataatctctgttgacgatataacatttcatgaatgttgatgaagattgaatgcaaacttaagttgtctagagttttattctctaatattcattgtagagctcyttatcattaaattataggatttttaatttaaatactcatttttatgctgtaaatttttaggacttttcaaggagttttattcttagaataatttttattgttggaattgattatagtattgcaaatgcaatttttatgccataattatttttaaattttaataatacatttaggtttgcattcatgtagggtgttcataggttgctaagtacttttacgtcatctcgtgttattcttacaacagtgttgtgaggaaggcagggaaagttactgtgatttccattttgcaggtaaagaaaagtctctgaaagattaaatgatttttctg

SEQ ID NO: 766079 - DNA, 597 bp, Homo sapiens
ttatagatcatgagcaggctattctaagacaggtatcttcactttgcacttcattgcaagagctttcatactctgagtagatgcatcagatataaattaattctgcttctcatacataactgctggattcagcaaattgtttagcttctgtaaactcagctttccacgtctttaaaactgagttatgataccttcttgtgggttgaatgtgagaattgaayaggtcaatgaatgcagagaacttaacatagaacatgacctttatttgtgtttttaaaaacaaaatgtgaaaaccgtcgaagtacattaactgttatgtgaagaatgtaaaatctgtgaagaatgtaaaatatgatcaagtttagatttgtatccttgagtaatacacttcatgaaatagataatactattcacttattataaacattggaaatatatttacacaaacatacattttatttttcaaatttatttattacattttaattcctattaattatcttgctggtttagctgttacatccctaaaggagaaataaagccttaaatgactgtctctattttcccgtgtctttcagtaatgtatcctgcatatgc

SEQ ID NO: 766080 - DNA, 363 bp, Homo sapiens
ttgtataaacatatgtatgtgctgacagaagaattcattttttctggaaagattcagaaacagctgtaaacaatgactgtctcaaaaaaaggttctggatacctggagtaggaaaaagcctacttttcagtgtacaagcttttytactatgaattgttcactatgtccatctattacctttccaactcaaaaaaaaaaaaagggaaaaactgggaatataatcatcagtgtaatcatgtgcatttaactacaatttcttaaattttaagtatctacacaattacataatcccatttacactgaaaaggaaagcagactcagaatgtgagagtgattctcttcattcctttagaaaaaatacat

SEQ ID NO: 766081 - DNA, 596 bp, Homo sapiens
actacccacctaggctatacagtgtagcctattccttctagactacaaacctatactggcaagttacaatactcaatacagtaggtaattgtaacacaatacgtatttgtgtatctaaacatagacaacatagataaaactataatcttatgggaccattgtcatatatgcagtctgtcattgaccgaaatgtcattatgcggtagatgacagtactgctttttagatgctgctttttttcctgtttgtattctgctctaaccttcctaaatctcataaaattcaaagtacacagaatggtttytaagtactaacttttaaatttttcaagtaaatgaatctgtttggctaggtaccatcccttcggttcattcaggttggcttatttctgccaccaattctcaaattcttattttcctgttctttcctgaagtgccccgccacactcctgtaaaaaaaaaaaaaaagcagaaagcatagcaaaataaatgtggcatttatttaagttctattttagattttaggcaatcagaatttagtccacataatgataaattgtataatttgagaaaggaaaagcatagtaagagtgtact

SEQ ID NO: 766082 - DNA, 612 bp, Homo sapiens
tgattttttcttactaggttgcttgggttacaagatctggcaaaaccgagctggcagaaccaattgccattcgtcctactagtgaaacaggtgagaataggcattggagtgcaggagaatgctcactgaacgttagagacagcctctaaagttgagtctcagcttttgctttgtgatagctataatctctgttgacgatataacatttcatgaatgttgatgaagattgaatgcaaacttaagttgtctagagttttattctctaatattcattgtagagctcyttatcattaaattataggatttttaatttaaatactcatttttatgctgtaaatttttaggacttttcaaggagttttattcttagaataatttttattgttggaattgattatagtattgcaaatgcaatttttatgccataattatttttaaattttaataatacatttaggtttgcattcatgtagggtgttcataggttgctaagtacttttacgtcatctcgtgttattcttacaacagtgttgtgaggaaggcagggaaagttactgtgatttccattttgcaggtaaagaaaagtctctgaaagattaaatgatttttctg

SEQ ID NO: 766083 - DNA, 595 bp, Homo sapiens
atagatcatgagcaggctattctaagacaggtatcttcactttgcacttcattgcaagagctttcatactctgagtagatgcatcagatataaattaattctgcttctcatacataactgctggattcagcaaattgtttagcttctgtaaactcagctttccacgtctttaaaactgagttatgataccttcttgtgggttgaatgtgagaattgaayaggtcaatgaatgcagagaacttaacatagaacatgacctttatttgtgtttttaaaaacaaaatgtgaaaaccgtcgaagtacattaactgttatgtgaagaatgtaaaatctgtgaagaatgtaaaatatgatcaagtttagatttgtatccttgagtaatacacttcatgaaatagataatactattcacttattataaacattggaaatatatttacacaaacatacattttatttttcaaatttatttattacattttaattcctattaattatcttgctggtttagctgttacatccctaaaggagaaataaagccttaaatgactgtctctattttcccgtgtctttcagtaatgtatcctgcatatgc

SEQ ID NO: 766084 - DNA, 650 bp, Homo sapiens
atgctcacttcctgggtggtgggtttaatcatactccaaaccccagcatcatgcaatatgcctttctaacaaacctgcatgtgtaccctggaatctaaaataaaaattgaaaaacaaaagaaagaaaagagagcccaggatgcaatgaaatatatttaatattctgtgaatrttcttcttcttcttcttcccatcacaaataatagccattgatgatcattgtctagattcatgaattcattagggtttaatatagtggtaatctaattctgtcattctttcttcaatttacttgctggaatacttctataagagaaaattcaatgacttaacctaataaaaatttgttttttgctcaagcaatagtccagtgaggctgctgctgatatcttgactatactggactctctcctctaagcactaactcagatcactttcctcttgtgattgtatgcttttctgggtctttgaaatcttctctattaaggcggtgaatggaaaaaaagaataggggatcagatgtggcaagattttacaggccaggcctggaagtgtgttctttttctacctacattccattgactacaacagtcatatggctgtacctaactgcaagggaggctgggatatgtagttcaactgtatgtcca

SEQ ID NO: 766085 - DNA, 674 bp, Homo sapiens
ttcagcgaactaaggtatttaaatactttgtatatcttgcaatacagttacttccattgcactgacttaaaaggatgtccctcattttgtaacttattgttttgataatgaacttggcagagtttataaagtctgcagagtagaatacaaattgaccattaaytttttggcaataagaatgacatcatgttatgacatattacagatctttcagcaaagagtgcctctgttccagacgaacttggtgcctgtggacattctagaacatcaagctatgcaagtcagcagtcaaaagtatcaggtagaggctaacagtgaagttgaattccttattgttccaaagggacttgaaactgctgtggtgtgggggaacgatgtcagattgcagagtgtttgatatgagtattatatccaaggtgattttctctgacagggtatagcacgtgtcactcccggtcatctagtttctctgagctctgccacaggagaaatacctcagtgggaagcacatcaacaggagttgaaagtattctagagccatgtgatgaaattgagcagaaaatcgctgagccaaatcttgatacagctgataaagaagatacagcttcagaaaaactcagcaggtatccttttagtttaaagaataaattttaatttttaaaaaactttgtttt

SEQ ID NO: 766086 - DNA, 612 bp, Homo sapiens
tgttggcggttcaggactgtctctctgaccctcttcaatgcctttttcagtgataggaagtcaaaatcaggtactgtgatagctcatctgagttttggttcttgtgacggtgcttttctgtgtatagatagttgttaaaatttggtgttcctgccaaygggcagggggcaaacagtgtaggcttctgttccaccatcttactcccctttcttatacaatattttaaataatgttgtgcttgaaacaaagttttaactgcgttttggctgtgactcatcatatgaggtcaggtgtggaattttccacttgtgccatcgtttcgggtgctcagaagtttcagattttgtatttttcaaattagggatactcaacgtgtacttttctgtggtagaaatttgttatttgtagatttgaacactgtccctacatttcggtagtttcccacgtaatgatattcatcttacccaaatggaagcctcatccccaccacctaaaacattttacaacccaagacccttgaagctggaaataacctaggctcaatccattagatacgtggatttgagaattagattcagaagccagtcatggtggtatgcatctgtaatccca

SEQ ID NO: 766087 - DNA, 493 bp, Homo sapiens
gtataacagcattatgtctaaaaaatgtatataccttaatttaaaaatactttattgctaaaaaatgccaacaatcatctcagctttcagtgagtagtaatctttttgttggtagcaaaccttgatgttgatggttgctgactgacagggtggtggttgttaagggttggggtggctgtggcaatttcttaaaataagagaagaaggaaatttsctgcatcaatagactcttcctttcataaaatatttctctgtagcatgtgatgtttgacagcattttactcacagtagaagttctttcaaaattaaaaatcctctcaaaccctgctgctttattaagtttatggtttatgaactattctaaatcctttgctgtgagtttaacaattttcacagtatcttcactaggaatagataccatctcaataaaccacttttttgctcatatgtagagaagcacctcattgtccattcgagttttaatcatgagatt

SEQ ID NO: 766088 - DNA, 622 bp, Homo sapiens
ctagatcttctggataagttgctgcgctcttactttagcacttgccgcttcaccttgcacttttatgttatggaaatggcttctttccttaagccctgtgaatcaacctatgctagcttcaaacttttcttttgcacttccctcacctcttagacttcatagacttgaggagagttagggagtaggcttaagggaatttggtttaagggaatattgtggctggtgtgaccttctgtccaaccactaagattttctccatatcagcaataaggctgttatacttycttatcattcatgtgttcattggagcagcacttttaatttccttctacaacctttcctttgcattcagagtttggctaaatgttcagtgcaagaggcctagcttttggcctatctcagctttcaacatgccttcctcactaagcttaatcattgctagcttttgacttaaagtgagagaagtgcaactcttcctttcacttgaacatttagaggccattgtagggttaattagcctaattttaatattgttttgtctcagggaatagggaggtcccagaaggggaagggagatgaaggaatggccagtgagtagagcagtcagagcacactcaacact

SEQ ID NO: 766089 - DNA, 643 bp, Homo sapiens
cactttgggaggccgaggtgggcagatcacgaggtcaggagttcaagactagcctgaccaacatggtgaaaccccatctctactaaaaatataaaaattagctggacgtggtggtgggcacctgtaatccccgctgctgaggcaggagaatcacttgagcccaggaggcggaggttgcagtgagctgagatcacgccattgcactccagcctgtgggacagagcaagactccrtctcaaaaaaaaaaaaaaaaacctataaaacgggggtcctaacacctattaagtaggactgtaaaaattaatcaaatgaaatgtgtaaagcatcaagttcagtttctggcgcattgtaagtactcaaaaaataattactattcctatgttctgtatgattttaactaagcaaaaacaggcagaacaaagcttggggagaacatacattaaatattaataggtattatcactgggtggttagttattctttgttttatatttttgtgtattgtttcatactatataatttttatttctatagtcagaaaaaatacacattattaaaaaaactgtaaagacttattgaacaccatatgtaggcttataagtgtgtaaaggcacttgtcaaggatcccatccaatcttcccaa

SEQ ID NO: 766090 - DNA, 630 bp, Homo sapiens
taaagtgaagaagctgaattaaatgagtggcttcctgtgttagattgtattactttcttaaatatcccagctttccttccatagtgcttctccccatgcctgtggaaggattactcatccccaccttcttctttttttttttttttgagatggagtctcgctctgccrccaaggctggagtgcaatggcatgatcttggttcactgcaacctccgccaccagggttcaagtgattctcctgcctcagcctctcgagtagctgggattacaggcacccaccaccacacctggctgtttttcgtatttttagtagagacggggttttgccacgttggccaggctggtctcgaactcctgacctcaggtgatccacccacctcagcctcccaaagtgctggtattacaggtgagagccaccgtgcccagcctgccccaaacttcttgaagttaagagttccaagggacttgttttggtcaatgaaatgtgggcagaggcggatgtgtactggtttggagcagaggtttttacgcccagcacatggtatgccaggtcttttccctttgccatgagactggtaatgtttcggctaataagggctccatcagcatggttaccagagtgaagctggg

SEQ ID NO: 766091 - DNA, 630 bp, Homo sapiens
taaagtgaagaagctgaattaaatgagtggcttcctgtgttagattgtattactttcttaaatatcccagctttccttccatagtgcttctccccatgcctgtggaaggattactcatccccaccttcttctttttttttttttttgagatggagtctcgctctgccgccaaggctggagtgcaatggcatgatcttggttcactgcaacctcygccaccagggttcaagtgattctcctgcctcagcctctcgagtagctgggattacaggcacccaccaccacacctggctgtttttcgtatttttagtagagacggggttttgccacgttggccaggctggtctcgaactcctgacctcaggtgatccacccacctcagcctcccaaagtgctggtattacaggtgagagccaccgtgcccagcctgccccaaacttcttgaagttaagagttccaagggacttgttttggtcaatgaaatgtgggcagaggcggatgtgtactggtttggagcagaggtttttacgcccagcacatggtatgccaggtcttttccctttgccatgagactggtaatgtttcggctaataagggctccatcagcatggttaccagagtgaagctggg

SEQ ID NO: 766092 - DNA, 571 bp, Homo sapiens
caggctggtctcgaactcctgacctcaggtgatccacccacctcagcctcccaaagtgctggtattacaggtgagagccaccgtgcccagcctgccccaaacttcttgaagttaagagttccaagggacttgttttggtcaatgaaatgtgggcagaggcggatgtgtactggtttggagcagaggtttttacgcccagcacatggtatgccaggtcttttccctttgccatgagactggtaatgtttcggctaataagggctccatcagcatggttaccagagtgaagctggggagttgtttggaaaaattcctgaattagcagatctgtacatctctgggctgaggcttgggaacttatagttttagaaaattccccagggaaagtgtacagacatmtgcaatttacttggaagtggacaggaaaaagagatgtactgatggatgaatagagggacagataaataacaagacaagatatacaggttggagcactccttatctgaaatgcttgggatcagaagtgttttatattttaatttttttttattttgggatacttgcattatac

SEQ ID NO: 766093 - DNA, 546 bp, Homo sapiens
cacgtattgaatttttgctagtataattgattctaattataaagaaagttaaattttcagaaaaaatgtaaaaacataacattaaaagatatcacttgttgtaatacatatttatgaaaaactgttttgcagggctctaagaagttaaatcaaatacattctggatttcagtttcctcatctgtaaagcaaaatagttggatttaatggtgggttccttgaaactctttttgtctttgattcctggtaataccacactctattggtgattttagtgtaaaatgatgctttccagttaaattrccaatcaatggcaattcactggtttgtggactcctgtgcttaataaatggaattctaatttttcttaaccttaaattaacttctttaaaaacagatatatgtgactgttttagagatgacctctgacttctgacttggaaatgactcttaatttcaacataataggtctcagatgaaagattctttaaatatcttagcaatatccagattgacaatctctgagacaatttatggtaagctattt

SEQ ID NO: 766094 - DNA, 641 bp, Homo sapiens
tttatgtcctcacttctaaagaacagaattagttgtttctgatatcattggaattgtaattcacactcttagaaatcctgcaatggatctttcagctccactcaaacaagcacatctcagctgttacccaattacattgcctttgctccaagtcaaatcatcatccaacagctgagaactgaaacaaactccatttgtgaaaatgaaccataggtttattgataatgcagaatgttttaaagtgttaattctcttcatcctacagaaattaatatgttattttgggtcctattaattgtgaaatctaggaaactgagtcatagactttgatttaatttgtcattgatgtagtctarttttcagcagtgctgaaaagaaataaactaatggaaaccttgaataaatatttttgacacactgtcgttagatcttttgagaaaatgcccatcactttaaaccagtatgttacaagtctataaaagctcacattgtattgctcgtgagattgttgggtagtctcgccatctcaaaaggaagcacagaggcagtcaaatagtctatgtgtttattcattggttcatgttcttattgggcacctattgtatgtttcatttgctcatgctgcccgaaatagagcgctc

SEQ ID NO: 766095 - DNA, 541 bp, Homo sapiens
tgagtgctcattgcttattagctgtggtatttcactgggcaatctctgggtatagtgaacttacgggaataataataaatatcacagtgctaaaatggttaatattctataagcaacaagggaaattaaccctgaagtgcacagtaccttaagaaatgataatggcaaattctaaaatgaacaatatcatgggattaaaaatcaacatggagacgccacagtaagatgcaacttaacgttagatccatgcaacttgcaggtaaaaacaaaaccgtttattaattcattcaaattgtatttaccaagtgagaaagatagagatgttaactatttaaggtctagttaacataaactaaaaagctactggacttctaacaaaawactctgtctaaagagttaggtcttttaatatataaactgtttcatttcctaaatatctatccgtaggatattcttacatgtttctttcacattttaatgtgtgaacttgaggacttaaagattcttttacttagcattaaaacatatgcttaagaactgc

SEQ ID NO: 766096 - DNA, 643 bp, Homo sapiens
ctgtataaattcacagatgtataatactcgagaaaccacttaaggtaactaacttacattttcaaactgggaagagctaattatgaatggatctttgtatgtgactaccaactgacatgttcaattgatatcaatttttaattttccagattaacccatttcttccttattttcatttcattaaatgttactacctaccacactgtttaaactaaaaattttacaatctatttcacttctctatttctttaatattatttatcaatatatttttctcaaaccctgttaactcttccttcaaaatatcccaattggatccttctcactaccatcttgttaccccctggcctactctaatagccccctgcaaaatctctccactcatcttctggcctctaataatgttcyttcatgaagtagcccaaatgatcttttgaaaatcttattaatatcataccactcctctactcaaaaaccccatggtggatttatattctgcactcaatgaaatggaatctttctaccttggcctacaagaccctagatgacctggatccaggctacctccccaaatccatcccttacaattgtccacatttatactgctccagacagtttcgatattcaccaaatatacaatgtg

SEQ ID NO: 766097 - DNA, 643 bp, Homo sapiens
ctgtataaattcacagatgtataatactcgagaaaccacttaaggtaactaacttacattttcaaactgggaagagctaattatgaatggatctttgtatgtgactaccaactgacatgttcaattgatatcaatttttaattttccagattaacccatttcttccttattttcatttcattaaatgttactacctaccacactgtttaaactaaaaattttacaatctatttcacttctctatttctttaatattatttatcaatatatttttctcaaaccctgttaactcttccttcaaaatatcccaattggatccttctcactaccatcttgttaccccctggcctactctaatagccccctgcaaaatctctccactcatcttctggcctctaataatgttctttcatgaagtagcccaaatgatcttttgaaaatcttattmatatcataccactcctctactcaaaaaccccatggtggatttatattctgcactcaatgaaatggaatctttctaccttggcctacaagaccctagatgacctggatccaggctacctccccaaatccatcccttacaattgtccacatttatactgctccagacagtttcgatattcaccaaatatacaatgtg

SEQ ID NO: 766098 - DNA, 598 bp, Homo sapiens
agagggaaaagcacaaaaccttgcaacaagtaaggtgtgaaaaaataaaaggattactataggctacattattcccttgtgttgcaactcagatcagcttcagtggcaagatacatagtttgtcctcaagcctttctcttctaattcccctcaagtaagagaatcctagaagagctgttctgatcatgtataagaatatataaattcaaatggcataagggatatattacagtatacatgaggaggttctgccttgcccttcatttaggaaagaagaatttatttttccagctgttgggggtgtgctgttagtagacagcattcagatgatatccacttcagtatctttagaagttgcagaaagccacctcaataaaggtcgcatgccctttcccagagcagcccctctttgcatmcaggttaacgtttaggttcaggtatcattagaacatactgctcttccaactactttgtcatcatttttccatttttaaatttccaatttcctcattagcttatcaaacctgttagccagtgtccattttcagtgtagatccataagtatggttattattccttccacatacagtggaaaacc

SEQ ID NO: 766099 - DNA, 480 bp, Homo sapiens
tctatcattgttggacatttgggttggttccaagtgtttggtattgtgaatagtgccacaataaacatatgtgtgcatgtgtctttaaagcagcatgatttataatcctttggatgtatacccaataatgggatggctgggtcaaatggtatttctagttctagatccctgagaaattgccacacygacttccacaatggttgaactagtttacagtctcaccaacagtgtaaaagtgttcctatttctccacatcctctccagcacctgttgttttctgactttttaatgatcgccattctaactggtgtgagatggtatctcattgtggttttgatttgcatttctctgatggccagtgatgatgagcattttttcacatgtctgttagctgtataaatgtgttctctttagaagtgtctgttcctatccttcaccaactttttgatggggttgtttgtttttttcttgtaaatttgt

SEQ ID NO: 766100 - DNA, 607 bp, Homo sapiens
ctcagtgacaagctgtggtggaatgggccaatcacactttaaaaacccaattgtccaaacagtctgaacaacaaaaacataatttaactaacccccactcccaattacatttagcattgtttactttaaattttttaaatgttcctaaagataataatctaactgcagccaaacgccattatacaggcaaaaaattctccctaaacaaaggcaacccagtgttayggaaaaactcccaaactaatacttgggaacctggcacaattataacgtggggaagaggctatacttttgtttcaccaggagatcatcaatcccctttctgggtacccaccaggagcctcaagcttcgggtgtatactgacaatgaaaaccacagggaaaagacgtccatgtcagagactgccctcagacatggtgagatctgtgacgactcctcagaagcaggcacaccaaatcactgattcaatcctccctgatgtcaatgtagacccatctaactaatcccacttctcctgattaccttttcttttcttcttacaaacctaaaaatctcaccatttctattggcctgaaaataacatccctctgttcttctcttcctcct

SEQ ID NO: 766101 - DNA, 654 bp, Homo sapiens
atttagtgactcattcaggccaaaggtgaaaaagagaatatcctgagatataaactataatgaaactatttgacaaactgcattgtgatgtgtgcattcatctcaaagagttaaaactttcttttgattcagtaatttgggaacactgtttttgtacattctgtgaatggacatttgggagcatattgaggcctacaatgagaaagaaaataacttctgataaaactagaaagaaggtttctgataaagtgctttctgatgtgtgtgacaatctgtgcaactcacagatttacaactttcttttgattcagcagtttggaaacactgaatttgtagaatcttcaaagggatatttgggagtgcattgtggcccacggtgaaaaagaaacyatcttcagttaaaaactagaaaaaatctttctgacaaacctctttgaggtgtgtgcatccaactcacagagttaaatgtttctttcaatgcagcatttggaaacagtgtggttctccattctatgaatggacacttgagagctcattgaggacaagggcaaaaaaaaatctaatatgcctggataaaaaccagaagtaatttacctgaaaaaccacctggtcatgtgtgcattcatctcacagagttaaacgttacttttcttt

SEQ ID NO: 766102 - DNA, 569 bp, Homo sapiens
agcagtttctcataacagtgttttccacttactatcgggcaatatttccttttccaccataggcttcaatgtgttgccagatatcccttcgcagaatctacaaaaacagtgtttccaaaccgctgaatgaaaagaaagttttagctctgtgagatgaatgcacacatcaaaaagcattttctcaartatcttccttctagtttttatcctgtgatgtgcaccttttcaccattggcctcaatgagctcccaaatgtccattcacataatggacaaaaaaagtgttaccaaactgctcaatcaaaagcaagttttaactctgtgagatgaattcacacatcacaaacctgtttctcattaagcttctttctagtttttatctgaagatatttcctttttaaccatagccttcaatgccccaccaaatatctcttcacagattctaagaaaacagtgtttccagactgctgaatgcaaagaaaggtttaactgtgtgagataaatgcactcatcacaaaggagtctctcagaaaggttctttctggtctttatctgaagatatttcctttt

SEQ ID NO: 766103 - DNA, 462 bp, Homo sapiens
gtgacccagaagtcctacagggtgtccacctctggcccctaggccttaagcagccgctcctacacaagcgggcctggtgcccatatcagctcctggagcttctctcaagtgggcggcagcagcagcttccggggtggcctgggcaccgcatggctctgggtggaggctatggtggggccagtggtatgggggkcatcacagccatcatggtcagccagaacctgctgagcccccttaagctggaggtgaaccccaacatccaggctgtgtgcgcccaggagaaggagcagatcaagaccctctacaacaagtttgcctccttcatcgagaaggtgcggtccctggagcagcagaacaagatgctggagaccaagtggagcctcctgcagcagcagaagacagctcagagcgacatggacagcatattcgagagccacatcaacaaacttcggcggtagctgg

SEQ ID NO: 766104 - DNA, 620 bp, Homo sapiens
catcctttctttttgccctcagattttaccatttatttacacaatatttggttacgttgtataatccagtagtaagttcagctagcacaggtttgggaacaaatgagtgggagcaatgtatgctttactcagagtggggaaaatcaatcggtaaagtgagttggctaagtggacgttggtaagaaatctccaatgatattttactatctaaagtartcttttactgtaaaaataatgattgcttaaggcatataattaaaacaattccaaagggaatcaaatattttcctctcttttcttcatatagtagctggatatccaattttttgtgtatccttaatgaaaataatagtttttaaaaacaaataaataatatgtgcacaaataatgcagagaaagttgaaggttctccccaactcacttttttttaagacggggtcttgctctgttgcccaggctagagtgcagtggcgcgatctcagccccctatagcttctacctcctgggttcaagcagttcttgtgcctcagccccccaagtagctgggactacaggtacgtgcaaccacacctggctaatttttgtatttttagcagagatgggatttgccatgttggcca

SEQ ID NO: 766105 - DNA, 621 bp, Homo sapiens
gatgacaagtcagttgggtatataaagctagagtccgggggtaaattccagttagagttaatatatgtaaagttcttaaaacagtgctacgtgtttctttttaagctgtcagattgtgtcactcctttgctcaaaactctccggtgatttctcattttattcagacaatggcaaaatctttccagtgtgcctacaaggctctccatgatttatcctcttacccaacatctactttggtgatggttaatactagctgttgtaacaaataaaccccacagtaccagtggcttcacacaactgaagtttattttttgttcacaggacagtccrgtgtgggtattcttggtcagctggagcctttcctccatgtgctttaccattacttagagcctcagaatcttctaattctagctggtagaaggcaaaaatagaaagaagggagaagtctaatctgcttcttaagtgccctgacctagcagtgacatacataaagtcctacacacattccattgttgagaactagtcacatggccacatctggatgcaagtagggctgggcagtgtccctgaggaggcgggtccacacactatggaagggaaaattgatgtttttgaattgca

SEQ ID NO: 766106 - DNA, 633 bp, Homo sapiens
gtgtccatgtccataaatggatagtcaggctgtattgaaccttgcaatcccaatcagaccctttgcaaaagaggaaaaagagtaggccatgtctcttgaactagaaagaccaaagagcagcccagctgctgctcttccactcctgcccttgctctttctcctcacctctgtaawcattgtgagccaggggcttccttcttctggtatagtggcctgattttgcccttgtccttggctctttagtgttattgcatgtcaggctctctggtcaccagctgtacttaatgtgtgccacattcagacagttctattaatttatcttaggctgctttcctagtctgcctagatgctggggagcctactttctaatggttgtggtagatggaaggatgaatggatttctagaagttgaattactaagtcaaagaccataaatattttaagctcttatattatctgttagatacattaatagacctttttttttttttaaatggagtctcaccctgttgcccaggctggagtgcagtagtgccatcttgactcactgcaatctctgcctcctgggttcaagcagttctcctgcctcagcctcctgagtagctgggattacaggtgcctgtcaccatgcgc

SEQ ID NO: 766107 - DNA, 615 bp, Homo sapiens
ttggcttatcacatggcaataataaatcgaaagagaaatagatattatgttggatggagcacattttgaagagacataacaaaaatcactacagaccaaggaaagacatgtttaggcacatatttagaaagaaggctccagcaaattacagaaatagatgcaaaaaagagagactagaggtgggaatggtcagcaggacttaccaaataaccagagaagtgattatgaagcttcaaattatggctgggcactaaggatgaaggaaatgactcaagtagaagtatttctttgttaggatcttgctggaatgcttattggtataagtgagaaaaatgasaaaatgaaaatttttacatatagctcccagatttttagttcaggaagctaaaatacaggagaatgaaataatttagaagacatacatttagaatcacgtttttttttaaagtagatatttaaaactattaaaatttagatatttatccaggcagaaaaaataaagaaattaacggaaaagacagagaatagaacttgagaaacatctacgtaagggatgacagggagaagaaaagcaagtgaaggagaaatagataaaatgattacagtatgacaaaa

SEQ ID NO: 766108 - DNA, 615 bp, Homo sapiens
ttggcttatcacatggcaataataaatcgaaagagaaatagatattatgttggatggagcacattttgaagagacataacaaaaatcactacagaccaaggaaagacatgtttaggcacatatttagaaagaaggctccagcaaattacagaaatagatgcaaaaaagagagactagaggtgggaatggtcagcaggacttaccaaataaccagagaagtgattatgaagcttcaaattatggctgggcactaaggatgaaggaaatgactcaagtagaagtatttctttgttaggatcttgctggaatgcttattggtataagtgagaaaaatgagaaaatgaaaatttttacatatagctcccagatttttagttcaggaagctaaaatacaggagaatgaaataatttagaagrcatacatttagaatcacgtttttttttaaagtagatatttaaaactattaaaatttagatatttatccaggcagaaaaaataaagaaattaacggaaaagacagagaatagaacttgagaaacatctacgtaagggatgacagggagaagaaaagcaagtgaaggagaaatagataaaatgattacagtatgacaaaa

SEQ ID NO: 766109 - DNA, 437 bp, Homo sapiens
tataggagaatattagtattgtcttgagttaagcaacaatctattaaagggtcacaaaatgtactactaataaagaaaatgaacaatatattgtaatgcattaaatttaaagttatctggtcaacaaattattcctatgagagtaaaaaggacaagtagaaggacaggagactatagtkcttacacatgtatctgacaaataacacatttaagatacacaaagaatagctacaaaccaaataagggaaaaaaaggaaatgatttggctatctactttttaagagaagatatcataattatcaataaatgtaaaatagtgctcaatttcatccatcagaaggaagcaaattaaaatcacaatgagataccactatataaccaccagcatggcttaaattaataatattaataattccagtgtaagtcaaaatgtaaag

SEQ ID NO: 766110 - DNA, 437 bp, Homo sapiens
tataggagaatattagtattgtcttgagttaagcaacaatctattaaagggtcacaaaatgtactactaataaagaaaatgaacaatatattgtaatgcattaaatttaaagttatctggtcaacaaattattcctatgagagtaaaaaggacaagtagaaggacaggagactatagtgcttacacatgtatctgacaaataacacatttaagatayacaaagaatagctacaaaccaaataagggaaaaaaaggaaatgatttggctatctactttttaagagaagatatcataattatcaataaatgtaaaatagtgctcaatttcatccatcagaaggaagcaaattaaaatcacaatgagataccactatataaccaccagcatggcttaaattaataatattaataattccagtgtaagtcaaaatgtaaag

SEQ ID NO: 766111 - DNA, 471 bp, Homo sapiens
gtactgatttacatttccaccaacagtgtacaagagttccttttctccacattctcatcaacacttacatatcttttttatagccattctagcagctatgaggtgatatctcattttggttttaacttgcatttccaaaatagagatgttgagcattttttcatgaatctgttggccattcgtatgtcctcttttgataaatgtawattcagatcctttgcccattattaatagtttttttttttcaattgagttgagttctttatgcattttggatattagctccttatcagatatgtggtctgaaaatattttcttccaatccattggttgtctcttcactctgttgtttactccgctatgcagaaacactttagtttgatacaatcacttttgtctatttttgctttagttgcttgtatttttatgttgtatctatgaaatcagtgccaaaaccaatgtcatgaagat

SEQ ID NO: 766112 - DNA, 539 bp, Homo sapiens
gtatcttcccttttcttttcacaattgttgctagtaactcaacctctatttcttaatagaaatttagactacttaaggaaagaaaattgtagagatcatagagatctaccaagaccattagtatcatagcacatggtacagaaaamagaatttgtgttaccggtcaacagtgctggctcatcataaaggcacaaagacaatttgctgagctgagctgagcttggtttcaatgctattacttcaattcattttcccctaaagatagggctgtttttttgcctctttcaattgaacttatgtacatagagagtagaaaaatggttaccagaggctgggaagggaagtgggggcactgggaaggggaggcacaaatgattaatgggtacaaaaacaaaatagaaagagtgaataagacctactatttgatagcacaacaggttgactatagtcaagaataacttaattgtatatttttaaataacttaaaaatgcaattggattgtttgtaactcaaaggataaatgtttgatggaatggat

SEQ ID NO: 766113 - DNA, 539 bp, Homo sapiens
gtatcttcccttttcttttcacaattgttgctagtaactcaacctctatttcttaatagaaatttagactacttaaggaaagaaaattgtagagatcatagagatctaccaagaccattagtatcatagcacatggtacagaaaaaagaatttgtgttaccggtcaacagtgctggctcatcataaargcacaaagacaatttgctgagctgagctgagcttggtttcaatgctattacttcaattcattttcccctaaagatagggctgtttttttgcctctttcaattgaacttatgtacatagagagtagaaaaatggttaccagaggctgggaagggaagtgggggcactgggaaggggaggcacaaatgattaatgggtacaaaaacaaaatagaaagagtgaataagacctactatttgatagcacaacaggttgactatagtcaagaataacttaattgtatatttttaaataacttaaaaatgcaattggattgtttgtaactcaaaggataaatgtttgatggaatggat

SEQ ID NO: 766114 - DNA, 538 bp, Homo sapiens
tagtcaagaataacttaattgtatatttttaaataacttaaaaatgcaattggattgtttgtaactcaaaggataaatgtttgatggaatggataccccattttcctggatgtgcttattttatattgcatgcgtgtatcaaaacatctcatgacaccayaaatatatatacctactctgtacccacaaaaagtcttaaaaataatttttaaaaaattttaaaagctttgcttcaattactcttgaatgcttggttctggcaccgcctacttcttgtgggcatagtgcccactgcacgtgttcaagtgagctgcactcatccatctttcactagggctgattcatagggtggccagaaccaatttagaaccatagcttgctgcttacataaatcaatgaaatcgtatgaaacacaatataacatggtttcattgaaagagcacaggtgtcaaaaggatgtgagtttacatattacataacttaatatttatttgaacttggactggtcacttagcctggttgaacttcaaatccttta

SEQ ID NO: 766115 - DNA, 586 bp, Homo sapiens
aataacttctagagactttaagtgggggagtattatttttttcataattgttactagttatgcttgttttgcaaaggagaaggtccgtgaagcttctcccactgccaatccagaagtggaaacccagaaaccctttttaaaaaaaaattcctacactgaatgtcatttcaacatgtaaaacacatacaagtagaactgctctaattgtgattggggtaaagtctccgaagtccattcgggtggcaagttctcaaatatttcacggactctagatgacttatttatcaacccttggattagatgacagtattctttcttttttttttaacttttattttaagttcaggggtacatgtgcaggttgattacawaggtaaacttatgtcatgggagtttgttgtacactgttggttgaagtataaattagttcaaccattgtggaagagagtctggcaatctcttgaagacctaaagacagaaataccgttcgacccagcaattctattactgagtatatacccaaagaaatataaatcattctattataaagaaacatgcatgcgtatgttcattgtagcactattta

SEQ ID NO: 766116 - DNA, 625 bp, Homo sapiens
ccaatgctaataattcaagacaatgggaaaaaggccttgaaggcatttcagagacctttgtagcagtccttgctgtcactggccctggggtttaggagtaaagaatagtttcctggctcagcccatggctccactgctgtgtgcagcctcaggacactactgcctgcatccctgcagctccttttccagcttcagccatggatgaaagatgtacaggtacagcttgcatcactgcttcagaggatgcaagctccaagccttggtggcttctacatagtgttaagccagcaggtgcataaagcacaggactagaagcttcagagccttcgtctggactccaragaatatatcagaaagcctgagtgtctagccagaagcttttccaagaggcagagcctcatggtaaatctctactcaggtagtacacaaggaaagtatagggttggagtccccatagagggaggcaccattttccagacctcagtttcatagacccaccagctgcttgcacccttagtgttgaaaagctacaggtactcaacgccagcctagccaatgaagtcagctgtagggggaagattctgcaatgccacatgtgcagagctgcccaaggccttgggatccc

SEQ ID NO: 766117 - DNA, 498 bp, Homo sapiens
ctttttgaagtatgaatattttagtgtatatgctctagacttcaaactctataaagagtctcaaagaagttggctggataaagcctgctgtggatgtctttatattcaaagattgatgatgcaatttgaatatgtgtccccacggaatctcatgttgaattatatttcctaatgtggaaggtggatcctggtataaggtgattgaattatgaaggcaaatttctcatgaatggttcagcaccmtccccttgtaccatcctcacaataatgagtgacttctcatgagatgtagtcactgaaatctctatatcacctccccactctccgtgttttccccttgccatgtgagacaattgattctttctttgccttccatgattattgaaagatttctgagacctagaagcagaagcactgtgcttagaaccatgagccaattaaacctctttttcaaaataaatcatacagaaaatggcaaatgaggactggagcgttgct

SEQ ID NO: 766118 - DNA, 576 bp, Homo sapiens
taatgagtgacttctcatgagatgtagtcactgaaatctctatatcacctccccactctccgtgttttccccttgccatgtgagacaattgattctttctttgccttccatgattattgaaagatttctgagacctagaagcagaagcactgtgcttagaaccatgagccaattaaacctctttttcaaaataaatcatacagaaaatggcaaatgaggactggagcgttgctataaagatacctggaaatgtkgaagcagctttggaaccaggtaatggacggaggttggaagagtttggagggctcaaaagaagacagatgagaaaacttttggaccatcttagagtctggttcaatggttgtgacaaaaatcctgacagaaacatggacagtgaaggccaggctgaggaggtctcagagagaaataagaagctttctggaaaatgtcttccttttggatatggaaagctcacacaatgcctgctttttatttcagagactcataggcaaaagagactgtagccttgacccagatgagactttggactttgtaactttgagttaatgctgaaat

SEQ ID NO: 766119 - DNA, 618 bp, Homo sapiens
aagtttccagatacaagattaatggacacaaatcagtagctcttccatacatcaacagctaccaagcagggaatcacatcaagaactcaaccccttttacaatagctgcaaaaaacaacaacaacaaaaaaacaaaacttaggaatatacctagcaaaggaatcaaaggaccgctacaatgaaaattacaaaacgctactgaaagaaatcatagatggagccaagcacggtggcacatgcctataatccgagctactcgggaagctgaggcaggagaatcgcttsaacccgggaggcagaagttgtagtgagccgagatcacaccattgcactcccacctcagcgacaagagcgaaactccctctgaaaaaaaaaaaaaaaaaaaaagaaagaaaagaagtcatagatgacacaaacaaatggaaatgcatccccatgctcatggatgggtagaaccaatattgtgaaaattaccattctgttaaaggcaatctacaaattcaatgcaatccccatctgaatgccaccatcattcttcacagaattacaaaaacaattctaaaattaatatggaaccaaaagagagccatgtaaccaaaccaagcctaagcaaaaaga

SEQ ID NO: 766120 - DNA, 622 bp, Homo sapiens
tagcagtgagctgttgctgtctgtgttgttgttgtgggtaatggattcagggctctgccctatgagcacatgtccctgcccagaggacaccgttggcctagggggtggagtgtaagggaaatggctatgctttatcaggagcaggtcgaggcagctttctggtacaagacaactcagcaggtttggagtgcaggcacacatccccacacattatgtaagtatgcaacatgaggcacattaggtgatcatccgtgtgagcttgtgcttggctcagggccactaattgtctgtaaaagatataattactctgctaacactacacatatggtttacttgcacccagacaaagagtaaagccatgtcaaaactgtcaactattcttcaagtgtttcttcagctacccacsactcacccactgactctcctgggacctcagttagaacctaacaaactccactttaaataatgaatagacatcccaacacaaaaaatttaggcagcagacttgaaccacactatagaccaaatggaccaaacaggcatacatggaacattcccccaacagcagcagaatacatgtttttcacaagcacacacagaatattctccaggatagatcaca

SEQ ID NO: 766121 - DNA, 548 bp, Homo sapiens
atactttaagaaaaaatgatatgttgtaggctaatgttcgacctttctcaccatgtttatgttcctaaccgcatctatttttattcccaaatatttgcaagtctggacttttaggacttgtagaaaccaaaaccttgcatcatcatatttcaaggccaagttaacttaataataattaagttgtcactgataatttattttttaaaagttaagcatggaaacagtgcctcctcttttaaactaattttaaaatttttggaggggaggagccaagatggccgaataggaacagctctggtctacagctcccagcatgagcgaygcagaagacgggtgatttctgcatttccatctgagctttgaagagagcagtggttctcccagcatgcagctggagatctgagaacgggcagactgcctcctcaagtgggtccctgaccctgacccccaagcagcctaactgggaggaaccccccagcagggcagactgacacctcacagggccgggtactccaacagaccagcagctgagggtcctgtctgttaga

SEQ ID NO: 766122 - DNA, 549 bp, Homo sapiens
atactttgtgcttttaaccaatacgtcaatattcaaagtggtggaattcagactcaaattcattccaaaccttttctttgtttttcacttggagtcacaggagaatattcctactcttaaatccagatgcctctgaagaccaggaattgactttctccttagtaagtcacagacacttttaagacaagtgtgagaatattatcacctttctggggtattcagagttccccaaggagcctcaggaaaatagtatgttcagtgtgataattgatagctctgattcatctggctattcctcttccttccagagyttcctgccatgtcataccattcctttcacatcatcactgtgtgtccatgtaaatgtatctagacagccatcctacacttttttttaaatctccaacttctgctcagcattcatattgaagtcttccccaggtgaagcagttttagaagtcgactccgaatctccttggttctagctccatagagaataggattgagtacaggaggcaccagcacatagagattagccagaaagatgtg

SEQ ID NO: 766123 - DNA, 564 bp, Homo sapiens
aagtgggcagcctccagccctgggatccctgttaagaagaaggtgtctggaagatggttatcactgaggttggaatctgacattcttcctggcaaatgaagggctctttctgaatagtattgttatgcttgccctgtaacatcagatatttggttgatttatgtaaaacaaagatctttctgtgaaataatcttttttagactaaaaaaatttgtttttcacttgtacaaacatctgaaatgactaccacatataattcattttaaaacctyctgctaatttctatattgaacaatgatgttttgagttctatatccaaagcaccaagctaagtatttattagtcttctcaaactgacctttccagacttatctccctccatatcctgcacatcatttattgacctctagtccatccacatcatgggatatttcttacctctcattcatgccttttctcttacctagggagtctcattcctttattttcctcctctctattaagttttaatacaagtttccctgcttcccagaggccttccctttctaaactggtcttggtaat

SEQ ID NO: 766124 - DNA, 571 bp, Homo sapiens
acttgcctagttaacttatcatggtgatactcaactcttcacctagtctctgtttaggcaaaaaacggcatacagctgtgctgactagtttcatttaaacttattaccaaaagatttaattaccgtcttagtaattctaactgcattttcccagtccagtgattctcaccagaatctgcaccaggatcacctggagggcgtgttaaaacacagatttctgcccgacattccaagggtgttagattcagtaggtctaccgttgggttaaaatctctaatttctaataagtttccaggtgatgctaatgctgtcagtttggagatcatacctggaaatccactatcctagttaattcactaccttattgttagtccaaactgcaccattttgtaaacttcccactatkttgcagaccttggtcaaagtgaaacatttcacgggggttcaggctgtgagaaacatcctgcctaaccacctgaccacaaggcagacaaaggtccaactaaagcaacatccctatcatatcttgctgcgcaaaggtccattgaacaccacgatgacatcctacaga

SEQ ID NO: 766125 - DNA, 571 bp, Homo sapiens
acttgcctagttaacttatcatggtgatactcaactcttcacctagtctctgtttaggcaaaaaacggcatacagctgtgctgactagtttcatttaaacttattaccaaaagatttaattaccgtcttagtaattctaactgcattttcccagtccagtgattctcaccagaatctgcaccaggatcacctggagggcgtgttaaaacacagatttctgcccgacattccaagggtgttagattcagtaggtctaccgttgggttaaaatctctaatttctaataagtttccaggtgatgctaatgctgtcagtttggagatcatacctggaaatccactatcctagttaattcactaccttattgttagtccaaactgcaccattttgtaaacttcccactattttgcasaccttggtcaaagtgaaacatttcacgggggttcaggctgtgagaaacatcctgcctaaccacctgaccacaaggcagacaaaggtccaactaaagcaacatccctatcatatcttgctgcgcaaaggtccattgaacaccacgatgacatcctacaga

SEQ ID NO: 766126 - DNA, 504 bp, Homo sapiens
tttccttgtagctggatatactatgctgtgggtacagctggcagtggcatcagctcattctcctaagacttataaatttatgagccctccagaacaccaagtcttgcttgtgtgtggtgggaggagggaccatggaaataactgggaaggtggtatcagtgaagagtgagttgggccataagagaattgytcccaggagaatatctttcttggcacaattatccctgatgtaatcatccatatctattagtgtgttaatccttctttgatcagggaatgtaaacacactgcatacatgtatgcacagaaacataaatagccatagctctcctgagaccttcacagatacccccttagacctatttaactatttatttactaacattcacattgcctcattcaaatttacatacatacaaacagataaatacaaatatactcaggcaattgcccagtgctctagtcactaattgtatgtattgtcacatcaaacacacactataa

SEQ ID NO: 766127 - DNA, 504 bp, Homo sapiens
tttccttgtagctggatatactatgctgtgggtacagctggcagtggcatcagctcattctcctaagacttataaatttatgagccctccagaacaccaagtcttgcttgtgtgtggtgggaggagggaccatggaaataactgggaaggtggtatcagtgaagagtgagttgggccataagagaattgctcccaggagaatawctttcttggcacaattatccctgatgtaatcatccatatctattagtgtgttaatccttctttgatcagggaatgtaaacacactgcatacatgtatgcacagaaacataaatagccatagctctcctgagaccttcacagatacccccttagacctatttaactatttatttactaacattcacattgcctcattcaaatttacatacatacaaacagataaatacaaatatactcaggcaattgcccagtgctctagtcactaattgtatgtattgtcacatcaaacacacactataa

SEQ ID NO: 766128 - DNA, 446 bp, Homo sapiens
cacattctcattaacaagtcaataaaatatccaacaaattcagatctccatatttattcagattcatatgtggaatttaagtgtgttatgtattttttgtacaaatgcatgctagcatccatgtaacaaattccttatgcaagcactccttttactccattactatatggaacctaaaaattataatcagtttattccaccaaccaaacagataaaaacagatttttgagcaacattttagtctagatattattatcagcactkatagtatacagaccaataaagacgcagcacctacccttgcaaagaacataaatatttaaaaactaatccacctaacaggctaaatgtacctccaagccctatctagaaatatgttataaacatatttcacaacaaagccaatgcatttatcaaaacttatctagtgtgcatgtaagacttgt

SEQ ID NO: 766129 - DNA, 625 bp, Homo sapiens
aaaaacttgatgaatagcactaatgtctacaacattgatttacaactgtatatattggagagtgggtgaatgaaacttacaaaaaaaatcatatggataggtgatttctcagtattatcgtccttgatcttagaaaaatccagtatgaaaatacaaattattaaatcagatcaagtatgggttacttactcacagtgcatgaattatttaatttataaaaggattcagcttaggatctttttaaaactttgaatttcttaacacatctaaatatttatttacagatmatttaccaaagaattctgcaaactttgtgttgaaccttaggctaactcttaatacatacgactttgagtttttactgtaccttgcctatctgtgtgtctaggcaaaacatatacattaatccacggtttctctaggccaagctgtaaagggcccatggttagtcaaacccaagaaaaagaagactgaaatgcactgtataatcagaactgtgacattcattctgcagaataagaaattcagcctccagaacaggacaagagtggtctcttctgtgagatgtaaagccccagtttttctttcagcagtggctggtggggttttccaacaaaactcaatt

SEQ ID NO: 766130 - DNA, 625 bp, Homo sapiens
aaaaacttgatgaatagcactaatgtctacaacattgatttacaactgtatatattggagagtgggtgaatgaaacttacaaaaaaaatcatatggataggtgatttctcagtattatcgtccttgatcttagaaaaatccagtatgaaaatacaaattattaaatcagatcaagtatgggttacttactcacagtgcatgaattatttaatttataaaaggattcagcttaggatctttttaaaactttgaatttcttaacacatctaaatatttatttacagatcatttaccaaagaattctgcaaactttgtgttgaaccttaggytaactcttaatacatacgactttgagtttttactgtaccttgcctatctgtgtgtctaggcaaaacatatacattaatccacggtttctctaggccaagctgtaaagggcccatggttagtcaaacccaagaaaaagaagactgaaatgcactgtataatcagaactgtgacattcattctgcagaataagaaattcagcctccagaacaggacaagagtggtctcttctgtgagatgtaaagccccagtttttctttcagcagtggctggtggggttttccaacaaaactcaatt

SEQ ID NO: 766131 - DNA, 554 bp, Homo sapiens
tggatcctggattttttgttgttgttgttgttctgagacggagtctcactctgttgcccaggctggagtgcagtggtgtgatctctgctcactgcaacctccgcctcctgggttcaagcaattctcctgactcagcctcccaagtagctgggattacaggcacccgccaccacgcccagctaatttttgtatttttagtagagacagggtttcaccatgttggtcaggctggtctcaaaatcctgacctcaggtgatccacccgcctcagcctcccaaagtgatgggattacaggcrtaagccactgtacccggtctcttttgtataggtaaataatgatcaaatattggcaactttatacggtttatcctaatatttaaggctaaaaacttgctgtaagcactggtatttcccataagttaaaatattgatattacaaaattatttcttgttgatgagtgcatttatttatagtaaaaatgcaaatcaggcatgggaaagatacacaccagttttaggatagtagttactttagagaaggaagggatgatgaa

SEQ ID NO: 766132 - DNA, 471 bp, Homo sapiens
tagtgccaccatcaaggacttgaaagatgcaggggtggtgatgcccaccacatccccattcaattctcccatttggcctgggcagaagacagatggatcttggagaatgacagtggattatcgtaagcttaaccaagtggtgaatccaattgcagctgctgtaccagatgtggttccattgcttgagcaaattaacacatctcctggtacctagtatgcagcaattgacttggcaaatgcctttttstccattcctgtccataaggcccaccagaagcaatttgccttcagctggcaaggccagcaatatatctttactatcctacctcagtggtatataaactctctagctttgtgtcataatcttattcagagagaccttgatcactgttcactgtcataggatatcacactggcccattacattgatgacattaggctgattggatccagtgagcaagaagtagcaaa

SEQ ID NO: 766133 - DNA, 542 bp, Homo sapiens
cagtgtgtacaatggtacttagtaaactgtgagtgtgagttcggaataaaataacgggttcctggacaggcgtggtggctcatgcctgtaatcccagcactttgggaggccaaggcaggtggatcacgaggtcaggagttcgagaccagcctgaccaatatggtgaacccccctactaaaattacaaaaagtagccaggcatggtggcacaygcctgtaatcccaactatttgggaggctgaagcgggaaaatcacttgaacctgggatgcggaggttgcagtaagccaagatcatgccactgcactccagcctgggtgacagagcaagactctgtctcaaaaataaataaataacaacaaaaaaataacgggatccctctctagagggctcccccaaaccaaacacataacccaccttttccttcatgaacagtcagcaaggtcaaaggaggccaagaaagagtgggctgagttggaaccgggctggacttattaaaaccagtcagcattgctttgatctgaacagaactggtttgatcca

SEQ ID NO: 766134 - DNA, 771 bp, Homo sapiens
aaatgtttgaaaaccattgagtaaaagtgctttggccacaagtagcagaaaagtctgacccaaaaggccccaaaagaaggaattaattatcaccactataagaagcccagggggcggggctggtgaatcaggggctggacaatatcatcagggagtcaggttctttcctgttttgcccttggccctcctcagtgagccagctttctgccctcatggtcacaaggtgggtgctgtggctccatccaccctgacaggtccaagagagtaggaactgtctcctccctgacacccctttgtaaaaaccaggaaatctttcctctcacattttactggccaggacacatgcccaccccttaacttgtcactggcaaaggaggcaggtttaccatgaatggctttcactaaccagaatggagctcttcccacagcagatggctgtgcagaggagagtgggcaacagaggccgggggcttctcttgccaaggagaagatggagaagcctgtgggccccactgccaccatctgccccagcctctcatatcccttctgcctgggtgcctgcctcagtgtccctttagtccctctttcggtctgtcttgaggggaggccatggcmtgtgaggggtatcatttaggctctctgtgttcatttcctgtggctgctgtaacaaatcgccacaaactgggtggctgaaagcaacagaaatcaattccctcacagttccggaggccagaagacccaaatcaaggccagcagggctgggatccctct

SEQ ID NO: 766135 - DNA, 463 bp, Homo sapiens
ccttcaggggcatcctgagtggaactacagtgctgaagagctgcctccagcaatagtgttgacatgcctacctgtcagcacaactcacatcccttgtccacaggtctctctccacatgcacttatagtgggattcctagtgagctccctaagagcagttatactgctgcagaactctgttaaaagaaaatgtcgggctaccctctttgggtcccctccctttgtatgggagctctgttttcaatctattaaatcttgcaactgcacactcttctggtccatgtttgttactgctcaagctgagcttttctcaccatccascactgctgtttgccactgttgcagacccaccactgacttccacccctccggatccagcagggcgtccgctgtgctcctgatccagcaaggcgcccattgccgctcctgattgggctaaaagcttgccattgttcctgcacggc

SEQ ID NO: 766136 - DNA, 499 bp, Homo sapiens
tagtttgtgaatattttctcccattctgtaggttgtctgtttactctgttgacagtttcttttactgagcagaagctctttggtttaattagctcttacttgtcaatttttggttttgttgcaattgcttttgaggacgtagtcataaattctttgccaaggccartgtcagaagagtatttcctaggtctcatctaggattttttagttttaggtatttcattaaaatatttaatccatcttgagttaatttttgaatatggtgataggtatgggtccagcttcaatcttctgcatatggttaacaagttaacccagtgctgtttattgaatagtgagtcctttccctattgcttatttttgttaactttgtcaaagatcagatggctgtaggtgtgcagcttgatttcttggttctctgttctgttccattggactatatgtctgtttttgtaccatgctgttgtgattactataaccttgtaggacagtttgaagt

SEQ ID NO: 766137 - DNA, 537 bp, Homo sapiens
aaggagaatacgtgaaagccaactgaggcttgacaacctggcttccgttccttgctggtcctcctgttaacgcgctgccgctgtggtcttaggtttcactctcctcttcccgtccgtcaagagagacaaggatgacacaatccacatttattgattgctttcttcattccgggtagtccgcctgctgccctttgattcagtcttaacagtggttggtgaggtagatgttcctgtgcctcacgtttacggaggcacagagagattacattacttactcagggttccaagtggcagagctggaatttgaacccaatactttgttgaagcctcagtctccgatcttgaractgcacccagctgcctgggtcacggaaggcaaagatgacatcattgatcgagctctttgcaaaacagttctctacacgggcacactgttgtaacactgcaaggattatttgctcacctgtaaaatggggctagaggtagcttccctcgcgatctcctagggtggctgtgggaagctcatgtgaaaaggtt

SEQ ID NO: 766138 - DNA, 630 bp, Homo sapiens
caacatagcttaaaaaaaaggtaaaacaaaattctgcatttttataaaacttgataaaaaatagcatttctaactgtacagtcaccagaagtacacagttatcaaaaatgcacacacttcacttggcatctgcagcaccttcagctttctgtgtctggtctgtttgggcatctccattttctgcagggttattcccctcctggccagcctcagcttttcccttttcccttttggtaccttctctcccttctttgcaggggcctttttaggtttgggctccggctttggaggagcaggyttagtagaaaacctcgtggatcttctctgtggtttgtccttcatcttggctctatctgctttagcatcaccttcagcctttctcttgggcactgtggtggcggcaacggcggggggacataggcgctgggtgcgggatgcagcgcggcacgcaggtgttggtctgtccaggggtcgttctcgcctcttgttcttcaccctgctccgatttgtctatcttgacaccaataccacgctatcttgatcattggagctttttagatgtggaaatttgtgcaatttcaacaactttcttcttcttttacaaaattgtttgggctgtcatacgttgtt

SEQ ID NO: 766139 - DNA, 630 bp, Homo sapiens
caacatagcttaaaaaaaaggtaaaacaaaattctgcatttttataaaacttgataaaaaatagcatttctaactgtacagtcaccagaagtacacagttatcaaaaatgcacacacttcacttggcatctgcagcaccttcagctttctgtgtctggtctgtttgggcatctccattttctgcagggttattcccctcctggccagcctcagcttttcccttttcccttttggtaccttctctcccttctttgcaggggcctttttaggtttgggctccggctttggaggagcaggtttagtagaaaacctcgtggatcttctctgtggtttgtccttcatcttggctctatctgctttagcatcaccttcagcctttctcttgggcactgtggtggcggcaacggcggggggacataggcgctgggygcgggatgcagcgcggcacgcaggtgttggtctgtccaggggtcgttctcgcctcttgttcttcaccctgctccgatttgtctatcttgacaccaataccacgctatcttgatcattggagctttttagatgtggaaatttgtgcaatttcaacaactttcttcttcttttacaaaattgtttgggctgtcatacgttgtt

SEQ ID NO: 766140 - DNA, 561 bp, Homo sapiens
ctccaaaaagaaagaaagaaaaaaaaaaaaaaaaacagaaattggcagactggataagaaacaggatacatcttacacattttgttaacaagtgactctctttagatacaaggacacaaataagttaaaagtaagaaaaaatattttacatgtaaatagtaaccaaaatagaactgaggtgggtacattattgtcagacaaaatagaatttaaataaaaacaggttacaaaagacaaagaataacattatatatttataaatgattcaatacagaaggaagatacaacaattataaatatttacacacctaaaaatagaacrtggaaatatatgaaacaaaaattggcataattgaaggagaaatagatatttctactataaaatttggagacataaaatattccccaagatagaccacatgtagggcacaaaacaattctcaataaattttaaaagattaaaataatacatagtatcttttctaattacagtagaatgaaactagaaatcagtaacagaaggaaaaagagaaaatttacaaatattaaacaaccaatgag

SEQ ID NO: 766141 - DNA, 590 bp, Homo sapiens
taaatttataacttagcagaatgtacttaagtcacttgaatttgcctatttaagaaaaaaatcaatagttgttctcaagcacattgtttttgtgctttcagcagcatcataattgagtttgtttttaatgcttgtgcaccactaccagcctggttacgtactcccagaagggaaaagaagatgctccagccatccacggttctagcaggacctcaggttctgctgattcacacatctactctctgactggaggaacaggcagcacttgctgttttatttgttggaacaacaccaagtcctggacatccatgctaatttattttcaactaagacatgtgtttctaagacttctatgagagaaagcacagtatgatgggaaaggcttagacatgggcagagagagcagtgacgaccccagtcyggcctctcgccacctgaggggcatgagcaagcccctgtcccacgtggacaccagcacccttacctggcaatggtcaacaggatgcccaggagacctgcaggaaacagcacgtgctgggcactcagcatcatgccaggcagggcaggtactcagcgagtgctggtgtccg

SEQ ID NO: 766142 - DNA, 516 bp, Homo sapiens
acagggtttcaccatgttggccaggctggtctcaatctcctgccctcaggtgatccacccgccttaggctcccaaagtgctgggattacaggcatgagccactgtgcccagccaactatttattatctggtagttatgatctagtatcttattacagcaagagtttgcagacgccagctctagagagggcacagctgacagatgctggcagcttctgccaatgtgtgcattccacgcacccagcttaaccagaaggctgcatgaactttttttgagaactcaacccactctttttaagaaagcaaggaaaaaagctgaccytcttcaaataaaagacaaacagtgcctaccctctcctggccccaaaacctaagagaaggaagaccctgcaggcagaagctccagacaccctggagggagagctccattgttctctcttcccaagtgaaaagtaagggcctttaaagaagcttcagaacctccctgatctgtcctatttgtactttgctcccgtgt

SEQ ID NO: 766143 - DNA, 551 bp, Homo sapiens
ttgaggagaggcttagggtgcaagacaaatggatcttctgggaaatggaggctcccggtgaacccgcagcatccgtgtcctgtgtatctggagtcgtcctggcagcgacaggaagtcataacatcctctcttcaaataaatctccctctrgctgcctcccggctgggcagcgcatgaagcattgaagctccaatcaagctgcttgcatcccacgggaggaagcaactggctcggccccagaagaaacaggccagcctttgaagtgccagggaaagagctgcccgcaggccttgccttccccttcagaaactcgggcgtgtgccactgtgaacgggggctgccaccacagggtcccatagacagggttatcactggtctcttcttgactctaactaatgtcaaccctaaaaaacaagattcataaaacatgactaaatataaagtttattcgagtccaaagctcgaggctggccaagccaggagcatagattctacttgccctgaatgtacactcagattagctgcagttacaagagagtttttaaggaaaa

SEQ ID NO: 766144 - DNA, 551 bp, Homo sapiens
ttgaggagaggcttagggtgcaagacaaatggatcttctgggaaatggaggctcccggtgaacccgcagcatccgtgtcctgtgtatctggagtcgtcctggcagcgacaggaagtcataacatcctctcttcaaataaatctccctctggctgcctcccggctgggcagcgcatgaagcaytgaagctccaatcaagctgcttgcatcccacgggaggaagcaactggctcggccccagaagaaacaggccagcctttgaagtgccagggaaagagctgcccgcaggccttgccttccccttcagaaactcgggcgtgtgccactgtgaacgggggctgccaccacagggtcccatagacagggttatcactggtctcttcttgactctaactaatgtcaaccctaaaaaacaagattcataaaacatgactaaatataaagtttattcgagtccaaagctcgaggctggccaagccaggagcatagattctacttgccctgaatgtacactcagattagctgcagttacaagagagtttttaaggaaaa

SEQ ID NO: 766145 - DNA, 534 bp, Homo sapiens
gccctgtctatggctcagccttccagggtatctaattctggttctaagggaactgtttcacaacttgctaaggtgcagacaactgacagcaatgcagagagatgactccattgcagccaggtgagctcagtcctgtggaggctctgctggctacctcctcacggcggaagggcccagcgtggttccatctgcacattcccctacctattccagacctacacacgcatgggttgtctgattctccttccttgwaactagttgtaagatcttactagttctctcattgataatgaattaaataaatttcttaacatgttttatttgatgaatgtatgtgaatcatgatgtagccttttatgaaagttaatttctaaccatgccctggcaacccagctcagggtgtcagcacttggccttcgtggacacaccagaacaggtctgtttgaagctgtcactttgtggatcagtaaagaattcaggagagagtcctgctgttggtcaagcgtgctgatccccagtctctggggcgccacg

SEQ ID NO: 766146 - DNA, 607 bp, Homo sapiens
gagaagagattggggcaggggtagaggtgggagggatgcagagctggctggaaaaggccagcataagggtgccttgtagcaatggaactcttctgtgccttgactgcatcaatggcagcatcctggctatgatcttctactatagtttgtcaagattttactaccaggggtttctgcacaaagggctcacagaatctctctgaattatttcttacaactgcacatgaatctacaattatcttgaaagaaaaagttttaaaaaattaatgaaagcaaaaagtatagataaaaatggagctaaagtttatccattttgactwtagaatatctaaaattcctttgccaaatttaaaatacaaaaataagcttaaaaatagtcacaacatatatatcagaactgatttctgtagatgcaagagagcttctgaaaaataggaaaattcatctctcaagagaaagacgaaggcaaaggatatgaatagaaagtttacaaaataagaaatgcaaatattcagtgtttatacagaaagagtataatctcagtagaattaattaaaacaaaacatgagtctattgttagccagccagatgaaccttgagcatttca

SEQ ID NO: 766147 - DNA, 607 bp, Homo sapiens
gagaagagattggggcaggggtagaggtgggagggatgcagagctggctggaaaaggccagcataagggtgccttgtagcaatggaactcttctgtgccttgactgcatcaatggcagcatcctggctatgatcttctactatagtttgtcaagattttactaccaggggtttctgcacaaagggctcacagaatctctctgaattatttcttacaactgcacatgaatctacaattatcttgaaagaaaaagttttaaaaaattaatgaaagcaaaaagtatagataaaaatggagctaaagtttatccattttgactatagaatatctaaaattcctttgccaaatttaaaatacaaaaataagcttaaaaatagtcacaacatatatatcagaactgatttstgtagatgcaagagagcttctgaaaaataggaaaattcatctctcaagagaaagacgaaggcaaaggatatgaatagaaagtttacaaaataagaaatgcaaatattcagtgtttatacagaaagagtataatctcagtagaattaattaaaacaaaacatgagtctattgttagccagccagatgaaccttgagcatttca

SEQ ID NO: 766148 - DNA, 591 bp, Homo sapiens
aataaaatgccacaattactcacaaacatcagctttgtagagagtcattgtgcatcatgtcagtagagaaagtttggtcttttttcttccatcctatttgatgattttacaaaacatatttacttaagttcatttggaatttcaacatcacataggggaaaggtaaagtaaactgatgttctacttctgttttatccttcccttccttatcacctcctcctgaattactacttttaataggatatttactgcatgcattattccagtatatttctgggaagctattaatgatagcaagcccaggattgtcagggaaattaacagtttcatctcttttgtattccrtttcctaaaacttgtactgtaagttctgacatgtctatagcctatacttttaagcatttttacatatggcccaaagccaggttactgttaaatgttccacttgcctatttcaaggcgcacgcaaagtaagaggcaaaacaatgaatcaaggtaattgtgattactttgaatagtcataattgcaacaatcattccctgcaatattaaaaagaatcagattccaatagtgtaatttgcttttatatc

SEQ ID NO: 766149 - DNA, 603 bp, Homo sapiens
tgcaaggaacatgggagtgcaggtatttctacagcatgctaacttcatttcctctgtatctatacccacaagtggatttgctggatcgtaaaatagatgatatattttacaattttgagaaaccttcatactgttttccataacggtggtaccaatttacattcccataaaaaaggttcctttttaccagcatcctcaccaacgcttattatcttatatcttttttggtaatatcctgtccaataagtgtgaggtgatatttcactgtggttttgatttgcatatcactgatgattagtgatactgaacacgttttcatgtgcctcttggccatttgtatgtcttcttatgagmgatgtaaatttgggtcctttacatattattgttatttacatatttattatttttctgttgatgttgctttggttggtagattatcttttcactctcatgattgtttcctttgctgtgcagaagctttttagtttgatgctatctcattctctatttttgcttttattgcctatattttggtcatgtccaaaaacaagtttccaagaccgatgtgaagaaacttttcccttgttttcttctagtttacac

SEQ ID NO: 766150 - DNA, 522 bp, Homo sapiens
cttctaatgtaatgatactggtagtttaaaatgaaaatagagggaaatatatgtgtgtgtgtgtgtgtgtgtgtcacaaatgtcacactatgccaacaataatccaaacaagaccaaaaatctgatggtttataaaaatgtcagtcaaagtagaattgagagcaaagaaagttacaaaaaacatatagggaaattacacaattttaaatgaaaaaaaatcaagaagacataaaggaaggaaaaactgacatagcaaaaggaactagacaaaatctacaattgtagttggagacttcaactctcaccaactggatttaatttcatttatagaatgccacccaacaatagtagcaggcacgtttttgtcatgtgttcwtgaacacttagcttactaaacctttaatttgccttgtcttattctattttgtgctgctataacaaaatacttgacactaagtaatttttaaaaagcaggtatttatttactacagtactggaggctgagaagttcaatgttgagaa

SEQ ID NO: 766151 - DNA, 621 bp, Homo sapiens
cttagacattttatacctgtttttctccttctcttattccacttagtttttcaattcatacaaaaccgtatccaggccatcaccaatcattctatacgacaaatgtttcttctaacatccccacaatatcaccccttaccacaagacctcccttcagcttaatctctcccactgtaggttcccacgccacccctaatcccgcttgaagcagccctgagaaacatcgcccattctctctccataccaccgcccmaaaattttcgccaccccaacacttcaacactattttgttttatttttcttattaatataagaaggcaggaatgtcaggcctctgagcccaagccatcgcatcccctgtgacttgcacttatacatccagatggcctgaagtaactgaagatccacaaaaaaagtaaaaatagccttaactgatgacattccaccattgtgatttgtttctgccccaccctaacttatcaatgtactttgaaatctcccccacccttaagaagatactttgtaatctaccccacccttaagaaggttctttgtaattctccccacccttgacaatttactttgtgagatccacccctgcccacaaaacattgctcttaa

SEQ ID NO: 766152 - DNA, 621 bp, Homo sapiens
cttagacattttatacctgtttttctccttctcttattccacttagtttttcaattcatacaaaaccgtatccaggccatcaccaatcattctatacgacaaatgtttcttctaacatccccacaatatcaccccttaccacaagacctcccttcagcttaatctctcccactgtaggttcccacgccacccctaatcccgcttgaagcagccctgagaaacatcgcccattctctctccataccaccgcccaaaaattttcgccaccccaacacttcaacactattttgttttatttttcttattaatataagaaggcaggaatgtcaggcctctgagcccaagccatcgcatcccctrtgacttgcacttatacatccagatggcctgaagtaactgaagatccacaaaaaaagtaaaaatagccttaactgatgacattccaccattgtgatttgtttctgccccaccctaacttatcaatgtactttgaaatctcccccacccttaagaagatactttgtaatctaccccacccttaagaaggttctttgtaattctccccacccttgacaatttactttgtgagatccacccctgcccacaaaacattgctcttaa

SEQ ID NO: 766153 - DNA, 626 bp, Homo sapiens
ggtaagcaagctgtagacgaagggatccaaaggcttagggagattgggatggtggagttgatttgtcattttagacctacttatcccatctgggaggcttcagaagatatacccttgaccaatgccttgcaaaatagatctgtgaggacagcacctgaatctttgaagagctctgtaattgctcttctctgtatatcaaatctaacagtggaaactgcagtcactcaactacaaaattgaaatacaataggaataattggatcttgaggtgggaggggccaagtggtggcactcaactatcaaaggcaagttgggtgtagctaccgtaatggatagcagaggcaaagcagcaatcagaatagtctgacttgggtagagctctggcagtagctaattaatcatggtgtttctataagtgaaattgataggaagtttactgcattcctacttmatttatataagcaaaaaacttctacgtcgaattgacaaagggctaatttgaattataaaaacagtgaatcacagcccctcaatcaatttccagacttgagccagttcacatacccagaaccccttgaatgaaggggagtctgtgtccccttgagtaaggaccccactacactacc

SEQ ID NO: 766154 - DNA, 626 bp, Homo sapiens
aggctaacactcctttctctccccatactcagttcttttaaagccaatgctttccactgttttgggggagggggctttagagaaggagctctcttactctccactcctagcaagaaataaaacctgcttgccttttttcccattatctttgtaaccaatatgaactagggaaagaactccatttaccagtgacaatgacaggactacagarctggacagctgtcacaccatgaaggctgatgtcacagagccaggccaaggtgatgagaactgacctgtagagttatgcagaaacactacattagtaaactaataggcattaaatcattaggattccaaggcccctgtctttgcccttgttgttgggagaagacactgaaagagagaattctggctctctacagcaaagttcaattaaaaagtatagagtagggaggggatggggagagagtcagcatggaaaaataaccagccttcgggaaacaaagcccttcactttaaagctctcccttctttcaaatctgcctgcccgccaggcggctctgttcccctcagtcagctctggcagcaagaagtctgtgaactgtgtcttttccccacccccgcacagcttttcagataagtta

SEQ ID NO: 766155 - DNA, 626 bp, Homo sapiens
aggctaacactcctttctctccccatactcagttcttttaaagccaatgctttccactgttttgggggagggggctttagagaaggagctctcttactctccactcctagcaagaaataaaacctgcttgccttttttcccattatctttgtaaccaatatgaactagggaaagaactccatttaccagtgacaatgacaggactacagagctggacagctgtcacaccatgaaggytgatgtcacagagccaggccaaggtgatgagaactgacctgtagagttatgcagaaacactacattagtaaactaataggcattaaatcattaggattccaaggcccctgtctttgcccttgttgttgggagaagacactgaaagagagaattctggctctctacagcaaagttcaattaaaaagtatagagtagggaggggatggggagagagtcagcatggaaaaataaccagccttcgggaaacaaagcccttcactttaaagctctcccttctttcaaatctgcctgcccgccaggcggctctgttcccctcagtcagctctggcagcaagaagtctgtgaactgtgtcttttccccacccccgcacagcttttcagataagtta

SEQ ID NO: 766156 - DNA, 641 bp, Homo sapiens
gttttggttactatagcattgtagttgaagtcaagtaatgtgatgttacctgataccatgctgttttggttactatagcattgtagttgaagtcaggtaatgtgatgcttccagatttttttctttttacttaagattgctttgattatttggctcttttttggttccatgtgaattttagaattgcttattctaattctgtgaaaaatgatattggtaatttgatagggatcacattgactgtgtagattgctttgggtagtatggtcattataacaatattgattcttccaattcatgagcatgaggtgatttttcatatttgcgtcatctaaaattactttcatcagtgtatcatagttctccttgtagagatctttcaccagcatagttacatgtattcctaggtattgtatatttttttctagttattgttaatgaaattsagttcttgattttgttctctgcttgattgttattagtgtataacaatgctactgatctttgtactttgattttatatcctgaaatgctaccgatgtcacttttcaagtctaggagacttttggatgagtctttagggttttctacatataagatcatatcatcagcaaatagagatagtttgactttctcttgtt

SEQ ID NO: 766157 - DNA, 593 bp, Homo sapiens
atgaggtcatgaccaatatgaggtgcctacctttgaagcatccaagagattattatttagcaaagagaggaaaaagtagttccagagagcaaaggaacaatttgagaaaaactggagtgactagtattttatttggaaatyactggaatatttgaattaatgctattagcacaaatagatgttttagcaagtgaggatagtgacagaaagaaggtggtctagcatgtagtttctagaaactcatcatgatgtctaggtaaatgttgagaaagaaaaagagaccgaaaataacctatataggaaaagacagattgatttttaaagaagaaggcaaagaaattgattcataattttactgtactgacagatctaatgaaacatagtttaaagtaatattgatggattcagtctcttggaggttacaaatgactttttgaaaagaactgtctatttttggagtgcataagaaaaagtcatattggagtgggctaaagagtaagttaaaggctaggaaatagaaaaatttatgcacataacattttaaagaagtttgtacaaacaagaaaatgtagggcagaagttggaagtttaga

SEQ ID NO: 766158 - DNA, 601 bp, Homo sapiens
ttttttttttttttttttttttttttcagatttgtaatgaagttgagaaacttcctctttttttcttttttttgagacgcagtctcgttctgtcacccagactggagtgcagtggcacgatttcggctcactgcaaactctgcctcccgggttcaagcgattctcctgcctcagctgggactgcaggccgcccaccaccacatccagctaatttttstatttttaatagagacagggttttgccatgttgggcaggctggttttgaactcctgacctcagatgcacccggacgagaaacttcctctttattcctagtttgctgagagtttttatcatgaatggtgtgaattttgtcgaatagcttttctgcctcagttgatataatcatatgatttttcttctttattgatatgggagattacattaataattttcaaagattgaaccagcttgcataccttgaataaatcccacttacttgtggtgcacaatttttatatatattttgttggatttgttttactaacgtactgttgagaatttttgcatctgtgttcatgagagatactggtttctggttttcctttctcataatggctt

SEQ ID NO: 766159 - DNA, 601 bp, Homo sapiens
ttttttttttttttttttttttttttcagatttgtaatgaagttgagaaacttcctctttttttcttttttttgagacgcagtctcgttctgtcacccagactggagtgcagtggcacgatttcggctcactgcaaactctgcctcccgggttcaagcgattctcctgcctcagctgggactgcaggccgcccaccaccacatccagctaatttttctatttttaatagagacagggttttgccatgttgggcaggctggttttgaactcctgacctcagatgcacccggmcgagaaacttcctctttattcctagtttgctgagagtttttatcatgaatggtgtgaattttgtcgaatagcttttctgcctcagttgatataatcatatgatttttcttctttattgatatgggagattacattaataattttcaaagattgaaccagcttgcataccttgaataaatcccacttacttgtggtgcacaatttttatatatattttgttggatttgttttactaacgtactgttgagaatttttgcatctgtgttcatgagagatactggtttctggttttcctttctcataatggctt

SEQ ID NO: 766160 - DNA, 601 bp, Homo sapiens
ttttttttttttttttttttttttttcagatttgtaatgaagttgagaaacttcctctttttttcttttttttgagacgcagtctcgttctgtcacccagactggagtgcagtggcacgatttcggctcactgcaaactctgcctcccgggttcaagcgattctcctgcctcagctgggactgcaggccgcccaccaccacatccagctaatttttctatttttaatagagacagggttttgccatgttgggcaggctggttttgaactcctgacctcagatgcacccggacgagaaacttcctctttattcctagtttgctgagastttttatcatgaatggtgtgaattttgtcgaatagcttttctgcctcagttgatataatcatatgatttttcttctttattgatatgggagattacattaataattttcaaagattgaaccagcttgcataccttgaataaatcccacttacttgtggtgcacaatttttatatatattttgttggatttgttttactaacgtactgttgagaatttttgcatctgtgttcatgagagatactggtttctggttttcctttctcataatggctt

SEQ ID NO: 766161 - DNA, 596 bp, Homo sapiens
ccatgcctgtaatcccagctacttgtgaggctgaggcaggagaatcccttgaacccgggaggcagagtttgcagtgatccgagatcatgccactgcacgtcagccggggcatcagagtaagactgtgtctcaaaaaaaaattatattgaagaaaaatgacaattcagcatatcaaaatgtgtgggacactgcgaaagtattaccaagagggaaattcatacaattaaataattatattaggagaattaaaagtctcagatcaataagctcagctaccacttcaagagtatagaaaaaatcagactataaatccaaagcaagtagaaaaaagaaaacaacaaagataagagtgaaatcaataaaactgaaaagagaaaaataatagaaaaaatcaataaggcatggagctgcttccctgaaaaaawcaacaaaatttataatttctcacaatacagtcatctgtctgattcatttagagatatgaaaaagcctcggaattgtgtagataggatcaatgggagtgtgagaattccaagttcagctgtaacatgtactgtgtgatatcaggcaagtttcttaaaatttatgtgcatcag

SEQ ID NO: 766162 - DNA, 595 bp, Homo sapiens
aataagctcagctaccacttcaagagtatagaaaaaatcagactataaatccaaagcaagtagaaaaaagaaaacaacaaagataagagtgaaatcaataaaactgaaaagagaaaaataatagaaaaaatcaataaggcatggagctgcttccctgaaaaaaacaacaaaatttataatttctcacaatacagtcatctgtctgattcatttagagatatgaaaaagcctcggaattgtgtagataggatcaatgggagtgtgagaattccaagttcagctgtaacatgtactgtgtgatatcaggcaagtttcttaaaatttatgtgcatcagttcctttatctataagatgtaaagatactggtgcctaacacaatggaggttattatgaatgataatttttaaaatatgtaagacacaaggaatgatttctgtcatataagaagtactatrtaagtgtttgctatttttgttatgaaatagataaagtagttctgaatctagcttgcattaagggaaagttttctgttaattgtgtgacatggttggggaaggcgtgctgtgtacactatgcatatgcattgataagctta

SEQ ID NO: 766163 - DNA, 611 bp, Homo sapiens
ctagctagtctttcatttctccttgttgtgggggtaatccacacttgacttccaccactagtaaaaaaggattcccatttaaacagagaaatacacagataatcataatcattataattcacactgaattttaatgcttgatttgggaaaataaatgttttccaaaagaactcaacctcacacaatgcttcttccttccaactatgtgattggartcaatgacttagctggataaatgataaacaactgagatatacccaaagctcctcttcactttatcttgctgactacagaaaataaattttgtcactatcccctcttttgcatatttttagtaccttcgtttctggatagcagaacagtgatctgtaaacgcaatctactccaggtgttaacaatcttggtcaaaaaaaattcacaatcctagaattaatatatgtatccacagctatcagcctataaattcctttatgtctgaactattgaactgagccttaaaaaaaatacatgttatgtgtcccaaggggatatttaagaatctcagagacacagatgttggtgtgagaatcaagataacctctatgggaagaggagaaagaacaagaactttc

SEQ ID NO: 766164 - DNA, 611 bp, Homo sapiens
ctagctagtctttcatttctccttgttgtgggggtaatccacacttgacttccaccactagtaaaaaaggattcccatttaaacagagaaatacacagataatcataatcattataattcacactgaattttaatgcttgatttgggaaaataaatgttttccaaaagaactcaacctcacacaatgcttcttccttccaactatgtgattggaatcaatgacttagctggataaatgataaacaactgagatatacccaaagctcctcttcactttatcttgctgactacagaaaataaattttgtcactatcccctcttttgcatatttttagtaccttcgtttctggatagcagaacagtgatctgtaaacgcaatctactccaggtgttaacmatcttggtcaaaaaaaattcacaatcctagaattaatatatgtatccacagctatcagcctataaattcctttatgtctgaactattgaactgagccttaaaaaaaatacatgttatgtgtcccaaggggatatttaagaatctcagagacacagatgttggtgtgagaatcaagataacctctatgggaagaggagaaagaacaagaactttc

SEQ ID NO: 766165 - DNA, 611 bp, Homo sapiens
ctagctagtctttcatttctccttgttgtgggggtaatccacacttgacttccaccactagtaaaaaaggattcccatttaaacagagaaatacacagataatcataatcattataattcacactgaattttaatgcttgatttgggaaaataaatgttttccaaaagaactcaacctcacacaatgcttcttccttccaactatgtgattggaatcaatgacttagctggataaatgataaacaactgagatatacccaaagctcctcttcactttatcttgctgactacagaaaataaattttgtcactatcccctcttttgcatatttttagtaccttcgtttctggatagcagaacagtgatctgtaaacgcaatctactccaggtgttaacaatcttggtcaaaaaaaattcacaatcctagaattaatatatgtatccacagcyatcagcctataaattcctttatgtctgaactattgaactgagccttaaaaaaaatacatgttatgtgtcccaaggggatatttaagaatctcagagacacagatgttggtgtgagaatcaagataacctctatgggaagaggagaaagaacaagaactttc

SEQ ID NO: 766166 - DNA, 646 bp, Homo sapiens
acctgccctcctcttgttccttagaataagaatctaattaactggctttattcctagacagacatagttgtgactgtgtttcattgattttggacagcaaacatacttggatgaacctacagtcattttgagaaaagagcatggtctgtaaagactgagcatggtcaagtgaggaaacaaagttactatttacagagtttggggtgaaaatgcacaaccgatgatatcaaaatcatactttataaatggtggtatttgtttttaatgttatcacttaatagacctactcactcacagcataatacaaatctattattcttgcagaattataaagtaatatagtattaaaagcattttakaagcttatatttcttgatgagactcatcactttttaaaaaaagttgtggccctcagcttcaaatcctgataatcgggaactcagcgtattggggactagaaggtattataatttccctttttcataaaatataaagctgaattatctttctttcatcaccagcaattatatagatttgtgtaaatttacattgccacagcagtcacattgcccagctgagtttccagcaagtataaatatcattctcagaggcaatttatagtacagttcaaacagacatctttctc

SEQ ID NO: 766167 - DNA, 426 bp, Homo sapiens
ggccaacattccacagcctggcaccccaactggccaacttgggtggaataaacaggtgcaggccctggttgggagaagcacgtagtggtctcctggccaactcagcagccggcaccagagggccagggagggaccatctggagtggggagagagccagccccgcrtgcatcctccggccacacagcagatctgagcagctagatgtattcgctatatgcaactgcgattattagcatgtgattaaggcaggagcggtggtaatgtcttccaggagctactagaattattaactctctgctattgggatgattagtgcccagctacctcgaagtattaacaattcatcactgggatgtttccatattccccattagaagtactagctaccgagatgcctggtggcgtcccattatgattgttatttg

SEQ ID NO: 766168 - DNA, 616 bp, Homo sapiens
aaaatatatatatatatatattatatatatatatatttttttcctatttgcttttttcttttctttttaaaaaatgattatcagaaaggtaattgagctttgtttaatgtaatagttgggaatctcagggatgaaagaaaacaagattagaggctaccatgaatatctaatgataaaaccctgtaatagtaattgagtttccattcttttgaattgtaagactattcattaaaagagtatgcaaagattacttctatggtgttggccatcagtatttccttacttgtgtctgtatgtaagtcctgctatatgatgttcatttcagtcaagggtatggtaggtctaactctctgtattaacgtttttttcccgtatctgccagttttgaagcctgagaacagcaatagaaattgccatctttttcttgcttttrtctcttggttaaaaaaaaagaaagaaattgtcatccttttttaaaaaaattaacatttctgatctcttaagtaaggcagatattgtagatttttaaattttatttatttatttatttagtttttggtacaaaatgacctttactctctttctaaaatccgtgcattggtctcacagaagaaaa

SEQ ID NO: 766169 - DNA, 659 bp, Homo sapiens
ccagcacttttggaggttgaggtgggtggattgcttgagctcaggagtttgagaccagcctgggcaacatgacagaaccctgtctctacaaaagaaaaagtacaaaatatgtagctgggcatggtggcgcacacctgtagtctcagctactcaggagggtgaggtgggaggatcgcttgagcccaggaggccaaggctatagtgagctacgattgcagcactgcactccagcctgggcaacagagcaagaccctgtctccaaaaaaaaaaaaggggcggggstgggggggacgttaagcttggaaaccacagaagctgctttccttttgttcccagatagctgcagtttcacaaccctgttgacacagggtttcctttgctccccttagacgtactgagtaggagacaatgcatcattgactttttcttctattccctttcacatgtaaaatgtagacttacagacactaaatcagagcctcacacgcttgtgacctcaatgcctttcctccctctctccctcttcttttcctttcctgcttgctttttctcttttaaatacagaagttcccaaaacctttttggaaaaaaggtgatttttccccggtggatcctcaaccttggctaactaaacctctatttgattgagatctgcctta

SEQ ID NO: 766170 - DNA, 659 bp, Homo sapiens
ccagcacttttggaggttgaggtgggtggattgcttgagctcaggagtttgagaccagcctgggcaacatgacagaaccctgtctctacaaaagaaaaagtacaaaatatgtagctgggcatggtggcgcacacctgtagtctcagctactcaggagggtgaggtgggaggatcgcttgagcccaggaggccaaggctatagtgagctacgattgcagcactgcactccagcctgggcaacagagcaagaccctgtctccaaaaaaaaaaaaggggcggggctgggggggacgttaagcttggaaaccacagaagctgctttccttttgttcccagatagctgcagtttcacaaccctgttgacacagggtttcctttgctccccttagacgtactgartaggagacaatgcatcattgactttttcttctattccctttcacatgtaaaatgtagacttacagacactaaatcagagcctcacacgcttgtgacctcaatgcctttcctccctctctccctcttcttttcctttcctgcttgctttttctcttttaaatacagaagttcccaaaacctttttggaaaaaaggtgatttttccccggtggatcctcaaccttggctaactaaacctctatttgattgagatctgcctta

SEQ ID NO: 766171 - DNA, 511 bp, Homo sapiens
gcctctagctttaagttacaattcattgtaactatattgtttggaggaatgcattgaatgaccccacagggatgcaatcagcgaaatccagactgtggaaaattctgttggacaaatgactaagtttcttcccaaataaattacaagaaagagaaagggagagagaaagagagagagagaaagaatctatagatcgactgagacctaaaaaaaacccctcaactgactgcaattgtgtgaacttcatttagatcctgaagcaaataaaaccacgagtaacagattatgcggcaatcaagagaatttgaaggctgactggatatctgatgatattacagggcctgctgatatttttagctatcataatgataatgcrgttactgtggttttattttaaatagagatctcatctatactgtttctttccagaaacattcatggatgaactgatacaatgcctggaatttgcttcaaaatgttccaagggaaaggcagagggttggggcagaga

SEQ ID NO: 766172 - DNA, 594 bp, Homo sapiens
gcagacaggaccaggtgaccagttacagaaacaaggattaaaattgtcactagtatttcctatcaactttaagaatacattttcatgttatatataaatatattagacaaataacattgtttttatttctctcttcttcttttgtcacataacacaagaatgtattaacttgatattagcagttaagtgttagtagtttaacatatttctrttgaagttatggggtatcaggagaagagtaaccatcacccacaaacttctactactcttaggaaaaatagtatagtgtgttctcgttgcacacaggatcgttgcatcatgttaggtagaactattgccttgttattgtctgtatctgaagattagttagggcttaaggtgatacatataggtgccaactagaaaggtgctggacttgtcatggttaatttaagatgctgactggattaaagaatacctacagaattggtgaagcattacttctgggtgtgtctgccagggtgtttccagaggagattggtgtatgagtcaggtaatttagtgggaaaaatccaccctcaatgggggaaggcagcatacaatctccttggggac

SEQ ID NO: 766173 - DNA, 603 bp, Homo sapiens
acactattgacgagaaggcagtcataatgtgattgtcctcatttacctgtataaacttggtctgcaaacctcctgtcaatgtttttgggtgatgtcatcaacatcagcatcaaatcttgcacgggaggtttcagaaggttgaaaatataaactcgcaggagcaacgtaggaatatcacaggaaatgcagcatcaccaaatcctcagattagcacaaatgatgataacatggggaacaccatgagcaagatgaattgaagattgatttaggagagttggatctgaatgggagaaaatttaggaaaacctttgtcggtgtattttccttatgtgttcyatcccatgtaatcataggagtgacaaaagacaagagaaatatccacatatatatgtcttgaaaatagctttttttccaataattataatataatgatgttattattatacaatgtatttccacatgataaaagtattagtttcattgttggtggttttgttctttcattctgatacagaaaataatgacatgttacaactgatgcaattgatacatctcacaatttactagaatattgatttctcggggttagtgtaggcttagtaa

SEQ ID NO: 766174 - DNA, 509 bp, Homo sapiens
gaggctgaggcaggagaatcgcttgaactcgggaggcagaggttgcagtgagctgagatggagtcactgcactccagcctgggctacaagagcaaaactccatcccaaaaataaaataaaataataaaataaaataaagactaaaactaccagacagcttacagctcagggattttaaagacacagaggcaggggtgatacacagtcataaattaatacattgaggttacacattggctttagcctgaaaggatgaagtatcttkaagtggaagcttacaggtcataggaggattcaaagattttctgatttgtgatttatttaagaaagtaaaatttgtcagaaaatttgggatcagcagaaaataatggcacttctggctcatagacataacatcccgtaggcccctcaggaagaaattgagaataaagaatggcagagttcatttcatagatcccctttatctgaggtctatgtgccagtggatccatttagtagaggggcagctt

SEQ ID NO: 766175 - DNA, 594 bp, Homo sapiens
atgactcctaaacttgagattagggcttcatgttcactgaattgagcccttgtagaagctgaaactctcagtgcaaatatgctcaacattctaaattatacgttatatgagtttcctcttcattcagtaaactctttagggaacaccaaagcctgtttcattttctaagtatcrgcaagtggggctgacaagagtaacaagaggtcagagcaaggcatttcgtgaaaacagcaatgcacaggcatctgcagtccctgcttacagtgagattcacatgaccgtcgttcatgggatacgaaggataaaaggggagggaggaaaaaaatatgcagttgatctggatgaagaatcggatttggaaagcaacttagaataaactctgcttatatttctaagattaaatctcaagatacaggattttctgtcttcagagagttgcactctgctgcaaactttgaagtaacactttaccatttctatcttccttcttatgggatctttgagccacaatttataaaatcacctctacatctcttgtatttttgttatgtctaataatctcttgaggtctctctagggacagtgactataaat

SEQ ID NO: 766176 - DNA, 494 bp, Homo sapiens
atgctaataggtacaggacactatgagaccagtgctgcccctgttgtggagcccctgcaggagatgccgccagtaatatacgaaggcacatctccattcttgaaaatgcttggcacttagatgggtggagctgaggtaacccttgtgtgtagatgacagtaactgtacagttgcagacaaatactgtctgacagagagtgttgaggtttccaactataataatgaattaatctctttctgtttgcagttgtatcagttttggccttacatagtttgacattctgttgttaggcacttaaatcmtttaagaattattatgttgtactggagaactgaccccttcatctttgtgtaatgcccgtctttatttttagtgactttccttgcttgaagacttctctgtctgtaattcatgcagcgactcttcctttatttgataagtaagtgttagcctaggctattttgtttcgtctatttcctttacgtgtatacat

SEQ ID NO: 766177 - DNA, 565 bp, Homo sapiens
taaagctataaaatttctagaagaaaatataagagaatcttttagtcaccttagatcaagcaaaatttactaaatagtactcaaatttcatagactataaaaaattgataaatcatactttgttaaaatcttaagatttttcttcttcaaaaaacactgttgagaaaatataagggaaagcttgggtctcactctagacytacaaaatcagtatctccaggaatggggttccacatgtcattttgaaccataactgttaagaattattgcctcggttctcaaattaaaatttgagaatttcaatatatagtaccatattgatggcctccgcataggaccaaagaagactcacagggagaaatagaagacagatattctctacggtaaatgagaaaattagatctagagaagaaaaaaaactaagagattgataaatactggcttgcaaatacatgaataatcactgtgcagtgaccttggcacagatcactgcatagtgactaaaaaaaaaatagttcttgatattaggtttcaaatgagatactggaatcttctcaaatattca

SEQ ID NO: 766178 - DNA, 636 bp, Homo sapiens
ttgtctttaccagcacatcaaaaagatgctctactaaagtaaaactgaccctctgcccagcatccattcagctccattctgctctgaatcttcatatttaataaaaagtttgattaggttttcacagggtttgctgcattgaaatctgggggaaaaaatagaagtaaaaatagagactctgacagcaaaagaaagcaggatagggaaggggggaagggcatttgcatctcttaaacacttagtaaaggatttgagaattggggtaggatgggaaaaggcgggcagaggtaaaacaggataaataacagctcaaaacaattatctttgagacccgccaaaatcattagttatccccctaataaattcttttactccacccccataccacatacactcttaaaatgtgttgctagcaagtgtttggggcttgatgacatctctggaatgttttagtcgtgtttagcatggcagcctgggctctattctgcttggaarcaaccagggaggatctgtgataagtgttgaagaaaaggacaggaaaagtggaagaggaaagaactcaagcaaattccttcttccagacctattcatcctcctctctccctctgtagcttgggcttctgaacactctcttca

SEQ ID NO: 766179 - DNA, 641 bp, Homo sapiens
gaaatggggaacagggaaaataaaggaattcagttgacatggatttggcactcacccagcactgtatgtgccattgctactagagtgtcttcctggatgtcccataggcacctgatgatcaataagtcccaaattggcttcagtccccacttgctgtgcagacatgccctgcctgtccctgtgcacagaacagccatctatccagggatgttcatatatrtcatctcattcaatcctcacatccacccataaaatagaaattatcacccctagtcaatacatgaagaaactgaagctcagagaggctaagtgcaacagctcgggctgccataataaaataccatgggtggggcgatttaaacaacagacatttattttcttacagttctagaggctagaagtccaagatcaaggtgttggcagagctagctcctcctgagggctgtgagagactcactccttggcttgttgatggctgtcttttccctgtgtctccttgtatcatctttcctctgcacggctctgtgttcacttttctctttttataaggacaccagtcatgttggattacagcccaccttaatgacctcattttagcttgactacctttgaaaagaacctatctctaaataaagccacat

SEQ ID NO: 766180 - DNA, 632 bp, Homo sapiens
tgatctcctttccctgatatttgttgagaacctgtctatttatcctaagcaaattaatgcaggaaaagaaaaccaaatattgcatgttctggcttagaagtgtgagctaaatgtgggggtatgcatgatcatgaaaatagaaacaataggcaatgagaactacttgagtctagagagaaggatgggagaaaggactgaaaaaaacagcctgttggatattttgctcaatacctgggtgatgggatcattagtaccccaaatctcagtatcatgcaatatagctatgcaacaaacccacatatgtacccccagaaactaaaataaaggctgatgtttttaaygaaaataaatgagtgaaagaaaaagaataaccctctacaggtctaacatgtctttccctatcatacaaaggagccacttgaatcttgagtttttaactgagtcttgtgggagtaggagagtgagattagaattatgttctcacactagttttctcattctggagtcattcctgaagggatttggaacctttgaatcactttgcaatgaatgtggagtcacaacaactggattctaatccttactcttttgcttattcttgctctgtctcctcagaataatcatttaacctc

SEQ ID NO: 766181 - DNA, 632 bp, Homo sapiens
tgatctcctttccctgatatttgttgagaacctgtctatttatcctaagcaaattaatgcaggaaaagaaaaccaaatattgcatgttctggcttagaagtgtgagctaaatgtgggggtatgcatgatcatgaaaatagaaacaataggcaatgagaactacttgagtctagagagaaggatgggagaaaggactgaaaaaaacagcctgttggatattttgctcaatacctgggtgatgggatcattagtaccccaaatctcagtatcatgcaatatagctatgcaacaaacccacatatgtacccccagaaactaaaataaaggctgatgtttttaacgaaaataaatgagtgaaagaaaaagaataaccctctacaggtctaacatgtctttccctatcatacaaaggagccacttgaatcttgagtttttaactgagtcttgtgggagtaggagrgtgagattagaattatgttctcacactagttttctcattctggagtcattcctgaagggatttggaacctttgaatcactttgcaatgaatgtggagtcacaacaactggattctaatccttactcttttgcttattcttgctctgtctcctcagaataatcatttaacctc

SEQ ID NO: 766182 - DNA, 638 bp, Homo sapiens
gcaccttttaaatatttctccttcgttgctgaaactgtgttttcttttgttagtagagtatagagaaacaccaagaacagttttctcttctgattctggtatgctttggtttgcttgtacttgctcctgctgtgtagctgtcagcaatgcctatgagatatatccagtggagatcagactcgtggatgccttcccatcaagtttccacagaacactgcaagcaaattctcagggaggcttgcaggcaccctagttgttggcgttgtagctaaaccaaccagcaggggtgtttcctacttgctaatttcaactgtaattttgtgtccacctgcacgctggagaagtgtttcctgtcttggctgacttctctgactgacagcctttgsgttacctccaccccagagaagtgtttccacctttcctggtgattttggaccagctcggatccaggcaacatagaaaacttctctgttgtgcagtgggctgcaaccatactttctccaacaaggcctaaatcccaggtttgggaagggtcatccttccaagttgacttttccttgggtactctccccagggtagtcttctgagttttcttctcttcttcaaagacaatttgccattatagttaatagttattt

SEQ ID NO: 766183 - DNA, 638 bp, Homo sapiens
gcaccttttaaatatttctccttcgttgctgaaactgtgttttcttttgttagtagagtatagagaaacaccaagaacagttttctcttctgattctggtatgctttggtttgcttgtacttgctcctgctgtgtagctgtcagcaatgcctatgagatatatccagtggagatcagactcgtggatgccttcccatcaagtttccacagaacactgcaagcaaattctcagggaggcttgcaggcaccctagttgttggcgttgtagctaaaccaaccagcaggggtgtttcctacttgctaatttcaactgtaattttgtgtccacctgcacgctggagaagtgtttcctgtcttggctgacttctctgactgacagcctttgcsttacctccaccccagagaagtgtttccacctttcctggtgattttggaccagctcggatccaggcaacatagaaaacttctctgttgtgcagtgggctgcaaccatactttctccaacaaggcctaaatcccaggtttgggaagggtcatccttccaagttgacttttccttgggtactctccccagggtagtcttctgagttttcttctcttcttcaaagacaatttgccattatagttaatagttattt

SEQ ID NO: 766184 - DNA, 498 bp, Homo sapiens
aagaaaatgagcagcagcagcaagctggaaataatctacttagctgcactttacaaatgcctcctaaaaaaatcaagcttgacttcaatggaatttctagaaacaattcaatggaatttctagaaatagtaattctatgaggtatcaaattattaagaaaaatacctaaattacaaaggattcatgtgcattggccattctaaatctttttcccttttagtgttgaagctcaaggcactgtcaaaaaaaaaaaaaaaamaaaaaaccttggaacttgacaaaatgagttcagaaatacaaggaaaaaaggcaattaagagtaggaacttgaaagctcaaagaagaggggaaggaaggttgacaaaagacactcaatgatcccagaggtactgccctaacctctaagcattgcatctatcctaattttttaaagtttcgttttaattcccgaaattccatgaattaggcctagaaattagcaaataccctttgtgaaga

SEQ ID NO: 766185 - DNA, 481 bp, Homo sapiens
cggcgaagatgggagtgagtttgcgttgcaatgcctctgaggcccacggcttggaggccgatgtgtgtctcccaagatgagattcatgggggtcgttcaccaggatgggattcaggaaagaggtggcgcagaggggagactgagggaccagggtgatgtggacacgatggccttgaggtgcactcaccccgaggctctactgtgttttgtgtcctgaagtgtgcgcygagttagactcgccatccggagcaggcaggaagccaggcaagcggcgagtccacaccaccgctggttggtactgaccaccccacatctccctgcccctgcacgccagtccctcagaggactcactgctgttgaatccccaggacagtctacttctttaccgtgtgtagcacgatcactctgcctccccatctcgtgaggacgtgaccgccaccccgcggggactttgctcttctgttcactgctgcgttcccga

SEQ ID NO: 766186 - DNA, 481 bp, Homo sapiens
cggcgaagatgggagtgagtttgcgttgcaatgcctctgaggcccacggcttggaggccgatgtgtgtctcccaagatgagattcatgggggtcgttcaccaggatgggattcaggaaagaggtggcgcagaggggagactgagggaccagggtgatgtggacacgatggccttgaggtgcactcaccccgaggctctactgtgttttgtgtcctgaagtgtgcgctgagttagactcgccatccggagcaggcaggaagccaggcaagcggcragtccacaccaccgctggttggtactgaccaccccacatctccctgcccctgcacgccagtccctcagaggactcactgctgttgaatccccaggacagtctacttctttaccgtgtgtagcacgatcactctgcctccccatctcgtgaggacgtgaccgccaccccgcggggactttgctcttctgttcactgctgcgttcccga

SEQ ID NO: 766187 - DNA, 507 bp, Homo sapiens
ccctcccttacaacatgtgatggacagagttttatgtccctgcgaattcgtacagcaaaatcctcaccgtgaaggcgggggtgttgggacgcggggcctttggaaggtggttaagtcatgacggtggagctctcatgagtggcattattgcccttaggaaatgaaccccagaaaggcctgtttttccttccaccgtgtgaaggtacaataagatggttgtctatgaggactcagaccctcactggcctctgagcctgtggcaccttgatcttggacttcccagcctccagaactgcaagaaataaacgtttataarccacccagtctacggtattttgttaccgcagccccagtggcctaaggcatgcagaatttggccatccaatattaatggagagactgtcaggttatttgtagcctgtgggaggcaggacctgagagtgatttgaaggaaggagagagagagtttgctgatactggaccaaactccagtgtgggaggaagtct

SEQ ID NO: 766188 - DNA, 653 bp, Homo sapiens
tcaatacatgcttttgtagggacacattcaaaccatggcatatttctaggatgccatgagaattatgggatgatatgttctatcagctatgagtatgcagtgaggtctaactaggttcttatttttgcccttgcaaattagaatgaatggtacctggacaacaatcctcatcmtagcagctctgaccagggaaaagaagcaccactttcccccatgaagtaggagattccagaccaaattgctcccctagagctgtctctgtggagcccagctggtcattttgatgaaggcaaagagcctttcatcccctttttgatatatccttccttgtgtaggaaaagccacttgcttaatgctcctggccaacccataacctcctcctcaacccatcttcaagggaaggagcagaggaggagcaataagctggaaggatttagggcaatttgctccccgtgaaaaccaagggaatggggaaggaggtcctccaaacacttaacaataacatttctctccatattcgtagattatggactttaaccaaaaaacaatcattaataaaactcattttgtacacattgaaaataattgattattgaaacagatcatgcagtgatcatggctactattttctccaacctagtgtatattatatt

SEQ ID NO: 766189 - DNA, 541 bp, Homo sapiens
caacggggaataaccctcaggcccccgtactattaaacagttactgctaatggttttttttttttttttttttttttttttggtgagacggagtctctgttgcccaggctggagtgcagtggcgcgatctctgctcactgcaagctccgcctcctgggttcacaccattctcctgcctcagcctcctgagtagctgggactacaggcgcccgttaccacgcccagctaattttttgtattttttagtagagacggggtttcaccatgttagccaggatggtctcgakttcctgacctcgtgatctgcctgcctcggccttccaaagtgctgggattacaggtgtgagccaccgcgcctggccactgctaattgttttctacaaatgcttgcacagagtgagctctgagtcaggtcaaaaaaaaagataaacgctaagaataaggcttttcagggaggtagcagacaggtcaaatagagacagttctctggggatgaggcttttggagagcttcaaccccattctgccctatccaggggctg

SEQ ID NO: 766190 - DNA, 591 bp, Homo sapiens
tactctgttgctagtttctttttcttgagcctattttaatggacgagtttcatttaaataggtctcgcttgtcaatttttgtttttgttgcaattgccattgaggacttagtcataaattctttcccaaggccaaagtccaaaatggtatttcctaggtttttttctgtgattcttatactttgaggtcttatktttacatctttaatctatcttaaggtaagggtccactttcattcttctgcatatggctaaccagatatcccagcactcatttattgagttgggagttctttccccattgcttatttttgtcaactttgttgaagatcaggtggttgtaggtgtgtggctttatttctgagttctctattctgttccattggaacatttaattttggaatttgatatttgtctgttcagtgtttcaatttcttcctaattcaatcttggaaggttgtgtgtttatgtgaatttatccatttcctctagattttctagttcgtgtgcatagaggtgttcataaaaatttctgaggatcttctttctgtgggattggttgtaaggtcacctttgtaatttctaattgtgt

SEQ ID NO: 766191 - DNA, 627 bp, Homo sapiens
ggtggttttttttcagaagttctataagtagctctgtttaaaaatttcaaaatggacaaagggcatgaagctattttgggaacaaaatgtcagtactgaaggtatactttttcatatattgaactaatgcgtggttcagaaagttctttgctaatttatcaaaatgtcatcttcaggtactgggttggaaaattagtaactgctagagtgtgtgaccattgaaaggtgcaggagcctatcaatttttagcttctagcataaaacgatgtttatcattartgttgagatttaaaatgtcagaagttcttaaagttcttagcataaaaaataaaggctaaaagttaagcatctattatactataaatccagatatacaaaaggaaaacacagtactcaaaaagcattaaatgtactcaaataaattacctaaaaagtgcataggtaacaacttttaaccgtgtaatggcaaatgtcttaattttatccttataaaaatgattcctgttggcttttaattactctaaattgaggaatggtgtattattagtacactcttcacatatatactattcactcttaaatacttatgtggccaatcatatgttgggcaaataatactttttgctt

SEQ ID NO: 766192 - DNA, 627 bp, Homo sapiens
ggtggttttttttcagaagttctataagtagctctgtttaaaaatttcaaaatggacaaagggcatgaagctattttgggaacaaaatgtcagtactgaaggtatactttttcatatattgaactaatgcgtggttcagaaagttctttgctaatttatcaaaatgtcatcttcaggtactgggttggaaaattagtaactgctagagtgtgtgaccattgaaaggtgcaggagcctatcaatttttagcttctagcataaaacgatgtttatcattagtgttgagatttaaaatgtcagaagttcttaaagttcttagcataaaaaataaaggctaaaagttaagcatctattatactataaatccagatatacaaaaggaaaacacagtactcaaaaagcattaaatgtactcaaataaattacctaaraagtgcataggtaacaacttttaaccgtgtaatggcaaatgtcttaattttatccttataaaaatgattcctgttggcttttaattactctaaattgaggaatggtgtattattagtacactcttcacatatatactattcactcttaaatacttatgtggccaatcatatgttgggcaaataatactttttgctt

SEQ ID NO: 766193 - DNA, 613 bp, Homo sapiens
gttgataccttgcaaattccgaagaacttctctagtactgaactatctcaaaaagggttttccagatgtgaaaaataaatataaatgttgtttttaaggtgctttcatagatttttacttaatcttgagtcatttatttatttctaatttttgtcttgttatcttggggtaaacggaactaactaaaactttctgcaaattttacaaacctctgaaatttgaacatgctagaatatacccaagaatctagtccaaaactaaacgacctgtagtaaaactggtgctaacctaaaatagacgggtatttgaagctagaataataaaaaaaaaaaatcattctgttgattgctttaaatctacaggagtaaatttacyggagtaaataagaaattagtcctcccctttctcttctcttcccttgttttcttctgccttttccctccctcccttcctcttcttccctttttcatttccttctctttcttccttccttccttttcttccttgcttcttttctttctctctttctttctttcctatttttactcagtttccttgccattccatatttccatggcttaggaaaaaattcataatgctcagatttattaaa

SEQ ID NO: 766194 - DNA, 716 bp, Homo sapiens
actgtgtaccactgagagtttcagtgatggctgtagagtacaataacagctttctgaccttacaactttatataactactgtgaggttaaaagaaataaggaaaacctgtgaaagaaattcaaaagaaagacagtattaaggtatatagttttctgttcattattaacttgaaataaaattagttaactgcatcctttctttattcataattttctgaagaacagttgtcctttttttttttttttggtggggtgggggcagggtggagtraccaggaagtcaaactgtggctctgtcttgtggttttagactaggggtggtattttagttgaacctgcaggtcatggggagtccatttccctatcaggaaaggtggtgctgccttggaacgttgtgaagccttcattttgggtagtacaataaaaagtctgattctatttttgatgtttgactgctaaaagctctcaagcccaacttctccttctgccctacatctgagcaagttaataaaaagcctaggtctctttttggcacctgtgaaaagttcaaaccatgcatcttgtcctacgacaggcagccttcaccctagctgcaccccctagctaccataaaaacccaagccagtagccccttcctgttttctcaagccatttttcatttcagacctgcttgggagcctgcccatctctctctagaaagcctcattatgtaagta

SEQ ID NO: 766195 - DNA, 591 bp, Homo sapiens
ctgatttttattatcatcaatttccagcaattaaaaaatgtcagtaataaaatatccacccctaaaaaagtattttgttggtttaagtttcaaaacattgctacacttcctattattactcctatgtattgtgtttcaattttgaatgttttattgcataaacatagtaaacattacattctatttaraagtttattcagagaacttccagctttacgtttgctctagtcccatgagaattcagctatatgactccttttaagagtaaatccataacagtttggaattattttggttgcatttctgtgtctccaataccattggtattacacattcctacatttaggtgttggaataaaagtaatgatagcacattgattatagagctaaatagaattcgagtttctttgattttgtcattgtataggataacttgaaatgttatttgcatttaaaatttacaactgcaaactagaatgcaaattgcaaggtgtaatgtttttgtttggaaagtatattttagttcttcaatcaactataagtgaaactattgatgaacctagttatggcatctattgtatatcaatacat

SEQ ID NO: 766196 - DNA, 615 bp, Homo sapiens
ggaggatccaggagaagctggaatgttactttggctccttggttggctcgaatgtgtacataactcccgcaggatctcagggcctgccgccccattatgatgatgtcgaggtaagagatggagaaaattgccccatgttgggaagaatgagttgttgagagcctggtttagtagagttgtcagggtgagttcacattattctctaaggctcttaggtctgtattcgctctttctgtgcagtttctgagatattgatttcatcaaaatgttgggccaaagtaaatcccactaaactggtttcctgctctgtctcaaaggaacagcttgtttccaaccttactaatttaaagagccacacattcgtctgaaacaagtatttattgaatttatctacagaaaggtgtgcttggcttttcctttaatttcacaaagtatggtctttaataagatgaggtcacaaataatcctycatgtgctttcattttgttctttttcagtagctgccaaaaatatgtatatattttccatttgtgaaaatcttggggcagcttgaatgagggtcatggtttcacttaagcattggcatcttgacaagtgttgatttcactctgatat

SEQ ID NO: 766197 - DNA, 591 bp, Homo sapiens
atcttttaattatagctgctttgttagctagagagagctgattttagctcctcttgacacgagggagtgcatactcagagaggttacaacacgtgcctgaaacccaaagttagttaatgataggaaagtagccagatccttctgactcacagtatagtcctctcctttgacaagcaaagactgtrcaagcagcttttataactttagcttttgtcttgactctgtagccagtatctgcatactgaaatgatttcactttgaagaaacaaagaaattatcatctataaaactaaaacaaaaaagcccttagttatgggagacgtaaaaggtggggaaaacataaataaagaaaatgagctgcaatttataacccaagttaaacaaaaagctcccctaaatttatatcctcctgtttccacataatgagtcaattaatcttctaatgctttataaaagtaaaaaacactgcagtagcagctggttttaatgttaaagctaattaggaagacacattaaggcaagagaagtgctgaagttaacatttagctcaagagggaaaaagtatgtgcgtgtgtttgtgttgcggacaag

SEQ ID NO: 766198 - DNA, 492 bp, Homo sapiens
gaagcgatccgtcttgtgatgataattactcctcagaacagctctgccgaagagaaaaggcagaatgcagaacagactcctgtttacaaaagcgtttgagaacctagtaatacatttcagagtatggaagtttttaatatctatttttttgtcatttggggttaagtactgaaaaaacaagtgcccaccattcactataarcttccagattctgactaaattctccttcaatgaatcgattgcctcttattaattctgaagcttctgtaatatttccttttaagatggtcactaccactagatggttttcagcttaaagaaacccaggtattaccaatcctctgtgacttgaagccaaaaccagcttcaaggaggatgatcccccaaaatatcttccaagtctccattctagatgtggacctagagaaaagaagaaaccttgtaattaaaaaatgtgccttcatgcacttaaaatgtgtccaacacattgac

SEQ ID NO: 766199 - DNA, 580 bp, Homo sapiens
agtctcccaattggtgggactacaggtagacacaaccacacttggctaattttttttttttttttttttttgtgtagaaatggagtctcgctgtgttgcccaggctggtttcgaactcctgggtcaagcgatcttcctgcctcagtctcccaaaatgctggaattacaggcgtgagcctctgtgcctgtccagtgtactataattaatttacagactcttgggcattcagttgattttgttttttcaacatcataagtaacgatgtagttcatatctttataactaattcttatgactagtgcaaatttttgcctgaattttctttgggataaattaccggggacagaattgrtaaatcaaagggtatgagcttccatggtccactctcttctctccaattctgaggatttgcaaatatacccctctagctctagctagatttggagggagctgtgtcctcatgatagtgtcaccttttcttttagaaagattatcagactttgataatactgtacaatagtagtactttttttcacaaatgtatgtgctgtcaataaagtgtggtttgtttcagattaa

SEQ ID NO: 766200 - DNA, 562 bp, Homo sapiens
aagcagggttttttgtagtgagagaaaccataatgagattatggagtagactggacataagcaacacatttcaggtgtcactgtcttccatcacccccagatgggaccatctagttgcaggaaaacaagctcagggctcccacatattctgcattatgtgaattgtgtaattatttcatcatatattacaatgtaataatagtagtaacaaagtgcacaataaatgtagtgtgctcgaatcatcccctccccatccccgcagtctgtggaaaaatggtctttcatggaactggtccctgayaccaaaaaggttggggactgctgatgtagagattaaatttttttcatgtccactctaatgacgaaaacaagcaaattgatggagaaagtcatttcacaattttgttaccattttctaactttgcaaaccttcagcacactgattaatatctctaagcctcaatttttctcatctgtaaaataggtagattagtaactacctcataaagttttagaaggattgaatgagataatgccagtaaagcctttagcacaacacctg

SEQ ID NO: 766201 - DNA, 609 bp, Homo sapiens
ttttcaatttactttgcccatatctatcaagagaatcactatctatggcagacatagccttacaacatatatttcttaaataatagacttaaaagtagagatttctcccagatccatgggctgcagaatggacgttgtgttagcaggcataaaaaggacattaatctccttctgcgtctccttcagagttcttaagtgactaggtcattgtcaatgagcagtaatatttcaaaagaaatatttctttctgagcaataattctcaagggcgggcttaaaatatttagtaagccatgcagtaagcagatgtgctatcttccaggctttgttgttgtatttrtagagcacaggcagagtacatttggcataatttttaaggacattagtatttttgaaatgccaaatgaccatttgctttaacttaaagtcaacagcttcattagctgctaataagagagacaccttttcctttgaagctttgaagccagatgttgatttctcctctctagctatgaaagttgtagatggcatcttcttcaaatagaaggctgtttcatttacattgaaaatttgttgtttagtgtagcaaccttcattaataatcttagct

SEQ ID NO: 766202 - DNA, 609 bp, Homo sapiens
ttttcaatttactttgcccatatctatcaagagaatcactatctatggcagacatagccttacaacatatatttcttaaataatagacttaaaagtagagatttctcccagatccatgggctgcagaatggacgttgtgttagcaggcataaaaaggacattaatctccttctgcgtctccttcagagttcttaagtgactaggtcattgtcaatgagcagtaatatttcaaaagaaatatttctttctgagcaataattctcaagggcgggcttaaaatatttagtaagccatgcagtaagcagatgtgctatcttccaggctttgttgttgtatttgtagagcacaggcagagtacatttggcataayttttaaggacattagtatttttgaaatgccaaatgaccatttgctttaacttaaagtcaacagcttcattagctgctaataagagagacaccttttcctttgaagctttgaagccagatgttgatttctcctctctagctatgaaagttgtagatggcatcttcttcaaatagaaggctgtttcatttacattgaaaatttgttgtttagtgtagcaaccttcattaataatcttagct

SEQ ID NO: 766203 - DNA, 634 bp, Homo sapiens
tgaaagatttctgttgaaaatctgctgatggccttatgaaagattctttacatgtgacaagtttcttctctcttgctcttttgaaatcctctttgacttttggcaattggattataatgtgtcttggagtgttctttttttgatttgatcttgcttaccatgctttggacctcccgaatctgcatgtccacatcatttccaaaattttagaagttctcaggcaatatttcttagaataagctttcttcccctttctatttctcttctctttctggtactaccataatttatatacttgcacattttgttatgttctgtaggcccatatgtttttattattctttttatatatwtttttctttttgttcctgtaattggctaatttcaaatgacctgttttgagttcactaattctttcttccacatggttgagtctgctgttgaaattgtctgttgagtttttcagttctgtcattgatttttctcagctccagagattcttctgtttttttcttgggggtggggagttgtttctatttaattattaaacttcttattttgttaatgcattattttctaattttatttagttgtctatatattgttgcatctcactgagcttcaagatgattat

SEQ ID NO: 766204 - DNA, 634 bp, Homo sapiens
tgaaagatttctgttgaaaatctgctgatggccttatgaaagattctttacatgtgacaagtttcttctctcttgctcttttgaaatcctctttgacttttggcaattggattataatgtgtcttggagtgttctttttttgatttgatcttgcttaccatgctttggacctcccgaatctgcatgtccacatcatttccaaaattttagaagttctcaggcaatatttcttagaataagctttcttcccctttctatttctcttctctttctggtactaccataatttatatacttgcacattttgttatgttctgtaggcccatatgtttttattattctttttatatatatttttctttttgttcctrtaattggctaatttcaaatgacctgttttgagttcactaattctttcttccacatggttgagtctgctgttgaaattgtctgttgagtttttcagttctgtcattgatttttctcagctccagagattcttctgtttttttcttgggggtggggagttgtttctatttaattattaaacttcttattttgttaatgcattattttctaattttatttagttgtctatatattgttgcatctcactgagcttcaagatgattat

SEQ ID NO: 766205 - DNA, 634 bp, Homo sapiens
tgaaagatttctgttgaaaatctgctgatggccttatgaaagattctttacatgtgacaagtttcttctctcttgctcttttgaaatcctctttgacttttggcaattggattataatgtgtcttggagtgttctttttttgatttgatcttgcttaccatgctttggacctcccgaatctgcatgtccacatcatttccaaaattttagaagttctcaggcaatatttcttagaataagctttcttcccctttctatttctcttctctttctggtactaccataatttatatacttgcacattttgttatgttctgtaggcccatatgtttttattattctttttatatatatttttctttttgttcctgtaattggctaatttcaaatgacctgttttgagttcactaattctttcttccacatgrttgagtctgctgttgaaattgtctgttgagtttttcagttctgtcattgatttttctcagctccagagattcttctgtttttttcttgggggtggggagttgtttctatttaattattaaacttcttattttgttaatgcattattttctaattttatttagttgtctatatattgttgcatctcactgagcttcaagatgattat

SEQ ID NO: 766206 - DNA, 599 bp, Homo sapiens
gatggaatctctccgggtagagaaagagtaaatcctcctccaggctgagagagaggcaccagcaaacagttatttcgcactgcactgaatagacaattcacagggaaatgttgaargaagagaggaggcgaccccaagtgcagtccatggcccacatgctctataataaataatttcgcagcagcccagcagtgtgtgcattgaccggccggggccagcacacacagattggcagggaaaatacatctagcggtgtcgaattttcattgcaatcaccaaattaactgattcccccacatcacactcccccaacacggcacacgccggcgcgcgcgcgcgcacacacacacacatacacacacacacagcagagctgagaaatgcaagttactgagaggtgaagtagggtctctgtgagattgtctcagcgcggattaaaaacctaagtaacgtgtcagacacccgggttacttgtgtgaggatgggggtgtgaaaggtgagaaatgggactcggcggtgtacgcagggagaatgtgctgtctgccttcacggagattctggcacacatgacatatctgaaatttacacccaacgtaaaa

SEQ ID NO: 766207 - DNA, 601 bp, Homo sapiens
atagcaagatcctgtctctaaaaaaatttaaaaaatatatatataaaaatataatgtaaagttgcatttatcaagaacgtctagtgttggcaaatgaacaaataccagtagaccaacggaacagaagacagagcccagaaatagacccacataaatacagtcaactgatctttgacaaaggagcaagagcaatacaatggagcacagataatcttttcaacaaaccgtgctggaacaactagaaatccacatgcaaaaaaatgactctagacacagattttacacatttcacaaaaattaatttgaaatgaatcgcaaacctaaatttaaaacacaaaactataaaacttctagaaaataacgtagtagaaaatctacgtggccttgagtttggcaatgagttttaaaatacaatgtcaaaggtacgatctctgaaagaaawaattgataagctagactttattaaaattaagatttctgctctgcaatagacactgtcaagaaaatggagagacaaaccacagactggcagaaaatatttgccaaagacatatctggtaaaggattattattgaaaacatactaagaactcttaaaactc

SEQ ID NO: 766208 - DNA, 623 bp, Homo sapiens
ctctctatggcagatgcacctgaaagtgttttctaagctagataatctggtagtggccaacccagagattcatcccttatctatgataaacatctgagccccatcccatcccatggaacatgggccatacaggagattgaagccctgagttttcagttaaatgaagaatgccaggtggaggtcgttggrgggggtgttaagtgaaaatgctataaactgcatgatgtttacaggcagttgcagttttcctgaccagcctgttgccactggaccctctcccctatatgttagcatctgataaagccgcatgtctcgtttactagctctgggtctcttctttggcctcttgagcctggtggcttccctattgaggttaggggtttgatacaatatcacccttcaggttaggatatgaatgagaattcagaggtgggattagctttctgacagcagaggtccagctgggaaggcaaggagtgacatactgctagtctgcctagaagtttgtaccttccccacacacagtttactcaacctagataatgactggatttgaatcataatctagcctttatttgcattgtcattttggacacctcatttaatctgaatctcagtttctt

SEQ ID NO: 766209 - DNA, 634 bp, Homo sapiens
ttcatatttcagatttttttttattttggaatatttgcatatcataatgagttcaggctgggatgggacccaagcctgaacatgaaattcatttatgtttcatatatatcttgtacacataacctgaaggtaattttatacaatattttaaataattgtgttctgttcgtatacattgaatcatcagaaaacaaaggtttcactgtctcatttcagtgccccaaaagttttggattttggagcatttggggtttcagctatttagattagtgacagtcaacctatatgcatctccagaaaacatggacattttcctgtaactaccatgccattatcaaatctaacaatattaacatttctttgattttatccaataaccagtccttattgaattttcctcaggtgcttcaaaaaatgtggttttcttttatcagttgatttgttcaaatcagaatctaaasaaagccagtaactgattttgggaaaaaacttattctatggaaaaagcattttgagaaatacatgtttgaaaatgtttacactgttatatgattttgtgctgaaaataatgtaagcatttcacactttttaaatcccatatctctctccactcttaatctgctggaggtgcact

SEQ ID NO: 766210 - DNA, 645 bp, Homo sapiens
caccaagtctcaggttgaaatctgatccccaatgttgaaattggagcctagtgggaggtgtttgggtcacggagtcaaatctctcaagaatggcttggtgcatcttcatggcaatgagtgagttctgactctattagttcctgagagctggttgttataaggagcttggcacctcctttcctctcttgccatgtgacctctgcacatgctggctgtcctttgccttcaaccatgagtggaagcagccagaggctttcgccagatgcccaatcttccagccagaagaatcatgagccaaataaatgttttttctttagaaattacctagcctttggtattccttwacagcaacacaaactaagacaaggaggggaagattttcttaaaaagggagcaatagtacacacagtaacttgaaggggtgatgcagcctggaaaaggaagtgtgttgttttacccaatagcaatgacttagcacatctgtgggagagggaaggtgatggagggttaaagacacaggacgctaggacaacaaatgaaagaaatggaagacacaagcgtgctgtgtggagtgttaacatttagccttctccattatcattcaagaggaagacaatactggaaggtcttccaatgacaattata

SEQ ID NO: 766211 - DNA, 493 bp, Homo sapiens
ctatatatttttgaaagataggtgtgtgatttgtgcctgggaatccaagaccttaaatacctaactggtcttgatgaaagtcagagaaatactagctaccccataatagaggtctttccagggcagcctggagcagtagagcacagattctgaamctacgactgctgttgtacctgctcagacttgctgaaagaagagctactcttcctctgacaaaatgaggactgatgggttcttctcagtttccttggagacccacagggtgctggagcaactccttctcccattctaccatgtgtgggtactgctattgtactattagtcagggggtgagaaacctaaccctttacccccagctgctaaattttttcttctttcttcctaagtccggagaggacaagaggcagccccaaagcttgcttttgttttgcctgtaccttggggatccacactctttctaaggcccgtttttacagaaagagggatgtgcttc

SEQ ID NO: 766212 - DNA, 610 bp, Homo sapiens
tggctttttgcccgcgccaccactgctttttgcacctttttgcccccgccgccgcggctatttgccccccgccgccgcgacgttatatggttttttgctcccactgctttttgcctccgccgccgcggctttttgcccccccaccaccgcagctttttgcgcgtckcggctttttgccccatggccatcgtcagaagtgtgagtggaacagagggaagggaaagctgttttcttcgaaagctcaaaaatcttcaacttttaaatagggataagtgttatttttgctccaagcacacatttgagaaatcttccatttagcggatctgatgataaacccacatttttgtttgttttaatctgaaaatgtatttgtatggttcttggaaatatttttttcatataaaattatagtttatcagcttatttcaagttttatttaccatttgataattactcctaaaatgtcattgattaaagaaagaatcatctattgctccaactgctctttactaaaggtaatttgtctttttaacctcatcaggctccttttaagctctcaaactgaccttattttttttttacagattcaatgcattaagtcaatttatta

SEQ ID NO: 766213 - DNA, 585 bp, Homo sapiens
tatatatacttatctatgtatatgtgtatatatatacttgtatatatatatttatacatatatatgtgtttatataaatcaaaatctgttttatttgggcacatgtgtggctgttatagcttcctcatacagtctttgtgttttttgttttttgtttttttttttttgagacagagtctcgctctgttgcccaggctggagtgcagtggcgcgatcttggctcactgcaagctctgcctcctggattcatgccattctcctgcttcagcctaccaagtagctgggaatacaggtaccccccaccacgcccggctawttttttgtatttttagtagagacggggtttcatcgtgttagccaggatggtctcgatctcctgaccttgtgattcgcccacctcggcctcccaaagtgctgggattacaggcgtgagccaccacaccggacagtctgtcttttattatatgtagtgataaaagaggaaggattctttatcctacttaatacattaactttaaatcccgtatggtctgatattaatattgccattccaactttctttttgtttgcattgcctgattcctc

SEQ ID NO: 766214 - DNA, 612 bp, Homo sapiens
tataatactgaattaaataacaaaatcttccttccccttttttatttaaactaggtttttcaagattatacaaaataatctcaatatgcataattacacccagcattttttctctttgtgatgaaattctaatcatttcactctcctaatgatacatagtttagttcttccatactcattcattcattccactcaaaagtatatactgagcaagatatcatgatcatttctaacctgggrtcaaaaaatgatgccaactagctaatgctatccacagtcattcacctacatatggtctgtgactgctttcacattccatcaacagggtggaatagctgtatctgagactacaggctgtcaaagtaaaagatatttattacatagccctttttagaaaaagtttgccaacctctagtcaagtgtacaggaaaagaaagataaaaataaatttcaatgcaatgttatgtaaatttaccaacaaaaatctgtcttcagtatagaaattactacaagaggaatgaatggtaaggatcatggaaggtttcctagaagaggtaacattttagtcgtttttgaatcgacagaagttggccacaggaacaggttttctgt

SEQ ID NO: 766215 - DNA, 612 bp, Homo sapiens
aacttaaagtattaaaaaaaacaaaaaagaatagatggcaaatagacgttctcctgcgtgccaatacattggtaatgtcatcttggggcactatttggggatctcttcagcacttcagaaaaagtgctgtgaccaatttttgaaatccaattatatagtattagaggaggaacagcaacttcaatgcaacgaatgcatttgccactccatctctggaaaagcatcaatggaaaaacattaatcaatcaatccatattkattgatagtcttctatcacttgtatgaaatattgcccacaactggggttggcactatggaaatataaagaggattattagacattgtccttgcaatataactaagtacagtatgtccatgacatagattgcagtacagactcaagaagaaatgaaatcctcacttttatttttgaacgaggttttgatgtatgaaaatgttcgattcctgcaggacaattagatggagagctagagagaactcttgcataatctctcaaatgtcctggtgaccagacacgatcagggatttggggagggaggtcaacagactgtaagtatcaaccaagcaggtcctgagtaaagtgcaggccaa

SEQ ID NO: 766216 - DNA, 588 bp, Homo sapiens
tcctgactgcacagaagggtgggtgctaagacaggtgtgaaggattaagagtaggcttggtgtggcaagtagaaacggaaaaatgaggagttgcctgtgggcaatatgaagatgggtacccaggtctagtgagggctctgtgttgatggtacagattaagtacattaactggtggaaagaacagtaccatgtgagccaaaaaaaaattagcttcttgtcttagttctactcccaaccagctggatgattttggacatgtctttctggcctcagtttaatcacctgtacaatgagagggtgatggaccatagagttaagcaatttttttttctctaaagggraagatagcaaatattttaagttttgaagatgatatatggtttttgcagtatatgctcctcctccttctcctctttctttttttacagccctttaaaatataaaatcattcttagctcatgttccgtacaaaaacagagctgcagttcgctgatccctggaatagctaatctccaagattcatttaaactataaattgttttgataagataatatgtgagcttccctgaaaaaagtagcttttattcc

SEQ ID NO: 766217 - DNA, 617 bp, Homo sapiens
aacctcctcttgtgtcctcttttgtccatgtatactcaacatttagctcccacttataagtgagaatgtagtgtttagttttctgctcctgtgttaattcacttaggataatggccttcagctgtataaatgttgctacaaaggacgtgatttttttcatggctgcgtagtattccmtggaatatatgtaccacattttctttatctagtccaccatttataaacatctagcttgattccatgtctttaccattgtgaaagtgctgcaatgaacatacacatgcatgtatctttaggatagaacaatttatattcctttgggtatatacccagtaatgggattgctgggttgaatggtagtcctcagttctttgagaactcatcaaactgctctctgcagtggctgaactaatttgcattcccatcagcagtgtataaatgttgtcttttctctgtaacctcaccaacatctgtcattttttgacttactaataatagccattctgactggtgtgagatggtatttcattgtggttttgatttgcatttctctaatgattagtgatgttgagcattttctcatatgttatgggccacatctatgtcttctttggaga

SEQ ID NO: 766218 - DNA, 590 bp, Homo sapiens
gtaggctatttaatctgctgatagtttcttttgctgtgcagaagctcttttgtttaattaggtcccacttgttactttttctttttgttgcaattgcttttggagtctttgacatgaaatctttgccaaggtctatgtctggagttgtatctcctaggttttcatatagggtttttatagttttaggtttcatgtttaagtctttaatctatcttgagttgagtttggtatgtggtaaaaggaagggatccagtttcaatcttctgcatatggctagtcagttgtcctagcatgatytattgaatagagaattctttccctgttgcttgttattggaaactttttcaaagatcagacggctatgtaggtgtggcgctttatttctgggttctccaacctgttccattggtctatgtgcctgtttctgtaccagtaccatgctgttttagttactgtagccttgtaatatagtttgaaattgggtagtgtgatgcctccagtttttatctttttgcttaggattgcttcagttatttgggctattttttggttccatatgaattttaaaataattttttataattctgtga

SEQ ID NO: 766219 - DNA, 552 bp, Homo sapiens
gtggaagtgggttctgaggagaataatcatttcttgcaaggtaattgtctcaggggaggccattcagtttcctcaagcaataaagggttaattccctcagacaggggagggtagaccacccactaggggtggagaggcaaagaaggcttagaatttaagactttagtgtccccattttcatcaagrtcatcccatacattcccattccaactttcaggaccctacttcttttcaaccaatgacctcactttaacagtagacatcctttgaggccaggagttcaacttgcattgtaatccagccagttgcaggatgagactctggatttataactcagcaaacctggctctgcagctgcaggagatgaaggtctccttcaaggaagacagaaactttcaggtcatttatgcagcctttcagctgggaatttgaatcctgagctcatccttttctttccccactttgtccagcaacattagcagcaaccaattcacttcattttactcattcgtttgactaaaatgttcaaaagtattatgtacataattaccc

SEQ ID NO: 766220 - DNA, 585 bp, Homo sapiens
ctgtgatctcctagctgcctttcctacttccacttttgctccctgcagtcttttctcccaaagagaagccagatctattctcttaaaacatgaaccagatcatttccctgcttataatcatctactagcttcccattgaacttaaaatcctaaccacctacaatgaccttcacaactccatgcactagctctgacttcctctccagccacatttcccactactctcctcctcattcctatgctccagaccatttctcctgctcctggagctcattcctgtctcagagcctttgcgtttttgttcccactaccagtgtcatgcttcttcccatcttcacctggctgacacttcctcatcattcaggtctcagcaacatgccagctcctcagagacacctcccagatamccttgctaaagcaatccgcctatgctccaacctctttatcatatgactccatcctaattttcttcattgcacttaccatggcctgaaattatgttattatatatttgattaatagaatgtaagccccatggatagcagagacttctgtcttgttcactgcttaaattccctatgccta

SEQ ID NO: 766221 - DNA, 592 bp, Homo sapiens
taatgaatgagtctgcaaatttcttcacccacatggtgatatagcataggtataggctgctctggccagaggaagggacatacacctagtgacaatcatccttgcctttgataatagaacttggaacataggtagtcagcaagtactgattggactcaatgtmtgaaggcttacacagttataagccactttgctttgtgccacatggctacaattccttcaagcctatttcctcatttgcaaaactggaattatttccacctcctagggttgtttagaggatcaaaatgaaataatccaactgctgttagcagtgtcaagcacatagtatgtggtcaataaatttgagctgcattccttctgtatgtggtccacgggaactggaagagcttatctcttcttactttgatgcctcaagcttaacaagaaggctgaattgagaaatgacacaaacgctgaaatcctatcctttgacgtacacttaacggcaaccatgtgtgccaaacttgtcctccatcagtgatgaggagatccccaacaaaaggtcataagcatcttagaaatcatttcatataatcgagtgtgtcccctt

SEQ ID NO: 766222 - DNA, 573 bp, Homo sapiens
taaagtcctttgtctgttctaggatcccattcaaaataccacgttacatttagtcctcatgtctctttttttttttttttttttttgagacagagtttcactctcgctgctcaggctggagtgcaatggcgtgatctcagctttctgcaacctctgtctccctggttcaagcaattctcctgcctcagcctcccaagtagctgccaccatgcccagctaatttttttgtgtttttagtaaagaccgggtttcaccatgttggccaggctggtcttaaactcctgacctcaggtgatactcccgcctcagcctctcaaagtgctgggattacagacgtgagccaccrtgcctggccctagtcttcatgcctctttaagctcctctcggctgtgacagtcgctcagacagtacttgtttttgatgaccctgagagttttcaggagtaatggtcatgtattttggataatgttcctcaattaggattcatttgattttttctctcatggttagatggaggttatggattgtgtggaggaagaccacaggggtaatgtgccattttcatcctaccaa

SEQ ID NO: 766223 - DNA, 614 bp, Homo sapiens
tgttgtttgtatcccctcaacttgaatgtaagctttataaaggaaagcatctttattttgttcactggtggatcccaagccgctagaaggatgattggccactgttgggtgttacaaatgtatatatttattgaataccttgaatggaaagtaattttatatacatatatatatatatatatatatwttttttttttttttgagacagagtctcgctctgtcgcccaggctggagtgcagtggcgcgatcttggctcactgcaacttccacctccgtggttcaagcaattcccctgtctcagcctcccaagtagctgggattgggattacaggcacacaccaccatgcccagctaattcttttgtgttttcagtagagacagggtttcaccatgttggccagacttgtctccaactcctgacctcaggcaatctgcccacctcggcccctcaaagtgctgggattacaggcgtgagccacagcgccaggcctatataaatatattagtggtaattatattagataatttttactgagcatttactatgtgccaagtggtgcacatgtatcatatcatccaacactcccaatgaacttatgaagcaggtataatt

SEQ ID NO: 766224 - DNA, 614 bp, Homo sapiens
tgttgtttgtatcccctcaacttgaatgtaagctttataaaggaaagcatctttattttgttcactggtggatcccaagccgctagaaggatgattggccactgttgggtgttacaaatgtatatatttattgaataccttgaatggaaagtaattttatatacatatatatatatatatatatattttttttttttttttgagacagagtctcgctctgtcrcccaggctggagtgcagtggcgcgatcttggctcactgcaacttccacctccgtggttcaagcaattcccctgtctcagcctcccaagtagctgggattgggattacaggcacacaccaccatgcccagctaattcttttgtgttttcagtagagacagggtttcaccatgttggccagacttgtctccaactcctgacctcaggcaatctgcccacctcggcccctcaaagtgctgggattacaggcgtgagccacagcgccaggcctatataaatatattagtggtaattatattagataatttttactgagcatttactatgtgccaagtggtgcacatgtatcatatcatccaacactcccaatgaacttatgaagcaggtataatt

SEQ ID NO: 766225 - DNA, 677 bp, Homo sapiens
cgtcactatggatccacttctctgaaccaccatttattccggaaagaacaggataatcatactcatcgaactcgcaagtttgttgtgagaattatatgtaaaatcagttcctagtactcacaaactggcacatagtatgtatttaatcaatggtatttttaaaaattgcaagagcaataagcatgtgcctgctcgtctatcaagaaattaaaaggtagagctagacacaaaccttaatcaggaattaaatggatattgtacatcttcatcatagacatccatcctatgaactttgcttagtttagcaagtgtgtcagtcagatatgctgtagatgaggtttctttaagaacagatcatgcacattggaatccacagcaaggaggctcatgctaaatcaaagragttactaataaggtgtcactcacaatatctggtaggagagctaagtttaaccgagactttagttttagggtataaccaagggaaggagacatgcactgtcatggcttgagagcccccattcaaagcattcataaaggtaccagacctcttcctatgaagccttgaaaaatcaggtgtctcttttctcctagggttttaaagatcctgtgtaccgtgcagacggaagcagtttgctgacattgcctacactaccgcagtaagtctgccttgcttg

SEQ ID NO: 766226 - DNA, 608 bp, Homo sapiens
acaatgtcaggaaattcttgaagaagaagaataaagaagcataaggaaatggaaagtgatggggatgctcttttttaaattctttttaaaaaattccatctttattggggtataattgaacaataaaaaatgcatatatatttataatataaaattacaattgcataaaattgtataatttatatwtacataattatatttgtatatattgcatatattttattatttattaatttaatttatttatttgagacagagtcttgctctatcacccaggctggagtgcagtgttgttgtctcggctcactgcaacctacgcctcccgggttcaagcaattttcctgcctcagcctcccaagtagctgggaatacaggtgcgtgccaccacactcggctaatttttgtacttttagtagagacaggatttcgccatgttggccaggctggtctcgaactcctgacctcatgatctgcccacctcggcctcccaaagttctgggattacaggtgtaagtcactgcacctgacctattgcatatattttatataacacatatatatttatattataaaattataaatacaatgtaattatttaataaatgcat

SEQ ID NO: 766227 - DNA, 523 bp, Homo sapiens
aaatcatattgtaaatgagtgggaaaatcttcatgacatactgttaagagataaaagtacaaaagcaaaaatttttagaagcatgttacgtgtgtgtgtgtgtgtgtgtgtgtacgtatactcccctagagagtggaataatgagagactcttattttcttttttgagctcattgggacttttcagtttgtagcattaacattttttccctttgcaactgaagggaaaaaatgttatttttaaaaactgaatcacatttgggtattataacagagcacaaaggagaggtggcctaaccctaagtggragtgggccatttctagaaggtgtgctggagctgagtcctgaagtcagccaggattatctgctggtgaagggaaaagggtgtttcaggcagaggagaaagcatacatggagaatcagctttggagagaatcgaactctaatttttgtccaccacatcttgcagcaccacgtcaaggtcactttatggactttgctgcaccacactttaagtaccaat

SEQ ID NO: 766228 - DNA, 610 bp, Homo sapiens
tgcctagtaaattaggcagtaaaaggcttttgtataaaacataactttttagctgagtctttaaggttgctaaggagcatttcatatggcagaggggttaagacatttcattttgagagctaggtgtacaaaaggcatagaacaatgtaagagcatatgtatctcataaaataagagacgttggcgagctacaaagtagtttaatttgttcattctcaccaagctattctgaggaacaagtgagatgagatctctgaaataactttgtaagctatgaagcattaaaacatggcactctttttatattcatttcattatctgaacaagtaacaaatgaaaaatggagcgtaatrtagggaaattgtcgctgtaagaatatatattgagataacaattggtgagaaaataaaaagggactggatacttggaagggaagaattttgcttactcaaatgataattaggttataacataggattaacatgcattttataatttaaatttgaataggatatattttagggagtacaaattgatttattgaatgtctcaattgtgttatgaaaaatttattggatttagaatcataatccatgattctaccatttga

SEQ ID NO: 766229 - DNA, 617 bp, Homo sapiens
cggttatcttctccctgctccctatgtgcaaattcaactccaaatttgacctttgtgctcccaaatggatgcatgatgtcagaaggtatcccagatgagcaaaatggatgtgggtaacgtaaccaaccacttttaactgggggagggtgagcactcaaactgtattctgcttttgtatatacatacaattattcatttatgttccagaacggaaaaacaaatgcaattgaggactgtcagtatttcgatctataggtcaacatgtctatttattcaacaagcttatctgaatacttgttctatgtcagattccatgctaacagattagattcggtgatatataagatccagtatgaatcttcaacgtgtttattataaagagacaaggtaggagtagggaagggaagggaagagagagaattgwccctccctgagtgggtcggaaaagatttatggaggaggagtgtctaagctagaatttaaagatgaatacaagtttttcaggcagacaaagtacagctaggcaggcagatgggaactacctgagccaaggcatggaggcgtaaagtgcacagtgtgtttaaagaacagtacacagctagctattcttggagtac

SEQ ID NO: 766230 - DNA, 541 bp, Homo sapiens
ggagcaacagtcaccagatatttctgaaggtgttcatcttgacagaaatgaagaagacattggtgttggagaccagggcttgatgtttggctacgccactgatgaaactgaggagtgtatgtaggcctttaaccattgtcttagcatacaagcttaaagccaaactggcagaactacgccataatggcactttgcctgggttatgccctgattctacaactcaagttactgtgcactatatgcaggattgaggtgctatgcttcccatcagagtccacacaattgttatatctgtttggcatgatgaagaggttcgtcttggtgagatgagggatgccctawaggagaaagtcatcaaagccattgtgcctgcaaaataccttgatgaggatacaatctaccacctatagccaagtggcagacttgttattggtgtgcctcggggtgatgctggtttgtatgactggacagaaaaccattatggacacttacagaggttggggtgttcatggaggaggtgcctttgaggaaaggattatac

SEQ ID NO: 766231 - DNA, 627 bp, Homo sapiens
aatattccatgtcctcaaattctcagtccctgaaatcagctaccaagcctccaaagaacctggctcggggagaaaagcgaggaggtcaacttacccaagcctttgcgcctaggtcttagtggggagggcggcactgccgggacaagactgggagactccaggccggtggagggaaacggcaacaggagttttccaccgggaattaggggtgcagggctctgtctcgccacatacccttcgmcccggggcaggtccgggcctcacaggcgcctcccctggatctctgcagccccggggcgcacgaagacccccagggacctccgaaggttggcgaggtgggcgtccacccaacgcagcctgaccccacagtcccggagcgccgcggtgaggcccggcccacgggccgccctccggtggaccccactactggacacaaagggaggaggtcttcccggcctgtggcgcccttcccccgacggcggctgcaccccggagggagcccggcgctactccggatgccgctgcggcacctcaagtcttcgcgggtcgccgactgcccagactccccacctctggttctatcccttttgcccgggatagagcagtcacgtccactcgctacctctt

SEQ ID NO: 766232 - DNA, 627 bp, Homo sapiens
aatattccatgtcctcaaattctcagtccctgaaatcagctaccaagcctccaaagaacctggctcggggagaaaagcgaggaggtcaacttacccaagcctttgcgcctaggtcttagtggggagggcggcactgccgggacaagactgggagactccaggccggtggagggaaacggcaacaggagttttccaccgggaattaggggtgcagggctctgtctcgccacatacccttcgccccggggcaggtccgggcctcacaggcgcctcccctggatctctgcagccccggggcgcacgaagacccccagggacctccgaaggttggcgaggtgggcgtccacccaacgcagcctgaccccacagtcccggagcgccscggtgaggcccggcccacgggccgccctccggtggaccccactactggacacaaagggaggaggtcttcccggcctgtggcgcccttcccccgacggcggctgcaccccggagggagcccggcgctactccggatgccgctgcggcacctcaagtcttcgcgggtcgccgactgcccagactccccacctctggttctatcccttttgcccgggatagagcagtcacgtccactcgctacctctt

SEQ ID NO: 766233 - DNA, 476 bp, Homo sapiens
tgtgttgttttaagccactaagtctggactaatttacatagcagcaataagaaactgaggcagtaccttattcataagttgctttggataacatagaattttttaagtgagagctagaaggcatctttaaagtgggtataacttaactattctsactttagaagtgaacggaaatgacttttctgaaggttcccctctccttgaagcctaaaattacgtgattcaaaacaaagacccctatgagtctactcatttgaacgggcatataaatgacttagaaaaaatacaagagcatcttgcttataatactgcctgtgtagtaatggattaccttgagtctaggttcagcctacactcctgggagcctctcagaactccatcttagccaggttcctcctaagaaggggatgtaagaaggaggcaaaatgaggggccttggcatcacgtagaagtgggcttacatccagccatgccac

SEQ ID NO: 766234 - DNA, 569 bp, Homo sapiens
acagattagaaagagcagctgatcttcagcctgggtgacagagcaagaccccatctctataatatatatatatatatataatatatatattttatatataatatatatatataatatatatattttatatataaaatatatatattatatatataatatataaaatatatatatttatatatatattttatatatataatatatatatatatatatatcagattaggaaggcatggtggtgtgcacctgtagtcccagctactcaggaggctgaggaggtccaggagttcgaggctgcagcaagctacgactgtgccattgcactccagtctgggtgacagggagagatcctgtctctgaaaaaaaaggaggagaakaaagagcagccgatcctatcttcacatggcaggaaacaaggtcatgagcagtggccacacaggactgttttattttgatataatggaagtggcatgggaaaatgcgaaaagaaaggtcaccctgaatagctctagggaagaaaaagaatgttgggcatttcaacaaacagcattacagaaaagaagaagcag

SEQ ID NO: 766235 - DNA, 515 bp, Homo sapiens
ccataggagagtaaggtcccacagagagtgataaatgccaaaggacaaataatcagcaggcttcaggggatccccactgagtgagtgcaagatcttagtagaaaacaagtatttgataaatagttgaaacatgaagtcatgcttgttcagacatttattcccagtgtcatgaaaagagcataagccaagaggtagaagatttgtaattcaaattcatttctctactttctggctgtaaraacttggacaagatacctaatgcatttgaatattcatttcctcatctgcaaaatatgtgaacaatatttcaatgactttttgaaagcaacatgagaaaaagctgtaagtgcttggcaaagaaaaattgcaggtgctttttgaatgatgtcattcatacctcagtttccccatattacacaggatatgaatgacatggccatatagaaaaagaatcattgaaatttataatgtgagaaccagagatccagagatatgacttcagggataagaatcaa

SEQ ID NO: 766236 - DNA, 494 bp, Homo sapiens
tgccctcccttcatctgtgcccatcagaatatcaaaggcccattttttagtctccaaaattttaaactcttagaagatggaaaccaagtatttcttttcacacccatcagtgggttatgggtggtaagcaccaagcacatgttgaatacataaatatctttcatcctctcttttcctctattcctacatataactaagagtgactgtatcccytagataaagaggccttccaattgtatgatactttagactttccaaaggttatggcgtagcagtcccaaacacctcatctgaagccaggctgtctgggttcccaccattgctgtgccagctgtgtgaccttggacaagttacataacctctctttgcctcagttttttcatcaacataaagggaagaataaaggtacttatttcataagagtttctagaaggattaaatatgttattcgtaaaatgctgaaaagtatgtctagcacatagtgagcattatat

SEQ ID NO: 766237 - DNA, 637 bp, Homo sapiens
ctgatgaagctgggggcactgagtttgtaaaccctgatgaaccttttttgccagaagaaacagcttccctatccccagtagcggcaacatcccctccctgacccatgctgccatcagcctttccacctttgtctgaggagataaaccctgtgctgcctgaggcaatggtgatggcctcccatgaggcagctgccaggcaagataatgttgactctcctcaggagccacctccaacacttctgtttgcttctagacctgtaactagactaatatcccggcaggcccctggaggtgaggttgagagtgtgacccatgaagaggtgtgccacactagaaaagaactgcttgagttttctaatttatataaatagaaatctggataacaggcatgggaatggatattaatggtgtgggataatggtagatggaacatagagtcagatcaggctgaatttattgatttgggcccaytaagtaggagctctgcatttaatgttgcagctcggggagttaaaaaaggttctaatagtttatttgcttggttaactgaaatatggattgaaagatggcccactgtgagcactgtgagtgagctgaaaatgcctgctctcccttggtttaatgtagaggaagggat

SEQ ID NO: 766238 - DNA, 543 bp, Homo sapiens; identical to SEQ ID NO: 764617

SEQ ID NO: 766239 - DNA, 601 bp, Homo sapiens
cccccatgttggaggtggggggaagtgttttggtcatgagggtggatccctcatgaatgccttggtgccttccccacagtaataagtgagttctcactgtattagttcatgtgagagctggttgtttaagaacctgtctgtttttggccggccgcagtggctcaygcctgtaatcccagcactttgggaggccgaggcgggcagatcacgaggtcaggagatcaagaccatcctggctaacatggtgaaaccctgtctctactaaaaatacaaaaaactagccggccgtggtggcgggcacctgtagtcccagctacttgggaggctgaggcaggagaatggagtgaacccgggaggtggagcttgcagtgagccaagattgcaccactgcactccaacctgggcaacagagcgagactccgtctggcaaaaagaaaaaaaaaaaaaagaaagaaaaaaaaagaacctgtccattttttttttgctccctctcctgctgtgtaacatacctgctccctctttgccttacgctgtgatcgtagacttcttgatgcctttgcagaagcagatgccagcagtatccttcttgtatagtttgcag

SEQ ID NO: 766240 - DNA, 601 bp, Homo sapiens
cccccatgttggaggtggggggaagtgttttggtcatgagggtggatccctcatgaatgccttggtgccttccccacagtaataagtgagttctcactgtattagttcatgtgagagctggttgtttaagaacctgtctgtttttggccggccgcagtggctcacgcctgtaatcccagcactttgggaggccgaggcgggcagatcacgaggtcaggagatcaagaccatcctggctaacatggtgaaaccctgtctctactaaaaatacaaaaaactagccggccgtggtggcgggcacctgtagtcccagctacttgggaggctgaggcaggagaatggagtgaacccgggaggtggagcttgcagtgagccaagattgcaccactgcactccaacctgggcaacagagcragactccgtctggcaaaaagaaaaaaaaaaaaaagaaagaaaaaaaaagaacctgtccattttttttttgctccctctcctgctgtgtaacatacctgctccctctttgccttacgctgtgatcgtagacttcttgatgcctttgcagaagcagatgccagcagtatccttcttgtatagtttgcag

SEQ ID NO: 766241 - DNA, 601 bp, Homo sapiens
cccccatgttggaggtggggggaagtgttttggtcatgagggtggatccctcatgaatgccttggtgccttccccacagtaataagtgagttctcactgtattagttcatgtgagagctggttgtttaagaacctgtctgtttttggccggccgcagtggctcacgcctgtaatcccagcactttgggaggccgaggcgggcagatcacgaggtcaggagatcaagaccatcctggctaacatggtgaaaccctgtctctactaaaaatacaaaaaactagccggccgtggtggcgggcacctgtagtcccagctacttgggaggctgaggcaggagaatggagtgaacccgggaggtggagcttgcagtgagccaagattgcaccactgcactccaacctgggcaacagagcgagastccgtctggcaaaaagaaaaaaaaaaaaaagaaagaaaaaaaaagaacctgtccattttttttttgctccctctcctgctgtgtaacatacctgctccctctttgccttacgctgtgatcgtagacttcttgatgcctttgcagaagcagatgccagcagtatccttcttgtatagtttgcag

SEQ ID NO: 766242 - DNA, 599 bp, Homo sapiens
agacaacataattttgaatgctacagttacatgttatagctttaaattatataaattttagcttttaaatcatatttgggttattttcacttatttgtaaatagtcaaactatatttattgattttaaaatgtggaaagtattttgtttaattatttctaacatataaataaayacaactgttcctgtgctttccaagtataacagaaagtgatatttttagtagtatagaaagaaatgttcttgaatgttaatattcaaaagtaccgttttattcatttaatcaatgaacaaataaaaatttaaattttcaagataaggagaatcattacctttagaaagaaatgattagctccttactttccatcccaatgaaagcaaaggaaactgagacaaacattctttaatttaaatcttatattaccccaatcataaattgtaattacaagtattatcatgacattttatataacctataaaactgtattatattattttataaaaatatttttaaaatgttcagtatataagagaaatgaacacaacttaaaatcatatgacatatttagacatatcacaagccaaatcatgtccttttta

SEQ ID NO: 766243 - DNA, 491 bp, Homo sapiens
ttaaaaaggtggtagggtagtgactgactttgtgcttgatattttgtctatcacatatgacttattttccatagataattcattttggcagtaaattttgtgttctaattatttttattcttgcaggctgctgaatcaggaataataaaagttaaaacaattgctgcacgaaacactgaaattttggcaggtaattttttgtattaaaaatttaataataamcaaaaatttgactaatagtaaaagtagaatctttattgtaaaagccatcagttttctgtaacatctcttcctcatgccctaacatatgctattcataatgaaacagaatgggcaaaagtccataacttatgaactgactgtatttcccagagacgaatgctacaaaaattctctgaaatcagaaagcttaacactactgactccttaaaggcaaggaattttttcttactcatcttcgcattctcctccacttcctgctaatcacctga

SEQ ID NO: 766244 - DNA, 667 bp, Homo sapiens
attcctgtcttataagcaaaaatacaaaaagcaaaaatctccattgttcatggataatgtacccaatggataaatggctaattcaggtgtgtttttaatacaatctagcaacctttataatcaattactttgttaatgaataaagacaactgtttttagagcaactgaagatataatgtgccacttcttgtcttaattttaaaaatgaatgagctgaccttttagtaaagagaaaatcttcaaaagtattggctagttctggccacatactgtyaaattttccagaagaagcatgctgccgggcaacaggtagcccaatagaaagaactctgaggagagaggatactgctagtttccatgtgctttcagaagggcaggaatacttcaaactgagaggaaccctaagagtctgaaaataaagacagtttaatataagcattaattaaaacatacacacacaattttaattaagaaaaactacagcagagaaaaaatagcataggtattttcatcttaaaaaggatggtattttcatttaaaaaggatgttatttcgcagaaaggccaattctcagacgtagtcctcaaatactgcctggaaagatatacttttaaatcctatctctatcttataaacaatgagcctacataaataacatttttgaacc

SEQ ID NO: 766245 - DNA, 537 bp, Homo sapiens; identical to SEQ ID NO: 753454

SEQ ID NO: 766246 - DNA, 621 bp, Homo sapiens
gtttgcaaatagcttctaccattctttgggttatctcttcactttattaattatttcccatgctgtgcaaaagctttttagcttgatgtactattatttgtctagttttgcttttgttgcttgtgcttttgatgtcttgcacaaaaaatrtttgcccagaccaatatcatggaggttttcccccaacgttttcttctagtagtttcatactttcaggtcttagatttaagtctttaatccattttgatttgatttttgcatatggtgagagttaggggtctactttcattcttctgcatatagttatccagtttacccagcaccgtttcttgaaaagactgtcctttctccattctatgttcttggtgcctttgtgaaaaatgagttggctgtaaatgcatcgatttatatctgggttctctactctgttccatttacctatgtgtctgcttttattccagtatcatactgatgtagctgctatagcttcatagcatattttgaagtcaagtagtttgatttctcagctttgttctttttgcttgggattgctttggctattcaaggtcttttgtggttccatgtaaattttagtgttgttatttctgtttttgtgaatat

SEQ ID NO: 766247 - DNA, 641 bp, Homo sapiens
ttaaatgttttcaaatgcttttttggcatctaaaaaaaaaaatcatgtggtttagtcattaattctattaattctggataacattgatatccagatgttaagccaaccttgcattcctgggataaatctcattgagtcatacagtatactccttcatatatgttactaacttcattttgctagtatttcactgagtatttttcccacaagaatgtgatccaggaaggaagggctgcatatgccccactcrccacattgtccccattccctctagcaatgccaggcacagagagtgctcagtgaacctcaacaagtgaatgaaaaagtcaatctataaaacacaggatctcatgggcctccaaagagttcacactaggaatagtgaccatcatattatcacaaatgtctaagtatgcataatccacataaactggagagtcaagggaggttataaaaaacccaaacttagaatgaagcccttgctgaatgagggggcattgggtggcttgctccactacagtcaagggtgtctcactttaggttccagaccaagaggcagaagcttatggggacgtggggccctctctccacatacaggtccccccagactaaggaaacatgccaaggtctcaggtggtgac

SEQ ID NO: 766248 - DNA, 611 bp, Homo sapiens
tggagcaagtggagtagcttctcagaggttctttgtccatcacatagtgataaggccaggtgcagtggcccatacctgtaatctcagtgctttgggaggccaaggtgagcagatcatttgagcccagaagtttgagaccagcctgcgcaacatggcaaaaccccatctctaacaacaacaacaacaaactcatagtgataagagggtttgttagggaaatatgttattcagtgaggagaggcagttaaaccactagcttagttctgtaaatgctgagtcatttccagattggagaatgatttaagcaaagatggtgaggaggttagaaagctcttaggaaacggttgtcaacggtaaactcaygtcccagtttgaaacatgaaacactgtgaaactatgagagggcagaaaaataagacttcggaaaaatggaggtgagggtctagaagcctcaatgaagtagtaaaacagggtctggaaggcggggctggtagcaaaagaaaagaaggtgtgtgattccagatgcggattcccaaggtcaaagtttcagttgccactcaagcaatctaacccttctaactgtcatcattttgtatcttgatattgtatat

SEQ ID NO: 766249 - DNA, 618 bp, Homo sapiens
tgaacaaactcacagctccacaccaatgcagtcttaaaaatgagactggccagtggctcacacctgtcatctcagcactttgcgaggccgaggtgggtggatcacctgaggttgggagttcgagaccagcctgaccaaaatggagaaaccccatctctactaaaaatacaaaattagctgggcatggtggtgcatgcctgtaatcccagctactcaggaggctgaggcaggagaatcgcttgagcccyggaagcggaggttgcggtgagccaagatcaagccattgcactccagcctgggcaacaagagtaaaactctgtctcaaaaaaaaaaaagagacaggcatcccacatcaatgcttccaaggtgtgtacccttttgatctggcaattctgcctagaaggtcatctgaggaagtggccaggagagcacaaacacacacatttacagatgctcatcacagtgtcactttgaggacttaaacagaaactctgtgagttataagatcattgaagagctgtgactttaacctctccaccttacttcctccctagattcctctaggaacagaaaaatacagattcctcaagaactattagaatacatacataaaactta

SEQ ID NO: 766250 - DNA, 618 bp, Homo sapiens
tgaacaaactcacagctccacaccaatgcagtcttaaaaatgagactggccagtggctcacacctgtcatctcagcactttgcgaggccgaggtgggtggatcacctgaggttgggagttcgagaccagcctgaccaaaatggagaaaccccatctctactaaaaatacaaaattagctgggcatggtggtgcatgcctgtaatcccagctactcaggaggctgaggcaggagaatcgcttgagccccggaagcggaggttgcggtgagccaagatcaagccattgcactccagcctgggcaacaagagtaaaactctgtctcaaaaaaaaaaaagagacaggcatcccacatcaatgcttccaaggtgtgtacccttttgatctggcaattctgcctagaaggtcatctgaggaagtggccaggagagcacaaacacacacatttacagatgctcatcacagtgtcactttgagracttaaacagaaactctgtgagttataagatcattgaagagctgtgactttaacctctccaccttacttcctccctagattcctctaggaacagaaaaatacagattcctcaagaactattagaatacatacataaaactta

SEQ ID NO: 766251 - DNA, 616 bp, Homo sapiens
agaaaactggaggcaaagataacacctcgaaaagcatccagaggtgtaaaaaagacagattaacttcaaaagagtatctgttaaactggcatataatttctcaacagcaatactggaaacaagaagacaatggaatgatatttccactatgctaaaagattactgacacctagaattttatactcatcaaatataccccacaagagagtaaaataaagacatttcaaactaacaaaacagcagtgttgccaccatcacccccatgtgaaaggaaattctgaaaggmtccccttacagtagaagaatgattgcaaaaagaggtctgagctgcaagaaggaaaaaagagcaaagaaagtaggaagtatgtgtataaagctaaatgaacactgacagtataaaacaacaatgataataatgtctttgtgcttttaaaatatatagaattaaaatatatgataaaaataacatatataccaggaaaacagtatcctaatttttttattgctcttgaggagggtaacgctaggttttaatatattaaggatacaggttttcatatcaaaagtaatgtataacttccaaatgagtagacgggaaaagtggaatttttaaaaa

SEQ ID NO: 766252 - DNA, 616 bp, Homo sapiens
agaaaactggaggcaaagataacacctcgaaaagcatccagaggtgtaaaaaagacagattaacttcaaaagagtatctgttaaactggcatataatttctcaacagcaatactggaaacaagaagacaatggaatgatatttccactatgctaaaagattactgacacctagaattttatactcatcaaatataccccacaagagagtaaaataaagacatttcaaactaacaaaacagcagtgttgccaccatcacccccatgtgaaaggaaattctgaaaggctcccctyacagtagaagaatgattgcaaaaagaggtctgagctgcaagaaggaaaaaagagcaaagaaagtaggaagtatgtgtataaagctaaatgaacactgacagtataaaacaacaatgataataatgtctttgtgcttttaaaatatatagaattaaaatatatgataaaaataacatatataccaggaaaacagtatcctaatttttttattgctcttgaggagggtaacgctaggttttaatatattaaggatacaggttttcatatcaaaagtaatgtataacttccaaatgagtagacgggaaaagtggaatttttaaaaa

SEQ ID NO: 766253 - DNA, 605 bp, Homo sapiens
tcttctgttctagaaattagcatgggatatgcttcaaaaacatgactggccacagaaacagcttcatggttcattccattctttattgcatggttagtttttcactttttttaagcctgtgtctgcagtttacaagtagtgtagtatgcttgcaaccaaatcattccaatgctccccattggtctcctcttctgaaaaaggaaggtaatactagaatctacctmaaaggatcagagaaagggtaaaatggaacaactcgtgcaaagggctagcgttgcacctggcacatagtaagtgcacaataaatgtaagcacattttgaaatgtattattagtctttgggctaagcacctgcaccgaatttgttacctcctctttgctgctatttcctcattgatgaaattcagaaaacggtgggacctaattaactgtgttattgtgaagattaaatgacacaatacagtgccagcacctagttattactcaacataaatttgtcacagttctcacaagacatcagaacacccgctgatgtgctgtcccccatggcactcagcatattaagtgtggtcggcacaagcggctgcctggtgtgaagtatgagg

SEQ ID NO: 766254 - DNA, 605 bp, Homo sapiens
tcttctgttctagaaattagcatgggatatgcttcaaaaacatgactggccacagaaacagcttcatggttcattccattctttattgcatggttagtttttcactttttttaagcctgtgtctgcagtttacaagtagtgtagtatgcttgcaaccaaatcattccaatgctccccattggtctcctcttctgaaaaaggaaggtaatactagaatctacctaaaaggatcagagaaagggtaaaatggaacaactcgtgcaaagggctagcgttgcacctggcacatagtaagtgcacaataaatgtaagcacattttgaaatgtattattagtctttgggctaagcacctgcaccgaatttgttacctcctctttgctgctatttcctcattgatgaaattcagaaaacggtgggacctaattaactgtgttattgtgaagattaaatgacacaatacagtgccarcacctagttattactcaacataaatttgtcacagttctcacaagacatcagaacacccgctgatgtgctgtcccccatggcactcagcatattaagtgtggtcggcacaagcggctgcctggtgtgaagtatgagg

SEQ ID NO: 766255 - DNA, 652 bp, Homo sapiens
tggacaatgtgcctgcagtgacgagtgcatcttcacatccctctttactctccaaagattttggacttactgttcaacattcagaatctcctggtatcttcttcattggaaaatgcaatgtaattagagcatttggagtgaattgtgattatcctatgttacaaacacgagaagtgtttcttatagatacagagactaacacaaataggtaagtagcagccgcaactatatgttttttaaaatccaactgctttgattcattccaaaaaattaatttttaaaatattgtattagagattcaagaacaagtttgaaaaaacaatactgtagcaacaaagttraggaataatgtgatattcaaagttagtgaggagaatttcattttttaattgatatataatatttgcacatatttatagggtacctgtgatatttttgttatatgcacagaatatgtattgatcaagtcagggtatttagaatgtccatcacctcaagcatttatcatttctatgtgttgggaacatttcaagtcctctcagctagctgttttgaaatatacaatacattattcttcactgtagttaccctagtctatccaaaattagaactttatctaactgcatgtttgtgcccattaaccaacctttct

SEQ ID NO: 766256 - DNA, 445 bp, Homo sapiens
actgagctctaagccaagaagagaaatgaaattctgtctatacaatatcaagacagccaattgattcaatttgtttaaacaactatttacagagtactttctatatgccagacattcatgtaggtgataaggatatagcagtaaataagagagttccttaagtctgcaaacttacagtctagtggtgactacaacccctaagattgtgtaaaaagcacagtggttagcagacaggtaggtagtaaaagtctgaaagtctgagttgaaattctaacaccatcatgtaatytcatgttacttaaattccaacttcctcaatttcttcatctgtaaaatagaaatgataattgtacttgactgacaggtctgttgtgaagattaagtgagaagatatatttaaatcacctagaatgacccctggtgtagagttaatactcaataactg

SEQ ID NO: 766257 - DNA, 490 bp, Homo sapiens
ttccttctttgcaaagcacagtcattttattttgttgctgctactcctactgcattaagcacagatatactaagagagccaaaaagtcaaaaaaaaacagcaagaactccaacgtactgacattcaatctttcttgactgaagaaacctagcaaaggatgattctatttcttttcccagtacatcagacaaatgtcactaaatgtacatatctgtggcatasgtcactgatttatcaatatctgtgttttcagatttaaaataatagtttgtggaagaaaaaaacatttggtaggggacatttcaaactatgagctcagacaatacttggttgaaaacataggccctatcattaggagagtaatacttttaggtctggaacagaggaaacctctcagttattctggaacagctggggacacaaaggaacttgaaactggacattcatttcaagctattaaatgatatgttgtactacagtagggcattta

SEQ ID NO: 766258 - DNA, 490 bp, Homo sapiens
ttccttctttgcaaagcacagtcattttattttgttgctgctactcctactgcattaagcacagatatactaagagagccaaaaagtcaaaaaaaaacagcaagaactccaacgtactgacattcaatctttcttgactgaagaaacctagcaaaggatgattctatttcttttcccagtacatcagacaaatgtcactaaatgtacatatctgtggcataggtcactgatttatcratatctgtgttttcagatttaaaataatagtttgtggaagaaaaaaacatttggtaggggacatttcaaactatgagctcagacaatacttggttgaaaacataggccctatcattaggagagtaatacttttaggtctggaacagaggaaacctctcagttattctggaacagctggggacacaaaggaacttgaaactggacattcatttcaagctattaaatgatatgttgtactacagtagggcattta

SEQ ID NO: 766259 - DNA, 615 bp, Homo sapiens
ccagaatggactcacccttatatgtttaaaagacttctgacaaaggcaaaaatcaattcaatggaagaaataaaagcattttcaacaaatagagctgaaataacggcatattcataggaaaaaaaacaatgaatcttggtcattatgttcaagattatcatttgtattattatataaaaataataatttaaaatagataataggcctgaacttttcagctaaaattataaagcttccacaagaaaacatagaagaatatttccacaacatcaaggcaaacaaatatttttttacaaagcattaatcatgaaattaaaaattggaaaattggtctttaccaaaacttaaaactactgttcatcaaaagatctcatttaagtaaatgaataaataagccacagactaggaaaaaatatgcacaatacttcatataatgaagtatatatatctagaacatattagagacycctacaattcaataagacccaaataatacaataaaaatgatcaaaagacttaaatagacacctcacaaatagggtataaaaatgacaataagaaagagaattttgttcagtaccattagatgttagggaaatgcaaaataagtcaaat

SEQ ID NO: 766260 - DNA, 558 bp, Homo sapiens; identical to SEQ ID NO: 750953

SEQ ID NO: 766261 - DNA, 377 bp, Homo sapiens
gccctcccactctatgattttagctcctgtccctccttcctcacagtgcaagaggttccgggatcagctgtccccgaagcaggtagagatcctgagggaaaagctctgtgccagtgaactgttcaagggcaagaaggcttcatatccccagaggtgagggcctcccagaccctgyacagccagttccatcacgcagcagttctcaaacttgagcgtgccttagaatcacctggcaggattgtcacccccaggtgctgtgtccctcctcagagtctctgatccagcaggtcttggggtgaggaccaaaatttgcctttctaacaactccccaggtggtgctgatgtcttggtcctggactgtgctctgtggacactga

SEQ ID NO: 766262 - DNA, 585 bp, Homo sapiens
tgtttgttgtttgtttgttttaaagagacagactcttgctgtgttgcccaggctggagtgcagtggctgttcacaggtgcgatcatagtgcagtacagcctcaaactcctgggttcaagtgattctcctgtgtaarcctcccaagtagctgggactacaggaccaagcctagctccaaacaggaagatttgactaaatttgacttagtctccttcccttaacccaaatgcatgttggtatttgatatagagtgtgtgtgtgtgtgtgtgtgtgtgtgtgtgtgtgtgtgtgtgtgtgtgtgtgttttgagtaatttcactttaaggttttcttttgtttttttttttacatcttactttcttactttgcattcttagagaaaggggtgttctaaacacacaaactgaaaggaggaatcaggactaatggcagttatcacatctcaaatgtagatactgctgtaaccacagtgttaccgtcagatacacacgttcagggattaagaacagaaactaagcaccttttggatgctggccacatgagcttcaagtgggtccttaacagctctctttgtgcttttacacc

SEQ ID NO: 766263 - DNA, 585 bp, Homo sapiens
tgtttgttgtttgtttgttttaaagagacagactcttgctgtgttgcccaggctggagtgcagtggctgttcacaggtgcgatcatagtgcagtacagcctcaaactcctgggttcaagtgattctcctgtgtaaacctcccaagtagctgggactacaggaccaagcctagctccaaacaggaagatttgactaaatttgacttagtctccttcccttaacccaaatgcatgttggtatttgatatagwgtgtgtgtgtgtgtgtgtgtgtgtgtgtgtgtgtgtgtgtgtgtgtgtgtgtgttttgagtaatttcactttaaggttttcttttgtttttttttttacatcttactttcttactttgcattcttagagaaaggggtgttctaaacacacaaactgaaaggaggaatcaggactaatggcagttatcacatctcaaatgtagatactgctgtaaccacagtgttaccgtcagatacacacgttcagggattaagaacagaaactaagcaccttttggatgctggccacatgagcttcaagtgggtccttaacagctctctttgtgcttttacacc

SEQ ID NO: 766264 - DNA, 615 bp, Homo sapiens
cggcttcccactgtgccagggacttgactggaagggcgggcctgctagcggacttggggctgctgaccacaccgttgctggtgggcctcttgaggatgcggacctgtggagggggtcccgggggaaaattatcatcctgaatcacaatgggcactttgggagatttgaatttcctgctttctgtgtgatcttcagttttttttccagacgtctatttcyccgctgtctgccgtctcctcccagctctcagcaacctcctcatattccatcttactcgccactttccagatcgcttgctttcttatttccacattttctctgacttttgcagtattcaatattattacctgattctgatttttcagacatcactatatggtccttggctttttggtcgttcctctcattcctttgctgtttcaagctctgttcccagcctaagctttttaccaccgaattctgttctgtgacccataacttaaaactaacccaacttttcattccctccagactttttttggtaagcagtatcatcatgctttaggtggacactgagtcatactgctgtggtagtgctggtacacgtagttttgaataccaggttcttgagtgaat

SEQ ID NO: 766265 - DNA, 611 bp, Homo sapiens
ctgatggctttccattacagatttttttttttttttttttttgagactgagtcttggtctgttgcccaggctggagtgcagtggcatgatctcggctcactgcaacctctgcttcctgggttcaagcaattctgccgcagcctcccgagtagctgggattacaggcacccacctccacacccggataatttttgtacttttagtagagatagggtttcaccatgttgtccaggctggtcttgaacttctgacctcctgatctgcctgtcttggcctcccaaagtgctgggattaaaggcrtgagccactgcgcctggcccacacctgggtaatttttgtatatttaatagagacggagtttcactgtgttggccaggctggtctcacactcctgacctcaggtgatctgcctgcctcggcctcccaaagtgctgggattacagacctgagccactgcacctggcttccattacagatttttactttgaattattttatctaatttgaagctaatatagcatataataaaaattcaggagaaaaaaggttatttttaaatcttttttgagagagtccattctttagcctgaaagtaaagtgcatatgtaagc

SEQ ID NO: 766266 - DNA, 601 bp, Homo sapiens
ttctgataattttacagttagttttgcattgcaacagagattctctctctctctctctttttttttttttttttttgagacaagagtctcgctctgtcacccaggctggagtgcaatggtgcgatcccagctcactgcaacctccgcttcctgagttcaagcgattctcctgcctcagcccccgagtagctgggattacaggggtgtgccacyatgcccagctaatttttgtatttatagtagagatggggtttcaccatgttgtccaggttggtctcgaactcctgaccttgtgatctgcctgcctcagcctcccaaagtgctgggattacaggcatgcaccaccgtgcccagcccagagattctctttaagaaatttggtgcaacagtcatttctgggacaaaaagtagtgagaaaatacaaacacaccagggtaaataaaccagagcgccacaaaatgtaatattaagtgtgtaaaaataataatccctgagagctatcagtgtgaaaagtttttatttgaatgccgtaattgaatggaattgttcatttaaaccttcaagtgaatttatttttatgtctaaaacttattagaaatgt

SEQ ID NO: 766267 - DNA, 601 bp, Homo sapiens
ttctgataattttacagttagttttgcattgcaacagagattctctctctctctctctttttttttttttttttttgagacaagagtctcgctctgtcacccaggctggagtgcaatggtgcgatcccagctcactgcaacctccgcttcctgagttcaagcgattctcctgcctcagcccccgagtagctgggattacaggggtgtgccaccatgcccagctaatttttgtatttatagtagagatggggtttcaccatgttgtccaggttggtctcgaactcctgaccttgtgatctgcctgcctcagcctcccaaagtgctgggattacaggcatgcaccaccgtgcccagcccagagattctctttaagaaatttggtgcaacagtcatttctgggacaaaaagtagtgagaaaatacaaacacaccagggtaaataaaccagagcrccacaaaatgtaatattaagtgtgtaaaaataataatccctgagagctatcagtgtgaaaagtttttatttgaatgccgtaattgaatggaattgttcatttaaaccttcaagtgaatttatttttatgtctaaaacttattagaaatgt

SEQ ID NO: 766268 - DNA, 641 bp, Homo sapiens
ttgctgcttcgagtattagaaatgcctctagagtttggtagttaaagccaaagcagatggataaacactagtagctgccgaaggtggtgcatgatgtcaatggagaacaggcaaggcaggtctttcgtaggggacagccgttgtttgacctggcagcgccctcacttcttcagggactggtgatcctttgataaattgctcctgcctcctctctaaacatatggtttgaatagaggctgtccatgctagctccccaccctcttgggctgggtgatgggtacagcattggacacaccatccaacagagccaatgaggtgccttccctgggatttttccaaccaaagcaggaaagaaagtctgttcctattttgatacatctctgaggaacacttcccaggcaataaatatctatgaaatgaatgaatgaatccccattgccaagtgaastctcagagggtatctctgttcatagtgagaatttatcatgcttttggataagtacgtgaataaattaggagagcatgcgtgtgttcataaacggggatgtaagagagtaagtgaataaataaacaagtgaatatatactctgcaattctgattgtttatatttctcatactgatagacatttgcattccaaag

SEQ ID NO: 766269 - DNA, 470 bp, Homo sapiens
cattgagcttcagaatagggaagttactctctgagctagactttggatatgtagctctaaacagatgtgttacctgaagacaaccatgaagcaagtcattaaaagtacacaggtataattgaaggaaaatacaggccactgcatgggcatataataggtgggaataattttagttgggaaggctcctctaaggcagtgacatgtcagaaaagattcaagggaaaaaattctcttgtcaggctaatgggacatgtggcagacagactttaggatggtctctgtgatccctgcctcctgatacctcatgttatcctgtctccttgaatgtgggtgggacctgtgacttactctaactaacagaataaggccaaggtgacatggtgtcacttctgtgatgccatttcataagactgcagcttttgtcttgcaagtagactstctctgttgccatcttggtttgcatgcttaga

SEQ ID NO: 766270 - DNA, 608 bp, Homo sapiens
acagtaccagctgacagtgccccttcctcagaaatcagggatccagccaatgggagcccttttctgaactcagaatcactagccaagtttcagtttcatggggcccctcctttaactttctaagttttagtaattctaatatcttccctttagtccctaatcctaggactggtagtagcgtgtttagttgctacctttgagataaccggtttcgacaaacaactgcacgccagcctcggcaacagaatgagactccatctgggggagaaaaagaagatagagacaggatgaattatgtattttatgggacttaatatgtttaaagtatcctcgtttcaacatgcaatcagattaaaataaaaaaccatgaatggcaaattttacattctctttttaagtcttcaaaacccagtgagcatttsaaaaccctgtaagtcttcgacacccagtgagtatttcatacacgcagtacatctgaatggggactcgacacacttcaggtgcttaatgtgtccagtagttgccatattggactgcacagcacagctctaaagcctgactacccaggttcacattccagctctgccactagtaactgtttaacttgg

SEQ ID NO: 766271 - DNA, 563 bp, Homo sapiens
tcaccaggcccccaaaggagtccctggtccttctctttctctttctctctctccttacctccctccttttctctcattcctcttctctcctccttccctttcatctctctcttgctctctctgaattattgtgttattcttgtgcagctgacattgctttctttacctgtgagagcatacctggacagttgtgggttccctctgtgtgtgtatatgtgcttggatggctctgtatatatctccatgcatatgtagtatcacatatatttgtaaacctggtagctggcatgttctttttggggccctgggagtttgtgtctatgtgcatgaagggwttcctctatgtatgtgtgtgtttcccctatgtatgtgtgtgtgtgtttacttagatgcttgtgtgtctactacacctgggtggctccaagcttttgagtgtgtacactaggatatttatccatatctgtgtgtctctgcatgtcctcttgatgtttgcttttctctgtgggtttatgcctagatatctgtgtgctcctgactgcctctaagggtgtgaccccttgtgc

SEQ ID NO: 766272 - DNA, 528 bp, Homo sapiens
tacatgatacttccttctaagttatttttgtgtctgccttggtagaatgtaagttccgtgaaggcagaggcttctgtctgtcttgtctctttgtccccagccccttgaatagaatgtggtacatactaggcattcagttaatatttgttcataaatgaatggtataattagaaacaattagataattgtttctataattaaacaatttatgtatttagacatttatatatttagatatataaacaacttatatgtggacaatttatataaataattacataaaggtataatttgaaacaayttatatgcccacaaaaaagataaatatttcttcagtatgataatattcaattttaaaaatcatgtttaaactagtttatcataagcgaaaaagctaagaacgtaatttcagtggaaaaagaacaaggtgcaaatatctttagttatatctatatctgtatctgtatctatatctaaatctgtatctatatttttctctgtagctctttatctatatttctatctata

SEQ ID NO: 766273 - DNA, 721 bp, Homo sapiens
catctcatatgcacagcatgggtcaattagcaaaagcttgaacctatggtccttcccttgacaactgtgaacgattttcaaaaatttagaaacatttaattgacaaattgagattgtatgtattcaaggtatacaacgtgattccatacacataattgtttaatgattatgataatcaaattagttaacatatccatcatgtcaaaattttagtgagggtttctctgttaagtattgggccaggcgcggtggmtcatgcctgtaatcccagcactttgggaggcccaggtgggtggatcacttgaggtcaggagttcaagaccagcctagacaacatggcaaaatgccatctctactaaaagtacaaaaattagttgggtgtggtggcaggtgcctgtaatcctagcttgttgggaggctgagacaggaggattgcttgaaccggggaggcagcggttgcggtgagccaatatcatgttccgctgcactccagcctggacaacacagcgagactctgtctcaaaaagaaaaaaaaattcccaggtacctgctgtgagagaatacctacatatgtggtatttctaatacttatgcacattttattaatattttcccaaggtaaaaaatgctctatcaaggaagattgtctgaatttatttcagctgggtgtggtggctcatgcctgtcatctcagcactttgggaggctgaagcaggagtat

SEQ ID NO: 766274 - DNA, 534 bp, Homo sapiens
tttatcttttacattgcatattaataatgaattagtcataatgataacttccaaagtatttattgcaataattaatgcatttaaactgtttggtatgatgcctggcacatactaatcactcagtaatgtttgcaatgatgatgaagagtatcagtattactgtcattctgcactgagccattcttctctctctacaaggtctcttakagtgaccttatcttcagcttttactgtcactgctgcctggatgaaaaacttaccttgactctgctcaggagctcccttgttttattttccatttccactatagattaccacttagatattacaccagaacatcaagctcaacacatccaaactagtctgtctcctaacttcccaatttccattcacaaaacaagcattctttccttttactcatctgaaatgttggggacacgtttgctgcccctttcgacttgccctcagcatgacagttgagcccagtgtctatatcaagcaggtgctcatttaatgtttgccttcttccctctc

SEQ ID NO: 766275 - DNA, 580 bp, Homo sapiens
gaggaacaagtataaaggaacattcccaatcaggaatatgagcaaggacttagaagataccacttccactctaagctaagaagtcctttgtgcctaaaaataaggaaaaattaaatcacaagtcactggctgagcagtgccaaaactacacctcacccacctacctgcccaaacgctagtggcagtgctttaaaacagtgcaacagamacaaaaaacaggacagcggttttagggtcagatttagctttaaatcctgctcctctacagactacctgtttaatcttagacaaattaatatctccatacctcactgtctatgtctaaaatgataacaaaactgacatcatagagttattacaaagatcttctgaaaatattatagagaacactatacatggcacattacaggcattgtaatgcttgactgtcattaggtctcattaaaccaataatataactccataactcagagcggtccagacttgcactacccaacagggtagtcaactagccaaatgtggctactgagcacttgaaatatggctagtctgaattgagatacaccatgaatgcaaaata

SEQ ID NO: 766276 - DNA, 601 bp, Homo sapiens
atgacaaatgtcactataccaccagttgacagagcaagtcagttcttccaaatgaaacatctagaacaactcttgaggaaacttgtttgtgggagctgaaggcaggcctaaataaacatatattttagtgcttattaggatgccttgtttccaagggctatttcagtatcaataatggtatgtgccactgggaggattcgcatctgaagccaagtccaggtaggaaacctcctactttttaaaaatgtttaacttttaattttttagatggagtcttgctctgttacmcaagctggggtgcaatggcatgatctcagctcactgcaacctccacctcctgggttcaagtgattctctcacctcagcctcctgagtagctggggttacaggagctaccatgcctggctaatttttgtatttttagtagagacagggtttcagcatgttagccaggctggtcttgaactcctgacctcagtgattagtccaccttggcctcccaaagtggtgggattacaggcatgagccactgtgccaggacaggacatctcctgctttagacaataaccagatggatcccaatagacatgtagaattactc

SEQ ID NO: 766277 - DNA, 656 bp, Homo sapiens
tgatacagtgttattagtagttgacttacatttccttagctttacctaatgtcttttttctattcctggatgctgtccaggatagcacattacatttggtagtcatgtgtctttaggttcctcttggctacgagtttctcagacttcccttttttgtttgatcactgacagttttgaggcatactgatcaggaattttgtagaatgtccttcagttgggtttttctgatatttttcttgtgactagactggggttatgggttttcaggagcaagatcacataggyaaagtaccattctcatcacatcatatcaagggcacatactatcacatgactcatcactgttgatgatcttgatcacctagttgaagtagtgtttgtcaggtttgttactttccccactttccacactgcacgctataaaaggaagtcactctgcacatcccacacttcaggagtggggagttacgcctcgcctctttgaggacagcgtctctaaacaaattatttggaattgttctcagcacaatcttccataaccaggtcctacctacattttgggcttcatccccagctgctccctccctctcccattccaggctcatcatactacaggtcagcacctgcagatcctgcatggtgccattctttctcat

SEQ ID NO: 766278 - DNA, 656 bp, Homo sapiens
tgatacagtgttattagtagttgacttacatttccttagctttacctaatgtcttttttctattcctggatgctgtccaggatagcacattacatttggtagtcatgtgtctttaggttcctcttggctacgagtttctcagacttcccttttttgtttgatcactgacagttttgaggcatactgatcaggaattttgtagaatgtccttcagttgggtttttctgatatttttcttgtgactagactggggttatgggttttcaggagcaagatcacataggtaaagtaccattctcatcacatcatatcaagggcacatactatcacatgactcatcactgttgatgatcttgaycacctagttgaagtagtgtttgtcaggtttgttactttccccactttccacactgcacgctataaaaggaagtcactctgcacatcccacacttcaggagtggggagttacgcctcgcctctttgaggacagcgtctctaaacaaattatttggaattgttctcagcacaatcttccataaccaggtcctacctacattttgggcttcatccccagctgctccctccctctcccattccaggctcatcatactacaggtcagcacctgcagatcctgcatggtgccattctttctcat

SEQ ID NO: 766279 - DNA, 616 bp, Homo sapiens
ttaaagaagctcagaacaaaagaatacacactatatgactctatttacataaaattttgaaatagaaaaaattaatccatagcaaaagaaggcagaatgtttgcctttggtgaagggtggagaaagagtgacagtaaagggatgtgagtgaactctttgggttgatgaaatttatcttaattggggtagtgtttatatacttttgaaaaataatcacctaacagtacacttcagtgtatgtatcttattatacaaaaatgacattctaataaagtttatttaaacggtaaacacccaaactccatagtatatgtgcctctgatcatgaaaccaattcyattttatatttcccccaggagcatataaccatgtcttttttttctacactggtaacaaccgctcagcctcccaaagtgctgggtttacaggcgtgagccaccatgcctggccaggttatttgatagatcacttaaatatttctcctaatataactaattgtagaaagaaaagttaaataggattcagaaggcctgagtactatcccatctactagctttgtgatgttgcagaagtaaattaaactctatttctcaatttcatcacctgtataaaataa

SEQ ID NO: 766280 - DNA, 649 bp, Homo sapiens
tgcttttggtggggcaaggcccattgattggagtgctcacatggacaaggggtaatgaatagcaagtttagcacagagataatgtacaatatcatctttctatttctggtgacagagttcagagaacaggaagtcaatttggcagcttcagcacagccttgcccacaataagcctcatgcagtaggacagttcctggataaaagcaggctaattctagggtccgaaaaagaaatctcaagaatcacctgataagaaagctgctctgacaaactactgaaataaattatgccctttgatgtatcatgccagctacactcagaagcagagatattttagttatgaaggaacagagtttgttgataaagattgtttaggttctcagagacatagcttgggtcctatggcacccaagaactgtgttrtctagattgtatgctacaccatgttgtggcagatatgtttagttttgagaggcatgttgctcatagatttcctactatcatgttctcattcttcaatcctgatgctgagattagcccagtttagttgatcagtttttcctttcctctatccccacttctttctttctctcttacttttccaataacctatactctctgtaataccttcttacagaaatactgcaca

SEQ ID NO: 766281 - DNA, 607 bp, Homo sapiens
gtttatttattttgtttacttttgtgtcctccagcacctagaggagagccaggtatatagtagattctcattacacatctcaagaatgaatgagtaaatgaattagtaaagtcacctctttacatcgctaaaactctttatgagcatctcaaaaaataattgattctttattccttgaagggccatagttcctagagggtttggaagcacccaattcccaagttccagatagcaagaatggtaaaatcttttcaaagatatgtcactattactgttaggttctggttacaattctacraactccctgtgggcagagttaatctgaagtgcctttgaaaaaaaaaatgccaattacctcttggtttctactctccccagtaccacgacatccccccatgattaattctcacttcattttccacaccatcaacttcagagccagcactgtcttcaaacaaattactaaaagcaacatgataacctggcagaattgtcttcacttcagtcatctttctctctttgaagttcaatcccctctgctcttatcagattattttagtagattgtatgtgatgttttattggttttgtggctctatttcagtatg

SEQ ID NO: 766282 - DNA, 611 bp, Homo sapiens
tactaaaagaagtgtgtctaatgtttgacattattatgactttactgtggatttatggatactctttatgagaaaaaaattcctctatttccgtaatttcctaagtttttttctttttgtttatttatatgtattggtgttgaattctatttaatgcttttaaagcaactattgagatgataatgtggattttctcctttaatctgtttatgtgatgaattgcattaacagagttttataactaaagccaactctgtattcccaagataaatccaacatagagatgacacatgttgattttcaaattaatttctagattcagtagcttatattttattgagtaattttgcattaatattcattagtgatattggcctataaaattcctttttagtgctgttcttrtatgttttagtatcaatgtcatattggccttgaaataattaggaagttctacctctttctattttcagtgtccaatataaccctactgatacccacagtttgactagagtttaaataggtttatttatgacaataggtcccctgacctcccttttcttagagcagttgctttagaaaatttgcaattagaaattctttccttatcc

SEQ ID NO: 766283 - DNA, 669 bp, Homo sapiens
ttattcattttataatttactccagttttttcttctttttctctttcagaaagtattattcttcatttcaaagttgaatcttcaggaaaagtcatcgaattttgatctctttattttcttttgctattgctcattcattgtatatttgttctattttttaatttactcaactccattgcctaaacagctattaaattatttctttaataaattttaattctcaagaactatttctttttctgtaatcgtccatttattttagcatcctgtttttttttcatgtrtatcttctctcatctctggtgatattaattgcagttctttttaaaagctttgtatcacattgattgtatttattttttaacttttcttgttttgccttttcttttatgctaatggtttcccaatatatcttaaattcttacctgcctttcatatctaagaatgagaccaaggcattgaaagtttgattggaaactgtgtgcctaattaggaattttgaccagagaaattcagtggagagttatcaggcagaagctctggcatttcatcaaggtacccaaagtgtcagaatctcaatatatctgaagcaatgtctctgaagtaattacatatttttaggttatcctgcaatattctgactgagtaggggacagatgataggcctgt

SEQ ID NO: 766284 - DNA, 667 bp, Homo sapiens
ttgctaaagagaggattattcatatttttttaaaaaggaaatggctcagttgtcatcctaaatactttattttccatccatgtttacaccatgatgttatgccattaactgctctagcaaacataaaaaattaggtagccatggattgtagttattcattcttcaataaaatgaattatttttcagatatgattgctataatgcttacttgtgaactctatctatgctaagtaaaacagaagaatcatgttttcaatgatggctgtagagtgatacagaataaaacatctcagtacaggagtaaaagacacagaatccagagttgaaagctggcacatggacaatgctattcactgcgagtcttaccaaaaacatcccataggttctggttctgtagtttactgacaaaaatgactatttcattcacttagagtgaggctccagagccaccgaaaaagtgtatgtcagttttgctaaggygtggccaagacacaaccagagaatcccttttaaataaagtatttccaacaaatttcatctctttgtgcaaattttctgccaaaaacactgggaagttatggcccttatccagagattgtaaagcattaaaacaaatgttccagggtccaacttctgcagcatttgcatcccaccaagtcacctctaa

SEQ ID NO: 766285 - DNA, 509 bp, Homo sapiens
ataaagtgtcaagttatgaatataatgagggagaaaggcaaaggaatatctagtcaaaatgtttttcagtccaaggaaactatatgtcatgagaccctgaaatgagatctgctttgtgagtttggctaacaacaaagaggccagtgggaaataaaactagtatttggttactactgcctctaataaatatgatgggaacttggtttgggcctttcttctgccttctcaaggctgctactctaattaaggtctcagaactccatctttgcaccatcacgggaatgttgtttttttttkttttgttttgtttttgcaggttgcctagtcttccagctcagttgcttctaagccatctattaaacaccattacctcaatctttcaaagtattgtttccttaaacggctctgttccaacgtttctacgcgtcctaatgctaactcctaacgcaggcttcatgaagatttttcattaacccagcccatgctgagggatctcttttctgaatttt

SEQ ID NO: 766286 - DNA, 625 bp, Homo sapiens
tcctggtggatcctaatgtattaattgcggcctccatatctgattgctggtaaacctggcattctaaggaaatagttcattactgcaatgctcttaagtcttcccatgtgccagacagataaccagcttcctttacctaaagactcacattagtattactggagccttgaaatatttgccaacatggktgcttgtcagataaacaaggcattgtaaacccttattcagacacttgccagaaaaagaccatattcaagatttctatgcatagaaaggctgtgaagatgaaagacaagaaaacaatttgtgcttattttagaaatcagaggacttcaaatacaaaaccccaattggcaatagattacattcttctcttcaacaggcagaatccttcactgagaaatgcagtgaatcaatgttatattctctttgaacttgtttaatcatgtataatattaaggagaagtcaaacctgatgtatgcattataaaatatagctcttcttctaccagtgaactgtcggtcaacttggcaggttcaactctgctttatttattactgagatactttatcatttaagcatgcaatatagggaggttcttactgggcaaaatgaaacatcaaa

SEQ ID NO: 766287 - DNA, 529 bp, Homo sapiens
atggattatctggtctggcatgatgctagaagggcagttctcattagaagtactaatttaacctgagaatgatgtctcttgttcgacaaccacataagtctctagatttgccctttctgagacttcgcatcatgtaaattacataaatctggtgtttgactggatgctggatgccctggtggagtggcagcacctgcagagatctgcatgtgtgtttttcttggttcagagctattttgaacatagrgtaccaaaagactgtctttagaaccctgagatttttgtatatttcaacttaaaatttaagaacatttatgaacataatattaatcaataatattcacatcttattgccgtttacataacacttttattaaacagttttagtagttataaaactgatttgcacttaattattttcgtagttataaaactgatttgcacttaattattttcagttgaagtgttttacaaatgatatggtcatgtttcacaattacatgtaagcagcatacagtggtgatctagc

SEQ ID NO: 766288 - DNA, 634 bp, Homo sapiens
agaatccttcactgagaaatgcagtgaatcaatgttatattctctttgaacttgtttaatcatgtataatattaaggagaagtcaaacctgatgtatgcattataaaatatagctcttcttctaccagtgaactgtcggtcaacttggcaggttcaactctgctttatttattactgagatactttatcatttaagcatgcaatatasggaggttcttactgggcaaaatgaaacatcaaaacacaggaggaagatgccatagatatccactggtattactatgaaggtaaagccatagtatgaataatacatattttactagtaccatatttaatttagaggcatcaatttttctctatttgttacaactgtttcctgtagataagttaggaatccctagtgagcttaaaaagaacaatatccattctttatctattatcttctctctgagatgactgatgtagaatgttggaacttgttatggatagaatgtttgtgtcccccacaaattgatatgtttaaatcctaacaacaatatgatgaaaggaaacttggagagctttcttattctctttttgccatgagaggatccagtgataagttggtagtctgtaacccagaacagagaaccca

SEQ ID NO: 766289 - DNA, 617 bp, Homo sapiens
acttgattttttgctatagcacctctccctcttggtgttatatatttctttgtttatttattatgtttccctttccccaattagcatgtaagctcaatgaacacagaaactttgtctattttgatgtcactcctttaatctcatccatgtagaacaatacctggtgattcagtaggcagtcaataaaaatttgttgaattagttaaatgcatgtaactgtgccctaagcaaaatgtttattacccccacttcatggatcagaaaactgagctccatggaggttaagytgcgcacaggccacaaaggaagtaggtagcagaaccagaatctaaacccagttctaaactgagccttttatctccaattatagagaaggttgaggttgcttatatccctggaagaaggaatacttgttcctggattatacactctggtatgaattaattatatcacattattctccaacccaagtatttttgaggggagaggaaagacagtatgaggaggaaagagatggtttgaggaggaaagaatgttagaagagattttgtgtgcctttctgttttgccaggaatcctctttccgaagacactgggggcttttcttcaatatgtttc

SEQ ID NO: 766290 - DNA, 525 bp, Homo sapiens
ttttgaatctgtcaagtgcttatgccagctgggcttctttgctttgatgaatttaattttcctttgggaagatcaaaacccaaatccaaatctaactctcattatttatatgttaagattacaaaagccattgatacttcatatatttgctaaaatgttgtatctaataattttgaatcaaagaataccctatttatccaaatcattggaaacaataaatctttgtttytagaccgccaacaaaatgcaggatgtccccctaaatcaaagaaggcagtttcgccaattactgactttcaagtatttggttaatatttcttacactagaaaggtttctctaatgcttagtttcatttttattttgctacatataaggccctttcctctatttctgttcaaaaaaccattttgtcaatgcccttcagttactggaaagttaggaaggtagaaatcctttttctgtactaagcaattttacagcatttaaaatggcttttattttccacctttatgcctttcttggat

SEQ ID NO: 766291 - DNA, 540 bp, Homo sapiens
atactaaaatccctgcccagagagaagcttagcccccattttctatacacgcagcatatatagaagcatcatcagggactgctcgggtgctgcctttactccacctcaacatacaatgactcagttaaccagcccaataaaagcttgttttcaccattgttcaggaaggttttgctttgggaactatcctcagcattcttcttattacaagtaataaaatctccttgytgaatcctcgattatggtaaatggactgtcatccaccaagcaatcaaacccacccattgtgtgggtaacaaacagccttcttttggaagaagaggccatctaggactttccgagctagagaggagaagtcagctcctggcttcaaagcttcaaaggacaggctgaccctcttgttaggggctaatgcagatggtgacatttaagttgaagccaatgctcacttactaatccaaaaatcctagggccttaaataattatgctaaatcaactttacctacgctatataaagctgcgatgacagcacacttgttt

SEQ ID NO: 766292 - DNA, 634 bp, Homo sapiens
aacgaaaaggtggaccattgcagcatctgtcattattgtttctcattttgccttcttcttcctgtcttctccccattgccatctcattttctctgcagccatgagcaggaactgtatgcaaagtacaaaagactgtattcctgaaacagaacttgttgaccccattttcttgactcttatttgacattgctttctaagagaagggttttggattacacactcacacacacacacatatgtacacattcatagtaataaatgtatttatcaactcagttgcaatgagattctgcttgttggaatatcatataataaatagctatattggtatttattgaacattggctttttatatgactgcaataagatttgatgctagtatttttaactgttgctccctctctgcctccatgcttagctgtttaacatgacattcattcatcaaaaataaatgtccaagtcaatggagtgtttctgtaacagatattagtcaccttaracttgttactcatagcccataaactcttatcattctttctcagataacccagttgaccctacattagtagaaattgagagctctgagttcatttttgttgttatttgatgaatatatcacttggctgactattag

SEQ ID NO: 766293 - DNA, 532 bp, Homo sapiens
gctaaaaatcaatgaaaacttcatactgaccttagggggtttaaacggatagtctggtgaaaaggtaatgtcaagaaagaacacccctccttcatagacagatcctgggggtcccaatatagttgacctccattcataaatgttgtctcctttgggtccagcactgaaataagacatacaaatgaaatgtgcttagaaattacataaaggctggaatttaacaaaatctatttatgataaccaattgagcaattccataaaaacacaaaaagttaatcagttaactctcatgttaagattcatattgccaatattgtcattatcctagaagtgaaatatgttggtatcacttmataaaagaacaccaagatcctcttttgccattcacaaccctacgcctatggaacaagagtccaagggactacaggccagaggtagaaacacaaatgtttaatgaaagcatgaaattatttgtgatgtcagagacaaaatttcaaagttagaaggacctctggggaatgactagtctgat

SEQ ID NO: 766294 - DNA, 592 bp, Homo sapiens
gcaggccatcggctgaggcttgactgtttatcacttgtttaaatatgaagattttgttttaattgtatttgttgttcataatggcttttcatccacaactgtacaactaaagggtctgacttgagaaacccaaaagcctattttgaaagcagcagagtttaaaactcttcttccagttccttccacatttgaacaggatagttctaagtcccagccaagcttgggccctggaacacagggtgcctgggaaaagctacccaacaccatcgaggtggccaccctgatcytattccattatcctaagccctttcgtttttgtttgtttgtttttagctcccctggaagtctaatggagtcagatatcacatctcctagaaaaggaatgacatttataacccccttctgctcctgcaaatggaggggttatcttgggattttgcccatcagcggctctccagaatctcaggcggcttcttagcctggtgcactcggagtcagctccaagcctggaggtttagcatccaggtagcctcagacctgatcataaggcccacagttgagagttagcaggacagccctaagtatcctcttc

SEQ ID NO: 766295 - DNA, 592 bp, Homo sapiens
gcaggccatcggctgaggcttgactgtttatcacttgtttaaatatgaagattttgttttaattgtatttgttgttcataatggcttttcatccacaactgtacaactaaagggtctgacttgagaaacccaaaagcctattttgaaagcagcagagtttaaaactcttcttccagttccttccacatttgaacaggatagttctaagtcccagccaagcttgggccctggaacacagggtgcctgggaaaagctacccaacaccatcgaggtggccaccctgatcttattccattatcytaagccctttcgtttttgtttgtttgtttttagctcccctggaagtctaatggagtcagatatcacatctcctagaaaaggaatgacatttataacccccttctgctcctgcaaatggaggggttatcttgggattttgcccatcagcggctctccagaatctcaggcggcttcttagcctggtgcactcggagtcagctccaagcctggaggtttagcatccaggtagcctcagacctgatcataaggcccacagttgagagttagcaggacagccctaagtatcctcttc

SEQ ID NO: 766296 - DNA, 579 bp, Homo sapiens
ctggtttatttactgaccacttgctttgacgctcgtgagaaggctgttctgttgaagtcgtaatgctttgcacccagtaggagctcaacaaatgcctaatgagctgaactcaattgagaaggtcaaggggctaagcaaacatgggggtgctgcatcattgccatttagagagtaacgagttatctgaaccagcgacaggaatagtgaatggtgagtgttgaaggggcagaaataaagaaccaagggatccgttacagaaggctcagaccttgagctgcagctttgagagggaatgcctggagccgaaatgagcgatacatacctaaycacggccagcaggtggcgctctaaagatgtctcgttgctatccagactcccagccaagatcttgctggagcaccgggaagtggaaactgagtgaggcatggggaacctctcagccctaactttttgcgctgtgcttcctccggaagtgcagttcccaagatcaggagccctgtaggtatttttgctttgttttcctatgcttgtttggcttgtgggtgtctctgtagagcaccatccattcaattcagtttc

SEQ ID NO: 766297 - DNA, 579 bp, Homo sapiens
ctggtttatttactgaccacttgctttgacgctcgtgagaaggctgttctgttgaagtcgtaatgctttgcacccagtaggagctcaacaaatgcctaatgagctgaactcaattgagaaggtcaaggggctaagcaaacatgggggtgctgcatcattgccatttagagagtaacgagttatctgaaccagcgacaggaatagtgaatggtgagtgttgaaggggcagaaataaagaaccaagggatccgttacagaaggctcagaccttgagctgcagctttgagagggaatgcctggagccgaaatgagcgatacatacctaatcacggccagcaggtggcgctctaaagatgtctcgttgctatccagactcccagccaagatcttgctggagcaccgggaagtggaaactgagtgaggcatrgggaacctctcagccctaactttttgcgctgtgcttcctccggaagtgcagttcccaagatcaggagccctgtaggtatttttgctttgttttcctatgcttgtttggcttgtgggtgtctctgtagagcaccatccattcaattcagtttc

SEQ ID NO: 766298 - DNA, 490 bp, Homo sapiens
ctccactcctggcttttttaggagctccaccttctcctgtaccctacttccccctcactacttcagtcccatgtttcttgatgatttctcttctgcttttcctgtacctcatggcactcgcctgggatcccaaatcaattcatctgcaacccttctagaataaggcacaatacaaatgctgacactggccctctgcttttctcaagycatattcccaacccaggtgatctcagctatgactctaactagatatacctgaccacccagagccagctgccaaacacctgtgttctactctccactcagatgtcacaaaggtgcctctgccttctacaaatgtttgttcaatcctagcatgtctgctttgactcagtgttgcatccctgctccctgcatgatgtctggcaccaacatacttcatatatacatgtcagtggataaattatgtaaacattaaatatctttgtaattaaaaagagtgagaaatgca

SEQ ID NO: 766299 - DNA, 625 bp, Homo sapiens
cctcagtgtgccatgttgataaagtctgcagtcatgtacagcaatgtcctaggccttcacattcactcagcgctcactcactgactcacccagagcagcttccagtcctgcaagctccgttcatggtgagtgcccaatagaggtgtgccattttaaatcttttctatcatttttaccgtaccttttctatcatatttttactggactyttgtgtggatatgtttagatacacaagtacttattagcactgtgttccaactgcctacagtattcaggacagtaacatgctgtacaagtgtgtggcctagatgcaatcagcccagcgtctggtctaggtgtatagcaggctctaccatctagtttgtgtccatacactctatgatgtttgtacgaggataaaataacttcacaatgcatttcccagaatgtgtcctcatcgttaaacaacacacgactgtactccaaaagggcagaaaggcttacacgtcttggtgcccaccccgggagcttggcccagctgcctggtattcagagtcccacagtcaatggtggatgaattaatgcttgcacagatggagacaagtcatcattgagtgaccattatgcacaaactgcacatgttaca

SEQ ID NO: 766300 - DNA, 606 bp, Homo sapiens
ggaatggaatggaatgaatggaatggaatggaacggatactaatggaatggaatggaaaggaaacaacccgagtggaatggaatgcaatggaatgcaatggaatggaatggaatggaatggaatggaatggaatggaatggaatggaattcaatgtaatggaaacaaaccgagtggaatgtaatggaatggaaaggactggaatgtaatggaatggattggaatcaacccgattccaatgcaatggaatggaatggactggaattgaatggaagggaatggaatggaatggaaaggaatggaatgaactggaatggaatgggatggaagttaawggaatggaatggaatggaatggaatggaatcaacccgagtggagtggaatggaatggaatggaaatgaatggaatggaatggaatggaaaagaatggaatggaatggaatggaacggaacggaatggaaagaacccgagtggaatggaatggaatggaatggaatggaatggaacggaatggaatctacccaattggaatggaatggaatggaatggaacggaatggaatgtacccaattggaatggaatggaatggaatggaatggaatgg

SEQ ID NO: 766301 - DNA, 606 bp, Homo sapiens
ggaatggaatggaatgaatggaatggaatggaacggatactaatggaatggaatggaaaggaaacaacccgagtggaatggaatgcaatggaatgcaatggaatggaatggaatggaatggaatggaatggaatggaatggaatggaattcaatgtaatggaaacaaaccgagtggaatgtaatggaatggaaaggactggaatgtaatggaatggattggaatcaacccgattccaatgcaatggaatggaatggactggaattgaatggaagggaatggaatggaatggaaaggaatggaatgaactggaatggaatgggatggaagttaaargaatggaatggaatggaatggaatggaatcaacccgagtggagtggaatggaatggaatggaaatgaatggaatggaatggaatggaaaagaatggaatggaatggaatggaacggaacggaatggaaagaacccgagtggaatggaatggaatggaatggaatggaatggaacggaatggaatctacccaattggaatggaatggaatggaatggaacggaatggaatgtacccaattggaatggaatggaatggaatggaatggaatgg

SEQ ID NO: 766302 - DNA, 510 bp, Homo sapiens
tatcgaatgcaatcgaatagaatcatcgagtggactcgaatggaatcatcgagtggaatggaatggaatagtcaatgaactcgaatggaatcatcattgaatggaatagaatggaatcatcgagtggaatcgaatggaatcacaatcaaatggcatcgaatgtaatcatcatcaaatggaatcaaaaataaccatcatcaattggtattgaatggaattgtcatcaaatggaattcaaaggaatcatcatcaaatggaaccgaatggaatcctcattgaatggaaatgaaaggagtcatcatctaatggaatcgcatggaatcatcatcaaatggaatcgaatggaatcatcatyaaatggaatcatcatcaaatcaaatctaatggtatcattgaacggaattgaatggaaccgtcatctaatgaattgaatgcaatcatcgaatggtcccgaatggaatcatctacaaatggaaaggaatggaatcatcgcatagaatcgaatggaat

SEQ ID NO: 766303 - DNA, 438 bp, Homo sapiens
tgaaacgaatggaattatcatgaaattgaaatggatggactcatcatcgaatggattcgaaatgtaatcatcgaatgaaattgattgaaatcatcatcaaattgaatcgaatggaatcattgaatggaatcgaatggaatcatcatcagatggaaacgaatggaatcatcatagaatggaatcgaatggattcattgaatggaatcagatggaatcatcaagaggacttgaatgcaatcaytgaatggactcgaatgaaatcattattgaatggaattgaatggaatcatcgaatggtctcgaaaggaatccttatcaaatggaatcgaatggaatcaccgaatagaatcgaatggaacaatcatcgaatggactcaaatggaattatcctcaaatggaatcgaatggaattatcgaatgcaatcgaatggaattatc

SEQ ID NO: 766304 - DNA, 591 bp, Homo sapiens
agatttggtctgtaggccctaatttgccatctcctcacaggatgcatatagtcctgcatgatccaggctctgttcttctctattctcattctcaccactcactttacacggcagcaaagctgcatggcttatggggtcatactccatgctgtttcctgcctcccagccttccttatgctgcttcctctgcctggtgtgcttcctctttccccaactcccctgctagactaactcgcacccgtttgttgttactcagctcaggaaccttttccttttggaagaattcccactstctcctgggtaacctggaggctccctcctgagctcccacaattccttgcacctattcctatcatcctcacatggtagtgcaactacctgtttcaatgtctgcatcaagtaccaaactgtgattccttgatgagcagaactggatcttagtcatcctatatcctcaggggttagcacagggattggcccaaagcacacacccagtaaatgcctattggcacttgattatggctcaatctattctttagtagaggaagagtattgtgtcataaataagttctttgaaatacctgtacagca

SEQ ID NO: 766305 - DNA, 612 bp, Homo sapiens
gtgcttattgtgtcctgggcacccttctaagtactttacaaataattactttcattctcaaagcaaccctatgaactaaggattattattttcccagtcttaaagatggacaactgaaatgcagagaggttaagatacttgcytgagttgaagtagtagtggaattaggagacaaattttggcagctgtctccagagccactgattgacaaccactacttgacactgacactcaatcacctacctatttagacttttagaataccctgattggtcctttttcccatgataacaggaattggcaaagcacaggctcatgggccaacatctataccctgcttggtttgtaataaaaagtaaaccggaatacagccacacccattaatttatgtattgtctgcagccattcttgccctacaaagacagaattgaggaggtgcaatacaggccatagggcccacaaagcctattttattgagtgctgtagctttgataagggttgtttgtccccaccaaatcttatattgaaatttaatccctgatgttggaggtgggtcctgatggatagtgtttgtgtcatggggatggatccctcatgaatagattaaggcct

SEQ ID NO: 766306 - DNA, 640 bp, Homo sapiens
agtgaaaatttgttttctacatgctgtggattttaatccaacatagctgttaaactcttggggtggcctcctgggtgaaatctactcacacattttctttattatatgaaaggatcctgtggggaaggcagctggtgggtaaacaccaggcttaagccttagtcagtgtgaatcctggataatgtttacaaatagaakggtctctgcagcaaccaactaacagtagataagagagctgcctcatttacagctgcgtttaatctttccaacgcctgaaaaatattcgctgaatgctggtgaataggatggcttatggtgccctcaccttcacccctggacacgcttcctccactgacctttctggtcacaagcaacaaaggtggttaaaaatactccattctttgtacaaagaccatccactgcaaccccaaggcccttaatgttattatccgtggtgctgatggattggccctgatcttcaccccacttcctcttcagaacaacacgcatttatgttgagaagactggcggggactcataagtgttggaattctcttacatgtcaattaggggaggcattttacacaggatatccaatttcaacataacaaccacccacaaagtaggtgctgttatgccc

SEQ ID NO: 766307 - DNA, 640 bp, Homo sapiens
agtgaaaatttgttttctacatgctgtggattttaatccaacatagctgttaaactcttggggtggcctcctgggtgaaatctactcacacattttctttattatatgaaaggatcctgtggggaaggcagctggtgggtaaacaccaggcttaagccttagtcagtgtgaatcctggataatgtttacaaatagaatggtctctgcagcaaccaactaacagtagataagagagctgcctcatttacagctgcgtttaatctttccaamgcctgaaaaatattcgctgaatgctggtgaataggatggcttatggtgccctcaccttcacccctggacacgcttcctccactgacctttctggtcacaagcaacaaaggtggttaaaaatactccattctttgtacaaagaccatccactgcaaccccaaggcccttaatgttattatccgtggtgctgatggattggccctgatcttcaccccacttcctcttcagaacaacacgcatttatgttgagaagactggcggggactcataagtgttggaattctcttacatgtcaattaggggaggcattttacacaggatatccaatttcaacataacaaccacccacaaagtaggtgctgttatgccc

SEQ ID NO: 766308 - DNA, 578 bp, Homo sapiens
ttggggctcgcctggccaacatagtgagacctcatttctgtttaaaaaaccaaaaaattagttgacctggtgatgtgcacctgtggtcccagatacctgggaggctgaggcaggtggatcactggagcccaggaggttgaggctgtagtgagccatgattgtattactgcactcyaatctgggtgacagagcaagaccctgtctcaatttttttaaaatctagtttaaatcatactctctatgatttcaaatcttgtgccatcatgaaaactttttttatggcttaccatatgatgtatcatggagaatgctccatgtattcttgaaaatagtatgtattctgctggaagaagcattctatagattttagttaggtcaaatgtttgataatattgttcaattcttgtatatcctgtctaattcctaactcttttaggatttctgtatgcacgatatatcttttccatcattttgctttcaacctatttgtgtcttcaaagcgtatttcttacagtcagcatataattaaatctttttttaaaaaaatcttgcattacagtctctcccttttgattaca

SEQ ID NO: 766309 - DNA, 584 bp, Homo sapiens
tgttcccttggcaagacagaatgaagaaaagtcttgttcatgagggcagtttccaagtcaacatcacaaaggtaacttacatcagacatatttttccacactggaaagagtccagaagacattcaggacatggaaatttcatatgacacggaagtcctactgtctacaattttcaatgagatgtaaaaagctgatgaaatgatggatttgaattttttttcaaacccataattcacagtagataattttaaagtgaaggaaaacattttgtgatcaatcyttgaatatctctgactcatcctcataactccatgattacaaaactgtagcctacaaatctaggctttgtacttgtcacctatggcttaataaatactaccaggtactgctagatcttgtctgacaaacctccaaggaaatcagaattgctttaggatgagaaatcagcaggtggcactctttcctctacatccatttttaaccactgttttagggcagaatattagaggttacatcctaagaggttgatacctaaggtcttgggtgaacaggggtaaatcagtgttgaagacaagagacatcac

SEQ ID NO: 766310 - DNA, 580 bp, Homo sapiens
cttgtcctccagttcttacctaatcactctgtgccctcctactcctcaaagatgagggaaaattgcaggagagaggcacatggagctggattccagaatatggaacagagtaaaggttgtggatacaaatacctccaaatgaaataatcactagggccgggtgtggtggctcatgccattaatcccagcactttgggaggccaaggtgggtggatcacgaggtcaagacatcgagaacatcctgactaacatggtgaaaccctgtctctactaaaaatacgaaaattagccaggcgtggtggtgcacacctgtagtcccagctactcaggagtctgaggcaaragaatcgcttgaacccgggaggcagaggttgcagtgagctgagatcacatcactacactccagcctggcgacagagcgagactccatctcaaaaaaaaaaaaaaaaaaaaagaaaagaaaaaagaaaaagaaaaagaaataatcactaaatgagttcaacgctaaagtctatacttttagttgctcatttcttacaatgaccaatgtcaaccaggaacttcttcactttgtgcccag

SEQ ID NO: 766311 - DNA, 564 bp, Homo sapiens
caatggctttgactgctactgaaatgctcgtggtcaccaaatttttatcttccgtccataaactcatctattacaacttttcactcaccattttcacttgaagctaccacaaacagcttaatttcacattttcaaattaatgatattttcctcagtccaaccaaaatctattcttctgtagtctacatccttgtaagactcttcattacaaaagtatttatttagcaccttctgacagccagtcattatttttttggcattgagaatgtaacagtgcagtaaatagagaaaatccaggttgcaaggagcatacattttagtaaaggagaaaaacaaatcatatacatattgtacaatgagtttytaacaactgtattgagatataactgataatgaactgcacatattcgaagtatacaatttggtaagtattgacatatgtatggatccaaaaaatagtcaccattatcaaaatagtgaacatacccttcacccctaaaagttttctcatgtccctatctgttttctgtcactatagattagtttgcattttctagaatttta

SEQ ID NO: 766312 - DNA, 604 bp, Homo sapiens
tatacataaggcaaaaaagatgcagaagggctggacttcaaggaccctaaaagtgccctgaaatagtctaatgtggaataccttgtcctgtcacccagagttggagcctcaaatacaggaacttatttttatatagtccaaggagttagcatagcccccagaaacttagcaggaatttgggaaaaaaaaaaaaagttgaaaattaagctcagcaattcaraaatatctcagggactaggttgcttgcataatcagaaaataatattttgcattgtcaaatgaaactccagacttagggccttaaaaaaaaatagacaaagttttcctggagaagtaaactaactgtagaaatgttttttagcactttaagtgacaatgatttgtgaggtgttttgaattttatggttttaaatcagcatggaaacttaatagagcacgctttctatttagaagctctacctcagaaataggtatgcatctttttctccacacctcaagttcatggttttacaccatgtacatcaaactaaagtttcaccatcatgctggcccagtattgtaaaagaaatagcttttcttaatctaaaattagagtgtaataact

SEQ ID NO: 766313 - DNA, 556 bp, Homo sapiens
gctgccagtggcttcttgcctccaattcacagtaaccttgatgaatcattgatctcaatcactcctgggtggactcctcatgcctcgcctttctgaactgtagttgtaaccgtcctcaaagggttaacaagaattacatgctgggctctgggcagaaatatagtcataattaagcattaaacaggctacattttggcccacatccttgtaaccaaaagtcatgttgctgtagatgctgaatgtttgcatacccattgtttttatagatagaatttctgacattggaatcataagactyttgtttaagaattgcttaaaatgttctttagactgtatgaagtcatcggctcttctctaagcaaatgtataggccataaaataaatcaaatcagtatgctttacaacttgtcaaaaatgcactattttgctaaacgtatgactctgcaattttataatatgctaaagtatctggttagatatttatatattaaaatctaaaagtgatctttgctagcaattttacatttttgttcagaaaacccacatgcattttttt

SEQ ID NO: 766314 - DNA, 561 bp, Homo sapiens
gattacttggatatggcaccaaaagcccaagcaacaaaagcaaacggacaaatgggactacatgaaacttaaaaacatcgaaagaaacaatcaacagagtgaaaagtcaacctgcagaatgggagaaaatatttacaaatcacatatctgataaaggctatctttgtcagcttgggttgccataacaaataccatgaactaggtagtttaaacaacagaaatttatttctcacagttctggggactgagaaatctaagactgaggtgctggcccattccatttctggaaagggtcttcctagtttgctatatcctcacatgggaaagacaccatctctctcttctttttttttataaagacaataatctcattcatgaagkctccatcttcatgacctattgacctcccacaggccccacatccaaatactgtcacattaggaattagggcttcaccatatgaattttgggaaggcaaaattaatcagttcacagttcacagcaaaaggttaatatccagaatatatcaactcctacaactcaacaatgaaacccccccca

SEQ ID NO: 766315 - DNA, 561 bp, Homo sapiens
ccaatgccacccctcccacccccagcagtggcagcttggtgcagaaagtgtctctggatgctgagggagggagaacacagtaattgtgaggcatcaaactcagtgctgtcttgttagagcagaaaggaaaaccagaccaaactcagctgacatccatccatggagggagcacttaaaccagcccaaaacagtgsgaaatcactgatcctagcaatccaaactggagttctcgcaaacctggccactacaggctaaactgctctgggtctctaagttaacctgaaaggtagtctaggccataaggactgcaactcttaggtgagtcctagtgctaaactgggctcagagacagtatactggtttgtgtgtgttggttgggggtgggggtgggtaagggaatacaacctattaagacacgcgctggaataactaaaggagtactggcaccacccctcacctaaccccaggctgcacaactatagtcttcaaacaagaccccttccttccacttgaggagaggagacagaagagtggggaggactttatcttgcatcttggata

SEQ ID NO: 766316 - DNA, 758 bp, Homo sapiens
tggatccttgaactcctgtgctctagcaatcctcctgccttagcctccctattagctgggactacaggcatgcaccaccacacccagctaattaatttttttttttttaagagacggggtctcgctatattgaccaggctggtctcaaatttctgggttcaagtgatcctcccgccccagcctcccaagtagctgggattacaggcgtgtgccaccacgtccagctatctgcctttttaaatagagaaagtgaatatcgtgttaaatcattcttaaagacttaactaagattacttatcacactttgtcacaatatatttaaaatacttcattaaattctgaggtgagatagtaaaacatttgcgctaacactaaatagcctttttagtttttagtcttcctatctccagccttttcagatgtcccttcatgtcagaatgtcttcctctactaatccttctctgtgctatatttgatcgctagtaataaagcctgataaataagtaacgcgttyatttcatcaggctctattcaaggcttggagattgattctatacctttcccacattgaaaagtacaagtggaagtgggagcttctgactgacagcttttgagcttacctctgggttcgtaactatagtctttagttaaagctaccaggaatttggctaccagataagtgagacataaaaccaagtatcattactaaagcaatctagtaatatagaatatcactgtgtttaaataacttatcctac

SEQ ID NO: 766317 - DNA, 606 bp, Homo sapiens
tttcttttattaattacccagaagatttctatcataagcaacaggaaatgaactaagatactattagtatgttagcgttatctagctttatcaataaaaaagttctatatgttagaattgctgtcatttcaacatatatctttacaagtatctgaaataagygagggagatgggttgctagagagtatcttgctgtttctgctcctttgtgggggcaagaaactggattctttgccttacaatgtattagtaaataaaggtaagggatagcaggtctgatgctgctatctttagaagggtctgcttatgaggctggcccttggctggtgtctgagaacttgacttttggcatgttacattgctctgcctgcctgggacacaaccctgcggggccagcttgcgtaaactgcaaaaataacatgatttgtggtgaacacctactttccttctgggtctggaattcaggtgactgtggttaggcacacaggcagaggtgcctacatgaccagaccccagtaaacaccctggattttgagttataagcaggcttcaccagggcagaaaaactacagaagtattactgtattttattgggaagggaggtgc

SEQ ID NO: 766318 - DNA, 638 bp, Homo sapiens
caggaaccatatgtccttatgggatcctattcctacataccaaatcttagatactgtggtagaagctactgtttacctcccagtattcattccctccttcttccttgtaaaaggacacccagtttttttgctgggctaactacaataaagatcacatttccagactactttacaattagatatagccatatgatgaatttytggccagtaggatataaacagaagtaatgcatgcaatttctgaaaaaaaaaaaaaaaaaaaaaaaaaaaagtgttcttaaaaagacgggatgtgacctttctcccttccttctacctgctggctgaaattagaatataatgactggagtacaagtagccattctggaccatgaggaggaactgacagcttaaggataacagcaacaatgtaaaaggagcctagttcctgttgatcttgggtgtctttacaaaccctggtctactcccctttggaattcatttatataaaaaagaaatacatttgtatattatttaagccattgctatttgaaaatttttgtcaatgccagctaaacctactactgtactaataaatacagactattttcatgataatacaataacacataatgtactttaaaacaactcctatagat

SEQ ID NO: 766319 - DNA, 641 bp, Homo sapiens
tattgttctaagtcagacccacttggtaattagatttggaatctaaaatagtgatcatgcctacattgtttagaattgtatcataccttcttacattagaggtaccaaccttagtattaatattttcctcagagcaagtcagacctaaagccattacatggggtagatcagagctagaaaatatattgagcctgctttgtgaggaaacaattggctgccttcttgctctgtctcctcacaatgaggctggcttatccaaggagggaaaatacactgtatcttgcttgcctagagtgttgtgttgcaaagaattctgaaacaacttttgagtcatttattccatttattcaacaattatttattgagtgcctacratgtgatattcaaggtactattctaggtcctgggaatatagcaacacacacaagagcaaaatcagttaaccaatcaatcaatacttgccccccaaagagctgacactggaaagaatggtgtgatggattatagatgtcttccataaacatgggagggaggaattgaggcatcttaccatgtatttgccatccttccagattaaatctagtcatagcatcagattttcaggcagttccacaattgtgtgtatcttatctttggagctc

SEQ ID NO: 766320 - DNA, 641 bp, Homo sapiens
tattgttctaagtcagacccacttggtaattagatttggaatctaaaatagtgatcatgcctacattgtttagaattgtatcataccttcttacattagaggtaccaaccttagtattaatattttcctcagagcaagtcagacctaaagccattacatggggtagatcagagctagaaaatatattgagcctgctttgtgaggaaacaattggctgccttcttgctctgtctcctcacaatgaggctggcttatccaaggagggaaaatacactgtatcttgcttgcctagagtgttgtgttgcaaagaattctgaaacaacttttgagtcatttattccatttattcaacaattatttattgagtgcctacaatgtgatattcaaggtactattctaggtcctgggaatatagcaacacacacaagagcaaaatcagttaaccaatcaatcaatacttgccccccaaagagctgacaytggaaagaatggtgtgatggattatagatgtcttccataaacatgggagggaggaattgaggcatcttaccatgtatttgccatccttccagattaaatctagtcatagcatcagattttcaggcagttccacaattgtgtgtatcttatctttggagctc

SEQ ID NO: 766321 - DNA, 590 bp, Homo sapiens
ctctgttgagctagtgtcaaaaagttgattgtccactaattacattagataatcagatccagaagcagctaccagtgatatgagttcttgtgtcaacattgaactctgagctttcagtggacttgacagagatgagtgtccaagtgccgtgggaagagcctgtactaagcaggtgtcagcatgtaggcttccaaatgccctctattcctggatgactgggagacctgatttgggctctgccagctgctctcctactttatgtggctcctcctcagtgctcactttctactgctttaattactatgattgttctcctccccagttacacccaattagcactttatttcttttctcacctcctaycctatgcaccacttcatgtgttcaattgagtctatcagttatcctgtgacctggccagtgcgctccctatgtaatagtgaagagactaagactagtttttaattatatagatatgcagtggccgagttgagctttgagctccaatgtcagtgcccattttatggtttctggagggtgcagacccttcctacatatcattgtcacctgtcatgctcagggcatgtggt

SEQ ID NO: 766322 - DNA, 586 bp, Homo sapiens
ttctacagcagggcaactggagtcttagatccactgactgtcctctggctccccatttctctcttctgtgatatggctggtctactctttgcctgcacgggtgacccgtgacctgcaacaagtcattattgcaatttgagaaggtgagctgccacctactcttggatctgaagtcccagccacaggtcccctcttttgtagtctcttttgtagcagcctcttattccatccccaaaccattgccaattcacatcccttcactgaagggcatggaaacttccagacccyctgcttgttacacatggactgagtgatttcgccaaaataatctgtgtgcttaatagggtaaccccatactgctgcaaacctctacacagaggctcttttacctgacaacaccagggtactcggcccatctggcctgttttgcaattttctgtccttgtactatttcacaggaaaagctgctgggcttgaaagctgctaaaacatcaatacccaggtttctttctcatcgtttggtgcaagactgaaaggacaacattcagagattgtcattatttatgtctctttgaaaccagagcta

SEQ ID NO: 766323 - DNA, 586 bp, Homo sapiens
ttctacagcagggcaactggagtcttagatccactgactgtcctctggctccccatttctctcttctgtgatatggctggtctactctttgcctgcacgggtgacccgtgacctgcaacaagtcattattgcaatttgagaaggtgagctgccacctactcttggatctgaagtcccagccacaggtcccctcttttgtagtctcttttgtagcagcctcttattccatccccaaaccattgccaattcacatcccttcactgaagggcatggaaacttccagaccccctgcttgttacacatggactgagtgatttcgccaaaataatctgtgtgcttaatagggtaaccccatacygctgcaaacctctacacagaggctcttttacctgacaacaccagggtactcggcccatctggcctgttttgcaattttctgtccttgtactatttcacaggaaaagctgctgggcttgaaagctgctaaaacatcaatacccaggtttctttctcatcgtttggtgcaagactgaaaggacaacattcagagattgtcattatttatgtctctttgaaaccagagcta

SEQ ID NO: 766324 - DNA, 612 bp, Homo sapiens
tatatgtatgcatatatacatatatgtacatatgtacatgtatgcatacatatatgtgtacatatgtatacatgtatgcatacatatatgtacatatatatgtatacatatatgtatatgtgtacatactatatgtgtgtgtatatatatatgtacaagtcaagtcatcaaaatccttaatagcatttatctctgggtaatgagaatttggatgacrtttattttccagttttttttttctgtaatttccaaggtctccacaatgactatctattaccactgtaatcagaaagcaatgttaacaaaaggaatcctatgggaggaaaataaagcctccttcaatagaaatacatgctgaagtcataagcccaggttctctagggcagttctgatttgaaatacttgattccattgaccccaaagtactgtactctcttgtcacctgtgttgctgcagtctaagtgagaagttcctttgtaaatttgattcacctagaaaagcatccaaggggtcctggcacagtcccagcttgcataagctgttcccatatgagcaactatctgcctgtagcagctcccactgcactaaggaagattgcaataatgctctacc

SEQ ID NO: 766325 - DNA, 596 bp, Homo sapiens
cttgtctctttatacaaaatctcttttggagcccatagtgagttggataaatgttttgattatcaggccattaggcagaatttccaaggatagcagttccttaagtctctctcttcccttatgcccacttaccccccaaaaatacccactcagtgtctaagggcctccagggaggcatcttctccatttctcacagccccatcatctctgtctctttcctacctctccagctctttacctgtcactcagtgcacactaaaattcagcaaaagcaaacaacatgtggagccccaccctcgctatgccttctctcaggttcactaacgttgctttgtctctctgtacctgaattgatctgtcctagaccacaggaggcattcagtacaagtttactgactgaaggatactgaactgcaaaagaatctgcataccaaagaaactgtacgccattcagacctggrctcaccgcaaatatttactctttaatcatttctgcttgtgccttcaattagaggaaaataatgcatgtgtcttaaacaattttcaatatatgagagcagaaatagttccagatcaccatataaacagatacaaaa

SEQ ID NO: 766326 - DNA, 613 bp, Homo sapiens
ttttccatgtctgacttctgattaacctgagttctgggacggtctctaagattttcagtttatctattttatcttatttaagagcaagtacttagcataaatcctgcccttaaacaaccttgatgtaatcattctttgattgtcgtcacatcctttctgatcactggtctcctatggtatamaagccctatttgagaggggtcatggcaagtgattgaccatcttatctgcctactgtcagagacacagacacggcttctgtttttaagtctctattaaatgtttctttctgagaaactggatgtgtcagcctctttcttcagcctttcagcttcctcaggcattggggtcaagtttgcatagatctaccctgtcatgtgcgctccaaggtcagagttaaccaggcccatgcgtgtttatgtctttccacaatgtcagacttttactgatgctatttccaacacagaagctgcaagctacatggagctcccaaggagccattcgattgtcagtgttgcgggcacacaggctaaaaccattgcacaagccggtcaatattgcaaaccatacataatagtattcttaatcaatacataaacattataagttaaag

SEQ ID NO: 766327 - DNA, 613 bp, Homo sapiens
ttttccatgtctgacttctgattaacctgagttctgggacggtctctaagattttcagtttatctattttatcttatttaagagcaagtacttagcataaatcctgcccttaaacaaccttgatgtaatcattctttgattgtcgtcacatcctttctgatcactggtctcctatggtatacaagccctatttgagaggggtcatggcaagtgattgaccatcttatctgcctactgtcagagacacagacacggcttctgtttttaagtctctattaaatgtttctttctgagaaactggatgtgtcrgcctctttcttcagcctttcagcttcctcaggcattggggtcaagtttgcatagatctaccctgtcatgtgcgctccaaggtcagagttaaccaggcccatgcgtgtttatgtctttccacaatgtcagacttttactgatgctatttccaacacagaagctgcaagctacatggagctcccaaggagccattcgattgtcagtgttgcgggcacacaggctaaaaccattgcacaagccggtcaatattgcaaaccatacataatagtattcttaatcaatacataaacattataagttaaag

SEQ ID NO: 766328 - DNA, 613 bp, Homo sapiens
ttttccatgtctgacttctgattaacctgagttctgggacggtctctaagattttcagtttatctattttatcttatttaagagcaagtacttagcataaatcctgcccttaaacaaccttgatgtaatcattctttgattgtcgtcacatcctttctgatcactggtctcctatggtatacaagccctatttgagaggggtcatggcaagtgattgaccatcttatctgcctactgtcagagacacagacacggcttctgtttttaagtctctattaaatgtttctttctgagaaactggatgtgtcagcctctttcttcagcctttcagcttcctcaggcattggggtcaagtttgcatagatctaccctgtcatgtgcrctccaaggtcagagttaaccaggcccatgcgtgtttatgtctttccacaatgtcagacttttactgatgctatttccaacacagaagctgcaagctacatggagctcccaaggagccattcgattgtcagtgttgcgggcacacaggctaaaaccattgcacaagccggtcaatattgcaaaccatacataatagtattcttaatcaatacataaacattataagttaaag

SEQ ID NO: 766329 - DNA, 613 bp, Homo sapiens
ttttccatgtctgacttctgattaacctgagttctgggacggtctctaagattttcagtttatctattttatcttatttaagagcaagtacttagcataaatcctgcccttaaacaaccttgatgtaatcattctttgattgtcgtcacatcctttctgatcactggtctcctatggtatacaagccctatttgagaggggtcatggcaagtgattgaccatcttatctgcctactgtcagagacacagacacggcttctgtttttaagtctctattaaatgtttctttctgagaaactggatgtgtcagcctctttcttcagcctttcagcttcctcaggcattggggtcaagtttgcatagatctaccctgtcatgtgcgctccaaggtcagagttaaccaggcccatgygtgtttatgtctttccacaatgtcagacttttactgatgctatttccaacacagaagctgcaagctacatggagctcccaaggagccattcgattgtcagtgttgcgggcacacaggctaaaaccattgcacaagccggtcaatattgcaaaccatacataatagtattcttaatcaatacataaacattataagttaaag

SEQ ID NO: 766330 - DNA, 662 bp, Homo sapiens
agggatcctgacacataccgaggtcttgaggtgaaatcttgctagggaaacataccgggaggaggttgcaccaggagtagcaaggcaccaccgtgctgatacccaggcccaaagtactgcagtcctttgatggcattaacttggtacagccctagcatttcattctggcagaataagaagtaaatcctctctggagtgtgaaaattattccagagcccaaamttgcttctaaaatgttgtagggcaagtatcagtttaaatctacatagatattaagtgtattaaacatagtgtgatttcaatcaacaatacccaaacatacaaaatggagagaaaaaaaacaggcaacagaaagggaccaaaataatttgcggatattgggacaatagtatattatatgctgaatgcattctatgacaagatcaagaattttagcagagaacaagaaactataaaaagaaatcaaacaaatgtcaaatataaagtaattcaaaccaataactcaatggatgaatgtaacggtaaatttgacagttaaatttgctcttgcaagtgatccactggaagtttggtcaggccatgaggcaatttgtaataaataaaaagaataaaatcatttctagacaaatatgatgaacgtgatttgatttaattaagtgtaa

SEQ ID NO: 766331 - DNA, 662 bp, Homo sapiens
agggatcctgacacataccgaggtcttgaggtgaaatcttgctagggaaacataccgggaggaggttgcaccaggagtagcaaggcaccaccgtgctgatacccaggcccaaagtactgcagtcctttgatggcattaacttggtacagccctagcatttcattctggcagaataagaagtaaatcctctctggagtgtgaaaattattccagagcccaaacttgcttctaaaatgttgtagggcaagtatcagtttaaatctacatagatattaagtgtattaaacatagtgtgatttcaatcaacaatacccaaacatacaaaatggagagaaaaaaaacaggcaacagaaagggaccaaaataatttgcggatattgggacaatagtatattatatgctgaatgcattctatgacaagatcaagaattttagcagagaacmagaaactataaaaagaaatcaaacaaatgtcaaatataaagtaattcaaaccaataactcaatggatgaatgtaacggtaaatttgacagttaaatttgctcttgcaagtgatccactggaagtttggtcaggccatgaggcaatttgtaataaataaaaagaataaaatcatttctagacaaatatgatgaacgtgatttgatttaattaagtgtaa

SEQ ID NO: 766332 - DNA, 470 bp, Homo sapiens
ccaattctttttcctctcttcagggacactcccaggcacctcatggatttcctttcactacacaatgctctggcaactctcctcagggtctcagatggatcgttccaaatttcatctcctttggtttaaaatcttctgggctcaatatccttaatttctaatgtccaatttcttgaaaacatttgcctcatgtattgkgtcctgtgttttagttaatccagagaggagtgtaaacctagtccattctaatctcttttggctacaggttgaatatctggaagcctacgtctgaatttaaatatttttcgctcctcaaggttcttcaccagcacctggtagtgtgaggatagcaggtcgtgctttagggttgcaattgggactttactgccattaccccatctcttgctttttccacaccacacaagttctcctgaacacatatacagacacttcacacacattcacatgcc

SEQ ID NO: 766333 - DNA, 470 bp, Homo sapiens
ccaattctttttcctctcttcagggacactcccaggcacctcatggatttcctttcactacacaatgctctggcaactctcctcagggtctcagatggatcgttccaaatttcatctcctttggtttaaaatcttctgggctcaatatccttaatttctaatgtccaatttcttgaaaacatttgcctcatgtattgtgtcctgtgttttagttaatccaragaggagtgtaaacctagtccattctaatctcttttggctacaggttgaatatctggaagcctacgtctgaatttaaatatttttcgctcctcaaggttcttcaccagcacctggtagtgtgaggatagcaggtcgtgctttagggttgcaattgggactttactgccattaccccatctcttgctttttccacaccacacaagttctcctgaacacatatacagacacttcacacacattcacatgcc

SEQ ID NO: 766334 - DNA, 544 bp, Homo sapiens
acttatgggatcaacatctctttgtgacactagtctcctgctgtcattgccacctacacgctccttgtagacaacttccctcttctgcctcacaacctgcattagccctgatatgctttgccagctcactgttaactttgactcctgcatgggtgaccttctcaatctacatgggccgttatgctagtaccactggctttaccccttttgaagggccctgctcatcctgcttcagctgtgacatatgtgctagtgggaggatgtygccccacatcctgcgcctatgtggggataccctcctccctccactatagcttcaacacctctggtggtcttccctctctactgcacatcaactgccctttccatgccatgtgggtttcacactctgtgcaatattttggtttccccttcattttggtgcatggttttctttctgaacctactttggtcaaatgccctaaacccagtcattaagaactgctttctcttaaaaactggaagagattggtaatatagagatatacagtttatggaacagagt

SEQ ID NO: 766335 - DNA, 543 bp, Homo sapiens
agctgacacttttcagaagtggagggagaagatttctgatgttggcctagatgaaagaagtaggaaagaaaatgtagaaatacaggaagatgatcacatgtctgagataagagatttgccatgtcgtttacccagtgtacaaggattacccaatccttgcaaagcattacactactttcacatattttgtgttaacattttcctttttcttatttttaataaataaatctgtccttctatccatccatctatgtatccatccatctttcttatacctcatcattgcatctctggctgatagtgctgatgatttacaacatcaagggctctagaggatcagagcaaagaagaagtctctstggcctcaataatattcatcagtaccaaacgcgggacacttctaaaatttattgcagattctggagatgtgcttctccaacaagccaggtcttagacgggaagctagcaagaaaagtaggtcatgacctacttctgcagagcagaaaagcaatctccttgcaggacagtagacagattctgttc

SEQ ID NO: 766336 - DNA, 543 bp, Homo sapiens
agctgacacttttcagaagtggagggagaagatttctgatgttggcctagatgaaagaagtaggaaagaaaatgtagaaatacaggaagatgatcacatgtctgagataagagatttgccatgtcgtttacccagtgtacaaggattacccaatccttgcaaagcattacactactttcacatattttgtgttaacattttcctttttcttatttttaataaataaatctgtccttctatccatccatctatgtatccatccatctttcttatacctcatcattgcatctctggctgatagtgctgatgatttacaacatcaagggctctagaggatcagagcaaagaagaagtctctctggcctcaataatattcatcagtaccaaacgcrggacacttctaaaatttattgcagattctggagatgtgcttctccaacaagccaggtcttagacgggaagctagcaagaaaagtaggtcatgacctacttctgcagagcagaaaagcaatctccttgcaggacagtagacagattctgttc

SEQ ID NO: 766337 - DNA, 654 bp, Homo sapiens
gagatgtgcttctccaacaagccaggtcttagacgggaagctagcaagaaaagtaggtcatgacctacttctgcagagcagaaaagcaatctccttgcaggacagtagacagattctgttctgtggcccccagagagaaacttgttctctgctaacaagtgtatgcaggcctgatcaatcttaggacccctgggggacactaggcctgtgcaatattatgcagrtaaagtcattcttgcatctgttgaaattttcattttcaaaaaaacacagccaacttcctgaagacttgtacacaggctggtcataccacttgcaagagtcagtcccagtcaagacacagcatggacatgagggtccctgctcagctcctggggctcctgctgctctggctctcaggcaaggaaggagaacactaggaatttactgagccagtgtggtcagtactacctggctattcaggaaagtcctctcataacatggttaatagtgttaatagttttgtttcccatctcaggtgccagatatgacatgcagatgacccagtctccatcctcgctgtcttcctgtctaggtgagagtcaccatcacatgccaggaaagtcaggcagggcattagccatgttttagcctgatacaaagagaagccaggga

SEQ ID NO: 766338 - DNA, 644 bp, Homo sapiens
gcagacatgtgacgctgggctgccccacctgctcttctttgtgcagccatctggtgacaacacttctcagactcagcctgagttttgagggttattgggagattacggaagagggggccatgaaggtgtctctccaccctaagtctctttcctctcatggcaatgtctcttcgaatttagtaaagaaaggagattagtctacctgaggagtctgtgttatggggtaattgaaattcttacagtaaaatggaagccacacattccaagcaggaattgttttaactgagtgaattagaatctaaactatagccttygaaagcctggcatatgttattcatgaagcagatactagagatggggttctctgatgcaaaaatataaatatttattgatctgtttttaaagatactaagataaaacttaaaaatgttgtcactgtatcaaatatattgcatcatatatctataaaaacagtaaaatttgtgtcatttatgaaaaatgcacatatttgagtgtatataacatacatattaatccatatatatttatttgataacttgttagctataaatactaagtacacatattcatgtgtagataagattatttaaatatgtttatatatatatatataagcaacacat

SEQ ID NO: 766339 - DNA, 644 bp, Homo sapiens
gcagacatgtgacgctgggctgccccacctgctcttctttgtgcagccatctggtgacaacacttctcagactcagcctgagttttgagggttattgggagattacggaagagggggccatgaaggtgtctctccaccctaagtctctttcctctcatggcaatgtctcttcgaatttagtaaagaaaggagattagtctacctgaggagtctgtgttatggggtaattgaaattcttacagtaaaatggaagccacacattccaagcaggaattgttttaactgagtgaattagaatctaaactatagcctttgaaarcctggcatatgttattcatgaagcagatactagagatggggttctctgatgcaaaaatataaatatttattgatctgtttttaaagatactaagataaaacttaaaaatgttgtcactgtatcaaatatattgcatcatatatctataaaaacagtaaaatttgtgtcatttatgaaaaatgcacatatttgagtgtatataacatacatattaatccatatatatttatttgataacttgttagctataaatactaagtacacatattcatgtgtagataagattatttaaatatgtttatatatatatatataagcaacacat

SEQ ID NO: 766340 - DNA, 644 bp, Homo sapiens
gcagacatgtgacgctgggctgccccacctgctcttctttgtgcagccatctggtgacaacacttctcagactcagcctgagttttgagggttattgggagattacggaagagggggccatgaaggtgtctctccaccctaagtctctttcctctcatggcaatgtctcttcgaatttagtaaagaaaggagattagtctacctgaggagtctgtgttatggggtaattgaaattcttacagtaaaatggaagccacacattccaagcaggaattgttttaactgagtgaattagaatctaaactatagcctttgaaagcctggcatatgttattcatgaagcagatactagagatggggttctctgatgcaaaaatataaatatttattgatctgtttttaaagatactaagataaaacttaaaaatgttgtcactgtatcaaatatattgcatcatatatctataaaaacagtaaaatttgtgtcatttatgraaaatgcacatatttgagtgtatataacatacatattaatccatatatatttatttgataacttgttagctataaatactaagtacacatattcatgtgtagataagattatttaaatatgtttatatatatatatataagcaacacat

SEQ ID NO: 766341 - DNA, 620 bp, Homo sapiens
agagggaggccctaaggcgggactggggtctcctgtctgacatggttcgcctgggaggagctgccagtgtgcttagtgatgggaaaatcccctgtgctctgagaccggaagcctcatcttgcccctccctactgccttggctgtgtccccaaagccctcttcttacggaaggaactatgtttcacaaattcctatttggaatctcttacctccaatatggytgcagatggagagagagcctgctaggaggtaactagggttaaagaggtgatcagggcaggatcctgacaccacgggattactgtccttataaagagagacactatagagctttctccctcccccaccctccctgcgtgccctgagggatggtcatgtggggacatggccaaaaggtaacatctgcaaattaaaaagagagtcctcaccagcaagaaaacctttctggactttgagctttgcctttccaggctcctaaactgttagaaataacatttctgtggtttaagccatccagtcacatccattttggtgtcacaatccctgcaaacactccaccctacctaccctctctgagtaggatcagtatcaggaagccctcgtggacatggggcccgcct

SEQ ID NO: 766342 - DNA, 519 bp, Homo sapiens
attagaaatcttgtaatccacccttgatctgtaagcccctgtttcaagatatcctgcccttttaggccaaaaccaatatgtgacctccatgtattaattttcaatttgacctgtaacttctgctttcctgaaatttactcctgccttaaaaaacccttacctgcaagccatcagtgaggccaggatttgaatcttagctgcctgattctctttacctgatgccctacaaaaaaacaaacaaacaaacaaacaaacctttactttctcctgctgcaaactcagtgtgaatatctgatctgactgagctgagtgagtggactccagttcggttccacagcacaagctctktttatagtggcatttatccactcatgagggcagagctctcatgacttcaacacttcccattaggccccacctcccaattctgttgctttgagataaatttaaaaacagatgggttttgaaggacacagtgaaaccataacactgcccaaagagagggccattcgagcccct

SEQ ID NO: 766343 - DNA, 594 bp, Homo sapiens
gcaggcagagctgccttctccaggttcagaaagagcaatgaggggcatagatggccattggaagtcagcagcagtacagcgaaagggaaaggcatagcctgtagacagggattgcaatcttgatatattttctatttagtttcctttctaaaaacagaataatttcatgctaacagaagtgttgtaagtacagcacaaagtgctttcttccaattaagtgcatattgtattttttaaaaaataatctccatctccatacacgaataaaatacattactccatctagtcctcaggaatatttcgaattttgacaattaactcaaaaaagttctttgtaaccaaacagyctccaggaagaaacacttatttacggacaaatctgtgatgccctggtccgacctgggacactggggacattgctcctatgctgagttactgagaagagccagccctgcagctgtgcccagcctgccctatcccctgctgatttgcatgttcgcagagcacagccccctgccctgaagacttattaataggctggtcgcaccctgtgcaggagtcagtcccaaccaggacacagcatggacatgaggg

SEQ ID NO: 766344 - DNA, 619 bp, Homo sapiens
aactacatggctacattaatcaaaatagcatagtgctggtacaaaaagatacacagacaaatggaacagaatagggaactcagaaataatgctggagacctacaaccatctgatcttcaacaaccctgacaaaaacaagcaatggggaaagtactccctatttaatagataatgctgggagaactggctagycatatgccaaaaattgaaactggaccccttccttataccttacacaaaaatgaactcaagatggattgaagacttaagtgtaaaaccccaaactataaaaaccctagaagaaaatctaggcaataccatttaggacatagacacgggcagagatttcatgacaagaatgcccaaagcattgcaacaaaagcaaaaattgacaaatgtgatctaattaaactaaaaagcctctgcacagctgaagaaactatcatcagagtgaacagacaacattaagaatgggagaaaaattttgcaatttattcatctgacaaaggtctaatatccggagtctataaggaacttaaacaaatttacaagaaaaaaaaacaaccccattaaaaggttggcaaaggacatgaacagacacttaaaagaggacatacat

SEQ ID NO: 766345 - DNA, 619 bp, Homo sapiens
aactacatggctacattaatcaaaatagcatagtgctggtacaaaaagatacacagacaaatggaacagaatagggaactcagaaataatgctggagacctacaaccatctgatcttcaacaaccctgacaaaaacaagcaatggggaaagtactccctatttaatagataatgctgggagaactggctagccatatgccaaaaattgaaactggaccccttccttayaccttacacaaaaatgaactcaagatggattgaagacttaagtgtaaaaccccaaactataaaaaccctagaagaaaatctaggcaataccatttaggacatagacacgggcagagatttcatgacaagaatgcccaaagcattgcaacaaaagcaaaaattgacaaatgtgatctaattaaactaaaaagcctctgcacagctgaagaaactatcatcagagtgaacagacaacattaagaatgggagaaaaattttgcaatttattcatctgacaaaggtctaatatccggagtctataaggaacttaaacaaatttacaagaaaaaaaaacaaccccattaaaaggttggcaaaggacatgaacagacacttaaaagaggacatacat

SEQ ID NO: 766346 - DNA, 619 bp, Homo sapiens
aactacatggctacattaatcaaaatagcatagtgctggtacaaaaagatacacagacaaatggaacagaatagggaactcagaaataatgctggagacctacaaccatctgatcttcaacaaccctgacaaaaacaagcaatggggaaagtactccctatttaatagataatgctgggagaactggctagccatatgccaaaaattgaaactggaccccttccttataccttacacaaaaatgaactcaagatggattgaagacttaagtgtaaaaccccaaactataaaaaccctagaagaaaatctaggcaataccatttaggacatagacacgggcagagatttcatgacaagaatgcccaaagcattgcaacaaaagcaaaaattgacaaatgtgatctaattaaactaaaaagcctctgcacagctgaagaaactatcatcagagtgaacagacaacattaagaatgggagaaaawttttgcaatttattcatctgacaaaggtctaatatccggagtctataaggaacttaaacaaatttacaagaaaaaaaaacaaccccattaaaaggttggcaaaggacatgaacagacacttaaaagaggacatacat

SEQ ID NO: 766347 - DNA, 624 bp, Homo sapiens
ctgagcttctgctggctcctgctgcctactctacacaatgcctgttgggtcaggggtgatgggcttggacagagttcactcgggccatcagcagctgagctgccttcatggcgtctcgttttgtgaagaggatgtcagcagccacatgagccatgatagctgggcagagagatcccacatcactctagtcagaggagaagctgccaattgycaagtggaagggttttgtcctgtgaccctgtgactacacagccactgagtcacatgtgctgctgtgtctgagaagagcccccaggggaggaactgtctactcggagatctgggaacaaaacttctctccaatcagggcccagacccactgcccatctcccagccacctgctgattgtgttccccacaccccccttgggtcttgggggctctctgtcctgctcaacagggacatggggaaaggtcctgagcttcctgaccttcaggaagtcaggaaggatcatgtttatggtgtgctattgctggttttaaatgttcatgctcaatttatcaaatttgaaatcataccttataccaacagttatatctatttctatataaatatacatattatgtagatgtataatatagatac

SEQ ID NO: 766348 - DNA, 612 bp, Homo sapiens
cagaagcttgcaaaactagcaagtgtcagacccgaaattcaaacccaaactcttccttataatacacagattctaatttattttgtctcacttcaaaacgatttggaaagtactcctctgtgacagtgctgccatcatctggcaaagtacccccttcacatgggaagagaggaggtgaagatagattagcagcaattgattcataaggctaagtgttacataagacgtttactcagacccctggacaggtagtatcttggggatgggagaggtaagggacaaaagtaaatttgttatttactcactatttatttccacaggagcatggaaacatgctatggttaaagaacatttaataagcagcaagaatgaagtttttggttcagactttacttagggacmgaattcagagaagcttcttgtatttcatattattataaagggaaattttaaaactttatccaattttataatttgctggaaacatcgaaacttggaattagacaacagtctgtaaatttgcaaaaccacattatacaaatctttcctctacaatgtctaagcagaaaatattcttttataatatggaaagaaaattttgtgtacatgagg

SEQ ID NO: 766349 - DNA, 634 bp, Homo sapiens
tttatgctttttcatttatctacttgtctattcttctctccttatctctatttctctccacatccctcctcacaccaaatattgcattttgaaaactatttctgaaattatttctttgtgtaagaaaatcagcagttaaaccaaacactagatgttaaggaaaaygcattaatcatagtaacctctttgttagattgaaggcttcacgaataactgttctacctgagtaatttagtaaggtaattagaagtctctgggtttaagatttcagattgccacttcattttccatttcctgataccctttgttcatctctgctagtctgctgcttccggccacctgctccagttttataaagcctacatcttctactcctttcaggtgcatacatttctgatttctaaacaagtaactcttttttcttattttcataatcataactttttcagatttatgtccttgcaatggactgaattgtgtccagtccacaaattcatatattgaaggcttaacccacaatttgacttagtatttggagatagggccgttaggagataattttgatgaaatgaggtcacaagagtggggtcctaatccacataaaaagacccttataaaaagaggaagagacatc

SEQ ID NO: 766350 - DNA, 630 bp, Homo sapiens
tataccagcctattatcagatacatattttgtgaatattttctccctttctgtggtttcccttttatttagcagagtattttaactgtgatcaagtccagtgtgttaatttttccttttatggcttgtgcaatttgtgtgcaatataaagcattttttctaacccaaatttacaaagactttctcctttgttttcttctataaggtttacagatttttttattgttgcaaaatgcacataatattaaaattaccattttaaccactttaaagtatgtaattcagtgatattcactaccttcacaatattgcaaaaccaacatcactatctacttcaaaaacattttcatggccaggcacagtggctcacacctgtaacaccagcactttgggaggccaaggtgggaggatcgcttgagccsggaagttggagaccaacctgggcaacctcgtgggactctgtctctacaaaaaattaaaaataaaaaattagctggggggtggtggtgtccactagtagtcccaggtactaggggggctgaggtgggagaatcatttgagcccaggaggatgaggctgcagtgagtcatgatcaccctgctgcactccagcctgggtgacagagcaagac

SEQ ID NO: 766351 - DNA, 526 bp, Homo sapiens
aattgaacattggactaaatgaataacagaacggaatgtgagaaatgcactgatttgaactcctgtgtttgtttgaatcatatacattttcagaaacagctaaatttgagtggaaaatacaacagtgttgtaatccaaaatgtcagtttatacctgacttaacatttattgtgctatgtgctgagaatcccaaaggcacatttaattttattaaacacagtgattcattccataaacctaacagccaaggcagtgccttgtcatcttttgacaacttaccatagtttacttcaagtaactaaaagaacatggcatcttcatgctaactagggtcccagatgtaaatgacaacagcaaacatcttakataggatgtgtggtggtgaaggaagactttggtgcgtaataagttatatgatggatttggtgggagtcccagtatcttatgagggtacagacacatggtttctattctgtcttaattcctggtgattcttcagtgtttgtatttaccaaagataaataga

SEQ ID NO: 766352 - DNA, 454 bp, Homo sapiens
gagttcaagaccttttaaaaagggctaaataaacaatctctacatgtaaaaggccactgactcctacttcctctgtatagagcaactgttgaactcagctgcctgtaggtaagattttttattctggaattatttaattgttttctggtatgttcataactaatgtctttaaaataacttacttatagtgaaaataataaggggagttgtgaacaattytcaggtaaacacggtgttccagaatacagcaggagcatctgggcatttttgtggctgtaagttttaaactttgcttaaagctctcataatagtgacctgcagtacacgcttgactatgactaagccatggatcagaggtctaattaagcctgattgccagagcaatgagaggatgtttcagacatcatatttttgttgtttagactgctttatttttaactttccaggggcatta

SEQ ID NO: 766353 - DNA, 454 bp, Homo sapiens
gagttcaagaccttttaaaaagggctaaataaacaatctctacatgtaaaaggccactgactcctacttcctctgtatagagcaactgttgaactcagctgcctgtaggtaagattttttattctggaattatttaattgttttctggtatgttcataactaatgtctttaaaataacttacttatagtgaaaataataaggggagttgtgaacaatttycaggtaaacacggtgttccagaatacagcaggagcatctgggcatttttgtggctgtaagttttaaactttgcttaaagctctcataatagtgacctgcagtacacgcttgactatgactaagccatggatcagaggtctaattaagcctgattgccagagcaatgagaggatgtttcagacatcatatttttgttgtttagactgctttatttttaactttccaggggcatta

SEQ ID NO: 766354 - DNA, 640 bp, Homo sapiens
aacaaaaacgggaagaaataacaaagaaaaagaaaattagaatcaaaagaaaactggaaaaaaaaaaaaaaccttagtagccagaagtctgttttacgagtgaaacttctgctgtgtaagggataagggatttcttaaaaatgtatttcctaaaatgggcaaaatgtagcacttactagccattcaatcagctttggaatattctcttcattgtgaagaaagcacaggtgtgtgtgacatttgttcccttcttctttcccaccccaagcacaaggtattttcacagtcctcagccaaatacagagtttgacgttccctggcaaacggtccctgcgtgttctgttgaaggttaggagtagaatgagcctaatcctgtcaggagactgtttaagtcccagtcaaggacgctagctcctcagcgctgacgcagtctgccccgtcctctgcaccttgctaagaaggacaaacgcaagtggccacaggwcaaatctccaaaggggcggagctgtggagaaagctacggcagagatctccctggattaggagcagatgcaatcgaatctccagaacttggatttatagtagaaaaacctagagatgttcagtctaatctttaagtttcccaaacctgggcatttca

SEQ ID NO: 766355 - DNA, 539 bp, Homo sapiens
tggaattgggagctgggcgtatattgtactagaaaatcagtggtattatcacaaaggaaaagctgtactggaattaggattttggtttggataagagggtattcaaatggcagaaggtgatggacagcaaagattcagaggagagaaaactcagkactcaaagaatatttaggtcccatgcaaagcccctgggaaggtgcattgagtttgtgtttatttattgagaacaaaagtctcaccatcaggctcatgtgttagtaatactgctgagcaatgttcaaggtgattagagaaatgaaacgctggacagaccctgttacacagatgtaactgagaagaggaggacaaagacgagagcacttgaaataagatgagaccaattggtgcagagaccgaggcctcggggcagtcagtactgccctgtgtatctagactttgtcctagaaagtaaaacttacctgtaaaataattgcacctataattttatttaatgctcagtattatcagagatgaaaggttgtgtttttattatttcacca

SEQ ID NO: 766356 - DNA, 543 bp, Homo sapiens
cattcattctgcctctgacgtgccaggcgctatgccggtcattttgcagtaatctcatttaatcctaatgataatactcagatgtaagtgctattatctcttccccctaagtagggaaataggggtcaggaaaagcccaggagcctgttccccaagaccaagttagcactacagagctgggaatgaattccaactttatgtgcactgcaaagctcttcyatgcccccacaccaccccacgcccggttctccctactgttcctacattccagacgcaccatccagcctgcaatgtgctttcacaccatgttcacctgcagacaatgctttctccatctaatgcccctgccttcaccatgcacacactgaagttgcctagaagggtcagtcacactctactctgtgccttccttctgcctcggcacttgtgatgctgcgggattatcagtttcccctccctcatcccaaagactgaacagtcaccaagagtagcaagtcgactagtcaccactgaacatacgcagcctggagaatcagaggtgca

SEQ ID NO: 766357 - DNA, 549 bp, Homo sapiens
tatatattcataatgggtatatcgtcaaaggaattagttgttaattttggttgttatctttgtcagatatggtataagataatgttcacccaggaaatgaaattccaaacttttgaaatatcttcatagttagaagttatttaaaagcataggaattatctcttaacagtttgaaaacaatcaacataaaaagatcttcagcattatttttttcccttaacggtttgaaaactttcccaacttttttggtcattagtttatttagttatatcttgacacaattttrtaattattagcacggaattttaactagtagtttcttaaattttttaaattttttctacatatttagttatatctcatcctgattcctacattaatgtgccttttcctttattatattttccaagtcttaacaaatatttggttttctcaaaatcctagattttggaactatttactaactactttttactattacagaatttattaatttcttttatttgtttaaaattaattccctccacctgctttctttgggactatttc

SEQ ID NO: 766358 - DNA, 629 bp, Homo sapiens
tttgtgaatcttattgttcatcattatacagtaacaagtggtttgctgataaactggctctgaagaaaataattgaaaagccctgatttgtagcatttgcaacccttgtggtgtaaatgcttccactgtggcaaatttccaagttactgatacaaggtcattgcactcagagttggggcaagatggatacaactaactggccctcaggagcaagctccaacataccactgatagtaagtttcttttctttttttcccccgagactgagtctcactctgtcacccaggctggagtgcagtggtgtgatcttggctcactgaaacctccgcctcctgggttcaagcaattctcctacctcagcctcacgagtagctgggattataggcacgtaccaccatgcttggctaatttttgtatttttagtagagacggggtttcaccatgttggccaggctggtctcaaacccytgacctcaaatgattcacccacctcagcctcccaaagtgctaagattacgggagtgagtcaccatgcctggcctgaaagtaagtttcttatgctttctgatctctgcctttcactctgttttaatactaaagatcatttgtttttgtgtttgtttacatcc

SEQ ID NO: 766359 - DNA, 511 bp, Homo sapiens
tgcagtggtgtgatctcggctcactgcagcctctgcctcccaggttccagtgattaccctgcttcagcctcttgagtagctgggattacaggcacccaccaccacacctggctaatttctgtattttcagtagatacggggtttcaccatattggccaggctggtctcaaactcctgacctcagatgatmtgccctcctgggcctcccaaagtgctaggattacaggcatgagtcactgtgcccagccatgactgccatttttaaaatgacctgctataatgttatcccttgcattttatcaatcaaataattttaatgtgagttttgttgtttttttttttccagacagcatcttgctctgtcacccaggctggagtactgtggcatgataatggctcactgcagccttgatgtcccaagctcaagcaatcttcccacttcagcctcccaagcagctgggactacaagcatgtactaccgcatccagctaatgtttgtattttgtgtaga

SEQ ID NO: 766360 - DNA, 567 bp, Homo sapiens
ttgagatatgtgctctttttaagtcttacctcctaatctgcctttgggattatgctactggtgtcatactaacatcagaggtggtacaaacccaaggggctaattctctcactctcctttcccttgcagatgatcccagccctagactcagtgcacaagctcaggtggctgaggatattctggacaaatacaggaatgccattaaacggaccagccccagtgatggagcaatggcaaactatgaaagtacaggtgataatcatgacaragatttgagtagtaaacttttatatcatagtgataaaggtaatctgaatttaagtggcctttaaaagaaagaatagctaagggagtcagtttactacctcaaaattacagactgcctaaacaaatgtttaaattgatgtccttctctggattctcccactagccctgggtacccctgaatgttcaaatgccttagagttgtcctcctttgcatctggggtgactggcccacagagagttggggcatattctaatgggaggaggttctttttcaatgtctacagctttgtaattttatcc

SEQ ID NO: 766361 - DNA, 567 bp, Homo sapiens
ttgagatatgtgctctttttaagtcttacctcctaatctgcctttgggattatgctactggtgtcatactaacatcagaggtggtacaaacccaaggggctaattctctcactctcctttcccttgcagatgatcccagccctagactcagtgcacaagctcaggtggctgaggatattctggacaaatacaggaatgccattaaacggaccagccccagtgatggagcaatggcaaactatgaaagtacaggtgataatcatgacagaratttgagtagtaaacttttatatcatagtgataaaggtaatctgaatttaagtggcctttaaaagaaagaatagctaagggagtcagtttactacctcaaaattacagactgcctaaacaaatgtttaaattgatgtccttctctggattctcccactagccctgggtacccctgaatgttcaaatgccttagagttgtcctcctttgcatctggggtgactggcccacagagagttggggcatattctaatgggaggaggttctttttcaatgtctacagctttgtaattttatcc

SEQ ID NO: 766362 - DNA, 615 bp, Homo sapiens
  misc_feature 363: n = A,T,C or G
tccctgtcttgtagatcaggaagctgagagtgagagggtgtgatttgcccgtggttttggagctcagagagaggaaaatcctgagctcagagagactcagtcctcgcagcagctctgagagaggaactgctcgccccatttcacagacaagggcactaaggccagcagaggggcggcggcccgtcctggtcacccagggcacctccagcactkcccctcccatggggaatggctgccggcgtaggtgcccctcaccttgcagctctggggttagcatccagggctggagggctcggaagaacccagtcacccagcacatgggattcgggcacagcaggagcgggaggtgcaggtgcagccagncctgaggtgggtttaggaactcaggactgggtccagcctgtgacagggggtcatgctggggtttcaagccggggcagctcatggtcatgtttggatttgggagctgcctggcggtcccatggtgagtggatcagagggaaagagacccacggctgagcaggcaggaggaggctgcaggtggccagggggagagggaaggggtgaggacagaggggtgagcagggatcccacagacgtgaccagcagagtcac

SEQ ID NO: 766363 - DNA, 660 bp, Homo sapiens
  misc_feature 411: n = A,T,C or G
gcttcacatgccccacaactgccctaggagttgagtactctatcaccatccctgtcttgtagatcaggaagctgagagtgagagggtgtgatttgcccgtggttttggagctcagagagaggaaaatcctgagctcagagagactcagtcctcgcagcagctctgagagaggaactgctcgccccatttcacagacaagggcactaaggccagcagaggggcggcggcccgtcctggtcacccagggcacctccagcacttcccctcccatggggaatggctgccggmgtaggtgcccctcaccttgcagctctggggttagcatccagggctggagggctcggaagaacccagtcacccagcacatgggattcgggcacagcaggagcgggaggtgcaggtgcagccagncctgaggtgggtttaggaactcaggactgggtccagcctgtgacagggggtcatgctggggtttcaagccggggcagctcatggtcatgtttggatttgggagctgcctggcggtcccatggtgagtggatcagagggaaagagacccacggctgagcaggcaggaggaggctgcaggtggccagggggagagggaaggggtgaggacagaggggtgagcagggatcccacagacgtgaccagcagagt

SEQ ID NO: 766364 - DNA, 690 bp, Homo sapiens
ctgtagcccgggcctgagaacatgcctggggaaaagctgccccggccctgatgcatcccattggagggtgacagtggaggacacctggggaggacagattccgaggcaaggaaccccaagaggaattcgccaaggggaggagttggggcacaagtgcaacccgttctcagtgagaggtgtgatggggtgagtccsggctcgggtgccctggccacaggggccgagaggtcaacctgcatgaagaccccagccaaagggtccccatcatgggaaccgtgtgagtcccccactcaccacagaaagaggggttctcggcactcctctcgcattgctggtttctccccttgggaaaggaggtctctgggtttgcggggagggacttttgtgtgtccctgcccagaggctgtgaggggcccttcgtgacttgacacagattcctgggctatcacagagccagctcctggcggacagccacagcgccgcacctcccagacatggaggccagctcgccatccatgtgcccaccttccatggtcagggacctcagcagccaccctagagtgaaggaaaggggcaggggacagccggagtgggcgggcctcttcagctgttcctaggtgccaatcacagtgcaaatactttttaaaattattttttcaaaatcccccaaaagcaggggttcttagcatc

SEQ ID NO: 766365 - DNA, 690 bp, Homo sapiens
ctgtagcccgggcctgagaacatgcctggggaaaagctgccccggccctgatgcatcccattggagggtgacagtggaggacacctggggaggacagattccgaggcaaggaaccccaagaggaattcgccaaggggaggagttggggcacaagtgcaacccgttctcagtgagaggtgtgatggggtgagtcccggctcgggtgccctggccacaggggccgagaggtcaacctgcatgaagaccccagccaaagggtccccatcatgggaaccgtgtgagtcccccactcaccacagaaagaggggttctcggcactcctctcgcattgctggtttctccccttgggaaaggaggtctctgggtttgcggggagggacttttgtgtgtccctgcccagaggctgtgaggggcccttcgtgacttgacacagattcctgggctatcacagagccagctcctggcggacagccacagcgccgcacctcccagacatggaggccagctcgccayccatgtgcccaccttccatggtcagggacctcagcagccaccctagagtgaaggaaaggggcaggggacagccggagtgggcgggcctcttcagctgttcctaggtgccaatcacagtgcaaatactttttaaaattattttttcaaaatcccccaaaagcaggggttcttagcatc

SEQ ID NO: 766366 - DNA, 622 bp, Homo sapiens
tactgatttaaaatgcctacctatcagaatcattgcttattgccagtgttatttaatgacgctgaaacttagtcaagagagacacccatttgattctggtaactgataccatagaaatcaggaaaagattcaaacttagaagggactaccagtcaagaccaaattcctttagtagcatcatactatgtggtatttatttatctggtccaactgggygttctcagggtggggttaatgagtatattacatagatttggccttgctgtgctgaagacatgccagtcttgtcaccagcttcatactcaacccctcagattctgttatcaaggacgcttgtaatcaaattgaagcttaagtggtagaggaaattttcattttggggatgttccttgtctttcacttcatttttccttgtggggttcagtgttgtaagcgatttctattatccccctatattttattatttgatttttatttgtatcagtcatttatactgctgacagttgaaagaataaaaacagaatgaagcatccttattttgtttccctgcccatttaacttcagagtttggtttagtgtctagttgtagcagtggatattttgctaattaaaaaaaagaatt

SEQ ID NO: 766367 - DNA, 566 bp, Homo sapiens
gaaatgtttgattcaagatctggatcaaggaaagtaaaaagtaattggggattttttttggtccagaaaacaaggaagtgctcaatggaggtcacattaaaaggacacaagaaagtatgctccctggccaaatttgggacaatttaagtattctaaaaaatagtgatggtaatgggtaatcacaattcagttaaaaattacaaaaacaagttcgtataaatgttaataaagggtgagagtgggggacaggaagacagctcttctttacaaaagaatgcctgctgatacacagagaagaaatgacataattagaaagtcacmgttttgcaaccccagtggaacaattaatttgggcaaaaatcatcactggatgctaaaaccattgggtgaaacatgttgggcactacatgcacacggtcgtctcagagtatcatcttgacacttcgagtatcatttcacagatcatacttattacaaagtagggggaaaatacctttataatgtagagatctggaggccaacaccttgacccagtgatcaaggttggcatcaccagcagcaggaca

SEQ ID NO: 766368 - DNA, 671 bp, Homo sapiens
gctggcccttcagtcaagctcctaggcattaatgataaatcagatatttgctcacatacactggcatggttggctaatcagtgaaatgatgtgttttattaggatagcccagagacctgagacatcaggtcagaacayattcttgaaaagtctccatcatgaacatttcatattgcccaaaggagtctgtccattctttaaaatctttgtttcaacactgatattgaacttgtgcatttcctcattagcaaaacacatcattccttactgctcaaagcctgtagagagaagtctgtgttctcttggattctgaaagacagtgcaggtacaaacggacccacaggctcagggaccagacagatcaggatgaaaattccagctctgccactggtggctggaaaagtgacacagtctctctgagccttatttcacagctccccatttgcaaaatggagatacaccaatgactttgcagaggctttgtttttttgtttgtttctttcccccagagaagattgtaaagctttattgaaagaatttaagtcacattttcaatataacaccaacatgtgtggcttcagcttgtcttctttttaacttatggctgcccagcacctgcttctgtaatttgagcattccctagattaggtggagtctcccctttcacatta

SEQ ID NO: 766369 - DNA, 546 bp, Homo sapiens
ttttgagacagcttgctctgtcgccctggctgaagtgcagtggtgcgatcttggcccactgcaatccccgcctcctaggctcaagccattcttgtgcctcagcctcccaagtagctggaattacaggcgtgtgccaccacgcctggctaatttttttttttttttttttttgtatttttagtggagaaggggtttcaccatgttggccaggctggtcttgaactcctgacctcaagtgatctacctgcctcggcctcccaaagtgttgggattacaggcatgagccactgtgcccagccacatgacaccttttttwaaaaaaaaaaaaaaacaaaaaacacagatctgattgtaatgccctcttggggaaaactctccagtggttccccattgctctggggatgcagcccagacttctcataaggatggttgataggaccctgtgagatcagggctgcctgcctttcccttcggatctccctctgcactgaactctatgccctgagccttgaagccttgcttagcccctccggatcacctagaatc

SEQ ID NO: 766370 - DNA, 618 bp, Homo sapiens
tgtttgctaaagtcagtgatttgcccacacatagctccttgttggaaaagcagccatttgattgatgttatgtatgaattataatttacaaataaattattgaaagcatatgaggtccagtcagatgagatccacagggggaaaaatacacatatgagggaatccagggtttgacttttccatttaaccagtttttcattttaatattttaaacagttgcagagtttagctactaatggtccagatttttgagmtaggcataaacgagttagttgtccttggtcttactatttcagttcaacatacattatttaatgtagtataaataactacagcaatcataataaacatttattgagattgtaccatttatatttactatttcaatataccatgtatattcatgattttattttacagttgacccttgaacaacatgggtttgaactacgcgggtccacttataggtggattattttcaataatttgaaaaaaaaattcaaaaaattatttctaataattgaaataattttttcaatgtgttagaaaaatttttggacatctgtgacaatttgaaaaaacagatgacccaagtagcctagaaatactgaaaaattt

SEQ ID NO: 766371 - DNA, 617 bp, Homo sapiens
caggatgagttctattcccctgccctctcttctgggaataacttctaattttcctttggggaccattcctctctgagtagcagtctttgaggtctgggtggggctccaacctggccatcacaatattgtattcccctgggtacaatgactggtttagagatagacacaggaccaaatggagccaatgatgtccactgagctctttcttgggattgcagccaaagataattttgttctttcccacygaccttgaacctgagcagctgtgaactctggagctgccacattaccaacactgaaggcaccaccagcactggggacacagagccaaaagatggcaaggaggaactgggccctgaggacactgtgtgagcccctgtatcagctgtgcctgaagcgaggctgttggtttcttggtcaaaatgaaccaatacatattctcctttgctgaggctagcatggattaggttttctgacatctgcaactgaaggagtcctaactgaactactgtgcaatatagtctcacctttgatagaaaccccaatgcctggaagtccatctctagcaatatgttgacagaaaaacttggctcaggaggaggccagagagggacctc

SEQ ID NO: 766372 - DNA, 487 bp, Homo sapiens
ccataatcaccttctcccttcctatttgttgtgtccttctttttttcagtgttttatgaatactacttgttctaggcattacatccatgcctcgtcagctatgttttatgccatccatgtggtgctcccctcaatggccatagctgactaaactctaaagagaggtcatytgactcaagagcaaccaatctacagaccagccagcaagataggatttataatccaatacacaaagttgaactggctcagtcaagtttctttctcaggaatttgcatttgggaagttgcagaacttcaagtgattttttttcttaggtatttgaatttgaataatcatgtagattcacttctgggatggccattacaggactatgtgcattccaggttttacaggactaaggaaggccgttttgggaaaaaaaaaaaaaaagaggagaccaaaactgcttcatgggacagaagggggctggaaatgaaagcagtctag

SEQ ID NO: 766373 - DNA, 487 bp, Homo sapiens
ccataatcaccttctcccttcctatttgttgtgtccttctttttttcagtgttttatgaatactacttgttctaggcattacatccatgcctcgtcagctatgttttatgccatccatgtggtgctcccctcaatggccatagctgactaaactctaaagagaggtcatctgactcaagagcaaccaatytacagaccagccagcaagataggatttataatccaatacacaaagttgaactggctcagtcaagtttctttctcaggaatttgcatttgggaagttgcagaacttcaagtgattttttttcttaggtatttgaatttgaataatcatgtagattcacttctgggatggccattacaggactatgtgcattccaggttttacaggactaaggaaggccgttttgggaaaaaaaaaaaaaaagaggagaccaaaactgcttcatgggacagaagggggctggaaatgaaagcagtctag

SEQ ID NO: 766374 - DNA, 487 bp, Homo sapiens
ccataatcaccttctcccttcctatttgttgtgtccttctttttttcagtgttttatgaatactacttgttctaggcattacatccatgcctcgtcagctatgttttatgccatccatgtggtgctcccctcaatggccatagctgactaaactctaaagagaggtcatctgactcaagagcaaccaatctacagaccagccagcaagataggatttataatccaatacacaaagttgaactggctcagtcaagtttctttctcaggaatttgcatttgggaagttgcagaacttcaagtgattttttttyttaggtatttgaatttgaataatcatgtagattcacttctgggatggccattacaggactatgtgcattccaggttttacaggactaaggaaggccgttttgggaaaaaaaaaaaaaaagaggagaccaaaactgcttcatgggacagaagggggctggaaatgaaagcagtctag

SEQ ID NO: 766375 - DNA, 556 bp, Homo sapiens
ttagctgggtgtggtggcacacacttgtagtcccacctactcaggaggctgaggaggcaggatcaattgagtctcaaagatcaaggctgcagtgagctatgatcatgccactgcgctctagcctgggtgaaaaagcaataccctgtttcaraaagaagaagaagaaggagaaaaaaagaggactttgtcttgcaacttggaaaccagctcagccatagtaggacggaataactgggcagaatcctgaggctcccattccaggccctagctcctggatggtatttttagacatatcctgggcaaaaagggaatgggctaccttaaagggaaagacccagtcctggaaggatttgtcatctgctgacaaaagactccttgggccctcacgagttagcagtggtagccaggaagcactcgccaagggccttgagtgagactcagagacatgatggcttcagatgggatacagcccattcccagctgtggtggctacggggagagactccttctgcttgagaaaaggggagggaagagtacgggaactttgttttgcagc

SEQ ID NO: 766376 - DNA, 556 bp, Homo sapiens
ttagctgggtgtggtggcacacacttgtagtcccacctactcaggaggctgaggaggcaggatcaattgagtctcaaagatcaaggctgcagtgagctatgatcatgccactgcgctctagcctgggtgaaaaagcaataccctgtttcaaaaagaagaagaagaaggagaaaaaaagaggactttgtcttgcaacttggaaaccagctcagccatagtaggacggaataactgggcagaatcctgaggctcccattccaggccctagctcctggatggtatttttagacmtatcctgggcaaaaagggaatgggctaccttaaagggaaagacccagtcctggaaggatttgtcatctgctgacaaaagactccttgggccctcacgagttagcagtggtagccaggaagcactcgccaagggccttgagtgagactcagagacatgatggcttcagatgggatacagcccattcccagctgtggtggctacggggagagactccttctgcttgagaaaaggggagggaagagtacgggaactttgttttgcagc

SEQ ID NO: 766377 - DNA, 539 bp, Homo sapiens
gaaattttactctaggcctagtttagtcctactgtcaaggcatagctatttttgggtttcttctgtgcgttctggatgttgagctaggactttccgctggctgatcaggacttcagtttctccctgccctgtgtgagctctgggaatatttttttaggggatgggagatgtctttttttatgtctgttttttgccttatggagtttcatccacacaagcatgacttaatatcagcagtagagttaaatagaattccaggcaaatttctatagttaatttctctgtgttgctccatcttttctggtattctgttccacatattccatctaacttcaccttcctgaactcttatttctgtcttctcgacttastgagaccactgtcctttgcatctccttcccttcacagtagtcttcaaaaagccagggtgattatgaagctcacatcatttatttcccttcccctaggcatcacagtcctgagatagctattatcttaacgtctaaaaatagttgtttcatatattttatccagggttc

SEQ ID NO: 766378 - DNA, 578 bp, Homo sapiens
ctggatcctaaatagtatgtctttaattcttgcttactaattcttgagagcttccagaatcctgccctttccaagctgtagtgatgatccagcttttctgtccatcatatgagctacccagtatccttccataataaagcctttctgtttccygaaaactgccagtgtcagttgctgctccttagaaccaaaggatacttaccaaagatattttaattggacgaaaggaccaagtacctgaacagtgaaggctgttgctaagctgtccaataagaccaatctgcaggaggaacatccatgcattgaccaaaataaaccccactgtggcacagaggccacaagcaattctgagcgacatgcacggatggaggccaaagcagctggtagagggctgagcccaggaaaagcactgtgaggagggctcttacgagatcccccactaggcactggtgaggggatggggctcccccagtggcatcactaaggtaaactgagatgtatctatgttagatgtttccatgttagtcatttaagactcattttaactgcccagtgggttcactttgcccactgcctag

SEQ ID NO: 766379 - DNA, 629 bp, Homo sapiens
caattccacttcaccacccataataaatcccactgacttgaacttcagagcttacctacatactcagattgacttctatagccctagacatagaaaaaacaagtaggttgattgcatctttatagagccatattgcccaaattcacttgattgtatttttgatcacttatccatactatggagtagagtgaaatttctccaatacacaaggccaattattttgagatctttacaaagatatctctatctgtctatatattatatgtatgaccctatgcagaatgttgtagtttgtatgtgtgtgaagaatttaggcaagctgcaaactttaaaaggaacactccctaagaccatccccaactgcaagtttggrgggaagatttttcgaaactaccctaagttttggtaatttgcttagaaggactccgaaaattcaatgaaagctgttatactaacaatacaatttactacagggaaaggatatagattaaaatctaccaagggaagtgcatgggacagggtccaagcgaagtgtcaaatgtggagtcctgtccacatgcagtcatagacatgttactttcctgtatctttgtgtgacaatatgcagagtattgctaatcagggaagct

SEQ ID NO: 766380 - DNA, 629 bp, Homo sapiens
caattccacttcaccacccataataaatcccactgacttgaacttcagagcttacctacatactcagattgacttctatagccctagacatagaaaaaacaagtaggttgattgcatctttatagagccatattgcccaaattcacttgattgtatttttgatcacttatccatactatggagtagagtgaaatttctccaatacacaaggccaattattttgagatctttacaaagatatctctatctgtctatatattatatgtatgaccctatgcagaatgttgtagtttgtatgtgtgtgaagaatttaggcaagctgcaaactttaaaaggaacactccctaagaccatccccaactgcaagtttggagrgaagatttttcgaaactaccctaagttttggtaatttgcttagaaggactccgaaaattcaatgaaagctgttatactaacaatacaatttactacagggaaaggatatagattaaaatctaccaagggaagtgcatgggacagggtccaagcgaagtgtcaaatgtggagtcctgtccacatgcagtcatagacatgttactttcctgtatctttgtgtgacaatatgcagagtattgctaatcagggaagct

SEQ ID NO: 766381 - DNA, 536 bp, Homo sapiens
gctgtcccacttctggatatatatccaaaggatttgcaatcagtatgtcgaagagatatttgcactatggtcatttcagcattacagtaaccaagatatggaaacaatctaagtgtttgttaaccaatggacggataaacaaaaatgtagtatatatacacaatggaatactatacagcatttacaaagaaggaatttcagtcatttgcaacaacatagatgaacctggaggacgctgtgttakgtgaaagaagccagactcatggaaaacaaatcatctcacttttatgtggaatcttaaaaagttgaacccatagaaggaaagagtagaatgatgactaggggaagtggtggaaggggaaaggagaactgttagttaaagggtgcagagtttcagttagacaagaggaataagttatagtgatctattgcatagcatggtgaccatagttaatgatgtattgtctacctcaaaattgctaaaagaatagattttaaatgttttcaccacaaaaaacaataggtaaaatggtgaa

SEQ ID NO: 766382 - DNA, 608 bp, Homo sapiens
tagagaattcaatgagcactaggtagccctgaaagcactctaggctgtgattaccaagaaatagactaaaagcattttaagagaatttctgcctagatatctgacttggcctccaggagacacatttctctgagactagcaaatttaattttgaacttttttttcttttgatagctaattggcccttatgaattattaaatcagcagctcyttaagaaatccacacccagagctgatgaagagaggaagtctctggggctgtggtcttcagaaagcttaagccattttctgcaaatattttatttataaatgactatgaggaaactctagcctgtctctgactttatgaatgtataaacgaaacaggtcatacctaggatcccatgggagcatcaaacacaaacactaagttaatgtaacttagagtagcccccataaagagatgacacaatgtagtggaaggaatgctaagctgaagagtctgaagacccaagtttaaatttctggctctgccactttcttgccagtaagaccttgagctaatgagttcactcctctgtgcttcagggtcttcagctataaaataagacagttggactaactttcaa

SEQ ID NO: 766383 - DNA, 565 bp, Homo sapiens
catctccagggtccagtaacaatgccagtgttgcatccagagtcatagagggacagcatggcctggatgcccacgtacatggacagggtgttgaaggtctcaaacatgatctgggtcatcttctctctgttgcccttgggtttcacaagggcctccgtcagcagcaccaggtgctcctccggggccacacgcaactcactgtagaaggtgtggtgccaaatcttcttcatgtcatcccagttgatgacgatgccacgctcaatggggtcagagtcccaatcttcagsgtcaggatgccatgcttgctctgggcctcatcacccacgtaggagtccttctgacccatgcccaccatcgtgccctggtgccaggggcgcctaaggatggaggggaacacggctacagggggcgtcgtccccagcaaatccagctttgtacatgccggagacactgtcaatgaccagcatggcaatctcttcttccattgtgacaggcggaggagcagggcggcagagcagtaggaggacatggtgcacgggctggcggcagcgactgtgtgatactc

SEQ ID NO: 766384 - DNA, 603 bp, Homo sapiens
cgtggccaatcttcaccaccacagggaacgtgggcagtgtcagctgaaatcagaagagaaatgaataaactgtcagagtgtgcccatctctccgtggaatcctacacatatttttcttgggaatacccttgggagggttctttaaagaactagtccaatctacttgctttacagattaaaaaactgagacccatggaatgacagtgagttcccagggtcacasagcatattagtggcagtgctacaagaaccctgtactcttatttggtataccctacatctttaaaatgcactgtcaattttctctgcattagacaaaacctgggcaggactggccctcagacaaagagaattaaaaaaagaaagtatctctgaaagagtgaactttactatatgtagatgtactttaataaacctgtatttttattttaaaaacacatctttggcatcttgatgtccctgtcagcatgtaccctcttggtacctacaaccttcaaaggcccagctttcctgtaatgatcctggttgttttctccctctttcacactcttcactgctcaccaataccccaatctcaccaccaaacaaggctttgcatgtgaa

SEQ ID NO: 766385 - DNA, 537 bp, Homo sapiens
ttaaataattaaacattgcaagttttgtaaataatgactagtatttgtatatcatgttaaagttcacaaaatgctctcacatttattatatttcttaattctcccccaaattttgtgatacttctatttaaagttgaagaaattgcatcttaaagagttgaaataatttgcccarggtctcacagttgataactgctctagataggactagagcccaagcttcaggtctgttaaaaatgctgacttgccttgtgttttcttgaaatcccagttttctttaagggatttgtagatattgttgtttaatactatggaattatcctgggagctcaatggaaaggtaatgtcttcctgtgaactagacagttataggagacctgagaatgtttcagctgcaagtggatctaaagaaggagggtgtagtgggttgaatagtgttcctttctgcctggccctccccatcccccaattcaggtccacctcaaaatgtgacttatttggaaacagtgtctttgcagctaaggatcttgagatgaa

SEQ ID NO: 766386 - DNA, 537 bp, Homo sapiens
ttaaataattaaacattgcaagttttgtaaataatgactagtatttgtatatcatgttaaagttcacaaaatgctctcacatttattatatttcttaattctcccccaaattttgtgatacttctatttaaagttgaagaaattgcatcttaaagagttgaaataatttgcccaaggtctcacagttgataactgctctagataggactagagcccaagcttcaggtctgttaaaaatgctgacttgccttgtgttttcttgaaatcccagttttctttaagggatttgtagatattgttgtttaatactatggaattatcctgggagctcaatggaaaggtaatgtcttcctgtgaactagacagttataggagacctgagaatgtttcagctgcaagtggatctaaagaaggagggtgtagtgggttgaatagtgttcctttctgcctggccctccccatcccccaattcaggtccacctcaraatgtgacttatttggaaacagtgtctttgcagctaaggatcttgagatgaa

SEQ ID NO: 766387 - DNA, 621 bp, Homo sapiens
ttcttgaaatcccagttttctttaagggatttgtagatattgttgtttaatactatggaattatcctgggagctcaatggaaaggtaatgtcttcctgtgaactagacagttataggagacctgagaatgtttcagctgcaagtggatctaaagaaggagggtgtagtgggttgaatagtgttcctttctgcctggccctccccatcccccaattcaggtccacctcaaaatgtgacttatttggaaacagtgtctttgcagctaaggatcttgagatgaaatcattccagatataaggtagatcctaaatccaatggctggtgtccttataagaagaagagaagatacagagagcagcacagagaggagaagcccatgtgaagatggaggcagagattgcagctaggcaactacaagctagggaatgrcaaggattgcttgtaaccactagaggctggaagaggcaaggattggatgggccctacagccttcggagggaacatagcccggccaacacaccttgattttagacttctggcttctaaaaccgtgagaataaatccccccacaccttttttttccttctcttttctcttttttttttttttgtgagacagcat

SEQ ID NO: 766388 - DNA, 628 bp, Homo sapiens
tattctgtagatgtgtattagatacaatgggtcaagtgtcaaatttacatccagaatatttttgttagtattctgcctcaatgatctgtctaatgttgtcagtggggtgttgaagttcctcactattattgtgtggctacctatgtctttttgcaggttgagaattacttgttttatgaatctggatgctccattgttaggtgtgtatacatttagcatagttaagtcttctttttgaattgaaccttttatcattatataatgcccttctttgttcttttctactgttgttgatttaaagtctattttatctgctacaagaataacaactcctacttttttttgttttccatttgtgtggcagayctttctccaatcctttactttgatcctgtgggtgttgttatgtgtgagttgagtctctggaatatagcagatggatttgtcttaaattttcataccatttgctactctatgccttttaagtggagtgtttagaccattgacattcaaggttaatattgatatgttaggttttgatcctattatgaaattcttagctgattacttcattgtttctattgtgtgggtgttttatagggtctgtgggctatgtactcaaatgtgt

SEQ ID NO: 766389 - DNA, 628 bp, Homo sapiens
tattctgtagatgtgtattagatacaatgggtcaagtgtcaaatttacatccagaatatttttgttagtattctgcctcaatgatctgtctaatgttgtcagtggggtgttgaagttcctcactattattgtgtggctacctatgtctttttgcaggttgagaattacttgttttatgaatctggatgctccattgttaggtgtgtatacatttagcatagttaagtcttctttttgaattgaaccttttatcattatataatgcccttctttgttcttttctactgttgttgatttaaagtctattttatctgctacaagaataacaactcctacttttttttgttttccatttgtgtggcagacctttctccaatcctttactttgakcctgtgggtgttgttatgtgtgagttgagtctctggaatatagcagatggatttgtcttaaattttcataccatttgctactctatgccttttaagtggagtgtttagaccattgacattcaaggttaatattgatatgttaggttttgatcctattatgaaattcttagctgattacttcattgtttctattgtgtgggtgttttatagggtctgtgggctatgtactcaaatgtgt

SEQ ID NO: 766390 - DNA, 600 bp, Homo sapiens
tattatgaaattcttagctgattacttcattgtttctattgtgtgggtgttttatagggtctgtgggctatgtactcaaatgtgtttttgtgattctagatattgtcctttcatttccacattcagagcacccttagagatctcttgtaagggaggtctagtggtaacaaattcccttagtgcttgcttgtctggaaaaatgttatttctccttcacttatgagccttagtttggggaatataaaattcttggtttgaatttctcttctttaaaatgctgaaaatagccctctaatgtctcctgtcttgtaacatctctgttgagaaatctgctgttaggttgatggagttccttttgtacatgatctgaccttatctccagcttccttttcattttttaatttttttwaattttattctccagcttcctttaagatttttttctgtagcattgatcttggagaatctgaagactatatgccttggtgatgttcattttctattgtatctggcaggtgttctctggatttcttctatctagatttgtacctctctggcaggattaggagaattttcttgaattattcccatatatatttt

SEQ ID NO: 766391 - DNA, 640 bp, Homo sapiens
aatgtgtgctttgaattatttttatacaggtaaatacacctgaacttggggcagggaaggcggcactttaccacagtatgcaaaggaaggatgggccagctcaggctgctgattcaagcaagtggtcacactaaatgcctagagatctgcctggacatggagcagagaggatgctgcttcattataatgtctgtgcgggaaggatgggttagcttcagctgccaatccagggaggaccctagagtctgggctcttagattcccgttttgagagggtctagtagatctaggtttgaaccttttgtccaccattaccrtcctatgaacttggccaacaaactaactactctaagccttggtatctacctcctttataaaatggggacatcaacaatagctaggcatagagggtgatgatatacagcttaatgaggaaatgtaaataaagaacttagcaaggtaccatagtacatgaaaacaacttaaaaagttattagctaaaattattaatataaactttgtattttaggtcttccagaggggctgatattttagctgagtctaaaggattgcaaggtattcaactaatgaataaagggaaaggaatgggcattctgagaagaggaaataccaagtttaaa

SEQ ID NO: 766392 - DNA, 494 bp, Homo sapiens
gacttttgtctcattttctgcaatgtgaatataatatggttacatgtagatgttttgatgtttatgctgattggtgttctctgagcttcctggatgtaactgtgggttgttatctgtaattaattttgaataatactcaaccactattactgcgaatactcctgttcctctctgcttcctctttctggtattatcattatgtgtatattacaacttttttttttttccacaggtctcagatacttttattcttttcatttttttcttatttcattttgtagaaataattttgtagaagtagagtttatattgacatatcttcaagctcactgwttctttttttggccatgcccattctattgaccagctcatcaaaggtattctttattcctgttacagggtttttggtttctagcatttcttttttttctttctttttttttttttttttgagatggatggagtctcactctgtcgcccaggctggagtgcag

SEQ ID NO: 766393 - DNA, 609 bp, Homo sapiens
aaatccactttcctctagtctactcaagattgtcactctagcaaattaattatttactctactgagttatccattttcccatctttactggatcattcactttagcatacaaacatgctgcaaattatttcatgttcaaaatttcttcatctgactttcatctagtaacctgctttccagtccttgttacagaaaaccttctcaaaagggctgtcaccatctctatattctcttcttgagctcatttctctcagacttctcccattctcastcaatgggaactcaactgagtgagaatgaaaattttcttatcgggattactcaggacctccatctgctaaatccagtggtcaattttaagtttttcttatacctgatctactagcagcatataatagagtgagtccctccatttttctgcaaagtctttcttaagcaggcttctagaacaccatactctctgatgactttcttcttacttgaccagccacttctcttcctctccctgactgctccactttaatgcgactcaaacatacttcacagagctccgtactctctctttgggtcacctcatccactctcatagcttttggtaccatctctacc

SEQ ID NO: 766394 - DNA, 471 bp, Homo sapiens; identical to SEQ ID NO: 753892

SEQ ID NO: 766395 - DNA, 539 bp, Homo sapiens
tactccctagttgtactattaacttttataagattaaggcaacagtgccctgtattacagatatctctctcactcctgtggtcatcagtctctgctctagaatcggatcactgatcccttgctttactatagttataaagtttctctagtaacattcaataaatattttcaactgttttgtttctaatttaataaacaaagggacaawcaaaagcaacaaattttactgatagtgccaaccactagaaaacggaaattctaaagatttttgttgcaatattttaacttgtttttcctacagggccatgtagtttttttgaaatctgtgcatttggatgttagaatctgaaagagggtaaagagaaacctttggcaagtgtttggtcttctttctgcaatcttggcaaatcttgatctgtctatgtgattatagctgacacaggccacagtctgattatatggagatttcttttttgacatcaactggcatattcaagctagaacctgcttttgatatggataagaaaaaggggcaggga

SEQ ID NO: 766396 - DNA, 539 bp, Homo sapiens
tactccctagttgtactattaacttttataagattaaggcaacagtgccctgtattacagatatctctctcactcctgtggtcatcagtctctgctctagaatcggatcactgatcccttgctttactatagttataaagtttctctagtaacattcaataaatattttcaactgttttgtttctaatttaataaacaaagggacaaacaaaagcaacaaattttactgatagtgccaaccactagaaaacggaaattctaaagatttttgttgcaatattttaacttgtttttcctacagggccatgtagtttttttgaaatctgtgcatttggatgttagaatctgaaagagggtaaagagwaacctttggcaagtgtttggtcttctttctgcaatcttggcaaatcttgatctgtctatgtgattatagctgacacaggccacagtctgattatatggagatttcttttttgacatcaactggcatattcaagctagaacctgcttttgatatggataagaaaaaggggcaggga

SEQ ID NO: 766397 - DNA, 587 bp, Homo sapiens
ttaaatttgattgaaatgtttttgattaattgttataaattctctgaatggtaaggtaaactaagcagttttattttcaaaattctgtctcaagaaatgttccttttatttacattagtcctgcttagaagtggtcttgctgcaccgtatctggtgcatgcaaatcatatttccttcagaacataacacttaatatgagagaaaagtatgcctcaggcataattctgtgagttaacaactctcttctcccaagcagcattcctttggtaacaaggaaagaaattaaacaagaaaaagataggaatatccttttctctagccctttggctaaaataagttttctaccttttctcaatcacctggacwcacatttttggtctcaccttctatgtcccaactccttcccttccccacctcccacaaggcattttgtagatcaaatatttccattagttggtaggcatagagatatatctggtggctggttaaagaagaaaacatatttatcaagttccttcaaagtactgtgtgctatttcatattatatcttatttcattgtacaatagccttgtaaaataaaaatatg

SEQ ID NO: 766398 - DNA, 606 bp, Homo sapiens
tctcttaatactcttctcgtaaattattccgccctagacacactgactttctcccacatcttcaaacatgctaggcatgcccctgcctctgagcccttgtaattgctgtgtcttctgcctagaatgttctgcccacaagatttgtgcaggacaattctccagatggccttggactgaccaggtttttctccctttcttgcttgtagttctcaacagtaactgtatgatggtctgataatgtaacttactgagatagagactggctagaagagcctaggctctgtttcagtctcaccagaacagcatgtccttcaatgatttagcacagtaagtcatgtgaccccaggatataacacccagggcaggctgctttccagggtcccttatctgctatgcaagtgggttacatgcaattgagactccatccaccctaggcagatttctgagcyttgggggagcagctcacaatgagtcctaggcttctgatgttttttgctgcctatctgtaagtaataaacccatttcccataacttgcatatgagtatgttctgtcacacaagttggtaaccagtgcatggtgagcttgcttcacaagttgcagggca

SEQ ID NO: 766399 - DNA, 587 bp, Homo sapiens
gtatatttcctaatcttctaaaatctgtccatattgataaaaataattaggaatttgtattgggtagaacatagcaaaagattaagattttcctggagatgatctcttgatctctttctacgaaaaatctgattcaacaattcaacccattctttcctattttggtagccttgttttgtttgaaggtagatgaggtcactgagactattatatacctcttaatctatctgacttttttaaggtaatggaaaataattgaaataatttaacagttgaaagagtcacagatgttattctttcgaaatagatgtaccttttcttccccaccattggtgcatgaaaagcctctcyggaatagacagcattcattaaatgttcttttaaataattaaaactgtgattaatattcagcaatgaccagagacagtaatgattacactttatatttctagtcttagatgctaactctagtaatgacctttgataataacatcagctagatacctatagccaaatataattgtaagctgacaactgtttgttacatttttgtagtatttcttgtgttgactcttaaaactacaaaa

SEQ ID NO: 766400 - DNA, 639 bp, Homo sapiens
atcatgcttttttaatccaatcatactcctcaatgacttaccacttctctatcaaacctagcataaaaatacacaagttttcctgtttctttgtgttttcctttccctatgtaaaacttatctttaataaatgtacatgcttttctcttgttagtttgtgttttgttccaaggatttaatccacaaacctaggctgggaagaaacgataattactttctcctacatgagcaaggaaataaaaaagacagatctgtattttggatacattattcagtagcaagatcatcttctcccatcagcaccttcttcaagtaatgtgatgacaccatttcttgtgtgcttggaaaaagtttcagcttgctgtctcctttgttgttttaaagaagtgttagacaaagcattgtttgcaaaatctagggagataatggagtacactttratttgttattctgtgtgagctatgatctaagttattggctctttccaactttaaaaatttttgttgttaaaagcaccttgcttaggaaattttaaatatttatgtctgcaacaattgtctcaaaataataaactgtgccattcctgtcattaaaaaaagacctgaattctttctgaaaaaatagcaagatcaaaagtgg

SEQ ID NO: 766401 - DNA, 591 bp, Homo sapiens
tattacaggcatgcaccaccatgactggctaattttgtatttttagtagagacggggtttctccatgttggtcaggctggtctcgaactcgtgacctcaggtgatttgcccacctcggcctcccaaagtgctgggattacaggcatgagccaccgtgcccrgccatttattatattttataagtcaagatctttcacatcatttcttagtgaccatatctttgatagaaggctctcctgtcttcagtacatgtcacagctgtggggacagcggtttctttatttagtagccatctggactaggtgtcagttctctgtaatttttaaaggtagtgacactggcaattactgaaatgtcaaaacactaggccaaccatgagggctgtggcaaaaaccttcccacatagttgtcatggtgatgtgggcaaactcatatatagcatctgacactcagccataaaattgaaattaaagttagctttttataatatcttagagaatggcacctgttataaaacaggtataccgtaccaaaacacctacatgcatatgaagaataaggttatgaataggcagaggaaacatctgtttt

SEQ ID NO: 766402 - DNA, 528 bp, Homo sapiens
atgaattaatgaaaggaccacatgaccaggtctccttttgcagtgcattggaatcatcctatctcagagttgattcataaattgccccaactagaaggtccctttgcgatttttgaaagagatagtgatcatctcttccagctcattctttttgcaaaggatactagaaagggaaaattttatattcaagctaaggcccaataattaggccttttactataccttattgtctcacagaggaacttagcaaattcttgttattcaagtaactactgagcaaattagtaagyagcagaccaaggaaaaacagaggtcgtcaatggggcatagtgaaagggacatgggctttggtgtctgccaggcccgatttcatatactaactccagacgttcttagcagctctataccatggaacaattaatctctagaagtttccgtttttcctccttaaaatgggaggtccaacctgttataagaattagaattttctctgtcaaacatctaagagctcctggtgttgagtgtgta

SEQ ID NO: 766403 - DNA, 610 bp, Homo sapiens
accatgtttgctggcttcctgcacttagggagctggggccacaaaggctaccttttgttttaaaatgactctgttccaccgggcatggtggctcacgcctgtaatcccagcactttgggaggccgaggtaggcggatcatgaggtcaggagtttgagaccagcctgaccaatatggcgaaacccccatctttactaaaaatacaaaaattagccaggcttgatggcatgcacctgtagtcccagctatgygggaggctgaggcagaagaattgcttgaacctggaaagtggaggttgcagtgagcagagatcctgctactgcactccagcctgggcaagagagtgagactctatctcaaaagaaaaaaaaaagtctccattcctttcagtcaagcaagtacaattaaaaatgttgtgtttcctgtgtatctgattacaatccactgcattagacaaaagccacccttagtttctttcggagacaagccttttctgctttggaccctgcatctactgctgaggaacaatgccctaaagattcttagaggcctttttatctagctgagaggatccacctggcaaatgcttaaatctttctgaaatatcaaca

SEQ ID NO: 766404 - DNA, 604 bp, Homo sapiens
ggatcctttggtcctatctgtctgtctgtctgtctgtctatttatttttgagacagggtcttaccatgttgctggtctcgaactcctgggctccagtgatccccctgcctcagcctcccaaagtgttgggattacaggtgtgagccactgcacctggccctcagttctcttctgacttgacctctgagcagtgtaagatgtcattgactgctctcttctatcatcctcttttcatgtcttccctgacattgcacaatcctcattttttatcctacctctctggttgtcccttctctgtctcctttgcaggcttgactgttaaatgcttgggytcctcagagctcagtccttggccctcttcttatctcaccccggcctttcgctctgggcaacttcaccctcagctacagttcccagctttgtacgctgacggttctcacattcctctcctttgacacttccatgtgaatgtcccaaagcctctcaacctctatatatccagaatagaaatcaagcctttccccccaaaacatggttgttgtctagccatccctgtttcagcaaaggtctcacaatccttccaattccgaatgtcacaaaccca

SEQ ID NO: 766405 - DNA, 649 bp, Homo sapiens
ataccccttcattcttaacctgctcactggtttcctactataattacagtctcaaacagtggttgcattctggcaaacgatgttttgagttagagttgttatgcagttagtcagttgtttgtagttaaaaagtctcttttttattcactgaaatgactggagtctcagctgctaggattcaaaggcaacagggaagacttcctagagtttcacgtgatcataaaaacctttccagacgttttaagtgattatgatttctatgctgyattgacttacaattagagatcattcaagtaacttagaattcagtaacttctaggtcacagagaggctcagatacacactgttgacagccttttgtttgacaacgggtggtgtctttgtatgtgtgtgtgtgtgtatacatacatacacactaaactgtactgctgtatgtgtgggaaaaagtctaaatactaagcatttttcttctattttgggcaagtatctgtgctcaatggatgcaagttggtatctaaaatctgaaaaatgcaaagataaatggatcatcggtgtacttcaagctttattttcttgcatagttttttcctagtatttcctgacaacctagaacagtagttctcgcctttgactgcctattgccattgcc

SEQ ID NO: 766406 - DNA, 604 bp, Homo sapiens
aatgttttcttgaacactcacatttaatcaatgaccttatatatggtcagttgtttatcttgaaatgaatgggctcacttggttcactttcaggaaaatatctgacctatatctatctgaacaaccataatttgtcagtcataactttaaagtaaagatgatgtccagctcaggactcaagcaatgatgcaattaagaaatagagattgtcataatactttgacgcatagcagaattattttatatctacttcccagttcactagaatgwtagaaagtatgtattccaaggtagataattaataacattaataatttttaagtgcttcaacaattataatcataagcaaaactgtttttgttttgctttgttttgagagttttttactctgagtatatggacattaaatatcacctgactaccagtaaatttgatgccagtgccaggctggaatgtagtggcatgatcatggctcactgcagcctcaacctcctgggctcaaatgatcctactgcctcagcctcccaagtagctaggactacaggtataagccaccacacccagctattcgttttatatatatatatataattatatatatata

SEQ ID NO: 766407 - DNA, 505 bp, Homo sapiens
atcacgttctcgcccttgtcgggaagcagaggaaaggaggaatgaaccaaatcttcccttgcttagcgctttcaaaagattagctcacccagtcaaaacaaacaggaaagtaaagacaaaactaaaccagcatgataacttgttacacaccagcatgataactttccccaccttagtaaggaggaaaaaaggactggggagtcaaggcagctacattaagaaaaacccctcctcatgaaaagcagacaagtgcagaagtcataccttctgtgactcatttgatttaaaaattatgtggaaagcataaaggsttggttctaaatgaaggatgactgtctctttctcttccccagtcaggttctataagtgagtaggagaaacaactttgctaattttattgatgcaacacttttcctctccatatttcttcttgttattagtagctgtaggttatttggtgagttctaaagatgggcatattattgtgatcatttaacagtaagga

SEQ ID NO: 766408 - DNA, 615 bp, Homo sapiens
aacttacaaagcttaggggctgtaaaaccaataaaatctgctccatttctaaaccagtcgttcagaatgtactctaaattatgaatgaatatgattttttgaatttcaaatcctagtccactaactagagtccccaaagcccttagcttacgaacagattatatttcmaatgagtaatcacaggtgctaggaagctggaatgcattttcccaaggtatcctcaatgttagggaaggaccgtaagttcggaaggatagtggtaaaaataggagaccctgtatgattaaatattaaataagatggtccctgtttacatgtacttaacagtagttaataaatggaacaattttaagaggtgaccaagtgaggtcctttagggttttcttggaggatttaaaaaggtgcattgcgggctgggcccggtggctcatgcctataatcccagcattttgggagcccaactcaggtggatcacagggtccggagatcgagaccttcctggctaacatgttgaaaccctgtctctactaaaaatacaaaaaactggccaggtgtggtggcacacacctgtagcttcagctactcaggaggctgaggcaggagaatcgcttgaac

SEQ ID NO: 766409 - DNA, 665 bp, Homo sapiens
agatttgcaaaagagcagttacgtgtgtgtgtgtgtgtgtgtgtgcacgtgcacatgctaggcatttcaattctcagctttataatctctaaattataccttgtcactgttatctcattaggcgtacataattaatcttttcaaggaataattccagaagacagagttataatatttcacatcactctaactattgctttatactctctcataacatgaggacttattcctattgaacttttaataagttatatcttctgtatttgtagatataagtgaaaaatctacagcactcatagagagggatacattatgtaagggctatcagaagtaaggacatctactactaattaataccaagggtattcatgtctatatctttctaaaaagtgaagtttcttaaaattataaatgtaattaaaatgcmatgtataaaatagatttaacaagtcaagtcaattatttaagcatttccatggccaataagaaaataatattgataacgtagcacgtaacactgatgtctcttaaaaaatgtaggaaatattttcacttgaaaaatgtaggaaggttacatgaatacaagagttaaaagatctgatatttcatagtcagatcctaatatttgaagtcattattacttttctctttttttgtttcacatg

SEQ ID NO: 766410 - DNA, 626 bp, Homo sapiens
ataagaactagtgattgttcactgaaaaagacaaatattagttctatcttcatgacattatatgttgctggggagatggtggtgaccagggaaaactgttcagaggaaaatcctggcctgatacatttaaaagaaagcaggtaaatgcgtaytcatcttttttttttttctccaacctcagtagatctaaggacattaatcagaccttgggataattatatatagctgtgctatgagtacgtggattcatttataattccattggtagtagataatgcaattaagtacaaaattctgcagaatctattatatcgttgtttgacgaatcaaataatgtattctgcatttttattctcatgaatatttcccttataaatagatgtctaaaatgaactattttgcatatgcttgccttatgaaagtaggcttatccactggaaatacaaagctgttttaagcatatttgtgtgtttaaacatgcttacgcatgttttcaagcataattgaaataattagaataagtttcattatcacctttcaccttttatgctagatgctggatcaagtcaaaactggaattgcaagtcaaacatcttgatgagatacagaattctgtaaagggaaga

SEQ ID NO: 766411 - DNA, 650 bp, Homo sapiens
ggatcccttttagttatgcaaatttctgtagcaaatgggtgttctgctgcctgctacaattcctctcccagaaaagctttttctttctctgctacatggccaaccttcaaatttcccaaacttttatgctctgcttcctgtctaaatataaactccaaacttaagtcttttcttttctctcaaatctgagtgtaggttgttcaaagcagccaggccacatcttgaacactttgctgcttagaaatttcttctgccaaataccctaaatcaagtttgtccaacctgcagcctgctggccgcatgtgacccagaatgactttgagtgaagcccaatacaaattcataaactttcttaaaacattgtgagttttttgtgattttttttttctagctcatcagctatcgttagtgttagtgtatttyatgtatggtccaagaacaattcttcttccactgtggcccagggaagccaaaagattggatacccttgccctaaatcatcactctttagtttaaacttccacagatccttaggacatggacaaaaatggagacaagttttttgctaaggcataacacacatgacctttgctccagttcccaatacgtttctcatttccatctgagacctcataagcctggacttcatc

SEQ ID NO: 766412 - DNA, 623 bp, Homo sapiens
ctcggctcactgcaagctctgcctcctgggttcacgccattctcctgcctcagcctcccgagtagctgggactacaggcgcctgccaccaagcccagctaattttttgtatttttagtagagacggggtttcaccgtgttagccaggatggtctcgatctcctgacctcatgatccacctgcctyggcatcccaaagtgttgggattataagcgtgagctgccatgcccggcctatcagtgtttaatgttaacaatatatttttaaatctgtaaatgattctgatcatagacgatcatttacccatcaaccatagaatatatattcttctcatctgtacacggaacatactccaagatcaaccacatgcttgaccataaggtaagtcccaattagaaaaaaaagaaataccaccaaccgtagtctcagatcagagtggaacagaaacagacatcaatacaaagaagatctgtcaaaaccacacaattacatacaaattaaacaacttgttcctgaaaaactgttggctaaacaatgaaattaaggtagaaatcaaaaaattctttgaactaaatgaaaacagagacacaacataccaaaatctctgggattcagcagaagtgg

SEQ ID NO: 766413 - DNA, 623 bp, Homo sapiens
ctcggctcactgcaagctctgcctcctgggttcacgccattctcctgcctcagcctcccgagtagctgggactacaggcgcctgccaccaagcccagctaattttttgtatttttagtagagacggggtttcaccgtgttagccaggatggtctcgatctcctgacctcatgatccacctgccttggcatcccaaagtgtkgggattataagcgtgagctgccatgcccggcctatcagtgtttaatgttaacaatatatttttaaatctgtaaatgattctgatcatagacgatcatttacccatcaaccatagaatatatattcttctcatctgtacacggaacatactccaagatcaaccacatgcttgaccataaggtaagtcccaattagaaaaaaaagaaataccaccaaccgtagtctcagatcagagtggaacagaaacagacatcaatacaaagaagatctgtcaaaaccacacaattacatacaaattaaacaacttgttcctgaaaaactgttggctaaacaatgaaattaaggtagaaatcaaaaaattctttgaactaaatgaaaacagagacacaacataccaaaatctctgggattcagcagaagtgg

SEQ ID NO: 766414 - DNA, 623 bp, Homo sapiens
ctcggctcactgcaagctctgcctcctgggttcacgccattctcctgcctcagcctcccgagtagctgggactacaggcgcctgccaccaagcccagctaattttttgtatttttagtagagacggggtttcaccgtgttagccaggatggtctcgatctcctgacctcatgatccacctgccttggcatcccaaagtgttgggattataagcgtgagcygccatgcccggcctatcagtgtttaatgttaacaatatatttttaaatctgtaaatgattctgatcatagacgatcatttacccatcaaccatagaatatatattcttctcatctgtacacggaacatactccaagatcaaccacatgcttgaccataaggtaagtcccaattagaaaaaaaagaaataccaccaaccgtagtctcagatcagagtggaacagaaacagacatcaatacaaagaagatctgtcaaaaccacacaattacatacaaattaaacaacttgttcctgaaaaactgttggctaaacaatgaaattaaggtagaaatcaaaaaattctttgaactaaatgaaaacagagacacaacataccaaaatctctgggattcagcagaagtgg

SEQ ID NO: 766415 - DNA, 623 bp, Homo sapiens
ctcggctcactgcaagctctgcctcctgggttcacgccattctcctgcctcagcctcccgagtagctgggactacaggcgcctgccaccaagcccagctaattttttgtatttttagtagagacggggtttcaccgtgttagccaggatggtctcgatctcctgacctcatgatccacctgccttggcatcccaaagtgttgggattataagcgtgagctgccrtgcccggcctatcagtgtttaatgttaacaatatatttttaaatctgtaaatgattctgatcatagacgatcatttacccatcaaccatagaatatatattcttctcatctgtacacggaacatactccaagatcaaccacatgcttgaccataaggtaagtcccaattagaaaaaaaagaaataccaccaaccgtagtctcagatcagagtggaacagaaacagacatcaatacaaagaagatctgtcaaaaccacacaattacatacaaattaaacaacttgttcctgaaaaactgttggctaaacaatgaaattaaggtagaaatcaaaaaattctttgaactaaatgaaaacagagacacaacataccaaaatctctgggattcagcagaagtgg

SEQ ID NO: 766416 - DNA, 587 bp, Homo sapiens
ggtcttctctcatgaaccatgagacatgtgaatagcaagcctccagatgagtccatactccagcctttgagcttctccagtggagcagagataagctgatcctgccgagtcttgcccaaattaagattcatgaccaaaataaatgatcttgcttgaagtcactaagttcaggggtgcttggttgcacagcagtagataagtggaacacacatggtaacttgcaggtggaggtgtcctcagtctcattctgcttttatatrtggcaaatatttttcacaatgtctggcctttcatgttatcttccccatttcgtgttgataaagatattttcttatttttgtgctttcttcttcattttagtagaattgtgggtgaagagaaaataaaaatgtggtctcaaattgccaccttcaacagaaacttgtgatttagtttccaattcacataccatgttattccataaaacctcattctttatttgcacgtcagtgtcaattagtttattggtcagctgttgtcacttagtaaggccccgctctgctggactcttcctctgaccttgtctgtgtgcacagatgacattaatt

SEQ ID NO: 766417 - DNA, 631 bp, Homo sapiens
aaaataaaatttcagaggtaggttccaacctcctaaattatttagaaacaggaaactcacttaaccaagtactccatttcccaggcaagtcagttaactgaattgttatagtatagtcaatactcaatcaatactcaattacttgcattatagaaggtagcattagtggaaatggaaaaaaatgaataatcaatatagctgtgtttttgatgagattttgctgtctagtgcatggmaacttggtacaaagaatgtggcagcctccctgaggttgtagtagctggggacaaatgccatcttttttaaggagtatctatgtttctcatatttcttctgcctgtcccccaagagataccaggttgcatgacttcttcacatctcaaagcacagcccatgctcttaacctcatctcattgggtttgcatcgagatgtatgtgcacaggcagatgaatatgtgagtgatgagaagagcatctgcaatgattccttctgactacagccaagaagggtatagaaattaccaggtggagttagacccctgttcacataggagagtgttgtgagaggcaagctgccttctgccatattcagaaggtcagacagtctttagaatatcataactcatgacag

SEQ ID NO: 766418 - DNA, 232 bp, Homo sapiens
agaatccagacgcaggccctgttagcataaaggtctgactgatttccagaaacgccrtcatccatcaggggagaaaagattaatccattcatgagggctggactacttgttgatgacaattcaataacattcccacatatgtggagataaatgacacttttaccctctctcctctaataaacactgtactcctaaaagaacaaagctctagggactgaatctcaggagtgta

SEQ ID NO: 766419 - DNA, 612 bp, Homo sapiens
actgtctctcttaaaacaacaacaacaaacaacaacaacaacaaaaacagtatgctattgatagttaaggttttggggagtcaaaagttatatgtgaatttctttctgtgcagagggttggtactcctaaccccttagttgttcaagggtcaactgtctgtgtgtgtgggtgtatatatctacgtactcaatgcctacacaggggaagagtctgactgcaatctgcttttgagttctgacacacatccagccgctctctgaccatcatgctcccatgtggcctctcagataagccccagtttattagctttaataattgaaatcatactcctaattttttagccttccccaacaataaaataagaaagtaaaagtctgtcattgttggtctgttctatgttttagcctgtccatgaccaatccacagatattttttgagtacttgctrtataaaaggctgtgtgataaccactacaggggattcaaaagggaagaagcaacgtcactctgatcacaattttcctgtggattggacatctactgtattgcctgcacagcatccatttctctttgtctaggaataataataataataataataatcccaatttt

SEQ ID NO: 766420 - DNA, 599 bp, Homo sapiens
acacaaacacaattcagccaaattatttgccactttttaacaaggatccccgtttccgcagcgtaagcagaaatttatttctcacagttctggaggccgtggtctagagagttcaagaccaaggcactggcagatccagggtctggctagggcctgcctcctggtttggaaatggtcatttaccactgtatccttacgtggcagtaagagaactagccggctttctttcctcttcttataagggcactaattccattcatgaggggctctaccctcatgacctaattatttcccaaagaccccacctcctgataccatcacattgggattagagtttcaacattggaatttgggggttggggaaacaaacattagtcaattgcactctatctcagcacactgtatagaattttttttttttttttttgagacggattctcactgtgtcgcmcaggctggagtgcagtggcacgatctcggctcactgccagctctgcctcccaggttcacgccattctcgtgcctcagcctcccaagtagctgggactacaggcgcccacccccacgctcggctaatttttttttgcatttttagtaga

SEQ ID NO: 766421 - DNA, 624 bp, Homo sapiens
ctattaggatgtaggtacagttaaacaataaccagccattgtgccagaggttacaagatttgtaaccttcccaattgctcctataggtaacatcattattgtgaaaacctaagattagtctttgaggtatttttcagactcttgcatttgggcaggccagctgactccaccaggatctgtgactcataccaaggaactaattcaaccagtcctggagctcccacccaagaagtgacttcatgtaagaagacagctttgacccctatgatttcatccctgccccaacctatcagcatttcccattccctagccccctgcctaccaaactatcctggtaaaaaccttagcctctgagctttcagagatgytgatctgagtaataataaatccagtccttctgcttcactgggcctgcaattattaaactctttctctactgtaataccgctgtctcagtgaatttgccctatccatgcagtgggcaagaagaacctgttggacaattataatacaatttttgatagttcacatggatctaatattaacaactgcagtaaatacatagcaagtctatatgccaaaataataatttatttaataattgcaacaaccttctgagatagg

SEQ ID NO: 766422 - DNA, 624 bp, Homo sapiens
ctattaggatgtaggtacagttaaacaataaccagccattgtgccagaggttacaagatttgtaaccttcccaattgctcctataggtaacatcattattgtgaaaacctaagattagtctttgaggtatttttcagactcttgcatttgggcaggccagctgactccaccaggatctgtgactcataccaaggaactaattcaaccagtcctggagctcccacccaagaagtgacttcatgtaagaagacagctttgacccctatgatttcatccctgccccaacctatcagcatttcccattccctagccccctgcctaccaaactatcctggtaaaaaccttagcctctgagctttcagagatgctgatctgagtaataataaatccagtccttctgcttcactgggcctgcaattattaaactctttctctactgtaatmccgctgtctcagtgaatttgccctatccatgcagtgggcaagaagaacctgttggacaattataatacaatttttgatagttcacatggatctaatattaacaactgcagtaaatacatagcaagtctatatgccaaaataataatttatttaataattgcaacaaccttctgagatagg

SEQ ID NO: 766423 - DNA, 624 bp, Homo sapiens
ctattaggatgtaggtacagttaaacaataaccagccattgtgccagaggttacaagatttgtaaccttcccaattgctcctataggtaacatcattattgtgaaaacctaagattagtctttgaggtatttttcagactcttgcatttgggcaggccagctgactccaccaggatctgtgactcataccaaggaactaattcaaccagtcctggagctcccacccaagaagtgacttcatgtaagaagacagctttgacccctatgatttcatccctgccccaacctatcagcatttcccattccctagccccctgcctaccaaactatcctggtaaaaaccttagcctctgagctttcagagatgctgatctgagtaataataaatccagtccttctgcttcactgggcctgcaattattaaactctttctctactgtaatacygctgtctcagtgaatttgccctatccatgcagtgggcaagaagaacctgttggacaattataatacaatttttgatagttcacatggatctaatattaacaactgcagtaaatacatagcaagtctatatgccaaaataataatttatttaataattgcaacaaccttctgagatagg

SEQ ID NO: 766424 - DNA, 652 bp, Homo sapiens
ttttatgtcattgaccaatctcttcctatcctcccctccttgatacattccggagtcactaataactctgtacttttgtgacatcagctttttcagactccacaaatgagtgagaacgtgggatattagtctttctgtgccttgcttatttcacttagcatattgtcctctagattcatccatgttaccacaatgacaggatttcattcttattatggctgagtactattcaattgtgtatatatacaccacattttctttattcatctgttgatggacacttaggttgattctatatcttggctattgtaaataatgcwgcaatcaacatgggaatctcttcaacatagtatctcttcaacatattactttcaagttttcattttgctagcatgagaatgtatagcctaagagaatggattcaacacaattgatgtgatgaagatttgcaaaagagcagttacgtgtgtgtgtgtgtgtgtgtgtgtgtgcacgtgcacatgctaggcatttcaattctcagctttataatctctaaattataccttgtcactgttatctcattaggcatacataattaatcttttcaaggaataattccagaagacagagttataatatttcacatcactctaactattgctttatactc

SEQ ID NO: 766425 - DNA, 666 bp, Homo sapiens
tttgcaaaagagcagttacgtgtgtgtgtgtgtgtgtgtgtgtgtgcacgtgcacatgctaggcatttcaattctcagctttataatctctaaattataccttgtcactgttatctcattaggcatacataattaatcttttcaaggaataattccagaagacagagttataatatttcacatcactctaactattgctttatactctctcataacatgaggacttattcctattgaacttttaataagttatatcttctgtatttgtagatataagtgaaaaatctacagcactcatagagagggatacattatgtaagggctatcagaagtaaggacatctactactaattaataccaagggtattcatgtctatatctttctaaaaagtgaagtttcttaaaattataaatgtaattaaaatgcmatgtataaaatagatttaacaagtcaagtcaattatttaagcatttccatggccaataagaaaataatattgataacgtagcacgtaacactgatgtctcttaaaaaatgtaggaaatattttcacttgaaaaatgtaggaaggttacatgaatacaagagttaaaagatctgatatttcatagtcagatcctaatatttgaagtcattattacttttctctttttttgtttcacatg

SEQ ID NO: 766426 - DNA, 691 bp, Homo sapiens
taaaatgggtagtaagtgaatggatttccattgtgtttctttctttctttgtgttttttttacatttattctataaacaattgttttatattcttaaaatgagtaagtgtgaagcatcccgtttgtctcaagtggacatttctgagttactgagatattttagaatcagaccagtgacatgtcaacctgaaaattgttctcaggagtttggatttgaattgactttcagtaggaaatgtccatgaattctggattagaaagtattgctatgaaaattgtggttgatcatcgttaaactgtatattacatttatatacttcactgaaataagttaagaccagagaaaaggacagataaaatatcttttgyaggaggcaagtcatgagggtgattcctaacctaaattctaggggttgctatggagacacaaaggaaaaggcagcagctagatctattgcaaagaaaggagtggcagaatttggtttaagattctgcaattaaaggatttcagtttttttttctgtcattatctaggcagaccaagtgaagacatgaacaatataaggataattctgaccagaatatgatatgagagtattgtattaagagctgggagctggatctgagctacgttgttggataattgctctatttttttttttttttttttttttttttgctgctgctgcag

SEQ ID NO: 766427 - DNA, 691 bp, Homo sapiens
taaaatgggtagtaagtgaatggatttccattgtgtttctttctttctttgtgttttttttacatttattctataaacaattgttttatattcttaaaatgagtaagtgtgaagcatcccgtttgtctcaagtggacatttctgagttactgagatattttagaatcagaccagtgacatgtcaacctgaaaattgttctcaggagtttggatttgaattgactttcagtaggaaatgtccatgaattctggattagaaagtattgctatgaaaattgtggttgatcatcgttaaactgtatattacatttatatacttcactgaaataagttaagaccagagaaaaggacagataaaatatcttttgcaggaggcaagtcatgaggrtgattcctaacctaaattctaggggttgctatggagacacaaaggaaaaggcagcagctagatctattgcaaagaaaggagtggcagaatttggtttaagattctgcaattaaaggatttcagtttttttttctgtcattatctaggcagaccaagtgaagacatgaacaatataaggataattctgaccagaatatgatatgagagtattgtattaagagctgggagctggatctgagctacgttgttggataattgctctatttttttttttttttttttttttttttgctgctgctgcag

SEQ ID NO: 766428 - DNA, 605 bp, Homo sapiens
tatatatatataattatatatatatatataaaacgaatagctgggtgtggtggcttatacctgtagtcctagctacttgggaggctgaggcagtaggatcatttgagcccaggaggttgaggctgcagtgagccatgatcatgccactacattccagcctggcactggcatcaaatttactggtagtcaggtgatatttaatgtccatatactcagagtaaaaaactctcaaaacaaagcaaaacaaaaacagttttgcttatgattataattgttgaagcacttaaaaattattaatgttattaattatctaccttggaatacatactttctawcattctagtgaactgggaagtagatataaaataattctgctatgcgtcaaagtattatgacaatctctatttcttaattgcatcattgcttgagtcctgagctggacatcatctttactttaaagttatgactgacaaattatggttgttcagatagatataggtcagatattttcctgaaagtgaaccaagtgagcccattcatttcaagataaacaactgaccatatataaggtcattgattaaatgtgagtgttcaagaaaacatta

SEQ ID NO: 766429 - DNA, 650 bp, Homo sapiens
ctgtgcccacacacaaattgacagaatcgaggccccaaggttagcgatgattaaaatttaaaagtccattcattcattttcaaaatattttattcgattgcttctgaggcagaatcatgagttgccttcgcttttgctgctcccggtggtggcatccaactctgaggatagctcatccaactmtgagggtagctctgaggggagctaaatatcctcattgttcaatgagctagatgaaaacaaaacgaggctgtaaggtcaatctcacagccttagtggagtaaaaattagaagtcaataattctcttaccaacaaagaggacttgcattcaacaggattttcaaaagtggtatcctgtaaaaattttggaaaataccaccataatggaaaaaaaataaagtggcatataaatcaaatgtagtgctaaaaattataatttttccatatgaattttggaatcctaaaatatttttatgtgtttgtggattcataaggcatcagaactggctttttgcactgaatatgagtacagaaggctttcctctccaatagtgaattaataaaggataagtaggaaaaacgttacgaaacgatgtggtaacattatagactctgtattagggcaaaaattgtgagatagtagaagatc

SEQ ID NO: 766430 - DNA, 635 bp, Homo sapiens
atgatgacaaaaatttataggaaaaaggttttaattaccccaagtcgatttatataccattttgaatctcatgccattgattgggggaaaatttcctatcatcttctactctccagggtatacttccaaatggcataattctctgtcataaaatatttccaatttttcttcaaatttcagtagaaagggattgaatttgaagagtcatcaccgcagttctgctttcataaacaaaagcaaacaagcaaacaaaaatcactacgagtgttttgtaaagggagaaaggcaccaatagrttattaaagttgaattaccagggccatttacgctcattcccagtgcctgtgtcacacataacccctgaagaaggaaaatagcaatacttagtgaagcaggtaaacggaatttccagccaaggagttcaacagacaatctgaattctggctggccttttaactcagaggtaattacagtagatttgggggcctaaccttagtttgcaatatttttttaactgatattatattttatgcaggccaagtcaaacacttgaagggcagagggcaagatgtaattaaattactaccttatttatgttaattattcattcttattaaatgaggacaaagatgtga

SEQ ID NO: 766431 - DNA, 635 bp, Homo sapiens
atgatgacaaaaatttataggaaaaaggttttaattaccccaagtcgatttatataccattttgaatctcatgccattgattgggggaaaatttcctatcatcttctactctccagggtatacttccaaatggcataattctctgtcataaaatatttccaatttttcttcaaatttcagtagaaagggattgaatttgaagagtcatcaccgcagttctgctttcataaacaaaagcaaacaagcaaacaaaaatcactacgagtgttttgtaaagggagaaaggcaccaataggttattaaagttgaattaccagggccatttacgctcattcccagtgcctgtgtcacacataacccctgaagaaggaaaatagcaatacttagtgaagcaggtaaacggaatttccagccaaggagttcaacagacaatctgaattctggctggccttttaactcagaggtaattacagtagatttgggggcctaascttagtttgcaatatttttttaactgatattatattttatgcaggccaagtcaaacacttgaagggcagagggcaagatgtaattaaattactaccttatttatgttaattattcattcttattaaatgaggacaaagatgtga

SEQ ID NO: 766432 - DNA, 609 bp, Homo sapiens
taaagactagaataatagtcaccaagggctggggaagggagagagaagggggaatagggagagattggtcaacgggtacaaatttatgggtagatagatagaatatgttctggtgttctattgcacagtaggatgactatgattaacaatattgtggccgggtgtggtggctcatacctgtaatcccagcactttgggaggctgaggtgggtggattacctgaggtcaggagtttgagaccagcctggcaaacatggcgaaaccccgcctctactaaaaatacaaaaaattagccgggcctggtggcaggcgcctgtaatcccagctacttgggaggctgaggcaggagacttgcttgaacctggaaggcggaagttgcagtagctgaaattgcaccactgcactccggctgggcaacagagtgagactttgtctcaaaaaaaaaaawatatatatatatatatgtgtgtgtatatatatagtattctgtatctctatatttcaaaataggtagaagagacgattttgaatgctctcatcacaaaaaaatgacaaggtatgaggtgatgggtgtggtaaataccttgatttgatttttccataatatat

SEQ ID NO: 766433 - DNA, 601 bp, Homo sapiens
ctctaaagtactttgtcactagttcaaaaatactccaaaggactctggaggccaaggtgggaggattacttgaggccaggagatggaaaccgtgtctctaaaaacgttagctgggcatggtggctcgtgcatgtagtcctacattatgtaaactccaaagttctttcttgctagctcaaaagtatttcaaaggactcaggaggctgaggcagaaggattgcctgagcccagggttcaaggcttcagtgagctrtgattgtgccactgcgctccagcctaggcatcagagcaaggccctatctctggaaaaaaacaaaaaacaaacgaacaaaacacgccagagcaaaatgtcttagtgttcaatcattctttacacttgttttatttatttttaatttttattttttgtgggtacatagtaagtgtttatgtttatggggtatatgggatatttcaataaaggcatacagtgtgtaataatcacatcagggtaaatggagtatccatcacctcaagcatttatcctttgtgttacaaacaatccagtcatactcttgtagttatttttaaacgtacaattacattattctttatgcctgtt

SEQ ID NO: 766434 - DNA, 587 bp, Homo sapiens
tgcaagtctttcaatagacacataaatgtttctcccaaagcaagggttttggtgatcaggaatgaaacttaatataaaaactaaattaaattgaactttttagaaattgccttgagaaaacctggggtgggaaataaggacttgaaactagactggaagataatcttggattccgaggggacccaagatgattgggagcatgactttggcaggaagtcattttaacatcatggcattgagacataaatgcccacctgaaatagctggtaatatggggactgaagtactcatgttagtgtgacagcagcagggtcactggattgaataactccagggggcaccattcatccattcctttattccaggaagtgttatggaatacaaggtattacacagaagcagcaatttggaaagaccatcttgagagattcttcataaaaacagaaccccrgtctataaggtacacattgagatcagtgtcactctgtccatgctctcatcccacttctgtgtagatgtcttctcccatttgctattgtgttaagacatcagaatggatcttccaaggtgctaatctctctccaccc

SEQ ID NO: 766435 - DNA, 599 bp, Homo sapiens
tggtaattaaacatatgggagtagataatattacttggggatgatttataaagaaatgattctcaaactttggggtcagattaattacccaggaaacctaataaaattcaaaatcctgggtaccaactccagagtgtctcattgagtatgtgtagaatgtagttcccaaacctgtcttgttgaaaagtagggccccacccaatggttctgatggagatgatattctgaccccactctkaagtataatgagaagaggatcttgcttagtgtcctgagtagtatcagaacataagcgatggacaaagaaagaggaacccagaaagaagactataaataagcaactggaggtactgaaggaaaaccgggagaaaaaaacattacaaattctataagaaaatagcgggtacaagagtggtgaacagggtcaaagtgttgagagataaagtaaagataaaggctaaaaacacccactggatgtaacaaaaaggaggtcatcacaaagttggcaggaacaattttggtagaattatgtgggctgcagccagattgcagtgggctgagggttgaatatgagatgaggataaagagacaagaagcag

SEQ ID NO: 766436 - DNA, 555 bp, Homo sapiens
cagtatttattcttctctctgccactgggttatgtaacaaatgatgattcaaacctgacaattaaattgcattagatcagtgctcctcacacctaaggtgcaaaaggaatcccctgggattcttgttaaaatgcaaagtctggttcagcagacgaagggtggagcttgagggtctgcatttctaataaacccctgatagataccaaagccgcccatgcccagccatactttggacactaggagtagaaagggtttagaattcagtgtatgtttccagcaaaatacatccagaggaaaaagacggcgagaaaaaggagtgggggaagtatgatctwctgatttaaaaaaatatggtatttacaaatcaagtataagttgagacttatagatttaaaaacaaaactatcctttgataaaagcatacattcaaacgaaaacaccgataagatttagttaaatgtattgttgatatcctcacagcagtttgttgtttaagctgatgaggagaagcacaggggccggttctcctttgattggcacaatcctttcgagaaa

SEQ ID NO: 766437 - DNA, 610 bp, Homo sapiens
acaaacaaaatgatgaaataactaagaataaatttaagaaatatgtaaaacctatatgagggaaattctaaaacatattctaggctaaatagattcaactttataaacatataaattctaaattaatttatgaatataaatgttatcccaatatctataggaagaaagctttaaaacacattctagatgaaataaattcaatcttataaacatctaaatcctaagttaatttatgaatataaatgttaccccaatatctaaaaacaaaaatgataaaagttcctgaaaaaatacayggcaggggagagacgaacaggcagagcacagaggatttttaggatagcgaaaatacctggtatgatagtataatggtggatacatgtcattacatttgtacagacccatagaatgtacaacaccatcggtgaaccctgaactatggactttggtgattatgatgtgttgatgcaggttcctcaatggtaatgaatgtaccattctggttgctggtgttgataacgggggaggccttgcatgtgtcacggcagggggtatatacagggaagtctctgtaccgtcctctcaattttgctgtgaacctaaaactgcc

SEQ ID NO: 766438 - DNA, 610 bp, Homo sapiens
acaaacaaaatgatgaaataactaagaataaatttaagaaatatgtaaaacctatatgagggaaattctaaaacatattctaggctaaatagattcaactttataaacatataaattctaaattaatttatgaatataaatgttatcccaatatctataggaagaaagctttaaaacacattctagatgaaataaattcaatcttataaacatctaaatcctaagttaatttatgaatataaatgttaccccaatatctaaaaacaaaaatgataaaagttcctgaaaaaatacatggcaggggagagacgaacaggcagagcacagaggatttttaggatagcraaaatacctggtatgatagtataatggtggatacatgtcattacatttgtacagacccatagaatgtacaacaccatcggtgaaccctgaactatggactttggtgattatgatgtgttgatgcaggttcctcaatggtaatgaatgtaccattctggttgctggtgttgataacgggggaggccttgcatgtgtcacggcagggggtatatacagggaagtctctgtaccgtcctctcaattttgctgtgaacctaaaactgcc

SEQ ID NO: 766439 - DNA, 610 bp, Homo sapiens
acaaacaaaatgatgaaataactaagaataaatttaagaaatatgtaaaacctatatgagggaaattctaaaacatattctaggctaaatagattcaactttataaacatataaattctaaattaatttatgaatataaatgttatcccaatatctataggaagaaagctttaaaacacattctagatgaaataaattcaatcttataaacatctaaatcctaagttaatttatgaatataaatgttaccccaatatctaaaaacaaaaatgataaaagttcctgaaaaaatacatggcaggggagagacgaacaggcagagcacagaggatttttaggatagcgaaaatacctggtatgatagyataatggtggatacatgtcattacatttgtacagacccatagaatgtacaacaccatcggtgaaccctgaactatggactttggtgattatgatgtgttgatgcaggttcctcaatggtaatgaatgtaccattctggttgctggtgttgataacgggggaggccttgcatgtgtcacggcagggggtatatacagggaagtctctgtaccgtcctctcaattttgctgtgaacctaaaactgcc

SEQ ID NO: 766440 - DNA, 606 bp, Homo sapiens
agaaatgcaaatcaaaaccacagtgagttaccatctcacaccagtcgaatggcttttgttaaaaagccaaaaataacagatgttgatgaggctgcagagaaaaggaaatagttacaaacttttggttggaatataaaatagtttagccactggagaaagcagtttggagatttcttgaggaacagagttgaaccactatctgacccagcaatactgttactgggtatatactcaaaggaaaacaaattgctctaccataaagacacatgcactctcatatgttcactgcagcactcttcataatagcgaagacatggaataaatccaaatgcccatcaatggtggatgggataaatatatatgamgttttcatatatatacaccgtggactactatgcagccatagaaattgaaatcatgtcctttgcagcaacatagatgcagctggaggccattagcctaagctaactaaagaaaaaatagaaaacccaatgccgcatatgggacttagatattgagagggagagggacggggctgaaaaactacctattgggtactgtgctcactgcatgggtgacagattaatttgtactgtaaacctcagc

SEQ ID NO: 766441 - DNA, 630 bp, Homo sapiens
ttgaattaaattttacatgaagtataaatgagttgattaaacaatcttatttgtacactacttagttttaaaggtacaaaagttacaaaatattggtagaaattaaataattctgactaagaatatgctgtgctattacacccaaaaaraaacgtttttctccgctatctaataaaacatagactggagattaatgggcagagggagacaggtggagaagtttctcctgtctaatatatactgcttttcaggatttttttcttatccttctgcctgctcttatttgaaatatttttcctccgttcctttacaaaatttatatcttatagaaaagtctgataaaaaaaagtgagaaatttcatttaatccttgatcctatagataaccactgtagtggttgggtatatattttccggggttagggatgcatatgtgactatgtgaaagttagtgtattttctctagacttgttcttatatatattttctaagatttagatcatgatagaaaggctatttgaaataatatttttctttgtaacaatgcatcttgactctgcatgtagagactcagagggattttgcaactttatcctccactgaaaatataatataacatttagattattat

SEQ ID NO: 766442 - DNA, 630 bp, Homo sapiens
ttgaattaaattttacatgaagtataaatgagttgattaaacaatcttatttgtacactacttagttttaaaggtacaaaagttacaaaatattggtagaaattaaataattctgactaagaatatgctgtgctattacacccaaaaagaaacgtttttctccgctatctaataaaayatagactggagattaatgggcagagggagacaggtggagaagtttctcctgtctaatatatactgcttttcaggatttttttcttatccttctgcctgctcttatttgaaatatttttcctccgttcctttacaaaatttatatcttatagaaaagtctgataaaaaaaagtgagaaatttcatttaatccttgatcctatagataaccactgtagtggttgggtatatattttccggggttagggatgcatatgtgactatgtgaaagttagtgtattttctctagacttgttcttatatatattttctaagatttagatcatgatagaaaggctatttgaaataatatttttctttgtaacaatgcatcttgactctgcatgtagagactcagagggattttgcaactttatcctccactgaaaatataatataacatttagattattat

SEQ ID NO: 766443 - DNA, 610 bp, Homo sapiens
ctccagagtggtgacaaactttccaagaattttacatccccaaggagggaatacaattcacacctcctctcagccagaaggaagcagcacaaacagttggggattcctcttgttatggtttctaccaaccctgggattcattatctcacagaaaggatgcttcaggctctaatagtgtgtgtcagaaaggtcgaatctggctatcactgggaaaagagaaaatatatccactattgctctggtacaaagatcacttttctctatttcattgatttgctcttctcttttttgtttgtttgtgtggggttttttgtgtttttgtttttgtttttgagacggagtctggctctgtcgaccaggctggagtgcggtggcgccatctctgctcaccgcaagctccgccccccgggttcccgccattctcccgcctcagcctcccgagtagctgggacyacaggcgcccgccaccacgcccggctgatttttatatttttttagtagagacggggtttcaccgtgttagccaggatggtctcgatctcctgagctcgtgatccgcccgcctcggcctcccaaagtgctgggatgacaggcgtgagccaccgcgccc

SEQ ID NO: 766444 - DNA, 592 bp, Homo sapiens
cactaggtgaccactaagctaactgagcagagatttcagaggctccacatgataaagagtatagaattagtttaggaagtcactaaacagaccaaaagtatgaaaaataagcaacaacaacaacaacaaatagtaataaggggcagattctrattttgaaatctggcacattgtattatttatgatatccaggttttattaaaaaatatgagacatgcaaggaaacaagaaagtgcgattgatatacaaaaacaacaacaacaaaaacgcaatcaaagaaagtgtcacggatgagctcagctactgggcttattacaaagactttaaatttgctattttaaatattcacaaagaactaaaataaagcaagccatgtctaaagagtcagaagaaagtatgagaatgattctcaccaaacagataatgtgaataaggagataggaattttgtttttaagaaaataatcaaataaaaattctggagttgaaaagtatattaattgaaataaaaattcaataatagggactcatcagggaattttttttctgccataagaaacaatagcaaatttgaacagaggttaattttatta

SEQ ID NO: 766445 - DNA, 645 bp, Homo sapiens
tttgagaaagaagaccctgctaaactataaccaggttcctgacctagaaaagctgggaaataataaatatttgttgtttacaccttctaaattttgacataacttgttatgcagtaataaacaactaacagtttaagcactagcatcggttcatrgagtgctcttcccctactctagatggcaagtgctcccaggaaaggaattccatctaccctgatcaataatgtatcccccacattgtgtatataataggttattaccgaattatttttgaaaagattaataagctactagccaaatccaattatgaccagaatacctgataatgagctataaattgagaattaagaaatatgagggttggtaagtggtatgtagaaaagctaatgtattattaggagaatgatagatgacatataaatagatggaggaggagtttgaaagtaatagtttaaataataataatgtatgggatttattcttgatggacacatagacataaatgaacccaaacatgtatacagtaagtcctgagttaatatcgtcaataggtgcttggcaagtgcaagtttaagtgaaatgacctatgatgaaaccaatgttataataggctgattgatataagtgagagttaagtttctatgg

SEQ ID NO: 766446 - DNA, 583 bp, Homo sapiens
tagattatctttttctgctctcagaagccacatatttattcttggagtaagcatagaggaagaggagtgattgcccaaagaaaaaactcaaggtgcagttatcggaagaatggaaataagtgttgaacaagcaaaagctaaccagaacttgtatatattttcagaccacattaaggcataaaaatatgtaagcattctrtcttgtttgaaataaaactgagccccaaattttacagtgcaaattatttaaaagagaaataaaatacactgaattataaaaataagcagtattttataaaagcacaacagctagaataatctagttcttcctcaatcataactaccagttaataatcaactcaggtctattcactgtgtcttgaatatcaaaagttagtagaactatacctgttctaaaattggactatgcattaagagaggacttggcctcggcttttatctgctgataggttaattggttttaattagcttgcataccttatcagaaccaaaatagtttctttagtctgacaaatctttggagcatagagaatacttttttagaagaaacgttttccattag

SEQ ID NO: 766447 - DNA, 536 bp, Homo sapiens
ctgcaatagtaatactcaacaatttaactctgcaatacttacaatgaatcactactcacaagtgcatgcaaagaaagagatataatatgtataaatattgtataccattttgctcatttactttttatttaatgtttaaacacactggtggggtggatattatggggccgatgccagactttgatggtaaatctcagagtgcttcagtcaactttaacacagttctaaacccaaagtctcaattttattccaattgctttgaggctagtttacatrtaactaactttcccttctgcaagtggggagcttggtcccttcctttttctatatatcactccccttaagacttctttttcctaagacattgctctaaatctgcatttctaccagctagaacctggaaaatacattgcaggagagaaggaagtccccaactcttctatcttgaggggcctagcggagttgtgcatgcttagttcttatctttgccacctaggtagataattgtgagcatctttcttgtctggttagactct

SEQ ID NO: 766448 - DNA, 550 bp, Homo sapiens
caagtggggagcttggtcccttcctttttctatatatcactccccttaagacttctttttcctaagacattgctctaaatctgcatttctaccagctagaacctggaaaatacattgcaggagagaaggaagtccccaactcttctatcttgaggggcctagcggagttgtgcatgcttagttcttatctttgccacctaggtagataattgtgagcatctttcttgtctggttagactctgtgatggataggactgtctcccccacttcttctgtgtctctcaacagctctgagaacaaagcagtgcacacaggagaccttcactaactsttcttgactaatgactgcatctttgtctgacaagtgcggtatccattgtgcactaaaaatgaatgagttgatttaaattaagaaaatgtcaggttgttcctggggtcatataagttgccacagtagcaaggtaaaaacaagagttagagttagttaacttttatgtgaatttaaaaatctttccagccttttttttctgttacagatggagagtcagca

SEQ ID NO: 766449 - DNA, 491 bp, Homo sapiens
atataatctaatatgtagaaaactgtaaagatgtcacacaaaaaactgacttaataaatgaattcagcaaagtagcagaatgcaaagtcaacacagtttactgttatttcattgaggatttttgcattaatttataagtggtattagtccatggttttctcatagtgcctttgtctagctttggtgtcaggctactgctggcctcatagaatgacttaggaagtgttccatctttaattctttaraaaagtttgaaaagcagtggtactaggtctttaaatgtttgatatagaactcaccagtggaaccatcaggtgcagggcttttttttgcccaggagatttctgattactgattcaatctccttattggttataggtctattcagattttccatttccttgtgatttcattctgatgggttttgtgtttctaggaatttgtctctttcatctaggttatggtattaggtttgtaatttcaaattccac

SEQ ID NO: 766450 - DNA, 636 bp, Homo sapiens
gtggcatccacctcctttaaaggcacatcttggagatcaggtcggccagtttccatagtcactaacagttcctggcagtcatggataggtggggtaaggtctgaatcagggaacaaggtacctggatttaaacaccttgtgggagagaaagttaaacgaggctgatctaacagtaaattgtgatactgcaggatgcgagcgttcaacatccatttgccagaagcacttcttarcaatgtctctatggcatgaggagccataagggttaaattttgacctagagtcagtttatcagcctcttgaaccaggcttgctgtggctgctatggctcacagacaacttggccacccagaggccacagggtccagtctcttagacaaataggccactgggtatcaccatggccccaaagtttgagtgagtacccctttagtgactccctggctttcatgaacaaaaaggtaaaatggcttttagatatttggagggctagagcaggggcctcagttaatgctttcttaaggttttgaaacgcctcctcctctgtgtcagtccaaactagtgggccatttcctccactagtggagtataggggcttgccaatttccatgaaacctgatatccgtagacaacact

SEQ ID NO: 766451 - DNA, 649 bp, Homo sapiens
ctgtctaattgtaattttatgtcattgaccaatctcttcctatcctcccctccttgatacattccggagtcactaataactctgtacttttgtgacatcagctttttcagactccacaaatgagtgagaacgtgggatattagtctttctgtgccttgcttatttcacttagcatattgtcctctagattcatccatgttaccacaatgacaggatttcattcttattatggctgagtactattcaattgtgtatatatacaccacattttctttattcatctgttgatggacacttaggttgattctatatcttggctattgtaaataatgcwgcaatcaacatgggaatctcttcaacatagtatctcttcaacatattactttcaagttttcattttgctagcatgagaatgtatagcctaagagaatggattcaacacaattgatgtgatgaagatttgcaaaagagcagttacgtgtgtgtgtgtgtgtgtgtgtgtgtgcacgtgcacatgctaggcatttcaattctcagctttataatctctaaattataccttgtcactgttatctcattaggcatacataattaatcttttcaaggaataattccagaagacagagttataatatttcacatcactcta

SEQ ID NO: 766452 - DNA, 669 bp, Homo sapiens
agatttgcaaaagagcagttacgtgtgtgtgtgtgtgtgtgtgtgtgtgcacgtgcacatgctaggcatttcaattctcagctttataatctctaaattataccttgtcactgttatctcattaggcatacataattaatcttttcaaggaataattccagaagacagagttataatatttcacatcactctaactattgctttatactctctcataacatgaggacttattcctattgaacttttaataagttatatcttctgtatttgtagatataagtgaaaaatctacagcactcatagagagggatacattatgtaagggctatcagaagtaaggacatctactactaattaataccaagggtattcatgtctatatctttctaaaaagtgaagtttcttaaaattataaatgtaattaaaatgcmatgtataaaatagatttaacaagtcaagtcaattatttaagcatttccatggccaataagaaaataatattgataacgtagcacgtaacactgatgtctcttaaaaaatgtaggaaatattttcacttgaaaaatgtaggaaggttacatgaatacaagagttaaaagatctgatatttcatagtcagatcctaatatttgaagtcattattacttttctctttttttgtttcacatg

SEQ ID NO: 766453 - DNA, 600 bp, Homo sapiens
ttttcttgaacactcacatttaatcaatgaccttatatatggtcagttgtttatcttgaaatgaatgggctcacttggttcactttcaggaaaatatctgacctatatctatctgaacaaccataatttgtcagtcataactttaaagtaaagatgatgtccagctcaggactcaagcaatgatgcaattaagaaatagagattgtcataatactttgacgcatagcagaattattttatatctacttcccagttcactagaatgwtagaaagtatgtattccaaggtagataattaataacattaataatttttaagtgcttcaacaattataatcataagcaaaactgtttttgttttgctttgttttgagagttttttactctgagtatatggacattaaatatcacctgactaccagtaaatttgatgccagtgccaggctggaatgtagtggcatgatcatggctcactgcagcctcaacctcctgggctcaaatgatcctactgcctcagcctcccaagtagctaggactacaggtataagccaccacacccagctattcgttttatatatatatatataattatatatatata

SEQ ID NO: 766454 - DNA, 656 bp, Homo sapiens
cagatcttctactatctcacaatttttgccctaatacagagtctataatgttaccacatcgtttcgtaacgtttttcctacttatcctttattaattcactattggagaggaaagccttctgtactcatattcagtgcaaaaagccagttctgatgccttatgaatccacaaacacataaaaatattttaggattccaaaattcatatggaaaaattataatttttagcactacatttgatttatatgccactttattttttttccattatggtggtattttccaaaatttttacaggataccacttttgaaaatcctgttgaatgcaagtcctctttgttggtaagagaattattgacttctaatttttactccactaaggctgtgagattgaccttacagcctcgttttgttttcatctagctcattgaacaatgaggatatttagctcccctcagagctaccctcakagttggatgagctatcctcagagttggatgccaccaccgggagcagcaaaagcgaaggcaactcatgattctgcctcagaagcaatcgaataaaatattttgaaaatgaatgaatggacttttaaattttaatcatcgctaaccttggggcctcgattctgtcaatttgtgtgtgggcacagttct

SEQ ID NO: 766455 - DNA, 475 bp, Homo sapiens
cgcttgaagggtactcaggaagtaaataaaagtgaacatcctgctatgagctggaaagcacaggcagaatcctccaccaccctgccagcctaactgtactgcccaaagacaaaggaatctttcctgttacaggtacgtgcaacccacaccaggtaaaatgcattcactaaggctgtttggtctttscttgacacatcactgccattacagactgattcttccaaacagacatttcatgaaggcccttagtaaatataggcttgacatagtagctggcaaagttatgaacaaaatgtattttattctgagacagaacctattttaaatagctcattgacctctataatcatagtgtttggtcaaaaaccatcaaaaccaccacatagagccaaataagatgcttccatttatatgaagtaatttcttctcacagtgcagaaaagagtggtgatgttcacacctatgcacaattcta

SEQ ID NO: 766456 - DNA, 647 bp, Homo sapiens
aggataatatatataatgtttgattacaacttacagttacatttaaaagtagaaaactaattagaaaaacataggatcaagtgcagtgcctcatgcttgtattcctagcactttgagaaactgaggctggaggatcacctaaggccaggagttcaagaccagtttgggcaacatagtgaggccccatctctacaaagattttctttttttaaattagcaaggcatagggtaygtgcctatactcccagcttctcaggaggccaaggttggaggattgcttgagccccagagtttcgggctagagtgagctatgattctgcctgggcaacagagtgagaccgtttcaaaaaaaggaaggaaggaaggaaagaaggaaggaagaggaaggagaaaaagaaagaaagagagagagagagaaggaataagaaagaaagaaagagaaaagaaagaaagagaaagaaagaggaagaaaagagagaaagcaaggaaggaaggaggaaggaaggaaggaaggaaagaaaaagaaaatatatacctaagtttttctttccaaccagcgcccagcaccgggcatctctcacgacaactggcacaagcagcagaaggcacaggggcaagagaaggagctgccacaagaagcgggagtc

SEQ ID NO: 766457 - DNA, 576 bp, Homo sapiens
tttcaattgggttatctagctttttctgattcatttataggaattctttatgtattctggatttgaactcattttcgtatatatatgatatacacagtacagaagattatatataaacactgtggcttgccctctcactctcttcaaggtgtcttttcatgaatggtcaatacacttttaaagggtgttccctcccaagcartctctcttctacaattctgggaaacacagagaaaaaaattatttaatagaaatgaacaaacggaatggtatgactttttttttttttttttttttttgagacagaatcttgctctgtcatccaggctggagtgcagtggcgtgatctcggttcactgcaatctccgcttcccggattcaagtgattctcctgcctcagtctcctgagtagctaggatcacaggtgcatgccattacgcctgactcacttttttgtatttttggtagagacggggtttcgctatattggccaggctggtctcaaactcctgacctcatgtgatccacacatctcaacctcccaaagtgctgggattacaggcgtgagccaccgtg

SEQ ID NO: 766458 - DNA, 584 bp, Homo sapiens
cccagagcaccagctagtcctgttgactccgcctctaacttgtaccctagacctgctcccttctctccctctcctctgcctagcctaagctgccatgccatcatcctttgcctggacaattgaaaagctctcttaactgctttcctcattcctcctttgctcattgtagcccgttttccaaatagaagccccacgagtttgtcatgcaaataactgagatagcactccctatgtaaaatgtgttcatgctttcccaccatactcgggttaaaatctaaacgctttcttgaggcctagaaaacctgtatgagtctcaccctctcttctcccctctaccccttgctcatcctgctccaaccacatttgccttcattcagtgatttccattcgycaccctctttcctccttagagtcttcattcacgccattcctcccacctggagtgttcttcccctgctctttggcaggctgcgacctttcatgattcaggtctcagcttatatgttagcccttcaggccctcctcagcaaccctgtctaaaatatttcaacttgctgtttttactcatcggactcttccttttg

SEQ ID NO: 766459 - DNA, 732 bp, Homo sapiens
tttaatctattcctcctccaatcactcctgtctcagtaaagggcactgcaatcaactcagttgctcaagagagaaacctgggtgtcacctggaattcctcctcctctctcatgtcccacacccagagcaccagctagtcctgttgactccgcctctaacttgtaccctagacctgctcccttctctccctctcctctgcctagcctaagctgccatgccatcatcctttgcctggacaattgaaaagctctcttaactgctttcctcattcctcctttgctcattgtagcccgttttccaaatagaagccccacgagtttgtcatgcaaataactgagatagcactccctatgtaaaatgtgttcatgctttcccaccatactcgggttaaaatctaaacgctttcttgaggcctagaaaacctgtatgagtctcaccctctcttctcccctctaccccttgctcatcctgctccaaccacatttgccttcattcagtgatttccattcgccaccctctttcctycttagagtcttcattcacgccattcctcccacctggagtgttcttcccctgctctttggcaggctgcgacctttcatgattcaggtctcagcttatatgttagcccttcaggccctcctcagcaaccctgtctaaaatatttcaacttgctgtttttactcatcggactcttccttttgtatcattttcacaacttataattatata

SEQ ID NO: 766460 - DNA, 589 bp, Homo sapiens
attcacaaacaattcaagatagaatctctgtaacccttctttgtaggacacatgtgcaataggaatctgaggtctctacaatgtatattcccaatgattattgtgatcaatcctggggcaccatctattctaggtttcagggagcaatttcttattctctcttttcaatgaaggtgwctcaacataccaaccgttcatatcatgttcatagcgtgatcttgaacacaaaaccacacagcctctcattctggaagggcaagaagctgagcctctgctaggaagtgtttctctgtcagactctccagctagagtctagctgctctttccagaggcagctccaggcgaaggactttcttgttgtttgtagccacaagtccgacaactactttccatggtgtctctcttcaggggtgttactattcagcattgctcttgcatatcctcccatcagagtagttcaatagactctttggtgtctgctgaagtctggctttctgggctccctctcaaaaacggcatatttagccttactcttggcatcacctctgcagggcgtcggacagcactgcacccatggctttgcataagt

SEQ ID NO: 766461 - DNA, 589 bp, Homo sapiens
attcacaaacaattcaagatagaatctctgtaacccttctttgtaggacacatgtgcaataggaatctgaggtctctacaatgtatattcccaatgattattgtgatcaatcctggggcaccatctattctaggtttcagggagcaatttcttattctctcttttcaatgaaggtgactcracataccaaccgttcatatcatgttcatagcgtgatcttgaacacaaaaccacacagcctctcattctggaagggcaagaagctgagcctctgctaggaagtgtttctctgtcagactctccagctagagtctagctgctctttccagaggcagctccaggcgaaggactttcttgttgtttgtagccacaagtccgacaactactttccatggtgtctctcttcaggggtgttactattcagcattgctcttgcatatcctcccatcagagtagttcaatagactctttggtgtctgctgaagtctggctttctgggctccctctcaaaaacggcatatttagccttactcttggcatcacctctgcagggcgtcggacagcactgcacccatggctttgcataagt

SEQ ID NO: 766462 - DNA, 589 bp, Homo sapiens
attcacaaacaattcaagatagaatctctgtaacccttctttgtaggacacatgtgcaataggaatctgaggtctctacaatgtatattcccaatgattattgtgatcaatcctggggcaccatctattctaggtttcagggagcaatttcttattctctcttttcaatgaaggtgactcaacataccaaccgttcatatcatgttcatagcgtgatcttgaacacaaaaccacacagcctctcattctggaagggcaagaagctgagcctctgctaggaagtgtttctctgtcagactctccagctagagtctagctgctctttscagaggcagctccaggcgaaggactttcttgttgtttgtagccacaagtccgacaactactttccatggtgtctctcttcaggggtgttactattcagcattgctcttgcatatcctcccatcagagtagttcaatagactctttggtgtctgctgaagtctggctttctgggctccctctcaaaaacggcatatttagccttactcttggcatcacctctgcagggcgtcggacagcactgcacccatggctttgcataagt

SEQ ID NO: 766463 - DNA, 611 bp, Homo sapiens
ttacttgattagtaagaaccaaagcatttccagaaccaaggcaaggagctgaagtagacagaacacaggacaaagaaactcaagacttaagtttcttcctgactttcacacttagcacaaagtgtgatctttgatccatagaactgctcttgagtttaatagcaatattactttgtaaattgggaagatagtaccttatccttaatactataaagggttatgtgtgtgattggtaaataataatgttctttgtatctgtgcaaaagggtatgattaaaattcctagagtttagaaaaacattgtgtggttatcttgtttaaagatgaggagaggaccattatccctcagaagtgccaattttacgtctttcccagttttcaacataacaggtcaagtttcaaacagaccatcttgaatcttccagtgactacaagtcaatgaaatatcagctttacagtatgtgtcttgattcrtttattcaggaaatagatgatgtctatctactctatgcatattaaaatagaagacccatcctatattacagactcagagacagattaggggtgggccaaccattcaggtaatcagggccccatcaaataggggaagc

SEQ ID NO: 766464 - DNA, 603 bp, Homo sapiens
cagtttcacgatattgcttctttctatccatgagcatggaatattcttccattttatggtgtcctcttttatttagttgagcagtggtttgtagttctccttgaagaggtctttcatatcccttgtaagttggattcctaggtattttattctctttgtagcagttgtgaatgggagttcactcatcatttggctctctgtctgttaatggtgtacaggaatgcttgtgatttttgcacattgatgttgtatcctgagacattgctgaagttgcttatcagcttaaggacattttggtctgagatgatggggttttctaaacatccactcatgtcatctgcaaaagggacaatttsactttctcttttcctgattgaataccctttatttctttctcctgcctgattgccctggccagaacttccaacactatgttgaataggagtggtgagagagagcatccttgtcttgtgccagttttcaaagggaatgcttacagtttttgcccattcagtatgataccggctgtgggtttgtcataaatagctgttgttattttgagatatgttccatcaatacctagtttattgagagtttttagcc

SEQ ID NO: 766465 - DNA, 631 bp, Homo sapiens
catcatatattattaggttactgcaaattaaaacaacaatgagatactaccacatatctaacagaatggccaaaatccaacacactgacaatgctaaatactcatgagcatgtggaacaacaagaactctcattcaccgcttgtagtaatacaaaaggtacagccactttggaagacaatctgtcagtgtctttcaaaactaaacacactctcaaatataacatggatgaacctgaaggacattttgctaagtgaaataaaccagatacagaaagacaaatactgcattaactcattcatatttgaaatctaaaaaggttgaactcatagaagtagagagtccaatgatgattactmgaggctaggaggctgaggagggaggaaatgggagatggtgatcaaagagtacaaagtttcagacagacaggagcaataaggtttgagatctattgcacggcagggtgactacagccaataataatgtacagtatatttctaaataactaaaagtaaatttcaaatgcttcaacataaaaaatggtaggtaagtgacatgatggctatgctgattagcttgatgtaaccattttacactgtataaatctatcaaaacatcacattggaatccaca

SEQ ID NO: 766466 - DNA, 631 bp, Homo sapiens
catcatatattattaggttactgcaaattaaaacaacaatgagatactaccacatatctaacagaatggccaaaatccaacacactgacaatgctaaatactcatgagcatgtggaacaacaagaactctcattcaccgcttgtagtaatacaaaaggtacagccactttggaagacaatctgtcagtgtctttcaaaactaaacacactctcaaatataacatggatgaacctgaaggacattttgctaagtgaaataaaccagatacagaaagacaaatactgcattaactcattcatatttgaaatctaaaaaggttgaactcatagaagtagagagtccaatgatgattactagaggctaggaggctgaggagggaggaaatgggagatggtgatcaaagagtacaaagtttcagacagacaggagcaataagktttgagatctattgcacggcagggtgactacagccaataataatgtacagtatatttctaaataactaaaagtaaatttcaaatgcttcaacataaaaaatggtaggtaagtgacatgatggctatgctgattagcttgatgtaaccattttacactgtataaatctatcaaaacatcacattggaatccaca

SEQ ID NO: 766467 - DNA, 581 bp, Homo sapiens
aatgccaatctgaaaaggatacttactgtatgattccaactgtatgacattctggaaaaagcaaaactatggagacagtaaaaagatcactggttgccaggatttaggcgggagggaggaatgaataggtgataggtggagcayggaaaattttttttttttttttttttgagacagggtcttgctctgtcacccacactggagtgcagtggtgcaatgtgggctcactgcaacctccacctttcgagttcaagtgattctccgggctcaggctcctgaatagctgaaaatacaggcgtccaccaccacacccagctaatttttgtatttttatagtacaggtagggtttcaccatgttggccaggctggtctcaaactcctgacctcaactgatccacccgccttagcctgctaaagtgctgggattacaggcatgagccaccatgcccagctgagcacagataatttgtaggacactgaaaatactctgtatgatagaataatggtggatacatgccatcagatatttatccaaacttttagaacgtacaacactaaaagtgaaccctaatgtatacta

SEQ ID NO: 766468 - DNA, 581 bp, Homo sapiens
aatgccaatctgaaaaggatacttactgtatgattccaactgtatgacattctggaaaaagcaaaactatggagacagtaaaaagatcactggttgccaggatttaggcgggagggaggaatgaataggtgataggtggagcacggaaawttttttttttttttttttttgagacagggtcttgctctgtcacccacactggagtgcagtggtgcaatgtgggctcactgcaacctccacctttcgagttcaagtgattctccgggctcaggctcctgaatagctgaaaatacaggcgtccaccaccacacccagctaatttttgtatttttatagtacaggtagggtttcaccatgttggccaggctggtctcaaactcctgacctcaactgatccacccgccttagcctgctaaagtgctgggattacaggcatgagccaccatgcccagctgagcacagataatttgtaggacactgaaaatactctgtatgatagaataatggtggatacatgccatcagatatttatccaaacttttagaacgtacaacactaaaagtgaaccctaatgtatacta

SEQ ID NO: 766469 - DNA, 533 bp, Homo sapiens
ataaatgcatattactaagtgaaaaatgccaatctgaaaaggatacttactgtatgattccaactgtatgacattctggaaaaagcaaaactatggagacagtaaaaagatcactggttgccaggatttaggcgggagggaggaatgaataggtgataggtggagcacggaaaattttttttttttttttttttgagacagggtcttgctctgtcacccacactggagtgcagtggtgcaatgtgggctcactgcaacctccacctttcgagttcaagtgattctcygggctcaggctcctgaatagctgaaaatacaggcgtccaccaccacacccagctaatttttgtatttttatagtacaggtagggtttcaccatgttggccaggctggtctcaaactcctgacctcaactgatccacccgccttagcctgctaaagtgctgggattacaggcatgagccaccatgcccagctgagcacagataatttgtaggacactgaaaatactctgtatgatagaataatggtg

SEQ ID NO: 766470 - DNA, 533 bp, Homo sapiens
ataaatgcatattactaagtgaaaaatgccaatctgaaaaggatacttactgtatgattccaactgtatgacattctggaaaaagcaaaactatggagacagtaaaaagatcactggttgccaggatttaggcgggagggaggaatgaataggtgataggtggagcacggaaaattttttttttttttttttttgagacagggtcttgctctgtcacccacactggagtgcagtggtgcaatgtgggctcactgcaacctccacctttcgagttcaagtgattctccgggctcaggctcctgaatagctgaaaatacaggcgtccrccaccacacccagctaatttttgtatttttatagtacaggtagggtttcaccatgttggccaggctggtctcaaactcctgacctcaactgatccacccgccttagcctgctaaagtgctgggattacaggcatgagccaccatgcccagctgagcacagataatttgtaggacactgaaaatactctgtatgatagaataatggtg

SEQ ID NO: 766471 - DNA, 603 bp, Homo sapiens
aacatattcaaaactataataattaaaatagaatgttttgcctaaggatagacaaatatataaatggaatacaatcaaaactgtctcacacatatatgaccacttaatttaactgtaatctaaatataaaagtaataccacaaatttctaggagataggaaaatattgttatgacttgagtagacaaagattttttaagcaggacagtagtcactaaccataatgagaaggactgatgaattggactacagttgacctttgactaacaagggttcaaactatgcaggccyatttatatgcagagtttctcaataaatgtactggaaaattttttggagatttgccacaatttgaaaaaactcacagatggaccatgtagtgtagtccaaaaatatatttaaaaaaaagaaacagttatgtatgtcatgaatgcacaaaatatatgtagatactaatgttttatcatttaataccataaaatatatacaaatctattataaaaagttaaaatttaacaaaactttggcatacaaacacaagaccttacatggcaatattcacagttgagagaaacgtaaacaaacataaagatacagtattaaa

SEQ ID NO: 766472 - DNA, 603 bp, Homo sapiens
aacatattcaaaactataataattaaaatagaatgttttgcctaaggatagacaaatatataaatggaatacaatcaaaactgtctcacacatatatgaccacttaatttaactgtaatctaaatataaaagtaataccacaaatttctaggagataggaaaatattgttatgacttgagtagacaaagattttttaagcaggacagtagtcactaaccataatgagaaggactgatgaattggactacagttgacctttgactaacaagggttcaaactatgcaggcctatttatatgcagagtttytcaataaatgtactggaaaattttttggagatttgccacaatttgaaaaaactcacagatggaccatgtagtgtagtccaaaaatatatttaaaaaaaagaaacagttatgtatgtcatgaatgcacaaaatatatgtagatactaatgttttatcatttaataccataaaatatatacaaatctattataaaaagttaaaatttaacaaaactttggcatacaaacacaagaccttacatggcaatattcacagttgagagaaacgtaaacaaacataaagatacagtattaaa

SEQ ID NO: 766473 - DNA, 603 bp, Homo sapiens
aacatattcaaaactataataattaaaatagaatgttttgcctaaggatagacaaatatataaatggaatacaatcaaaactgtctcacacatatatgaccacttaatttaactgtaatctaaatataaaagtaataccacaaatttctaggagataggaaaatattgttatgacttgagtagacaaagattttttaagcaggacagtagtcactaaccataatgagaaggactgatgaattggactacagttgacctttgactaacaagggttcaaactatgcaggcctatttatatgcagagtttctcaataaatgtactggaaaattttttggagatttgccacaatttgaaaaaactcacagatggaccatgtagtgtagtccaaaaatatatttaaaaaaaagaaacrgttatgtatgtcatgaatgcacaaaatatatgtagatactaatgttttatcatttaataccataaaatatatacaaatctattataaaaagttaaaatttaacaaaactttggcatacaaacacaagaccttacatggcaatattcacagttgagagaaacgtaaacaaacataaagatacagtattaaa

SEQ ID NO: 766474 - DNA, 488 bp, Homo sapiens
ctgggtaataaattgctttgggaaaactaatctcagaggctgccaagtgagccaacagaaggggatccctatatagtgagtcacgcgtcaaaaagaacaggctgaaggtgatatatggttggtcaagagcatattttataggtagttcatattatccctccctcaccgctgttctctgaggagtatttcctgtaccattctgctttctcttacagctttttttctttctgtagagatgtgattaaggattttcccaattcttaaactttgcttaaactctcctctgcaaggcacccattttataaacagtcactgcatttgatcacawtgtgttcataacctgtcaaacaactcaaccatgtatatttcctagaggctgtttagaattctccaagcctaaaacgatgatacaaaaagcaaggcggtttcagtaaaaagagaactagagtcagcctaataggagaagagacattgtgacatataaagtg

SEQ ID NO: 766475 - DNA, 494 bp, Homo sapiens
catgtatttgcctggttttgaaggatccttttggagttgatttccaattttatttcactgtggtctgagagagtacttgatataatttcgattttcttaaatttcctgagacttattttgtggcctatcgtatggtctatgttggagaatgttccatgtgctgatgaatagaatgtgtattctgcagttgttggatagaattttctgtaaatatctgttaagttcatttgttctagaatatagtttaagtccattgtttctttgttgactttctgtcttgatgacttgtctagtgctgtcagtggagtgttaaagtcctccactattattgtgttgccatctrtctcatttcttaggtatagtagtaattgttttataaatttgggagcaccagtgttaggtgcatatatatttagaactgtgatattttcctgttggactaatccttttatcattatataatgtccctctttgtttgtttaaactgctgttgc

SEQ ID NO: 766476 - DNA, 571 bp, Homo sapiens
actgaaaaactcttatcaccccagagaatgatgaatgaccacctctgtctcagctctatccctggaggttcccaggtgctaactgccttgaggtcttccttgccacacagagaagttagtctccattcattcctgcatgttaacttcacttgagtttagtgagcagtgaacactttattcactcccaattcaaatcaaaataggggtttaatttgcttccctgtcttctggggctaatctccattcattgaacactcayactcccattaactcaaggagagcaaccccctaagcagcctttgaatgaggcactgaaggactaattgttcctttggaagcttgcatatagctcctgctggtatcaatgagtacctccctttgtgtaccctgcattccaggccagaactgagtataagacatgattttatgtgactagtcatggataattaacaccctacttacttctgagctcagcactacatttccaggatgaatatcatcgtgcttggtgtgccctgcagacctaccatttgcaggtggaataccaggacatcaactcctgctaagtgtc

SEQ ID NO: 766477 - DNA, 350 bp, Homo sapiens
aaaattatttaaaatacccaatcctccggaggcctgcaaagcctagccatctctatgccattttccattcgcaagctacctccaacagtccccgcttgctgtagttctgttcctgggtacaatttcctgtgtgccctttgcctcatttggagctgtaagaagcagagttctgctttttctgtatctragtgttactgtgattcattccatcatccaaagaacctagaatcatacccagtaccgtagaatcatgaaacatcttacctgagccaagaagacaaatttttgcctagtcctgtttgtattttgtttttgtctccttctacctaagtaatccgacaagccccaag

SEQ ID NO: 766478 - DNA, 563 bp, Homo sapiens
aaaaatacatataaatttgtacacacaaatttataaatatatagaaatacatacgaattcgtaccccattgcctttctaaaggctaaaacaagggtcaggaaaccatagcctgctgaccaaatctggctctttgcctttttttggtaaataaaatttcactgcaacccaacatgcctgtttattgatgtattgtctatggctgttttagtgctacaaaggcagggctgaatagttgctccagagaccatatggcttgcaaagctgaaaatatttattatctgaccctttctggctttcgagcttctggawttttcttttgctgatctctcgtttaatgaattctaaactctaaaatatatttggctgtgaagatttctgttaaaggattatccaactgtatttttctaattcagtgtatacgtactcaacaagaataccatctatgtagtagaaaaagatgcagtcctgtattttgaagtagctgcagactgtgagccctgcctttatacgacctcttctcaccatgtatcactgacttgcttctgatcccagaaggcagatg

SEQ ID NO: 766479 - DNA, 655 bp, Homo sapiens
atttaagggaagtcttaatctgctttatatttaactcttatctccacactgtgaattaaaaatagaatgctggactgtagcctcacctcctggactctctgagggctcaggttactccagcataaggctgggctgcgagctgctccaggtctctggcttggtgcccctcccggactttccaaacagctgcctctttctaaatttttatccaagagccacacattaacctgtctaaagtgagcagtccttattctgtgattcttaaataacatttagcattttcctcaggtaattttcatttttcgtgaaactyagtgagttctgaatccttccagaagctagtttcaaaaactgagtcctgtagtcgagttctcctaagtccatgcgtgaggtggagtgaaagctaaagagcctttcctctttttttctcttcatctggtaaaaatttgctctggagtacgtcccctgatttcccttctcctctctcccactcttctcccttccttttcccatttccgcaccttttcctaatcctctttcccattccctgtgtgtatctcttccttccccaagcctgtgtctgagacagctggaaaggacaggaagagtttgggtgtggggaggagccggagccagggccgctccttctcaccca

SEQ ID NO: 766480 - DNA, 655 bp, Homo sapiens
atttaagggaagtcttaatctgctttatatttaactcttatctccacactgtgaattaaaaatagaatgctggactgtagcctcacctcctggactctctgagggctcaggttactccagcataaggctgggctgcgagctgctccaggtctctggcttggtgcccctcccggactttccaaacagctgcctctttctaaatttttatccaagagccacacattaacctgtctaaagtgagcagtccttattctgtgattcttaaataacatttagcattttcctcaggtaattttcatttttcgtgaaacttagtgagttctgaatccttccagaagctagtttcaaaaactgagtcctgtagtcgagttctcctaagtccatgcgtgaggtggagtgaaagctaaagagcctttcctctttttttctcttcatctggtaaaaatttgctctggagtacgtcccytgatttcccttctcctctctcccactcttctcccttccttttcccatttccgcaccttttcctaatcctctttcccattccctgtgtgtatctcttccttccccaagcctgtgtctgagacagctggaaaggacaggaagagtttgggtgtggggaggagccggagccagggccgctccttctcaccca

SEQ ID NO: 766481 - DNA, 344 bp, Homo sapiens
cctgaatttatgtagccttggacacaggtagtcgaattataagtagtaggctaatacagctgttaagcaactttaagcaaattgctcagactctctgagctttggtttccttatctgtaaaattagaaataattatagcacccamctcatggggctattgtgaagaaaggatgaaaagagatcaagtataaaaggaatcgagtgctgggcacaaagtgctccatatattgtagctattagtaaggctgatgaggcaattcatggaaacctctttcctggaaacaggatagaacctacatgtgtttggcattagattagtaaagggtaaaagaatatcactgcaa

SEQ ID NO: 766482 - DNA, 630 bp, Homo sapiens
attccaaatagtttgcatttggggtttgtttggactgttgttaatctgtggaaatcctgaggaacaagaatggcttgtttctttgtttacctttaaggtggttttcctcctgggtgcctgttcacctcctgaggagggaaaattgggtcatctctatgttatttaaggctgctcaccttaagggtactcccttaaataggttgttattccacatctgtcatctgtactagaacaaaagtaaattctcacactcgacttcagagtaggggtttgctcaattgcttcttatcaaagtttctaagaactgagttttttcagttatttcttgagtttacacattccagttttatttaatcaaaggaactgtgtgggaaaacagcagtgtataaaatattcattcacagcagtgatagtgcaattgagyaacagcagcagctgccctgaacacatggctgtgagaacacaattaaaatttcaacacactttgtgaaacacttttctatacagctcagctttcaaagtcatgagggaatgtatatggtgcttaagtgtaaactcctacttggagtcctgttggtggtttaatgatgaaaaatatcttttctttaattcaaatatattgaccctata

SEQ ID NO: 766483 - DNA, 510 bp, Homo sapiens
caaaacatacttcaaagcaacagcagtttaaacaaacaaagagggacattatataatgataaaaggattagtccaacaggaaaatatcacagttctaaatatatatgcacctaacactggtgctcccaaatttataaaacaattactactatacctaagaaatgagayagatggcaacacaataatagtggaggactttaacactccactgacagcactagacaagtcatcaagacagaaagtcaacaaagaaacaatggacttaaactatattctagaacaaatgaacttaacagatatttacagtaaattctatccaacaactgcagaatacacattctattcatcagcacatggaacattctccaacatagaccatacgataggccacaaaataagtctcaggaaatttaagaaaatcgaaattatatcaagtactctctcagaccacagtgaaataaaattggaaatcaactccaaaaggatccttcaaaaccaggcaaatacatg

SEQ ID NO: 766484 - DNA, 634 bp, Homo sapiens
ttatctaaatcttggttctggctaaagcagttcttccgctaagcaactagtttgttttcatttaaatgaaactgaagaatcttatagctgatcctgtttcccagcactggtgtagtgaaatagattttaaaaacagacagatctggaacccagagcagcctctttcttcatccactgaaaaattttaaaaacaacttgattgaggtgtaatttacctatcataaaattcacccattctaagtgaatcatacaattcagttatcgttagtaaatgtacagagttgtataaacatcatcagaatccaagtttagaacatttctgttttttccaaaagatcccttcctgtcccccsctccactaccaggcaaccactaatctattctctgtctctataaatttgccaattctggacgtttcatataaatggaatcattcaatgtgttgccttttgtgtctggcttcattcacctagcatgatgtttttccagttcacccatggtgtagcttggaacagtactgtgtttctttttattgacaaatggaccacattttaatcaaaatccattcaccagttgatgaacatttggtttttttccactttttggtggttatgaataatgctatgagtatctg

SEQ ID NO: 766485 - DNA, 603 bp, Homo sapiens
aagcttaactttatttatttatttatttatttatttatttaatttatttattttagagatagggtctcactctgtcgtccaggctggtcttgaactcctgggcctcaagcaatcctcccaccttacttggcctccctgaatgctgggattataggagtgagccactgcacctggctacaaccttaatttttttttttttttgagacaagagtttcactccgtcattcaggctggagtgcagtggcgcaatcttgtctcactacaatctctgcttcccaggtttaagcgattctcatgccacagcctccccagtagttgggattacaggcgtgtgccaccacgcccaactaatttttgtatttttcataragacggagtttcatcatgttggccaggccggtctcaaactcctgagctcaagtgatccacctgccttggcctcccaaagtgctgggattaccggcgtgagccactatgctcagcctactatcttaatttttaaaagtaaagtatgaagcatctcatttggagttagatagtcctgttcgaattctattattttattattagcagcatgactttgggcctggcagagaggagatg

SEQ ID NO: 766486 - DNA, 595 bp, Homo sapiens
aaaaaggaaggaaattctgacccatgctacaacatgaatgaaccttgaagacatcgtgctaagtgaaataacccagtcacaaaaagacaagtgctatgattccatttataggaggtacccagtgtagtcagattcatagagacagaaagcagaatggggggtgcctggggytggaggaggagaggtgtgggagtgtaatgggtgcagagtttcgattgaagatgaacacgttctggagatggattgtggtgatgcttgcataacggtgtgaatgtacttaatgccacagaactttacacctaagaatggttaagatgggccgggtatggtggctcacccctgtaatgccagcactttgggaggccaaggcgggcagatcatctgaggtcaggagtttgagtccaacctggccaacatggtgaaactccatctctactaaaaatacaaaaattagccaggcatggtggtgatgggcgcctgtaatcccagctactcggtaggctgaggcatgagaatctattgaacctgggaggcagaggttgcagtgggccaaggttgcaccactgcactccggcctgggcaacagagcgagaca

SEQ ID NO: 766487 - DNA, 584 bp, Homo sapiens
  misc_feature 94: n = A,T,C or G
tatttcaattgaaaatcatttttcacatcaaaaaatgagaagggatttctaatagcatttttttttttttgagatggagtctcactctgtcacncaggctggagtgcagtggtgtgatctcggctcactgcaatctctgcctcctgggttcaagctattctcctgcctcagcctcccatgtagctgggactacagacacatgccaccacgcccagctaattttttgcatttttagtagagatggggtttcactgtgttagccaggatggtctcgatctcctgacctcgtgatccscccacctcagcctcccaaagtgctgggattacaggcgtgagccaccgtacccggccaaaacatttaaagtaatcatcataaaaatgcttcaacatgcaaatgtgaacacaattgagacacatgaaaaaaataagtctcagcaaagaaacagaaaatataaagaagcagcaatggaaatttagaatggaaataataattgaaataagaacccagaggtgcccgccctgcctgaggagagggaggtcatggcgtgaagctacagctgctgccaccgccacttctgcaaggt

SEQ ID NO: 766488 - DNA, 621 bp, Homo sapiens
cacaacctatgcatgtaataacatgagccacatgtaccatcacaatgtatcccataaatatatacgattattatttgttaagtaaaacataaatcttaaaaaagtaaaaataaacccttccttgcctgtttacctgtgtctggtgcatatttcccttcgactatatccacctttattttgttgtaataccttaaaccagtgaatgtagagggagagaggacacatcaatggtacacaggacagtgtctggaacaaacaaatgcactgtgtcaggtcacaatttcttccctggggcattgatggaacagctttaggcaaatatgacaagcaaaccctgtacagccctcccacccctcttatggtagttggctcctctctagcctgctcacaatccytatctggtcatggtccttttatttctttcttagttccatattctccctccctctcagactttttttctttatcctaatcggaatttagatttttcacatgaaggagaaaattatcaatcgtaactaggccaaaagaccatagagggtttggaatctcagttttgctctgaatcctgactctaccattttaataaggatgaccttaatgaacttattggatctttct

SEQ ID NO: 766489 - DNA, 597 bp, Homo sapiens
atgaaaaccagttgttgaaaagaaacaaagaagaaacattgaaagacagcaacaacttcagttattataacaccaatctcggccattcaaatactgtctctccttcccagcagtgacactgatttgctgtgaaaatcttccattttttgattgttggtttactcgagaaaatcctcttctgtctagtaatggacgttagtagtcattaatgggctctactctcaacagggtacaagaagaagttaatttatgcctgtggcgggttctgggattgtcctactraagagatccaagatgctttcaaatgaaaagcaacaaagaacagaagttaaggtcccagatttcttccagaaaagcagacaactcctaccctcaagctaggcttgcaagaattcttttttgtcgggatcttagaagtttaatattttatgagggagctattgatattgatgttgaggacatggtaggactttacttctccctcaaaggataattagctgtatccatcacagtttcacaggtagggataattcactgcaccactactgcgccactgtgatatcttcatgctgggctataaatgattacttcagcatg

SEQ ID NO: 766490 - DNA, 585 bp, Homo sapiens
ttagagcatttcatcccctgaagagagtaacatgttgttcagattagattacctgctgacgcatagctcccgcttgaggtagcaaggttttaaggaaatggtttctgcttgttaataatgacaccaactgggatgagagctaacatgttttgaaaggtttctatgcacccagctctctgctaagcactaggcatacrtacttcacttaattattacaaatctgagggcaggaatttctatccctttatgtaagtaggagaggttagataattttcttgagacaacaagtggaaagcaaagccagaactgaaacccaggcagaaaagaagagatggggactagaaaaatgcccagcagaggcccatgagagccacagggagccaggaagaaaagccatgcctacatccaatgaaatattaacagaaacttcacctaacttcacaatcagaaaattgacaatggtacccccattttaaacaaattcagtcatcaaacgataaaaatccatgctgaaatcctaaagctgtgtatttaaacgagactaatttctatccatgaggccagcagtcttgaacattaacctga

SEQ ID NO: 766491 - DNA, 490 bp, Homo sapiens
acgcaggggctgaaaagtggtgttaagttcccataaccagcctttaaacatctattgaaggataataccccaacctgtctagggctgtatggtttaatatggtggccaatggtcacatatgtgttttaaatttaaattaatgaaagtgaaatgaagtttaaagttgagttcctcagtcacactggtgacatttcaaatgctcagtttcacacgtggtgggtggctaccatattggacgtgcagatacgtaacatttccaacagctcaaaaagttctgctctrgggccttgaaccctttttgattaggtcattttggtgttatatgacattttatccttcaatgatattaaagctagaataagctgaatatttattatgtgtcaggcaggattctaagcatattatacatattaactcctttaattgtggtaagacatgttataaatgggggtcatggaagccatttatcccatttatcccacatgttatc

SEQ ID NO: 766492 - DNA, 657 bp, Homo sapiens
agttactaaaagagattttcacactttctcccttttttgttgtcctttgtaggaaggcaaatagaaagaagatgagatagagaaaaagggggtagggaatgagaaggaagatggaagacagagggaagcagtgaagatacttaagagtagacagagcctccctaagccccygtcttctaaactttccatccagcctaaaaccccttagtcacctggcagttatgtaacccccaatcccaaaatcccgggaaccttcaaattacccttgggggaggcttgggattagatgctgaggacagaggattagtgtcacactcaggggtaggtttgtataccaacttgtccccagcgggaacccagattcataggacctatgcctccttgcagggagtaaagaaaccttacctgactttcaaaatcaaccagtcgcagggcttactggattcctaacataaagaaacaaaatttgtttcatattcaatggtgctgggccactctattactatgtagatgtgttagtttcaaacacagaagccaatatataaaagcctatattttatatgattacaacccaggtgtatgtgttttatcttatacttatgatgcttttaaaatatagagtaatttctcttgcaaggaatataataattaacaagc

SEQ ID NO: 766493 - DNA, 478 bp, Homo sapiens
tccagagttctcactctctctcctctctagtattctatcttgcaagttctagacactgtggcccctgaagattcccatctcggtgtcttcacctcatggagactgctagacactgcctggattcccgtttcccatactgcatcctgtaaactgtagccaggcagtaagttagggcartcgtggagctcagctctttcattttccatcactttggggtcactgaccttcattgcatgatatctaaagtatcaaaacttgtttactatatcttgttgatttttcagtggttttaggcaggatatatctttttgctattattctatcttggtcagaaaaagatccatctttctttatttctcctggaggatattttatattctatctaaaatattatcaattttatctaacttttcatttttacacccatcaagttgtagttaatatttagtaaaaatttttgttaaacttactccgtaac

SEQ ID NO: 766494 - DNA, 626 bp, Homo sapiens
gtttgtctgtctgctgaataaatgaatcataggatgaatgaatggagaaatgaatgaaaagtaagaggatatagaacaccaattatgcccataattaagtcctagattctctattccatttaggactcaagatacctagtcttatagttctttttcctgtagatggggataaggagaatggcaagatctctaatgattttcaagtcatctcattaacattttccttatattctccttagaagcctccactgcatgagatttaggtacagtctacaaatagaacatctccttatacaataaaacttggcccctgttaaagacttgattctttagagctattgaagatttttaagaaagatctagaatgtactactatcttacaaacatctgcttatggtccttaatgaaaacctctaaactaattccatttaaactgtacaaattctatgttgycatactcccataacgtgttctaaaacacagcattgttaatgagcataaagtatttatcagtccacataattgtttcacacatctattatattcctcagaaaattcatatgtagaaaaccaaatgaactgaaacttcattgtcctcacacctgacatcaaagtaataaaattcc

SEQ ID NO: 766495 - DNA, 556 bp, Homo sapiens
agccagattttgaaaatgtaattatataaatacatccaaaatgtgtgtgtgtgtgcgtgctgtgtgtatgtgtgtgtgtgatggttcatttttaaagaattttatattttgttattcttgaactttttcacatacagattgatttcccataagctcttgttaaaatggcctcagtttaattttttgtgctctgctcaaaasagtattaatgaaatgaatcaatgtccaaagtatgctacctggtaagttggtgaggatcccagaaatgaaattaggagacctacatttcagtcttagtcaatattttgtgttgtttctcattaaaaggaatgtatttcaaagaaggaaattctagaccagttgttcttaaagggtagtccagctccctgtgagagtccccaagacacttgcagaagggccaggagctcaagattatttttatgattgtactaagttgttctttgccttgttcactctcactgtctcatgagtgtatagtggaaggtgcatgtacagaaagagaacatatagaggctgcataacttgtgatgacatc

SEQ ID NO: 766496 - DNA, 529 bp, Homo sapiens
atgaattaatgaaaggaccacatgaccaggtctccttttgcagtgcattggaatcatcctatctcagagttgattcataaattgccccaactagaaggtccctttgcgatttttgaaagagatagtgatcatctcttccagctcattctttttgcaaaggatactagaaagggaaaattttatattcaagctaaggcccaataattaggccttttactataccttattgtctcacagaggaacttagcaaattcttgttattcaagtaactactgagcaaattagtaagyagcagaccaaggaaaaacagaggtcgtcaatggggcatagtgaaagggacatgggctttggtgtctgccaggcccgatttcatatactaactccagacgttcttagcagctctataccatggaacaattaatctctagaagtttccgtttttcctccttaaaatgggaggtccaacctgttataagaattagaattttctctgtcaaacatctaagagctcctggtgttgagtgtgtac

SEQ ID NO: 766497 - DNA, 414 bp, Homo sapiens
cctcattttggaaggacagttttaccggatatagtattcttgattggcagctccttctttcagcactttgagtagatcatctctctcccttctagcatgcagttcctgctgaaaaatctgttgataatcttacagatgcacacttgtttgtgatgrgttgcttttctcttgctgctttcaggattttcttttggtctctgacttttgacactttgattataatgtgtctcagtgtagatctctttggattcatcctagctgcagttcttgagcttctaaaatttgtgaatccatttccttgctcagactcaggaagttttcagccattttttcttcagataggctctctgccattttctctctttattgtctgcaaattacataacacttatattgttgcacttgatgatgtcc

SEQ ID NO: 766498 - DNA, 584 bp, Homo sapiens
aaagtggaactttatttaacaaagatgatatataatgttttgtggtcctaaatgtctcaaaatggagtcacttatgacaggtaactcagcttacagtgaaattgttgacctcggagtgagaagcatatacatggtggactgaggtgataagccaaccccggctgtggccaggcaccctgaaacctgatgagaaagtaaasctaaaaggcacctgaggataatggccatggatactcccaggcattaaaaactgcaaagaaactgaccatggccacgatgcctgtagaagctctgccattgagaactctaagtcctcttttccagaaactgtggctgccagaagccctgcgttggggaaaagaaaggacctccactctggctggccttccaagggaaaatcagagctgctggttcatcagtcagtgtgctggtctctgaaactacttgctgtgtttttttctccctctatcttattactgcctgtgttattgaatatatttgcatgattgttgttgtgtgaaggcctcacaataaactgtgaatttgtaagcatttaactggctactgagtcatagggaaacttc

SEQ ID NO: 766499 - DNA, 481 bp, Homo sapiens
aggcatagtattgcttcagttaaaagaaaaagttcaggtgtggaccgaggtcagatctgttttgacaaggactctggccctgtccacctgggtcacccactcgaacatgtggcagcctaattgtcagacagaaagamaatggttgtgggaaatctaggcctcgtgtcagtatttaaagttcagaggaggagagatgatctctttcagtggttctctcttaggaactgagattatctcttccagacattctctcttaggagcaagagcatctctttttcatgcccagagcaaaaatctactgagttttgtcagctaatattgggttacccatcaattatttaaccagtctttttggtcaagaaaatgtcatgaaatctattggcttagccttgcattcctgagtccattgtggacaaagggaaaatgattccgttagcttagtcagctctggaggttaggctggttctccctgaagcacaca

SEQ ID NO: 766500 - DNA, 539 bp, Homo sapiens
ctgcatattaattaatgttagatgttaatagtaggggagactgggtggtgtgatgtgcctgtaattgtcttcacaatttttctgtaatctgaaaccttctaaaatatagtttatttttaaaaagagaattttgcagcttggtacggtggctcacacttgtaatcccagcattttccatctcagcctcattgcatgagctcaggagtttggcaccagcctgagcracatggtgaaaccctgtctctaccaaaactacaaaaactttgcagggaatggtggcacacacctgtgttcccagctactcaggaggttgaggtgggagaaggatggctggagcccaggacacggaggttgcaatgagccgagatcacaccactgcactacagcctgggcgacagagtaagactgtctaaaaagcaaaacaaaacaaaagaaaagaaaacaaacaaacaaaaaaacacaaaaaccaaagaaacttttctacatcaccctccattgaggttatgtgcatctttactctcatctgcagtgtaaaaaat

SEQ ID NO: 766501 - DNA, 631 bp, Homo sapiens
aataacaaaaccagttgtgaacagttaaatatttttatatcatatcctcagatcatcatgattttctgtgaaataaagaacattagtccctttctttggtaagggagtattcacaattctgtctttatataaaataattttcacttattttagttaattaatatttactatatgcctactctctgataggtgctgagtctcatcaagtatgtagcagaatatgaattttagagcaggtctattcatcttctattgctgtgtaacraatcactgcacatttagcaacttaaaacaacacatattgattatctgacagttataggtcagaattcaaggcaaaactgcaagtttgctgtcatggtgtcagcctggctgggatctcatctgagatttgactgaggaagaattcactttcaggctccttcaggttgctggcaaaatttatttccttgtggctgtgtgactaagggctctggctttttaccgcatgttgactggaggttttgtaggtcctagaggccccgacagttccctatcgtgttgtcttcccactgatttttgcttcttaaagccagcagaagcgtctcgaactccagtcaaagacagagttctgtataaaataacacaatca

SEQ ID NO: 766502 - DNA, 636 bp, Homo sapiens
ggatacagcaggtgttcaataatatcctttcagttatgtattctaatatgtatttaagtttctcatatgtatatattagtgattctttgtcagtaataagcatttttgaaaatgattcaatctattaaatggtacataggagctattctttaatgaatctgttaggctcatagttctagtagagaagccctacggttatcctgttttttagtagaggaacccaagtctaataaagattatacaaaattcctcaaacacaaatctaaaaagcttgggagacctttgtggcaggtctgtttgattcagagcctacgtagctaaccactatacccttagataataccttctcttaataattcctaataattcaatcttcaaagaggattatttgtctctttcctacttcccaaattttttaaactaaagcaagagatataagaaaktcttccaaattgtctagaaagtttcccactaattaacatggaatgttgcagctataacttacggttattttaaccattaatcaaaagcatataattaaagattaaactgaattaaatgtctccactaagtaattggcttaggggacttaatgcatactacagtaagagtccatgcacacacatgtcattggct

SEQ ID NO: 766503 - DNA, 584 bp, Homo sapiens
tcattccacggaagtggtcccctgtcaatgtcctatgcctggcataagctctttgttttatgatgacagaagaaaacaaaccacatggagggttattttgattgttttgtggcttaaaaccacagatacattgttaaatattgttaartatctaattgttagatgtaaagatactgttagatatctttagtaagatctattaatattttggcactcagaacactgaaaacaaaaaaaaaacaaaacaaaaggtcatctgaggttggattgtagaaaaaaaataatgtgcttaagtttgtaaataatattattacaaaagccaggttctgctataatgtttaacttatagatgaactgcatggttcaatgtcaagccagaaaacaaaaatatctcataataatttattagtttgtagggctctggcaaaacatgaaagtttatgtttcttaattaaccttgagttcattttatgtaagaaaattattaggaacagtaactagaccctcagtaaacatataattcacccaatgtcattgatgtatccctttctgacccttaaaaaaaatcaattaacttcctgaaa

SEQ ID NO: 766504 - DNA, 649 bp, Homo sapiens
ctgacattgaagaaaagaacagtttaggcagttatactaataccttagggaataacgatttatttcaatcatgtgtctaaaacaaaacaacacaccaacacacacgcacacagacacacacacacacagacaaacacacacacgccagcttaacatctgccattatagataagggaatagtaagtgtctcaatacaggatatcaaaaataaggataaattgtacactgaaagcactctcgtttttggtraagataacatctaatctgccatgcttgcttgtgatgccaactaaagtggcaaatggcatcaactaacccccagtcctcctggtagcttcatatttggccaacacttggtttcgccacaacttcctggcttgccagcaattagaggaggaaatatgccatggtgcttggacagattaatcaataaatggccagcagtcattctgagtagtagctgtccagtcagtaaccatcaattctgatcacttcatatcataacccaagcctctgcactgattctcttcactgcattctagggaccagattatttacctttgaaagcaacaatggggtagaactatgagttaaaaggagaagaccctgagagcctgagtctgtcacaggctggatatttttcctgctg

SEQ ID NO: 766505 - DNA, 649 bp, Homo sapiens
ctgacattgaagaaaagaacagtttaggcagttatactaataccttagggaataacgatttatttcaatcatgtgtctaaaacaaaacaacacaccaacacacacgcacacagacacacacacacacagacaaacacacacacgccagcttaacatctgccattatagataagggaatagtaagtgtctcaatacaggatatcaaaaataaggataaattgtacactgaaagcactctcgtttttggtgaagataacatctaatctgccatgcttgcttgtgatgccaactaaagtggyaaatggcatcaactaacccccagtcctcctggtagcttcatatttggccaacacttggtttcgccacaacttcctggcttgccagcaattagaggaggaaatatgccatggtgcttggacagattaatcaataaatggccagcagtcattctgagtagtagctgtccagtcagtaaccatcaattctgatcacttcatatcataacccaagcctctgcactgattctcttcactgcattctagggaccagattatttacctttgaaagcaacaatggggtagaactatgagttaaaaggagaagaccctgagagcctgagtctgtcacaggctggatatttttcctgctg

SEQ ID NO: 766506 - DNA, 642 bp, Homo sapiens
gttttaaaatatgcattctgattagaatcaattagcaaagtgctttgttgttatttttaatttttttttttttgtggaatcatctttgctgcagttttactttcatgttttgcatcctctccctcggtaaatactgtaaaccttaccttaaacatgtgtctagagtccaatcacttcatttcaaatttaaagtttgcactgtggtctgagctgccatcatctctctctcggttttgtttgtttgtttgtttgtttgtttgtttttgagacagagtctcrctctgtggcccaggctggagtgtagtcgtacgatcttggctcactgcaacctcagcctcccgggttcacgccattctcctgcctcagcctcccgagtagctgggactacaggcgcccgccaccacgcccggctaattttttgtattttgtttagtagaaacggggtttcaccgtgttagccaggatggtctcgatctcctgacctcgtgatccgcccgcctcggcctcccaaagtgctgggattacaggcgtgagccactgcgcctggcctctctcttggtttttttgtaggaactgcctaactggtctctctgttcggttttccctctcatacagtcaagtcttaacacaccagcctaagag

SEQ ID NO: 766507 - DNA, 579 bp, Homo sapiens
ctgatgggcagccaggtttgagaaccactgtatgaaatggcagaatgaggattccagctcatgtctgcctagtccccagtcctgtattgaaataaagcactgaggttcagcatttcacatgggacataatagtttttgttttatatttgttctgtatcaatatataacgttgttcatccttattgactacataggaaaaataccctccaaaagctgtattcttcttcataaagactgaaaatatatgataatttatgatgtatattacataaactcatcccaactttaatgataaagtaagaagatattgtgtgaaacaacagagccrattagggtaaatcagtaagtccgagccaggcgtggtggctcacgcctgtaatcccaacactttgggagaccaaagtgagccgatcatttgagcccaggagttggagatcagcctggcaacatggcaaaaccctgtctctacaaaacgcacaaaaaggagtagctaggcttggtggggcatgcctatagtcccagctgctctggaggctgagctgggaagatcacctgtgcccaggagtttgtggctgcagt

SEQ ID NO: 766508 - DNA, 581 bp, Homo sapiens
aaagtggaactttatttaacaaagatgatatataatgttttgtggtcctaaatgtctcaaaatggagtcacttatgacaggtaactcagcttacagtgaaattgttgacctcggagtgagaagcatatacatggtggactgaggtgataagccaaccccggctgtggccaggcaccctgaaacctgatgagaaagtaaasctaaaaggcacctgaggataatggccatggatactcccaggcattaaaaactgcaaagaaactgaccatggccacgatgcctgtagaagctctgccattgagaactctaagtcctcttttccagaaactgtggctgccagaagccctgcgttggggaaaagaaaggacctccactctggctggccttccaagggaaaatcagagctgctggttcatcagtcagtgtgctggtctctgaaactacttgctgtgtttttttctccctctatcttattactgcctgtgttattgaatatatttgcatgattgttgttgtgtgaaggcctcacaataaactgtgaatttgtaagcatttaactggctactgagtcatagggaaac

SEQ ID NO: 766509 - DNA, 644 bp, Homo sapiens
accagtttcaagccacaaatgtgaaatcactgaacacagatttgggaagagatggacacaactcttgaaagtcagtgtgacaaactgaaacacagcactgcttacatatagatatataaagtggatgactattttaacagatacaaaagcaaagaatctatgtgaatttttaactaaaactgaaaatattatatacctaaaagcatgttggttaaaatgatcattttgaatatctaaatctacacagtcataattatactgatgctattaaaacatggtataatggccttctgtatggaactcatattaattgtaataaatattcaattatataaaattttagagatcatctactgtatattagacattgtgctatgaacaggagttacacagatggctaggacttagtttctatttttaaattataaaaagggccaccaaatggataattccagtagataaaataataaatactaagatagaggtaagcatctgtcccrcagtacagagaagagccatttagcccagtcttgtttgggatggttttctgggaaaatgatgttgtcaaaaccaccttatgaaatgcaggctctgtcactttacagttattcctagtattgccaactacaacttcgatcccatat

SEQ ID NO: 766510 - DNA, 611 bp, Homo sapiens
aaagaataatagattactcacattagtgtaaaactggtaatttaggccctttggcacatttttcagaaagtgccctttaaactttgttaattgcaaaataactagattgcccacctgccatcatgacagaggcttcttgttgcttttaattctggagaaggagggaaaagatgcagctggcccaccagtatttttggctgagattcaagctgacctgctctgctctgccctttgcagtttgttcatggagataaaacttcaccaaaatccaccctcaaagttaacagatttcatttgcagcaaggtacctgtggtatggtarcacccacatcaggacaggaatcagagatttgtgttcaaactaagatcctgacacctactatctgtatttgaacttcagttttatcagccaagggaagagaacattaacctttatcacagagttgttgtaaggagcagtgagctaacatatataaactgactttcccaaaatcaaattgttgtggagttgtatttattgcagttatagacatgtagtgaaccctatgcaactgaatgcccacagtgctccttattaatttgatatctactcctcctgatgagattccagt

SEQ ID NO: 766511 - DNA, 652 bp, Homo sapiens
ctgctggtggaatgcactccaccccacttcccctaccctactgccattgcagttggagcctttgtgaacacagagcctgccagcctcacccccaccaatgctgtgctcctgcaacaacactgccattagagtgaaactagtatggatgacggtggaaccacccctgcctgctctgagcagccacagagagagcacacagacttgtgcccaccagtgtctcacccccatcaatgtcccacccccctgctaacaccaccaccagtggaaccacaaacacagtcaccaataagggatgtcctcctccagttacgctgtctcccccrctgctacgaatgcaatacagaggcaggaaccttggcacccactagcaccctgctgcagtcaatgagtgtgaaccccaccatgctacctctgccactggcacatgtgaacaagaatggatcctgctgccatagccctacaaaatgctttggcacctcccattgatgtttagggaccagtggtccaagagcaccatggcttccccaaccgcccaccgattgtagttggtttctaaccttgaggagccagagaggaaagtcagactcgcaagtcccctagagtttgagggcacagtccaggagatggaagctgagccttgccccactaaaat

SEQ ID NO: 766512 - DNA, 502 bp, Homo sapiens; identical to SEQ ID NO: 756733

SEQ ID NO: 766513 - DNA, 588 bp, Homo sapiens
aggatcccaaggcagaagaatttttcttagtacagaacaaaatggagtctcctatgtctacttctttctacacagacacagcaacaatctgattctctttcctttccccacacttcccccccttccactcgacaaaaccaccatcgtcatcatggcccgttctcaatgagctgctgggtacacctcccagacagggcggcggtcgggcagagacgctcctcacatcccagatggggcggtggtcgggcagagtcactcctcagttcccagacggggtcgcggcagggcagagatgctccccacatctcagacgatgggcggmcaggcagaggtggtgttagacgtctaggtggcacttcctagacggggtggcggccgggcagaggctgcaatctcggcactttgggaggccaaggcaggcggctgcgaggtggaggttgcagcgagccgagatcacgccactgcactccagactgggcaccattgagcactgagttgaaggagactccgtctgcaatcccggcacctcgggagtccgaggctgtcgtatcattctcgtttaggatctggagaccatcccggccaaca

SEQ ID NO: 766514 - DNA, 583 bp, Homo sapiens
agcatcccaaggcagaagaatttttcttagtacagaacaaaatggagtctcctatgtctacttctttctacacagacacagcaacaatctgattctctttcctttccccacacttcccccccttccactcgacaaaaccaccatcgtcatcatggcccgttctcaatgagctgctgggtacacctcccagacagggcggcggtcgggcagagacgctcctcacatcccagatggggcggtggtcgggcasagtcactcctcagttcccagacggggtcgcggcagggcagagatgctccccacatctcagacgatgggcggccaggcagaggtggtgctagacgtctaggtggcacttcctagacggggtggcggccgggcagaggctgcaatctcggcactttgggaggccaaggcaggcggctgggaggtggaggttgcagcgagccgagatcacgccactgcactccagcctgggcaccattgagcactgagtgaaggagactccgtctgcaatcccggcacctcgggaggccgaggctggcggatcactcgcggttaggagctggagaccagcccggcc

SEQ ID NO: 766515 - DNA, 583 bp, Homo sapiens
agcatcccaaggcagaagaatttttcttagtacagaacaaaatggagtctcctatgtctacttctttctacacagacacagcaacaatctgattctctttcctttccccacacttcccccccttccactcgacaaaaccaccatcgtcatcatggcccgttctcaatgagctgctgggtacacctcccagacagggcggcggtcgggcagagacgctcctcacatcccagatggggcggtggtcgggcacagtcactcctcagttcccagacggggtcgcggcagggcagagatgctccccacatctcagacgatgggcggccaggcagaggtggtgytagacgtctaggtggcacttcctagacggggtggcggccgggcagaggctgcaatctcggcactttgggaggccaaggcaggcggctgggaggtggaggttgcagcgagccgagatcacgccactgcactccagcctgggcaccattgagcactgagtgaaggagactccgtctgcaatcccggcacctcgggaggccgaggctggcggatcactcgcggttaggagctggagaccagcccggcc

SEQ ID NO: 766516 - DNA, 515 bp, Homo sapiens
ttttgagcaaaataaatgattattgtttctataagccaaagtttgggggtagtttattagatagcaacagatgactggaaccaagctaacattagaattaagttttcaaaatggcataaattaactactaccagagcacagaaaaagaaaaaaataaatttttcctggagagaaaagaaagggcaattacagaggaaggggctttagagcttggtctcagaagatgaatagagtccagaagatggacaacagaaggttaaaaaagtggacacacgtggtggttttggaaaatgtggagtatatggtggatatctgtgagctttgcctcctttggtagacctyactgttgatcaccaagatttctgattctcctttccatccagacacacaccttcttgaagttaggtatggccatgtgacttgttttggccagtcaatcatcataggaagtgtcatgagtctcttttggtgaaatatttaggagcctgtacacaatttccccattctgttgactt

SEQ ID NO: 766517 - DNA, 619 bp, Homo sapiens
tcatctgagtatcttatttctgttgtctttttgcctattcataaagatccatttgtctttaggatatgaacttctatcagtatccacagaggctttgtgtaattttttagtgaatttctttttttttttttttgagatggagtttcactcttgtggcccagctggagtgcagtggcgcaattttggctcactgcaacctccgcctcctgggttcaagtgatctcctgcctcagcctcccgagtagctgggattacaggcgcccgctgccgtgctcggytaatttttgtatttttagtagagatggggtttcaccatgttggccaggctggtctcaaactgctgacctcaggtgatcacctgcctcggcctcccaaagtgtgggattacaggtgtgagccaccgtgcccggccatgaatttcttaaatatttaaatttggttatttcacttcagatttacctttctcccattcagttccaatgagtgtggctttgctcgtattgtgcactgttgtccccattttaaggtgcagaggtgcttcttcagtagttgggttaaatcattgcttccacaatggtgaacagttcatgtttgttatagctcagccctgtggtgtttc

SEQ ID NO: 766518 - DNA, 611 bp, Homo sapiens
ctaaagctaaatgaggagctgttttgtgattccaagccctctgccattaacagattcacaaaatctaaaatctgaattccccagatgcaggcgagagaaaatggatttgaacgattgtttcctccagcaaagaatgatccggtgttcgtctgaacaagcctgtatactcattgtctttttttagcttcctggggaaaacattcatgatcggcaatgataacaattataaaccatcakcagggtgtggtggcgcttgcctgtaatcccagctactctggaggctgagacaggaggatagcttgaacccaggaggcagagattgcagtgagctaagatcacaccacagcactccaacctgggcgacagagcaagatctgtctaaaaaaaaaaaaaaaacaaaactataaaccgaccacctgaccaatgattgagaagttcaaagtcatgcttccaggagctgggttcttaaagcaaaatcaaaccaactttcacagagagaccaacaggaacacaactcaatcgctcacatattaagcccggatgaattgctgtcatggtacattctaaggggaaacttaccaccacacatttgtctttaacaaaagtcctca

SEQ ID NO: 766519 - DNA, 611 bp, Homo sapiens
ctaaagctaaatgaggagctgttttgtgattccaagccctctgccattaacagattcacaaaatctaaaatctgaattccccagatgcaggcgagagaaaatggatttgaacgattgtttcctccagcaaagaatgatccggtgttcgtctgaacaagcctgtatactcattgtctttttttagcttcctggggaaaacattcatgatcggcaatgataacaattataaaccatcatcagggtgtggtggcgcttgcctgtaatcccagctactctggaggctgagacaggaggatagcttgaacccaggaggcagagattgcagtgagctaaratcacaccacagcactccaacctgggcgacagagcaagatctgtctaaaaaaaaaaaaaaaacaaaactataaaccgaccacctgaccaatgattgagaagttcaaagtcatgcttccaggagctgggttcttaaagcaaaatcaaaccaactttcacagagagaccaacaggaacacaactcaatcgctcacatattaagcccggatgaattgctgtcatggtacattctaaggggaaacttaccaccacacatttgtctttaacaaaagtcctca

SEQ ID NO: 766520 - DNA, 623 bp, Homo sapiens
ccttatatagaaattaactctaaatggataatacacccaagtgtaaaatataaagctagaaaacttttagaataaaacaaagggaaaatcaatatgaccttgggtttggcaatgagtttttgaatataatatccaaagtacaatctataaagaaaaacgtgataaattggattttatgaaaattcaaaccttttgttctgtgaaagacagcattgagaaaacgaaagcacaagccagacacttggttaaaagtatatgtttgataaaagaatgtatccagtatatataaataactcttaaactcagcaataaacacacaaactttcaaacagaaaagatctgaattcacttacagaagagcttgtgaagcacatttctgatcctcacttctagagattcttagtcagtttgtgtaaagcctgkgaatttgtaattggaacaggttcccaggtgatgctgatgctgctagcttagggcccacgctgctctaggtgaaactgctgcaggtggtcagattttgaggcatattcacctgggtgtctccatattggttgtagcctactcaggtagaagtagaatttgttcaatgatattctagccaaacatttttctttttttttttt

SEQ ID NO: 766521 - DNA, 470 bp, Homo sapiens
gtaagtttaacaaaaatttttactaaatattaactacaacttgatgggtgtaaaaatgaaaagttagataaaattgataatattttagatagaatataaaatatcctccaggagaaataaagaaagatggatctttttctgaccaagatagaataatagcaaaaagatatatcctgcctaaaaccactgaaaaatcaacaagatatagtaaacaagttttgatactttagatatcatgcaatgaaggtcagtgaccccaaagtgatggaaaatgaaagagctgagctccacgaytgccctaacttactgcctggctacagtttacaggatgcagtatgggaaacgggaatccaggcagtgtctagcagtctccatgaggtgaagacaccgagatgggaatcttcaggggccacagtgtctagaacttgcaagatagaatactagagaggagagagagtgagaactctgga

SEQ ID NO: 766522 - DNA, 641 bp, Homo sapiens
gaagacatggaacaatgaagagggtggaagatgatgtgattcattttatttaaagaaatcaagattatccaaaacataagatgttagtcagcattttccaaagcacattccctggatctctaatttatttggggacaaatggatgtgtttcccaaacaaattctgcatgtatattgcctaccatagtacctggcatgtggtaaataatcagtatacaatttctgtgtttgtgctcttagtggcagattctttttgaattgcatttttgagggtaaaaagaggctaaaagttaaacttgttctattccttactgtctggtttgtaccattcctgaaatctccgttactttctggaacatttactcaaaatcyacattactttcttctttgacttctgccaaaacaatctagtgcattgcgactcaaagtgtggttcccctaaccattactgctccactaacaaataacaaatcaggacaaaatacaaatcagtgcattccttcctacattagaaaaaaatgtcaattgaactaagtaacatccttagtaatatagctagtttatcttctcgttggttcttcttcctgacaaagaccagtaacaagtgattgatggatctgtacttaaagtagcagtgacctg

SEQ ID NO: 766523 - DNA, 649 bp, Homo sapiens
aattattatattccttgcaagagaaattactctatattttaaaagcatcataagtataagataaaacacatacacctgggttgtaatcatataaaatataggcttttatatattggcttctgtgtttgaaactaacacatctacatagtaatagagtggcccagcaccattgaatatgaaacaaattttgtttctttatgttaggaatccagtaagccctgcgactggttgattttgaaagtcaggtaaggtttctttactccctgcaaggaggcataggtcctatgaatctgggttcccgctggggacaagttggtatacaaacctacccctgagtgtgacactaatcctctgtcctcagcatctaatcccaagcctcccccaagggtaatttgaaggttcccgggattttgggattgggggttacataactgccaggtgactaaggggttttaggctggatggaaagtttagaagacrggggcttagggaggctctgtctactcttaagtatcttcactgcttccctctgtcttccatcttccttctcattccctaccccctttttctctatctcatcttctttctatttgccttcctacaaaggacaacaaaaaagggagaaagtgtgaaaatctcttttagtaac

SEQ ID NO: 766524 - DNA, 641 bp, Homo sapiens
tttaaacttggtatttcctcttctcagaatgcccattcctttccctttattcattagttgaataccttgcaatcctttagactcagctaaaatatcagcccctctggaagacctaaaatacaaagtttatattaataattttagctaataactttttaagttgttttcatgtactatggtaccttgctaagttctttatttacatttcctcattaagctgtatatcatcaccctctatgcctagctattgttgatgtccccattttataaaggaggtagataccaaggcttagagtagttagtttgttggccaagttcataggayggtaatggtggacaaaaggttcaaacctagatctactagaccctctcaaaacgggaatctaagagcccagactctagggtcctccctggattggcagctgaagctaacccatccttcccgcacagacattataatgaagcagcatcctctctgctccatgtccaggcagatctctaggcatttagtgtgaccacttgcttgaatcagcagcctgagctggcccatccttcctttgcatactgtggtaaagtgccgccttccctgccccaagttcaggtgtatttacctgtataaaaataattcaaagcacacattt

SEQ ID NO: 766525 - DNA, 601 bp, Homo sapiens
aaaatatatatgggaataattcaagaaaattctcctaatcctgccagagaggtacaaatctagatagaagaaatccagagaacacctgccagatacaatagaaaatgaacatcaccaaggcatatagtcttcagattctccaagatcaatgctacagaaaaaaatcttaaaggaagctggagaataaaattwaaaaaaattaaaaaatgaaaaggaagctggagataaggtcagatcatgtacaaaaggaactccatcaacctaacagcagatttctcaacagagatgttacaagacaggagacattagagggctattttcagcattttaaagaagagaaattcaaaccaagaattttatattccccaaactaaggctcataagtgaaggagaaataacatttttccagacaagcaagcactaagggaatttgttaccactagacctcccttacaagagatctctaagggtgctctgaatgtggaaatgaaaggacaatatctagaatcacaaaaacacatttgagtacatagcccacagaccctataaaacacccacacaatagaaacaatgaagtaatcagctaagaatttcataatag

SEQ ID NO: 766526 - DNA, 625 bp, Homo sapiens
cacatttgagtacatagcccacagaccctataaaacacccacacaatagaaacaatgaagtaatcagctaagaatttcataataggatcaaaacctaacatatcaatattaaccttgaatgtcaatggtctaaacactccacttaaaaggcatagagtagcaaatggtatgaaaatttaagacaaatccatctgctatattccagagactcaactcacacataacaacacccacaggmtcaaagtaaaggattggagaaaggtctgccacacaaatggaaaacaaaaaaaagtaggagttgttattcttgtagcagataaaatagactttaaatcaacaacagtagaaaagaacaaagaagggcattatataatgataaaaggttcaattcaaaaagaagacttaactatgctaaatgtatacacacctaacaatggagcatccagattcataaaacaagtaattctcaacctgcaaaaagacataggtagccacacaataatagtgaggaacttcaacaccccactgacaacattagacagatcattgaggcagaatactaacaaaaatattctggatgtaaatttgacacttgacccattgtatctaatacacatctacagaa

SEQ ID NO: 766527 - DNA, 627 bp, Homo sapiens
cacatttgagtacatagcccacagaccctataaaacacccacacaatagaaacaatgaagtaatcagctaagaatttcataataggatcaaaacctaacatatcaatattaaccttgaatgtcaatggtctaaacactccacttaaaaggcatagagtagcaaatggtatgaaaatttaagacaaatccatctgctatattccagagactcaactcacacataacaacacccacaggatcaaagtaaaggattggagaaagrtctgccacacaaatggaaaacaaaaaaaagtaggagttgttattcttgtagcagataaaatagactttaaatcaacaacagtagaaaagaacaaagaagggcattatataatgataaaaggttcaattcaaaaagaagacttaactatgctaaatgtatacacacctaacaatggagcatccagattcataaaacaagtaattctcaacctgcaaaaagacataggtagccacacaataatagtgaggaacttcaacaccccactgacaacattagacagatcattgaggcagaatactaacaaaaatattctggatgtaaatttgacacttgacccattgtatctaatacacatctacagaata

SEQ ID NO: 766528 - DNA, 573 bp, Homo sapiens
agtacggagctctgtgaagtatgtttgagtcgcattaaagtggagcagtcagggagaggaagagaagtggctggtcaagtaagaagaaagtcatcagagagtatggtgttctagaagcctgcttaagaaagactttgcagaaaaatggagggactcactctattatatgctgctagtagatcaggtataagaaaaacttaaaattgaccactggatttagcagatggaggtcctgagtaatcccgataagaaaattttcattctcactcagttgagttcccattgastgagaatgggagaagtctgagagaaatgagctcaagaagagaatatagagatggtgacagcccttttgagaaggttttctgtaacaaggactggaaagcaggttactagatgaaagtcagatgaagaaattttgaacatgaaataatttgcagcatgtttgtatgctaaagtgaatgatccagtaaagatgggaaaatggataactcagtagagtaaataattaatttgctagagtgacaatcttgagtagactagaggaaagtggatttagagcaaatgccagca

SEQ ID NO: 766529 - DNA, 537 bp, Homo sapiens
tgggcagagaaagaggctctttcttctgaggtaatgtgttagctgggctgggattaaagcaatcatggagcaagcctgttgcctaggttgctctccccacccttaccatggtccggtccatctgctttgagagatcagaacagagtcaacwatttttagcaacatgttttcttgtccttgctggctttgttttagtttgaagtacacaaatttggggtaccatttctatttagataattgaacttgaatacttatgctggttgctaagtctaccagacattctcaccaaaagaggaaagggagtaattcaaaccatttaggaatttggggctgtaatgatgcaagtgtggctatcagttttctttctttaaaataaaattggcagcttaaataatagagtcaaattgaccagatgttttgcacttggttaaatgcattccaattaaccaatcagtacgaataactgattagatcttttgctaaagaattcccattaagcaaataacaacaatggcaacaacaacaacaacaaagcag

SEQ ID NO: 766530 - DNA, 537 bp, Homo sapiens
tgggcagagaaagaggctctttcttctgaggtaatgtgttagctgggctgggattaaagcaatcatggagcaagcctgttgcctaggttgctctccccacccttaccatggtccggtccatctgctttgagagatcagaacagagtcaactatttttagcaacatgttttcttgtccttgctggctttgttttagtttgaagtacacaaatttggggtaccatttctatttagataattgaacttgaatacttatgctggttgctaagtctaccaracattctcaccaaaagaggaaagggagtaattcaaaccatttaggaatttggggctgtaatgatgcaagtgtggctatcagttttctttctttaaaataaaattggcagcttaaataatagagtcaaattgaccagatgttttgcacttggttaaatgcattccaattaaccaatcagtacgaataactgattagatcttttgctaaagaattcccattaagcaaataacaacaatggcaacaacaacaacaacaaagcag

SEQ ID NO: 766531 - DNA, 575 bp, Homo sapiens
aactgccatagcatttcaacatggtggtctaagctcattgtactatatctcaccacaaccaaattagccatttaattagcctgaaatggtccttgtaggggaataatggatacttagtcaataacataatcattatgtttcttagtcacatattaattcactttctgaagtgctttcaaaagaaaagaggattactgastcagttacctcagagttgaataataactgagaaattcaagaaaagaatctctcagtctgttatattgctgtgtttaagttataattcagaaccaagtaatattgtatatccatctatatcgtaattttataatctctaaaagaaatctctaaagtattattcatcatagaaaatagaacatgttcagaggagttaagtggcttttcataaccagtcaatatggcagaaaaaaatctaaaactcaaacctgtatggtagacccaaaatcctaagcctcttctcccatgaatttcctacctagttttaaatttaaaactttgctctccagaattttaatcatccaaagaatgttcacgttgaataaataaatgtgttc

SEQ ID NO: 766532 - DNA, 443 bp, Homo sapiens
ttattcatttattaatttcttcattcattctgcaaatatttgctgaacacctattataacctaactgggtgctggggataaagtgttaagccagatagccacataacatataacattcttcttgccctttcttatgataatgtttttctttaaagtgatttgaagtcaaagatstgggttaaagtcccaactctatttcttagctgataacttctagcaagtcctttaacttcacaggttctcagctggttcatttcagagaaaatggtacttgtctctctgatgaggttataagagactcagattttatgtccggaatgacaggtgagctgtacacacactgctacattggatgtatttgttgctgtcatcgtaacttgtatgcatatcccagttgtgcatgcttttacctctggcagccaaggaacaaccacggaaaatca

SEQ ID NO: 766533 - DNA, 625 bp, Homo sapiens
aacatcagcagtagcaatgtagtttttaaaagaaagtttctttagaatactggtgatctgggaggagggccaatggttttgctgttaaaatacaatgatggggattccttcactctggaggataagaaaaacacaagttaatggtagattgaactgaatgaataggcactcttcctccagtgtttcttaaactttgacatcataatattcacagtccactaataactgatgaaagaaaaataaaaggtgacggctaacaaaaatactaactgagaaactcggaagccactggactgcattctggatgtaacatttgcatatttcagatgtgtaatatagccatgttttctgcaagttaggttcctagtacttatgatagaaataagtttatctacactttcragtattccataaatctaaccataatccccagctactctgctctttccataggtaaaacaataattaatcaagatagctcagttaacaaaaaaaaaaaaaaaagcctgacttacatttttgtttgttcatttctagtgctctttgctgaggttgttgaaacaaaattatcccactaggcattccttgttaccttaatcagttccactctttcttcttctgtacc

SEQ ID NO: 766534 - DNA, 624 bp, Homo sapiens
gattaattcacatttcttataaagttgtacaatacaaattgcataagaaaataaatgactcttttctattacttggtggaaaaagttgatttatagtccctgagagaaagaactaaggaagagagttaaaattccatttactatatgagatttttaaagatctagcactcatgcatgttgtgaaaatactaagtatctcaaataatgtgtgagattctccttagaggtaaggttttatattgtsaagacattttttcttttattttttctattgagttactgtctttatgctttacttgtacctcatactataaattaaaagattagtgttcggtgtcattgcattaatgaagattattatttacaacaatagctagaaagtgattggaggtttaagtccagtaacttgagcaattaaaacccttgtagattcctatgaggtttaaaaaatacatgttgttaagggaaacctatgtactcaagaaagatagttattgctagtgtaccttcttcaggaaaccaaaaatgtctctcatcaaaaacggcttctggaaaagactggagttttattaacatcttagtatagatttaaagaaatgaatctcttctcctaacaactagatt

SEQ ID NO: 766535 - DNA, 633 bp, Homo sapiens
gtccacaattatttaatcatgttaaacattatttgcaagaaacttacaaaaatttcaccagataatattccaccaaacctgtgggggaagtgccccatgagataatatcccaggtccccaagtcctctaccattcctggagtgtatatggttccccaggagrgtgcaggaaggacttggtgcctctacttctacagccttgagaccttcttttataatagtattggtccgcccccatggagtcagtttgtggctggaagtacagtttgcacgattagtgtgcggaacacagcgtgggctgaacaggctggagggaaaaggctgcttcttggggaccaatttttagaagaaagtgcctcctctgtctctgtctcagcccttaccaattcttcttgccagctgtggtgtctgtgtttgcccactccagggggattacacattcattttatgtggcacaagaggctgagaagaaaaattgctggcaaatgagacacctgtgacatttggggtaaacacaattacataaagccctggtttatgggcttgtgtcatcactatgggaggatcaccttctccctcctccaatggatgggagacctggctataagcagcagaaggggactttataggctgt

SEQ ID NO: 766536 - DNA, 638 bp, Homo sapiens
ttcttggagaggttaagtaacttgcccaaggtcatacagctggtacatggtagagcagggatctattccaagtctaacacagtatccattctcttaatccctatactataatgtcacttgaatatggtaacaaaagtagttagaaytgccagtgtaatcaactagaaacaaaattcaagcctacttgatagtttagctcataaaatctgtctggtatcaccaaaggtgataggtgatttgggctggggagaatctataaattattttcaacaattcaaatagcctaatgcatgggttcttaatctgtttctgtgctacagtctcctatgactgtctggtgcagcctgtggactaccttctcacaataatgtttctaaatgcatgctggctgggcatggcggctcatgccgataatcctaggactttgggaggccaaggcaagaggatcacttgagctcaggagtttgaaaccaggctgaacagcatggcaagaccccatctctacaagaaaatacaaaaattagtcaggtgtggtatcatgtgcctatggtcccagatacctgggatgctgaggtgggaggatttgttgagcctgggagttcaaggctaaagtgagccatgatggtgctatagcactt

SEQ ID NO: 766537 - DNA, 525 bp, Homo sapiens
ccatattgatgatcttgatggatgacaagaccttgaacttctttctaaagcatcaagactacatgtttttcaatatttctagtattaagcatacttactgtaataattttttaaactagcattatatgctacataatattatcatatataacaatactgatttctcaccataagaatttttttaaatttaattttattttttgagacagagtctcacgtaataatattttaagcattagggtgtctctgctatttaagcacacatgtttttcctttccccggtttactgaattatttattagctacagagtattcatgctctgtgctaagagccacttctcttcccttctgcaactggagcgcaagtacataytctatttcattatcaattttaaaacctacctgaagctaaggaagtaattattcatagggatggaatcgctggggtgggagtatatttttaaaaacattaggacttgtttttagtactgggtgtatttgctgcttttttttgtttgctaatag

SEQ ID NO: 766538 - DNA, 655 bp, Homo sapiens
ttactgagactgacagaacgtttcttgccaggataaagccccagttttcggcagcatgggtctaaagctgcctcccttatttgggccctatacagtgacattagaataaggagacatctgcagctctaggggagggaaggaaggacccatgcaccatccaggtttggataataaatatttgaaaatttacaggatgagttgctaatcgtttttgttgttgttttgtttttttgagatggagtctcgctctgtctcccaggctggagtgcaatggtgtgatctcgtctcactgcaacctccacttccygggttcaagcgattctcctgcctcagcctcccgagtagtgggattacaggtgctcgccaccacgcccagctaatttttttgtatttttagtagagacagggttttgccatgttggtcaggctggtctcaaactcctgacctcaggtgatccgtccccctcggcctcccaaagtgctgagattacaggcatgagccaccacgcccggccgaattgcttatctgttaagctgatactcttcaaaagagatagaggtgacctcctacaaacagttttaagccattaattataacaattcagatcaagttgtgaaacaatagaacttttaaagaattaaattccctttgagt

SEQ ID NO: 766539 - DNA, 655 bp, Homo sapiens
ttactgagactgacagaacgtttcttgccaggataaagccccagttttcggcagcatgggtctaaagctgcctcccttatttgggccctatacagtgacattagaataaggagacatctgcagctctaggggagggaaggaaggacccatgcaccatccaggtttggataataaatatttgaaaatttacaggatgagttgctaatcgtttttgttgttgttttgtttttttgagatggagtctcgctctgtctcccaggctggagtgcaatggtgtgatctcgtctcactgcaacctccacttcccgggttcaagcgattctcctgcctcagcctcccgagtagtgggattacaggtgctcgccaccacgcccagctaatttttttgtatttttagtagagacagggttttgccatgttggtcaggctggtctcaaactcctgacctcaggtgatccgtccccctcggcctcccaaagtgctgrgattacaggcatgagccaccacgcccggccgaattgcttatctgttaagctgatactcttcaaaagagatagaggtgacctcctacaaacagttttaagccattaattataacaattcagatcaagttgtgaaacaatagaacttttaaagaattaaattccctttgagt

SEQ ID NO: 766540 - DNA, 637 bp, Homo sapiens
aaactctactgggttctctcattcaaattggagtaacacagggaaggcaattcttgtattcatggtcttctgttttcagggggccgtggtctcctgcaaagtgctaaagcctctctcaagtatgatgaaacagcgccaccgtgtggtctcgaggcttaccatcattcactcatttgcctttggatttttacggagcattggtcaataaacatcagaatatgtgtaaatgcatattgaaataatggaaattgaggtaaatttggtggaatcctcccatagctgtatttgtgagcacttattagagaaagtatccattcatcattggcatggacatgcttgaataaggtttgtgagtgacaacaagcttaatattgtccaaaagtctatcttkgcgatggtggtaactaaaaaatgcatttttccagaatatctccctccattctctgatgaaagagtctatataatgtgtgtatttcatgaaatgcattttattgtatgcggagggggagagagaggtatataaggcaacatatatttaacagaaaataagaatgaaaaattgtaaaagtcttcttggctagggccactcatttatcctgaagttaatcaagcaaccaagaccaaagcactttgggga

SEQ ID NO: 766541 - DNA, 618 bp, Homo sapiens
gcaacttgccgaggacacctcactaataatgtcagagatgagatgattaggccacgactcctgagcctgcacactcaaccacgcacacactggctcccagcagtcagcctgcaatgcttcctacttgccaattccttctggccatgcttcaatgcttgagaaaatagactaattattatattcatattctttttttttttttttgagatggagtctcgcactgtcactcargctggagtgcagtggtgagatctcagctcactgcaacttctgcctcccggattcaagcaattctcctgcctcagcctcccgagtacctgagattaaaggcgcctgccaccacgcccagctaatttttttgtgtgtgtgtgtatttttaatagagacggggtttcaccatgttgatcaggctggtctcgaactcctgaccttgtgatctgcccacctcggcctcctaaagtgctgggattacaggtgtaagccaccgcccccggcctgtattcatattctttttcaaacatgaaagaacttattcaagttcctattgccatggggctagaggccaagaatgaaaagggttatcaccatagaaggcggtgtgggtggaggtggtagtaa

SEQ ID NO: 766542 - DNA, 696 bp, Homo sapiens
ctgggatccatatgcagaagaatgaaactaaacccctatctctcaccatatacacatagaataagctcaaaaacgaaacccctatctctcaccatatccatgtaaaataagctcaaaatggattaaagacttaaacataagactcaaaatgataaaaccactagaagaaaacaggggaaacactttaggacactggtgtaggtaaagcttttatggctaagaccccaaaagcataggtgataaaaccataaacagacaaatgggtctacattaaactaaaaagtttcttcacagcaaagggaacaatcaatagagtgaagagacaacctgtagaataggagaaaatatctgccaactatccatctgaccaaagactaatatccagaatatacaagcaactcaagcaactgaagagcacaaaccataaataataccattaaaaagtgagaaaagggccaggcrtggtggctcaagcctgtattcccagcacctggggaggccaaggtgggcagatcacgaggtcaggagatcgagaccatcctggctaacacggtgaaaccccatctctactaaaaatagaaaaacttagccgggtgtggtggcaggcgcctgtagtcccagctactcggaaggctgaggcaggagaatggcgcgaaccggtgtggtggagcttgcagtgagccgagagatcctgcc

SEQ ID NO: 766543 - DNA, 696 bp, Homo sapiens
ctgggatccatatgcagaagaatgaaactaaacccctatctctcaccatatacacatagaataagctcaaaaacgaaacccctatctctcaccatatccatgtaaaataagctcaaaatggattaaagacttaaacataagactcaaaatgataaaaccactagaagaaaacaggggaaacactttaggacactggtgtaggtaaagcttttatggctaagaccccaaaagcataggtgataaaaccataaacagacaaatgggtctacattaaactaaaaagtttcttcacagcaaagggaacaatcaatagagtgaagagacaacctgtagaataggagaaaatatctgccaactatccatctgaccaaagactaatatccagaatatacaagcaactcaagcaactgaagagcacaaaccataaataataccattaaaaagtgagaaaagggccaggcatggtggctcaagcctgtawtcccagcacctggggaggccaaggtgggcagatcacgaggtcaggagatcgagaccatcctggctaacacggtgaaaccccatctctactaaaaatagaaaaacttagccgggtgtggtggcaggcgcctgtagtcccagctactcggaaggctgaggcaggagaatggcgcgaaccggtgtggtggagcttgcagtgagccgagagatcctgcc

SEQ ID NO: 766544 - DNA, 626 bp, Homo sapiens; identical to SEQ ID NO: 731156

SEQ ID NO: 766545 - DNA, 626 bp, Homo sapiens; identical to SEQ ID NO: 731157

SEQ ID NO: 766546 - DNA, 575 bp, Homo sapiens
gcactttctctcacctcctcctgggctcctgatcttgagaggaagggcgaccaggtggagagagatggaggtggaggaagattgaagggccaggccaggccctttccctccaaagctgtaagtcaggcatggactgggggaatgagaaagcctttacattgcgggtgagatttgattttaattgatactgctcagggcttttcagttcctgaaaggtgagtctgaatgattcagatggcacttttcttatgcctgagaggccctggacagctgcggtcctaagatgtcaaggggcatggaagggagaggctkcagagttccaccaaagggtgttttcctggcacccaacaagggccagtaagcagttacagagacacaaggatactaggaaggggagtctgggaagagggaggagcagcagggagaacgggatagggtgggcctgaagtgtttgtgaacctccccgagtccacctgtggaaggagagaggatggtggggaacaaggctgagaggaaaacagcatctcactgcagaggtcttgatctaggacttcagcattctttttttacttttt

SEQ ID NO: 766547 - DNA, 575 bp, Homo sapiens
gcactttctctcacctcctcctgggctcctgatcttgagaggaagggcgaccaggtggagagagatggaggtggaggaagattgaagggccaggccaggccctttccctccaaagctgtaagtcaggcatggactgggggaatgagaaagcctttacattgcgggtgagatttgattttaattgatactgctcagggcttttcagttcctgaaaggtgagtctgaatgattcagatggcacttttcttatgcctgagaggccctggacagctgcggtcctaagatgtcaaggggcatggaagggagaggctgcagagttccaccaaagggtgttttcctggcayccaacaagggccagtaagcagttacagagacacaaggatactaggaaggggagtctgggaagagggaggagcagcagggagaacgggatagggtgggcctgaagtgtttgtgaacctccccgagtccacctgtggaaggagagaggatggtggggaacaaggctgagaggaaaacagcatctcactgcagaggtcttgatctaggacttcagcattctttttttacttttt

SEQ ID NO: 766548 - DNA, 554 bp, Homo sapiens
aaagtactataattatgcttcaatcaccatctatctggactgcctacattattaaaaccctatgaagaccaattggggtttacaaagtacagacccgaaagtaagttaaaatgacattttccactacaaaaatatatgcttttgtgtaacaatatttaacacttgaaatagtgtgtcaatgtgttactcttgatttcaggattaaaaactgtcattcaactttgtttttcatgcaatttattgtaactttatttcattaatcaggaaatatccatagagaatttggcccaacattcttaattaaatttgaaatctcasacatgctacttgtgaaaaatctaccagtattccttaccaccatggccctttctaactatgccattttatcagctatttgcacaaatgcctagagttcagtcatggggaaactcctgagtcaaaaaagaaaataaaggcaacacttcagtgggatagtcaaacataaattgcaactccatcacacaactaattaaagatacaattgactaacaattaaccaataaaaatgacaggta

SEQ ID NO: 766549 - DNA, 594 bp, Homo sapiens
atgtcttgctgatttttccttccatgcctttgtgcttgatactttgtgtctaataaaaaaaaatgtttggtgtgttgtaaatattttttctcaagggagcaaagtttcttcttccatttaactcttggtcaagtaagtggtggcgggatgatttttcatactgacgccttctcccaaaatgtaatagatttttacagagaagacagcacatcagcttccaggatgttacaattasacacggatgatcttttctatgtgttctgtgtttttggcattaatcggacctctagcccaatggtgacatgagcttgatgatcttcgtattagacagataccatgacatatgcactctttttatattattaatgaacataggcaaagaaatgtgcagcacaggcctaataagatagagagaatttccatttctattgttatcttttacatttatttggcttggcttttattttaagggatagaattgctttataggaaaaaaaaaagcagtaggcaaactataaggatcattaagtctcagggttagctcaacccttaactaacttaaagaatttgagtattcctcagtgaacaatttgt

SEQ ID NO: 766550 - DNA, 594 bp, Homo sapiens
atgtcttgctgatttttccttccatgcctttgtgcttgatactttgtgtctaataaaaaaaaatgtttggtgtgttgtaaatattttttctcaagggagcaaagtttcttcttccatttaactcttggtcaagtaagtggtggcgggatgatttttcatactgacgccttctcccaaaatgtaatagatttttacagagaagacagcacatcagcttccaggatgttacaattacacacggatgatcttytctatgtgttctgtgtttttggcattaatcggacctctagcccaatggtgacatgagcttgatgatcttcgtattagacagataccatgacatatgcactctttttatattattaatgaacataggcaaagaaatgtgcagcacaggcctaataagatagagagaatttccatttctattgttatcttttacatttatttggcttggcttttattttaagggatagaattgctttataggaaaaaaaaaagcagtaggcaaactataaggatcattaagtctcagggttagctcaacccttaactaacttaaagaatttgagtattcctcagtgaacaatttgt

SEQ ID NO: 766551 - DNA, 373 bp, Homo sapiens
ctgtggtctcagctgctcaggaggctgaggtgggaggatcgattgagcccagcaggtcaaggctacattgagccatgatcaagccaccgcactccagtctgggtaacagagtgagaccctgtttcaacaaagaaaasagtggctgaatctggttttctatgatttagtagagaatttcttcgtcaatgtttatgacagatactggtctatagttttcttgcagtgtctttgtctggctttggtatcagggtaatgctggcctcatagactgagttaggaagtattctcttctctttaatttttgggaaaagtttgagaaggattggtgttagtccccttttaaatccatggtagaattgaccagtgatgctgt

SEQ ID NO: 766552 - DNA, 620 bp, Homo sapiens
gttctaaaggtggagattccagttgtcctctccctgtagagtcatggacaacattgacccctcacagcaatgatgtgtgacaagacacatggagcagtgccaaccaggaaagctcccccaagctttggtgtccacagtttttattcagacatcatgcttgactgactacatagctgaactcagtctctagctcctctggaggtcaaactgatatcccaagactcaaagcctccactgtaaatgagtttgtgtgatccaaattctcaagataaaggacattcttatcaggcaggatatgctgagggtttagagattaccaggggcaaagaaagagcaaaggccagccctgacttaaaatctatgttatataacccattactcagcttcaataayaagtatatctccaaccaccttccctttccatattgttttccattaaaactatgtggaggccaggtgctatggctcacgcctataatgccagcattttgggaggctgatgtgggaagattccttgagcccaagaatttgagaccagcctgagcaacatggcaggacattgtctgtacaaaatattaaaaaattagccgggtttggtggcacacccctgtagtcccagc

SEQ ID NO: 766553 - DNA, 628 bp, Homo sapiens
tttaaaatataagatcatatcatcagcaaacaaggataatttgactttttcctttacaacctggatacactttatatcattctcttatctgattgctctagctaggacattcagtattatgttaaataacagtggtgatggtgggcatctttgtcatgttccaggtcttagaggaaaggctttcagttttcccccattcagtattatactagatgtgggtctgtcatatatgacttttactatgttgaggtatgttccttctgtatcccattttttgaaggtttttatcatgaacggatactgaattttatcaaatgctttttcagcatcaattgaaatgatcctgcggtttttatcattctcttgataygatgcatcacattgattgatttgtatatattgaaccatccttgcatcacaggaataaatcctacttggtcatgaggaatgctttttctaatgtattgtttaatttggtttgctagcattttgttgaggattaatattcatcagagatattggcctgtagtttcttttttctttttctttttttttcttttttattttttgatatgtctgtctggttttggtacctgggtaatactggtcttgtagaatgagtttggaa

SEQ ID NO: 766554 - DNA, 628 bp, Homo sapiens
tttaaaatataagatcatatcatcagcaaacaaggataatttgactttttcctttacaacctggatacactttatatcattctcttatctgattgctctagctaggacattcagtattatgttaaataacagtggtgatggtgggcatctttgtcatgttccaggtcttagaggaaaggctttcagttttcccccattcagtattatactagatgtgggtctgtcatatatgacttttactatgttgaggtatgttccttctgtatcccattttttgaaggtttttatcatgaacggatactgaattttatcaaatgctttttcagcatcaattgaaatgatcctgcggtttttatcattctcttgatacgatgcatcacattgattgatttgtatatattgaaccatccttgcatcacargaataaatcctacttggtcatgaggaatgctttttctaatgtattgtttaatttggtttgctagcattttgttgaggattaatattcatcagagatattggcctgtagtttcttttttctttttctttttttttcttttttattttttgatatgtctgtctggttttggtacctgggtaatactggtcttgtagaatgagtttggaa

SEQ ID NO: 766555 - DNA, 621 bp, Homo sapiens
ctgcccttttataggatgcttcctgatccattatttggaactaccaaaatgctttaatgagatcattttaagtgtcatatctttaagtgctttgtataaatcaacagttggaaaatattccgtatttgtgaactgtgttatagttacaataatggaagtttcagcaaacctctcattcttcaacaaagtaatcctaaatttgaaattattagtgtacttaaaaatcartgaataactggagcaatatctaactgcaagagaatcccaagaaatgtgatactaaaatctcacttataagtaaattgtgctagtaataaagatgcaaaattaataactggtattgtctttacagagggatctccatttaattttcctttgatgagcacagttcttgctgaatcccgtctatcacccaatggcacccactttttcctcccttggatatgcagtggttttatgatttatttatttatttatttatttactcaattatttggcaaccttaggcttggtattgtgataaagatttgaaatataaggatgaatagtctagtccctactctctaggactcacaatttggtaagtgagatagatgcataaacaaataactgtgatactac

SEQ ID NO: 766556 - DNA, 545 bp, Homo sapiens
cagcatcaatacaattaaaactttgctaattttactcctttatgtgagaccatgtcacatatgtgtatatatttccacagaatgtagaaccctgctggttcttaactacattatagttaactaaaacagaaatctttatattaaaacaacagaaaagaattttctcaacttagataaaattttgatgtaaatccttaaatattctagttgttaatattgttaacaatagtcattagactgtcattagactgtcagatggttttctattttaattatgytccaagctaatctggtaggggttaaaaaaacctatgctaaattgtttggaaggatgttttagtatgatttctttaaaactttaaaatatccctaacaacatgaaaatatagaaaatcaattcccattcaggtttttttaaatcatgatttgagaagaaattgttatttgtaactacaccatcatttcacccaagacaaatcaagatgggactgtgggataagaaagagatctctaaaagagagtcagcactacactaaattaaggat

SEQ ID NO: 766557 - DNA, 588 bp, Homo sapiens
atctaatattaaatcctctctgctagaaatagcactataggtgaaggttctaatgtgtatttactttgatggcttttaaaagccccatccaaataatactacattttaccctaaaattacaaagtttaaagcaacttatataatgaccctggtatataaatgcatactctataacaaatraaattatgtcaggaagaacttttagatggcctacttcttcagcctgtttgaaaaaatatattctgacattataaaaagcccataagttatatatattatatatataattgtaaaaatatttttgtacaaatttttaagtctataaaaatttaaaaatcttttgtaaacttctcagtaccaagttaaattaattagttaggttttccagttgctgcttaatgaaaagataaatttgcaatttctcctgctcagaatagaacccaaagtgatatgtaataggctctagggatgtaatagaagggggtcaatattatggcattgactttaggattagtcagagaaaggaaacagctgtgctcataaatgttcatgataatcaggaggaaggacaataagaagttccatttc

SEQ ID NO: 766558 - DNA, 648 bp, Homo sapiens
cattttcatgagatttattctctaccctccagaatgtgtgtattttatgaaaccgtctggtttccctactattcctgctttgcagtatcaaatctccaatatcaaatattgtaaaatagaagaggagcttgatgacctgtgatgttgaaatatccatggtccctgtaggttatgtcacagggctggagatggtgtataggakagtaagaattctgttgttactgtcaaacatatgcaaactgattctggaattttctacttataagaataaagaaaattccattctccaaaccaagagatgaatgttaagtaccaggatattgagtgataacacttcattgaaaagaccacatctgtaacatcgattctgattaaatatgttacttcattgtaatcttcccactgtttccaagtcatgtcaatctttttttactgattttcattgagatgtggtagaagtcacttttattttttgcaatgttcaggtcattaataacagcatgaatctctgactttttaaataggtgtgctttttttatttggtacttttaccacaaaagaacttattccatgtgtcaaggataaaaattatgacattttttgagaatatccatgcaaattgcacattcaggtaaaactataaaaata

SEQ ID NO: 766559 - DNA, 546 bp, Homo sapiens
gatccccatcctttacctattttaaatatacctaccctttcctaattgggtttctacactgttgtcaccacctttgagtggtgtcttcacttgtactgtttttgcatactcacaaaccaatcagtacacgctccctatgctgagcccataaaagccccaggctcagccatattggggaactttcctgtcttcaggtaggagaaccacccccctgcatcccttctttttgctgagagctttccttttgcttaataaatgctactccactcactcaatccttgatggccacatacctaattcttcttggtcatgagacaagaacctgaacttagctgagctaaggagcaaaaatcctgcatcatttttgtggctagtatggagatcrgaggaatggtaagtaaaatgtggacctaaaaatcctctttcacttttgttttcaaggcttctcatcctcagaccttttttctgaaaacacatggagcactgggtctctgctagccaattaagaatgaatggcacacctgtagagactgctacccaccccct

SEQ ID NO: 766560 - DNA, 603 bp, Homo sapiens
aggaccagggactttctgtcttgcagaatgctttgtaggttggaagagaaagatttcactgataactatgtaaagatgaattgttatgtagaggaacataaagatactgaatataataaaattctacaagattagcattcaaatgggcattatgctgtagaaatcagattgttatgcaggaaatattcactctttccctctcttttgcatagaagcaatattttcccctgctctgttggtgttcagttcagccacacaacccctaacttaggaatctgagaagctactaagagataaaattaaacaacaatactataatagtaatccttatttaagagcttcttgcctataattcccagttactgtcckgagtttaatatcttagcaggacacacatcaagtgtaattgacacaccatggaacaaaatttctcgacgtttgaaatttactagtatgttgctcaaggtttctcttcttcgggctaagaatccctaataaattaattacatagtaattatttgaggatgtactatgttccagatcctaaggtaataatttaacatagtacttgcccttatgaagcttatggtcttctattctaat

SEQ ID NO: 766561 - DNA, 586 bp, Homo sapiens
attagagcatttcatcccctgaagagagtaatatgttgttcagattagattacctgctgacgcatagctcccgcttgaggtagcaaggttttaaggaaatggtttctgcttgttaataatgacaccaactgggatgagagctaacatgttttgaaaggtttctatgcacccagctctctgctaagcactaggcatacrtacttcacttaattattacaaatctgagggcaggaatttctatccctttatgtaagtaggagaggttagataattttcttgagacaacaagtggaaagcaaagccagaactgaaacccaggcagaaaagaagagatggggactagaaaaatgcccagcagaggcccatgagagccacagggagccaggaagaaaagccatgcctacatccaatgaaatattaacagaaacttcacctaacttcacaatcagaaaattgacaatggtacccccattttaaacaaattcagtcatcaaacgataaaaatccatgctgaaatcctaaagctgtgtatttaaacgagactaatttctatccatgaggccagcagtcttgaacattaacctga

SEQ ID NO: 766562 - DNA, 621 bp, Homo sapiens
ggatgaagagctgcttaaaagatcatggacagttacagcaaatttagacaaagcttggactacaatggaaatccaagaaggttgaagagttctatagaaccatccaggaggcactaaactcgagatatatttattacacagcagaaaaagttgaaaaaggaaaggaggaaggtggtaaaagtgaagtagatgaagaaatctgggtagcctaaaatagtatatttatatactaaaataatacattraggctgttctttccttgtgttgctggtggagatacagacttggaatacataaaggagcaagttactattattatgtggaacgattaaggtggagaacttcaaatgccacatcaattattatgtaaatcctaatgatgccaagaaactcacattcaactaaagggtcctatgtgtgtggctgaggtaaaatgtggccttttgaagttgtcaataaaggaacaaatagattgttgtgactatatagggtctgatgagccacttaccagcagcttccaagaggaaaatgtacaggcccaaaaaaatgtcacagaactgccaaaaggataggaaatcgatgacataaatgatgaaataactcattcttctacttgctctt

SEQ ID NO: 766563 - DNA, 621 bp, Homo sapiens
ggatgaagagctgcttaaaagatcatggacagttacagcaaatttagacaaagcttggactacaatggaaatccaagaaggttgaagagttctatagaaccatccaggaggcactaaactcgagatatatttattacacagcagaaaaagttgaaaaaggaaaggaggaaggtggtaaaagtgaagtagatgaagaaatctgggtagcctaaaatagtatatttatatactaaaataatacattaaggctgttctttccttgtgttgctggtggagatacagacttggaatacataaaggagcaagttactattattatgtggaacrattaaggtggagaacttcaaatgccacatcaattattatgtaaatcctaatgatgccaagaaactcacattcaactaaagggtcctatgtgtgtggctgaggtaaaatgtggccttttgaagttgtcaataaaggaacaaatagattgttgtgactatatagggtctgatgagccacttaccagcagcttccaagaggaaaatgtacaggcccaaaaaaatgtcacagaactgccaaaaggataggaaatcgatgacataaatgatgaaataactcattcttctacttgctctt

SEQ ID NO: 766564 - DNA, 615 bp, Homo sapiens
ccttatcagattttgtgaaacacattgattaaactgtgtattgctaataatagtaacagttcaatccagaagaaaatttgcttcttaggaccctaatgatacagtctgatcaataaaaaactttgaaggatagagcatattcaattatgatagaatcctgtggtagaagtgaaataaaaatattttcagggagaaaaataatcaatgcaaaattttcaactggtcaaaggcttaagtatttttgaaatgaatgatggggtggatattaagtcactataatatttataactcactgcatacatttaaaaattttctgtaatcactttattttcaaaacatcattcataactcatcagaacttcrtaactacttaaatttataattaaaagcctttttaaatttatcattaaaagcccccctctccccacctttttttttctttgagatggactctttctcttttgcccaggctggattgcagtgacgcgatcatggctcatagcagctttgaactcctgggctcaagcaatcctcccaactcagcctcctgagtagctggggctacaggcatgcacaatcacacccagctaattaaaaaaatatatttgtagagat

SEQ ID NO: 766565 - DNA, 586 bp, Homo sapiens
aaagtggaactttatttaacaaagatgatatataatgttttgtggtcctaaatgtctcaaaatggagtcacttatgacaggtaactcagcttacagtgaaattgttgacctcggagtgagaagcatatacatggtggactgaggtgataagccaaccccggctgtggccaggcaccctgaaacctgatgagaaagtaaasctaaaaggcacctgaggataatggccatggatactcccaggcattaaaaactgcaaagaaactgaccatggccacgatgcctgtagaagctctgccattgagaactctaagtcctcttttccagaaactgtggctgccagaagccctgcgttggggaaaagaaaggacctccactctggctggccttccaagggaaaatcagagctgctggttcatcagtcagtgtgctggtctctgaaactacttgctgtgtttttttctccctctatcttattactgcctgtgttattgaatatatttgcatgattgttgttgtgtgaaggcctcacaataaactgtgaatttgtaagcatttaactggctactgagtcatagggaaacttccc

SEQ ID NO: 766566 - DNA, 576 bp, Homo sapiens
tcattccacggaagtggtcccctgtcaatgtcctatgcctggcataagctctttgttttatgatgacagaagaaaacaaaccacatggagggttattttgattgttttgtggcttaaaaccacagatacattgttaaatattgttaartatctaattgttagatgtaaagatactgttagatatctttagtaagatctattaatattttggcactcagaacactgaaaacaaaaaaaaaacaaaacaaaaggtcatctgaggttggattgtagaaaaaaaataatgtgcttaagtttgtaaataatattattacaaaagccaggttctgctataatgtttaacttatagatgaactgcatggttcaatgtcaagccagaaaacaaaaatatctcataataatttattagtttgtagggctctggcaaaacatgaaagtttatgtttcttaattaaccttgagttcattttatgtaagaaaattattaggaacagtaactagaccctcagtaaacatataattcacccaatgtcattgatgtatccctttctgacccttaaaaaaaatcaattaact

SEQ ID NO: 766567 - DNA, 506 bp, Homo sapiens
agcgtttaaatacttgaatgttgcaagagaaatactattgctttgaaaacttgtgtgaatcttgaattaatgtgatggaaaattgtcttccaagcaatgtggtagccattccaaaaaactttctggcttttaaaccaagaacatcgggttctggccytaatgcctccaataactcactgggaactaccatattgtttctctgggttggaaagtcatcacatattaatggagaaaactagtctttcttgggtcagacaaatctcagatgtttatcttcctaattacaaaggatgggtttctcccaggctatggattgtcatttttgccatgggactagaaatagatagtgacaaggtatttttgctggatgagaaaatagtgaaaaatcatgtctcagcgattcctcctcatctcttctgcctgccatcattgcacttgataaatttgagagggtatgaaaagatctgaaggtgaagtgaactctttctttacttgcctatgtagaa

SEQ ID NO: 766568 - DNA, 556 bp, Homo sapiens
cctgatgttcaggatccagctgcaccactgggctggcacatccccctcttgctttgccaactgggacctataaacgaacacttattcttaccattttatctttcctcttttcctagtgatagatattttttaaaactgcctagggcattgtatgttacatgagaaaactcatcatttattccagatcaacctgaaatcctttttaccagcatctcaaggaggggaaacccttcctggctgctctgagcctccctggggaggaacgatgaagagaggcagtcatgcccatgctgccggctctgtccccatgtccccatctataatatgggtcattcccrgcctcgtgggccagaaccgaggggtaggaactgcacagggggttcctgagcaagagcaacttctcagggagggccaggccacgcgtggcctgggattctgtggctggaattaatgtcacccttgtgtatgtgtattggtttactgagtgctcacgtaggaggtaatgggaaaagaccttgggaactaccctggaggcagtgcagggctcggagcccgt

SEQ ID NO: 766569 - DNA, 473 bp, Homo sapiens
atggtcttagaatgcgtttcttcagccatagagctgcgcttcagcaccacggacagaaccacaaggcacccatggaggggatgacctgagctgaatccaggatcacacaactgtgcgtctcaaacctttcctcttcgtggctgacaaggtcactcagacaggggaggatctgggcccttctatggctacatgaaccccaggctataagttcytgtgtggttgcctgatgctgctgctgctgccgaaaatctcctttggggtgtttgtgcatcctggctctcccagctctgacagtcaagtttgggcctctgaacgagaagccacagggagaggaggagaagatgaagtgacggttccatggagcccatccatcatccacctccctgtccttcccctttcctctccgtctttctctaacctctttctttgtcgcacctgaaattggcagcatttcccaggaagaacacagaccc

SEQ ID NO: 766570 - DNA, 635 bp, Homo sapiens
aacttgaggagctttttcttcttcagctatttttcttgagagcctgaacatcccctccatctcttccacttgtagcgcttgtagtcagcctcagccataagccactgacaagagtgtattaactgcagatgtgaggatgaagcaagggcaaactatggttagttttcagaggtgactgagccccttcaacatatagatagggatttccatatatggtgaattttgtcactaagtgcttggctttgtggcatcctatttaccagtatttgaagcttttatttaacagttttattatgtggttctctctggtgttgagtttgagctcactaattagatcattaagttccttgaaagaaagacagggcttctatactcctaagcatttcctgcaatgtgtaacacagcaytgtcattgtacaaggaattggcactcaatgggtgtttgttaaattgatttgacccaatctcaatttcatgttcagctcaggagattcttattaagttctaaggagtttagatcctttctggtcatctatacctgaaggtataaattcattttgaccaattttccaactttaattttctcttgtgcacttcaggaagaacagcaccccagacatgactttttcagggac

SEQ ID NO: 766571 - DNA, 628 bp, Homo sapiens
ccaaatcagtgatcagcagtactcagttgtagcactctctaaatgccatagaaacagatggctgatggaagtgattggacgtgtttagagtgccagcccttttcatgcttctgatgcttcttacacctcacagtcactcaaaggcccagcagctcagagcccttctccatcatcagagtcacttcagactcctgggctctggggatctgatctttattccctgccctgtgattgactctgtcagtcacaaagcaagactccaggttcttcaaaagcaaacagggagtcatcctgcctcacttagtggtcctgtgttccacactcactcgataacttccctccttycaaagatacaattctaggccaggctcagtggttcatgactgtaatcccagccagggcaggggaggcacttgaggtcaggaatttgagaccagcctggcccacgtggtgatacccgtctctactaaaaatataaaaattagccaggcatggtggtgcacgtctgtggtcccagctacttgggaggctgaggtgcgagaatcgcttgaacccaggaggtggtgtttgcagtgagccaagatcgtgccactgggcgacagagtaagactctctcaaaaacaaacaa

SEQ ID NO: 766572 - DNA, 522 bp, Homo sapiens
aaaaagaatattcaagaggaaaaccagcatataaaaagatgtccaacatcactatggaaatcaatattaaaacaaatgtctgcaatcaggtgtttatcctgaatatcagaattgttaaaataaaaaataatgagaacaggaaatgccacagtaaggatgtgggcaaactgatccctcataagttgctggtggaatgtaaaataatactctacaaaacaatttgacagttttttaaagaaaaacttaacatgcaactaccatacaaccaagcaatggtactcttacacatttatcccagaagaatgaaaactcatttcacacaaaaatctgtacacaaattttaatagcagcttcatttgtaatagccraaacttgaaagcaactcacatgtctggcagtgagtgagtggttaaactgtggtagatccaaatcattggacactaatcagcaatcaaaatgaattaattataggtacacaaaaccacttggatgctgggcgcagtggctcacacctgtaatacc

SEQ ID NO: 766573 - DNA, 637 bp, Homo sapiens
caaacttctctgagctaaagaagcatgttctaatgcattgcaaggaagctaaaaaccttgaaaaaaggtaagatgaatggctaacaagaataaacagtgtagagaagaccttaaataacctgatggagctgaaaacmacagcaggagaacttcatgatcaaatcatgagtgaactcccattcacaagcttcaatagctgattcgatcaagtgaaagaaagggtatcagcgattgaagatcaaattaatgaaataaagtgagaagacaagattagagaagaaagagtgaaaagaaatgaacaaagcctccaagaaatatgggactatgtgtaaaggcaaaatctacgtttgattggtatacccgaaagtgatggagagaatggaaccaagctggaaaacactctgcaggatattatccaggagaacttccccaacctagcaaggtggccaacattcaaattcaggaaatatagagaacaccacaaagatactcctcaagaagagcaacttcaagacacataattgtcagattcaccaaggttgaaatgaaggaaaaaatgttaagggtggccagagacaaaggtcgggtaacccacaaagggaagcccatcagatgagcagtggatctctcagcagaa

SEQ ID NO: 766574 - DNA, 637 bp, Homo sapiens
caaacttctctgagctaaagaagcatgttctaatgcattgcaaggaagctaaaaaccttgaaaaaaggtaagatgaatggctaacaagaataaacagtgtagagaagaccttaaataacctgatggagctgaaaaccacagcaggagaacttcatgatcaaatcatgagtgaactcccattcacaagcttcaatagctgattcgatcaagtgaaagaaagggtatcagcgattgaagatcaaattaatgaaataaagtgagaagacaagattagagaagaaagagtgaaaagaaatraacaaagcctccaagaaatatgggactatgtgtaaaggcaaaatctacgtttgattggtatacccgaaagtgatggagagaatggaaccaagctggaaaacactctgcaggatattatccaggagaacttccccaacctagcaaggtggccaacattcaaattcaggaaatatagagaacaccacaaagatactcctcaagaagagcaacttcaagacacataattgtcagattcaccaaggttgaaatgaaggaaaaaatgttaagggtggccagagacaaaggtcgggtaacccacaaagggaagcccatcagatgagcagtggatctctcagcagaa

SEQ ID NO: 766575 - DNA, 535 bp, Homo sapiens
caatgcacagactcatgaaaaagcataaagcctttcaaaatcagcaagtatttaggttcacctagagttgtaagtgaatgagaatatatgagtctagaaaaacagccagttaaaacccagccttaaaaatatctttgaacctaatttgaaaagcatggcttgtctcaaactggtatatcagaaaacccatcctggccaccatatgaggcataaattagaggtatcagtttggagagaagacattcatttargtcactgaggaattgtaatcaataaatactaagatatgtagatcatgggaatgaaaagttgggcagctgtgcttcatattaaggaagtggaatttttgaattttgttagtggcttcataggaggtattgagagttagaggaaaaaaataggatgagtgtcaaatttctggtttcataacccaagttgccacttgttgggcgtggtttgatgaggatgagcatgtttgatggggaaaattgctatttctggcttgtggtatggtgaatataggaggcctgtggga

SEQ ID NO: 766576 - DNA, 535 bp, Homo sapiens
caatgcacagactcatgaaaaagcataaagcctttcaaaatcagcaagtatttaggttcacctagagttgtaagtgaatgagaatatatgagtctagaaaaacagccagttaaaacccagccttaaaaatatctttgaacctaatttgaaaagcatggcttgtctcaaactggtatatcagaaaacccatcctggccaccatatgaggcataaattagaggtatcagtttggagagaagacattcatttaggtcactgaggaattgtaatcaataaatactaagatatgtagatcatgggaatgaaaagttgggcagctgtgcttcrtattaaggaagtggaatttttgaattttgttagtggcttcataggaggtattgagagttagaggaaaaaaataggatgagtgtcaaatttctggtttcataacccaagttgccacttgttgggcgtggtttgatgaggatgagcatgtttgatggggaaaattgctatttctggcttgtggtatggtgaatataggaggcctgtggga

SEQ ID NO: 766577 - DNA, 593 bp, Homo sapiens
cttctttctttcaggcaatgttacatccatgaatttcatcccattttgcctgatgctttcattattcattttcattgctgggtagtatttcactgaatgagtataccacagtttatctactacagtgaatgaaaaattaaattattttcatatttggctatgcaaaagcatgttgttatgggaatacttatgttggatttataactaggaatgaaagaggtgggatacatctttggtagacatttgacaatattttttaatgataccaatttacactcccaacattagtttctraaaattccagttgctgcacactctgcaacatttgtcgtggtcttttattcctctccatgctttgtttattgtgatataacttgcctattgtaaaatgtgcaaatcttgaatgtacacctggatgactttttttttttttgagatggagttttgctgttgttgcccaggctggagtgcaatggcacgaactcagctcactgcaacttctgcttcctggggttcaagctattctcccatctcagcctcccgagtagctgggattacaggcgtgtgccaccatgcctgactaattttgtatg

SEQ ID NO: 766578 - DNA, 547 bp, Homo sapiens
ctttgactgtgaagccacttttcatgtttcctttcttctttctttaactcttacacattccccaggccctgtccccgtcgtcactttctctgggtcataattgggtacattcccagtggytttgtgtaccttagctagagggagggtgggtttccacggtttcctgagtcacagatggcctatgtctcacaggttatccctttcttccccacccaaacgtcctctcatctcatctcccaatagaggagaaagagaattagaaagcttcactgccttgggccaggtttctttccttcatggtctttattttacaggatgccttggaagttgtctgtctgaagaggcagctagggttgggggagggccccggcaagcacctagagtgcagacaagttaagcagagggtgggctttagccagggaagcagagccagggtggggagtacagaaccagcccagagcagagacagagggagggcaccatgtgagggtcggcattcaccgagcagacaggaaccagcagtcacactgcccaggatcctcttcca

SEQ ID NO: 766579 - DNA, 592 bp, Homo sapiens
gttgaccaggctggtctcaaactcctgacctcagatgatccccccatctcagcttcccaaagtgttgggattataggcgtgagccactgtgcccggcctcctgcttgaatcttaatatccatcctctatcaggtgttaacaataggattggacccgggcaatgaaggccagcagtttctgggataaggtattgccaatgccagtttccctaagtgtagccaggcctcagcaccccatcccaggcaaacacctaatgggcccatctgaggctgcagcttctccctgccagcagatttgcttttcccaccactcccatttctgcactatttataccacatgtggcctaccctcaggtgaacctggcattgtcacgtggagtcctcatgactttttaaaaagtagaagcwattgttgtcatcaaattatttcacaggccgggcacagtggcacatgtctgtaatcccagcactttgggaggcctaggtgctcagatctctggagcccaagtgtttgagaccagccagggcaacatggtgaaactccatttctagaaaaaaaatacaaaaattaggtgtggtgatgcatgcctgga

SEQ ID NO: 766580 - DNA, 579 bp, Homo sapiens
tgaacaggcatcaaaagatacgagttaaactagaatctctgctatggagaaactggaaccccaagggacagaaggcagcccgcacggagcagagccccagacagagctgcggcttgcctctgccttccagcattgcatacctgtcatttccaccctcatgtgagcacaagctaccgtgtcattttcctgaagggacctgggtcttaggctttaasacattgtagaatgttaacaactctgaatacagtatttttcatgatgagaaaaaatggaggccagaaactctttttagagccccctgcaacctctcccactgaccagtgctgactctgctgtgtgtggaccgggctggtcccccaacaagcagaggaccaatcagacaaaggtctgaattctgtgctgcctgcaggaaacagctttaaccaagcttcatcttcacagtcttctgagccaaatgtctagtttataaagaaaggagatgaaatgtatacatttggagaagtctaactgtgccgaaccaagcccaggaaggcatccctgtatagtggttaacccacactctccagacagcccgagtct

SEQ ID NO: 766581 - DNA, 601 bp, Homo sapiens
ataaattaaacatatatatatatgtagaaggcagtctaacacaggtttctcctactgttgtgttagctaaagatttttcttttaactgtctggggaaatgtgaatttatctgcatctgttcagaattggccaaacacctccacaagttgttcagaattattgacgagtcctgagagctaaaccccaagagacatttttccrgcctgttttctgtggtgcagaaaggagcgtggtgtgcgggagcagaggctgctctcagctcatgtgctgagtccaggcctgtgcggagcctgaggctgaactcgccatctttacactcctttaagggaaaatacccctttttccagggaaaactgggagacagacagtcgacgtgggttgcaatcccaatgccggttgcagtgctgagggctggcccatcaggggcagcttacagggactgaggtttgcaccttggcgctggtggggtgtttagtgccctggatggaaacaatgctgggatcccagtgaacagacggcagggaatgttcctcggagggaaaaacaggcctctggaggtgcagggcttggttttggaatctaagctccacaggtggaggcc

SEQ ID NO: 766582 - DNA, 539 bp, Homo sapiens
atgacacagggaccaaggttctgagcacttaagacgcttcagtcagattagccaatagcacgattcgctccatgctcattgttgcattgcttacgcatgcatggctatggtacagcccactggatgggctctaaagccttaggtgtggcagaatccaaaaagactgattctatatgtccctactggraggttagatggaccagggtagagatgcatgccagcccatcgacctggagcctgcacagctatggaactcccactgcccctgcagtgccattgcctagcagaagtaagggggatgcaaccactttgttacttccacataaagcctctaacttgacttcttgaagtttgcaagaagcagcatccacttaaagtccaactctgattgtgacagcttcctcacctggtctaaggatgcctcagtcacacaaaaccaaaactcacaccgtcagtgtatttaaacgtacatctaagcactcctcagaccggttggagactctgtcacatctaacccagctctgagtccatccctggca

SEQ ID NO: 766583 - DNA, 658 bp, Homo sapiens
acaaactcgatgtgtccttgaggaatctcagaaggctatagctggaaaagtccctattcgaccatctaatgagacagtgtcctcaaatgatgagaacactgatgcccaagcagttgaaatattttgcctaatatactgtggctagtttaagtgaccaaaccyagagcagaaaacaattttcttgctctgattcaagttcccagtccactatctcacactatgaagcacataaaaagcagtgatgacccatcttcattatgtgtccctggggtgtaattaccgatcatacgaagcagaaagattagaagtaataggccttctgcagctcttgcagctgtgtttccactgggtgagacagtgtcaagggtagaggctacaatacgaactggcgagggaggagagccaagtgacagacttccagtcagcaacaggcttgggccacttggccaggagccacctaagtgtcccatatcccctatgcagagcagtccggatactcagcctccagctcttctaggaaactagcaatgcagatgcctctatgagtttgagattgtctagctctgcccagtccaaacggaagtgtccctgaatcagtgggaggaagaagagaggcaactggttggatgaggactgagtttcattttaattatctttg

SEQ ID NO: 766584 - DNA, 603 bp, Homo sapiens
tgggagggaatattcttattttttatgaatatcagtggggccatcttcacacggaatggggtgaggagagctgtctaaaaacatacttttttgactgacataggttcctagacttcggaacagatttaacagtttagaccactggagataactttgagaaacattgacccaaattaagcagtctaaaaatgcaaactaaaggccrtcacagtcatccttaatcttaatgctattgaatggtatcaaactttactgaatccaagtcttcgtatttgctggtatatataaacgtgcctttatctattaatcaaccaacatttattaaatagataaatctgtgctagctgttgtcagaatacataattgtttcatacaatgactgtaatggcagaaacacatgcacatacacacacacacttagaaagtaggctatcaatactgaagagtacatgaaacctatccatttagtgatagagatattaaggactaaatagatgagagtttcatctttccactgggctaaggggttttaatcaaaacagacaaccttaaattggggaaactagcagaatatagcaaatatcctcccagcatatgctcttg

SEQ ID NO: 766585 - DNA, 648 bp, Homo sapiens
gaagggcaggaaatgttaaggaagggctggttgcctagccagacaagtcaaaggaggtagctggagatcagcgcaacctaaaggcatcacaacctgctgtgagggcacaaaggaagggacaatgaatatttttttctgagtagctgaacaagaggattatgaaaygttcccatgcaggaacaggactctgaaacccagaattttgtttcagttgtgaaaactctggggtcaaggggaacacaaataaatcagtgcttttatgtcacttgagagaggctgataaaaagctgaactaccgagacagggacacagagcagggaagaggggtggcacagaggtaatcttgtgcagagagagtctgaagtggaagaagttcatttaaatgcagtttgaaattgtaatttaaaacttctaaacatatattcatataatcaataaacctttaaatttgcttatcactaggttctaccacttgttatttaggaacctgcatgcagtctttagaacagtggagagaatcagggaagcttgcgctttaattttttatctaattcactaaactaataaatacttacagagtacctactgtatgcaaagcattataagactgccataagatatcacttaatatccatttttcctttaatt

SEQ ID NO: 766586 - DNA, 648 bp, Homo sapiens
gaagggcaggaaatgttaaggaagggctggttgcctagccagacaagtcaaaggaggtagctggagatcagcgcaacctaaaggcatcacaacctgctgtgagggcacaaaggaagggacaatgaatatttttttctgagtagctgaacaagaggattatgaaatgttcccatgcaggaacaggactctgaaacccrgaattttgtttcagttgtgaaaactctggggtcaaggggaacacaaataaatcagtgcttttatgtcacttgagagaggctgataaaaagctgaactaccgagacagggacacagagcagggaagaggggtggcacagaggtaatcttgtgcagagagagtctgaagtggaagaagttcatttaaatgcagtttgaaattgtaatttaaaacttctaaacatatattcatataatcaataaacctttaaatttgcttatcactaggttctaccacttgttatttaggaacctgcatgcagtctttagaacagtggagagaatcagggaagcttgcgctttaattttttatctaattcactaaactaataaatacttacagagtacctactgtatgcaaagcattataagactgccataagatatcacttaatatccatttttcctttaatt

SEQ ID NO: 766587 - DNA, 619 bp, Homo sapiens
attttcctcattgcacagtactggccttagacctgagcaagcagggaccctgtgcctcacagagccatgtactttaaaatgctttcctcaaagtgttctatgtccccctgcagcagtgcctggaaccagctggggtcagcagtgtcatcagggagggctcaaaatactgcttcagctttttctctcctctgtagcattctatatgacccccaatcacagcatagacagggacagaatgttaccccggcaccatggagggtaggctccagtaagataaataaatgacagttactgtgagagtctgggggtgggagctctatagaaagacccattttggcctgattctctccactgaaaaaatggatttccaagagaatgggaggaaacaacagagttgtgtcttagtgtgwcgggagttattgattcagtctgacctggtgttccaaggacagacccaggccctgatgcatggctttgagggaaaacccaagagctcacctcaagctgtgaactctgggcagggagagcttgaaagccctatccctgagttgggaaattcccttttcctaaagaaaccctatgaaaattccactccagcaccctatggtagcaactattg

SEQ ID NO: 766588 - DNA, 525 bp, Homo sapiens
ggtcacttcctttagttacttagggacacactttgcaaataattcactctggagaattcattaagaagctgtattgcccaaagccagatagtctacaggagcattaccaagatttttaataaaaaatacctctgcttaataactagtaacaagtagtacctgctttgaaacttttctaggccaaactaattccaatccctatggtgtagaatgttgaaaactttgatcggccgtccctttacatgctggaatatatcyagagtatttaggaaatgcaacttgacctaaccttcaggtctctctttggctcgtgtatcttttagggtcccattagaaaacagatcgcacatgcaaagggggtaattgaggaaagtttaatgaagggactatttacagaggaggtatagggttaaaaaaccaacagggatgatgtggcaccaggatctagcaacccatgaagctgttaccacccctgggtgtgaaggggtaaggggaggaggctgttactagaacttcatgggagct

SEQ ID NO: 766589 - DNA, 557 bp, Homo sapiens
gaatggcatatttagtgaagggcaagtagtgcagtatggccagtatggggcagtgaccagcatggggcataaggaaggcatagggtaggttgggactgaatcctagagcgttgtaaagtcccagcctggaactgaaccacgtatcttggagagcaaggagccactgatgattctgaggaggtaaaactatctgaactggatcagagagaaagataactcatgcaacaatgaagaaaagtcgaagttggaaatttgatatgtcatgaagctactgaaataatccataagagtcaaaaagtacttaaattatagcagaatcaaggtattggaytgggaagaaagttcaaaggaagaaaggacagaacttggcaattgatgatttggatgtcaagagaccctggagtttaaagagaatggagaacaagaaatggaagacgactgaggcttctggcccaaatgaaagcaagggtagaagtcctaatagccatgataagtaaatacggcaagaggagcagtatgcaggatgacatgttaaattaagtgtgctaagttttagt

SEQ ID NO: 766590 - DNA, 616 bp, Homo sapiens
aaaattgtatatacagatactgagaactgacgaacttaaatttccaaattgaaaatatttcatgtgtattcagcgcatgtgtagcctgcaccaaggcacattgctgtggaatttcaggataccagagaagatgctgaaagtttccagagaagaaccaacaatgttacataggaagggattaggaatcacaatgaaattcgacttcttagcagcaagcttcaaagcaggaagtcaatggagcaatgtcttccaagctgaggcaattgtttctaacctagacrtcagtctgcctccaaactgtcaatcaaatgtaaaggtaggaggcacacgtggaatataggtgtctcaaaacatttacttctgggaaggaatgggacgatttgctccagcaagcaagggaaaacatcaagaaagaaattttgagatcctggagacaggggatccatccctgaaaacaaaaaaaaaaatgcacaaaagaattcttaggacaataatggagggacttcctagaataacaactgttccagaggctcagtgaataggaagaaagaacactttagctaaaataaaaaaaaagaaggaaaagagcttcaatgagcaaatgaagcattgatag

SEQ ID NO: 766591 - DNA, 616 bp, Homo sapiens
cctgagagattggaaaatcaggaggaggcaagccgatgacattttgagtgcaggccccactcggagaggcattgtagaactttctggttaacaaagttaaaaccaaaacaaagtaaatgacgaatccaccacctcartctgcattgtattttttgtttttaaagaaaatggtaaaacttttgctgctgcttttagtgactgagattttcaagagtggattgaagaaattattatcagtctgtttggcagctaagaaacctgctttgagatgggtagttgcttattaataatactgctttccacttcagcctcatctgtaaggcactgaactagctgctactgggtcttcaacctaccttcagacttctactgcatgaagtctttccacatctactgtgagatggatcacttcttctccgttcccagcactttttgggtatctctcctatgtcataggagagacattacatctatgtaatagatgtaatgatgttgtacaaggctgagcaacctcagccttgctctaaaattatttacatcatagtttaccattctttgagggtggcactttgcatttcatagaataattgaacatttagagaattaattgaatgaa

SEQ ID NO: 766592 - DNA, 628 bp, Homo sapiens
ttgtacaaggctgagcaacctcagccttgctctaaaattatttacatcatagtttaccattctttgagggtggcactttgcatttcatagaataattgaacatttagagaattaattgaatgaatgcatggatgcagagttggatggaggaatggatacatgatggtagatgaatgaatggatggatgaagggacgattggtcaaggaggaaatagaaaaataattgcaactattcttttcttggaggtgcactggtgtccagtgagcatgtaatgcaggcagtactgctaacacctacataacatgccccgcatcaactagagcttcgctttacctccatatgaaaaaaaacttattttccaaaaataatttttaaaatttaaaaatctgaaaaaagagaaraagaattgtgacttttacaatacttgacattagatggatagagactttgtcatctttctacagacctggataatggtttactgggtgatggtgttgtttaaaatattttttgctctgttttttgtcattttcctttgagtctaccttctattttccttcataatctagaggtaatatttgccatagcttcacatgtagactgattaggagggaactacagggaga

SEQ ID NO: 766593 - DNA, 617 bp, Homo sapiens
atggaactggcagggaaacatgaatcattcacaccttcattagaatatgcagcactgtgtcagccatgccttgagcatagagccatcctaaaccatgtgggggacaccaagagaagcttctgaggatgctccccagcatactcacagttatgaagactccacctgagtcactgcagcaagtcagtgacatcttagatgatagaagatgggtcacttactggcaagcctgtatcaacacccccccttagcaactgtccctatcactggccaaacttaggtactacacgatctgtagaygaatcacttctaaattaagcatgaagatttccaaattagttcaaaatgatctaacatctagacagaaggtacataacggaggacgggaacataaggagtgggaaaaaatagaaggttatgttctttgagaaaacaatttattttcttttgaaaggcaggacctatttttgcaaaaaatgactgactcactttattttttggatcattgtaaaggaaagagagtgtgtgtaatgcgttgctttacaaccaaataaagatgtcatgtggacattaagctttctaatttggtttatattattccagctacaatcaaaatgcac

SEQ ID NO: 766594 - DNA, 485 bp, Homo sapiens
tttctagatttagggatctttttgtcatagagtaaatcatgaagtgtagcaggagacattcacccatgtgtcttagtccagtcaggctgctgtacagattataggttatgtggcttacaaatagcaggcattgatttctcacagttctggaggctggaagcccaagatcagggcaccagggggtttggtgcctggtgagggctctcttcctcattcttagatggtgcctccactgtgtctgtgtggtgggaagggcaagggcctctgagcctcttttataaaggcaccaatcctattcttgagggctctttctttatgacttcatgagccccacttsctaataccatcacttttggggtgaggatttcaagatatgaattttaggaagatacaatcattcagattctagagaccctcacccatatctatattaaagagtgtgacatctttcagagaagaagcagggggctgtgaacaccctcatc

SEQ ID NO: 766595 - DNA, 670 bp, Homo sapiens
taaattatagagaaaccatctgaggatcccccttatttgggacccctttaagttcccttctcattacaggaccttaggcaaataaagggagacttaggccaattttctgacaactctgataggaagctttccaaaatttaactcagatgtttaacctcacatggagggaggttatgctgctcctaagccaaaccctcactgctgctgaaaaacaggcagctttgtaggcagtagaaaattttggagatgagcaatatatctcctatagtaggtcaaaaaggaaaaaaggagatagggaaggtgatatgttttggctctgtttccacccaaatctcatcttgaattgtactcccataatttttatgtgttgtgggagggacgtcgtgtaacataatttgaatcatkggggtgatttcccccatattctcatggtagtgaataagtctcatgagatctggtggttttatcaggggtttctgctttagcatctttctcattttttcttgccgccgctatataagaattgcctttcacctcctgccatgattctgaggcctccccagccatgtggaactgtaaagttcaattaaacctcttttgcttctcagtcttgggtatgtatttatcagcagcgtgaaatggactaatacaataaattggtaccagtaga

SEQ ID NO: 766596 - DNA, 670 bp, Homo sapiens
taaattatagagaaaccatctgaggatcccccttatttgggacccctttaagttcccttctcattacaggaccttaggcaaataaagggagacttaggccaattttctgacaactctgataggaagctttccaaaatttaactcagatgtttaacctcacatggagggaggttatgctgctcctaagccaaaccctcactgctgctgaaaaacaggcagctttgtaggcagtagaaaattttggagatgagcaatatatctcctatagtaggtcaaaaaggaaaaaaggagatagggaaggtgatatgttttggctctgtttccacccaaatctcatcttgaattgtactcccataatttttatgtgttgtgggagggacgtcgtgtaacataatttgaatcatgggggtgatttcccccatattctcatggtagtgaataagtctcatgagatctggtggttttatcaggggtttctgctttagcatctttctcattttttcttgccgcygctatataagaattgcctttcacctcctgccatgattctgaggcctccccagccatgtggaactgtaaagttcaattaaacctcttttgcttctcagtcttgggtatgtatttatcagcagcgtgaaatggactaatacaataaattggtaccagtaga

SEQ ID NO: 766597 - DNA, 535 bp, Homo sapiens
aaataatggaaacgccattcccaacaggaagggaaatagttcctcttgacaatcctgattggaactccgatagctccacaaacgaatggaaagagaaactctttttaatgtgcatattagagggcttacaaagaactaggaccaaatctcttaattactttaagctgtccatgatagaccaaaaaccagatgagaatcacacagcctttatggaaaggctgagagagccactaataaaacacacctccttatcccttgattcagtagaaggacagctcatcctaaaggacaagtttattacacaggcagatcctgatattagaaggaagctgcataaggaggctataggagcagatagcaccttggaaaacctcctgagrgtgaacacttcggtcttttataatagggatcaggaggaggtcgagcagaaagagaggaagcacaagaaaacgacagaggctctagtagccgctttgcaggcttacaaagttcaggatccccatggtgcgtctgctagtggctatcgatgtggaaa

SEQ ID NO: 766598 - DNA, 560 bp, Homo sapiens
ctaactctatactacccgttacacaataactctttaacgtagctgcttctattgatatgactttaactgcttataaggaaaataatattttccaaaattattggtatgtgatgaactagaaaaggtgtagagctttttcaaaaatatagaacttctctttcatcattttttaaaagttagtttctttccattaaatatyatttaaaatctaattactttcctctcaaatttttttaaatatctaattttgaaactaacatatatattattcaataaataagtgatatatagtgttaaatcctagagaattgtattggaaaatgaaaacatgacctgagtttgtagaagtcattctgctgttgaacaattgtacttaatatgtgaatctgtctatatgtatttcaggtctcaaacataaaattacaaaattagtctcttaaaaaagcaaagatagataaaagattgagttggaatataagagacacatgtttgtatgtatttttggtggtataaatatttatgtattttgacactatgtttttcatgctatatcaccttat

SEQ ID NO: 766599 - DNA, 560 bp, Homo sapiens
ctaactctatactacccgttacacaataactctttaacgtagctgcttctattgatatgactttaactgcttataaggaaaataatattttccaaaattattggtatgtgatgaactagaaaaggtgtagagctttttcaaaaatatagaacttctctttcatcattttttaaaagttagtttctttccattaaatattatttaaaatctaattactttcctctcaaattttttwaaatatctaattttgaaactaacatatatattattcaataaataagtgatatatagtgttaaatcctagagaattgtattggaaaatgaaaacatgacctgagtttgtagaagtcattctgctgttgaacaattgtacttaatatgtgaatctgtctatatgtatttcaggtctcaaacataaaattacaaaattagtctcttaaaaaagcaaagatagataaaagattgagttggaatataagagacacatgtttgtatgtatttttggtggtataaatatttatgtattttgacactatgtttttcatgctatatcaccttat

SEQ ID NO: 766600 - DNA, 596 bp, Homo sapiens
ttaactacactctaatctttatttgtatttcactagatttttccattatagcccttttatattccaagatccatattactttgagacatcaattatctttatctctagtggtctatgaaagattcctagtctttcttatttctcgtgactttaatagttttaagaactggtccagtttttatagaatgtttctcaagataagtttattgtttttctcatgcttagacagaagttatatatttttggagataattcacagaggtgaagtatcctgttactgtttttccttttctcagttctttggaatccaatcacgaagtcaagctcacattcaaagagtaattatgtagattatttctaattcttccaaaaggaagatttgtcccatctttccctgccttcttttttgtgaccctrgtattcatgtcaatatagactcatgcttattatgttaattttgcattagaattcactactatgttatttgttgctcaaattattttttgcttgaatactcatgctcttagagtgtggcacctgagtgcctttgatatacctatttttgtttgtctgtttgagtaatttcttatttctgg

SEQ ID NO: 766601 - DNA, 545 bp, Homo sapiens
ttaacaaaaataaaaatttacctaaatagatgaagcagattcatcagtaatatgaccacctgtcataacaatactataacataacaatacacaatacctaaaaaaaaaataataattcaggcgctttagatgatagcatccacaatgtcaaatattaacttaacaaaataaaaagtrtaaagtaggaaaatgtaactactattgccattactactaacaataaaatattaaaaataaagcaccatcaaaatagactctaggatgacccagatattggaattattagaaaagaacttaaaatcaggtattaggtagattgtgataagttaatgatacatattaaaatgaatagtgcaaacaatacaattagtaaaatagaaaaaatgaaaatagaatgtaaaaaatattaaaaataattgattaaacaaaaacaatgcataacagaaagaaaaaaattgaagtaaactacactaatataaatgactgaaagtgtcatccatgtcatatatactgaaaaatttaaaaatataatagccaagatattt

SEQ ID NO: 766602 - DNA, 545 bp, Homo sapiens
ttaacaaaaataaaaatttacctaaatagatgaagcagattcatcagtaatatgaccacctgtcataacaatactataacataacaatacacaatacctaaaaaaaaaataataattcaggcgctttagatgatagcatccacaatgtcaaatattaacttaacaaaataaaaagtgtaaagtaggaaaatgtaactactattgccattactactaacaataaaatattaaaaataaagcaccatcaaaatagactctaggatgacccagatattggaatyattagaaaagaacttaaaatcaggtattaggtagattgtgataagttaatgatacatattaaaatgaatagtgcaaacaatacaattagtaaaatagaaaaaatgaaaatagaatgtaaaaaatattaaaaataattgattaaacaaaaacaatgcataacagaaagaaaaaaattgaagtaaactacactaatataaatgactgaaagtgtcatccatgtcatatatactgaaaaatttaaaaatataatagccaagatattt

SEQ ID NO: 766603 - DNA, 590 bp, Homo sapiens
actttatcactttggtaatatcattgctagggatttttaggaacattcaggaaaacaggtaaagggtattcaggaattcattgaggctcttttacttttcagcaattgtaaaattacttaagaaaaagtttaaaataaaagcatattgatttaaaaaggaaagaatattctttgatcttgtaaaatcttttatattctcagattaatgaggagtcaaactgacacgggtatgtttttactttcatatctttcaaacgctgttcttcatttttctggaaacttgaacttattaaattggatttgagataaaagttgcccacctataacatttgattttcaactgttttcctttctctggtattattatacagttctccttaattctccaaaagttacatgaaaacaaycttttttatttatcattcatgaagttaacaattgagattatttcaatgtcattcactggacacagaaatagaagaaacatagcccatgaccctaacaagtcatgtacataaagaattataagatttataatataattatggttggtcataaagaggaaacacaggggttttacttagtgaaca

SEQ ID NO: 766604 - DNA, 622 bp, Homo sapiens
aagtttcttggaatttagatttgagtttctttaatgagcaataatgttgaagatcttctcatgtgtttgttatataatatcttgttgtgtgcttttgttcatcttctttggagaaatgtccattcaaatcctttgtctgtttttaaaaattgagttgtttgtctttggttgttgagttttaagagttctttayacatttaagatactgaacctttattaaatatatgattcacatatatcttctctaattctgaaagttgtgatatcatttccatgatgatgtcttttgagagaaaaatactttttattaaaaaatgtttacaaaatccaatgtatctacttttccttttgttgctattgcttttgataacaaatctaataatgccttctaaaaccctaggtaagaaagatttaagactaatgtcttgcaataatttcatagttctatctattctacttaaatcactaatatactttgattgtgttgtttctttgtgtttagaatcaggaaggaattgagctgtattattttgcatgtgactgtccagttttctaagcatcatttgttgaaaaacacattctttttccattagatggtcttggcactcttctaaaaaatcag

SEQ ID NO: 766605 - DNA, 595 bp, Homo sapiens
gataatttcacagaaaaataaacttttacctagtgcatgcttaggctgaattgggggactattttctagatatcatggctgaaaaatcctatttcagagcttatcaagaaatcctctttcctcctaatattctatctgtaccaggaaacaccaccaagaatttctttcttttttttgagaccaagtctcattctgtcgcccaggctagagtgcagtggcgcagtcttggctcactgcaagctccacctcccgggttcaagtgattctcctgactcagcctcccgagtagctgggattacaggcgtgcatcaccatgcctggctaatttttgcatttttagtagagacaaggtttcaccatgttggccaggctggtctcgaaccrctgacctcaggtaatccacccgccttggcctcccaaagtgctaagattacaggcgtgagccactgtacccggcttggctttgacatttacaagtctataaaggaaatgggtccctagataaaactgtgtctacaaaaggaacagaaaaaggacagacgggcttcctagattacataactgagtcattgcatcaacctgcccggaaatctgc

SEQ ID NO: 766606 - DNA, 483 bp, Homo sapiens
tttgagtagaaaacaatttatgaaactgtcatatgaaattggagagaactagctaaacatttagtcagagcaaaaagatgtgatgatttaaaaaaatgtggcagcgtagctctcatttaagaacaaaatgatttgccttcaatgaacttttactataatcacagccttgttccaatgacaatagtgcctcagataggtaagaaacaattgatrgtaatatctgaaaaactgaacatggtgccaggaaaggaaaatatatagaactaaaacacagtgtactatgtatacacatatttgatgcaatttgagatggccaattgattatacattattaaaagatacgtgtttaattcaagacaaaaaacaggaacttaaccaatcttcaatttattttttattctttttgtgattagtcagtaaaacatcatgtggtacagcttaagagagcattgcataagttgagccaactttgcaacctaggga

SEQ ID NO: 766607 - DNA, 601 bp, Homo sapiens
gcctcaaggagaaaatgccagtctttctttcttcaactgataaataattttatgacaatagtgatcaattttaagaaacataaattttaaaccaagatctatcaaatagacaacttcaacagaatatttactgttatttttgtctttaaagaccataaaactctaataatattcagtaaaaaatttgtgtttctaacaaaacaatgaataatttgactgaactgtattgttaaatatcttcagcttgacatgttgctagttaggttgacaggttacatggaattatagtacatgctcacttggctgatattacatatcattagaatgattcaagcaagagaatgttaaaattcatgtccaactaaatgtgscataaagagaaatatattacaaatcatgctatcattttcagcatctgctaatgatgttaattatgggaacatacatcatataatcttattgtgataaggttttcaattagacagttatctcagaagtaagagtgtccattgcctcccttaactatcctcaccaattattacatgctgggtaattcaggtagcaaactgtgagatggacaatagcatgtggaagtctatta

SEQ ID NO: 766608 - DNA, 597 bp, Homo sapiens
tcattcacatttctctctctgcctggcttgtcattcctgcctagtgagacctgaagacaaaagattgccttcctaagtctttatgcccttctagctcaggatctgtaagaatcttagtacttgttttctatcgtggtggtgtattgaatttgtgccttccatctgaagaactagggattgccccaggctaggttttccctgggacttggagagaacacaaaggtgagctcccagcatcagagcaatggttagcataaactggacacaggtcaggcaagagccccaagggaagctgtcagtgattcttttcacatgggaatcttatttataagatttttaagtaagaaaaaccctttttgttatgggttggacaactaggtattagaccatatgctagtaaaaaattatccyatgaatggcagactggaaacacccatctccagcttcccttcatttcctgttatggcacagttgctagctgttctgatctcagtttatgtgggggttctcaaaataaggagaaagcaggattaggcaatgggaaaagttaggtgtgatgcagtgtcaacataaacctcagctagtttcaaagagact

SEQ ID NO: 766609 - DNA, 472 bp, Homo sapiens
agggctattactaatatgacatgttcttattcttgtatatttttatttccaagatacaacatttttggtgttttaaaaatatttatttttcaattattaacttccatttcccaatttctattcatcttctgaagcttttctcttacctatcttaataattattgcatgtattaagaaacagttgstatattgtcaagttaaaatattttgtttttataatgttaaaaaatatattatgggattttggagagctggagttttgaaatataatacacttattgagtaatcttttaaatttttagaataaatgtacaaagaattacatatctatatctatgtctgcttacatatcaacatatgtagatacacacaggtacatttatgtaaatatatgtgattagctatagataatcatacatatgtaagaatgtgggcatgtatagacatattgcctttttctaaaatgtatgtg

SEQ ID NO: 766610 - DNA, 634 bp, Homo sapiens
tcaatatgcatcaagaccttcaaggttatatttaaaaagaggaaagtccagccaccttgcggcagttaactgaaaaacaggtttcttgcctacttaaagatcatgggaaacgggaatctgagaaaatagataattattttcttgctagaatactcggagtttctataagcttatggagacacaaatatagcccagcctaaggatgcaggtgcaagtgatgaagcgtggtcccagactaatagattaccattagaacagagataaaggcaaggttaagggtatgcgagaagaccagttcaacccagaaacccaaggataaacaggggcctcttgtacactcggatacgtcctctgttctccggtgggtaattgtgatgagatgggaccaaggttaaaggtacaaggtaagaccagtttattctggaaccctaaggatgaatgggggaacacccaattcaagataataggaaaataagagggaatgcttcaytttattttttctccctctgttctctcttcacagatgggtagtcatgtctccataccagaggacatgctcctcagatgcaatccccaaaactgggtaaaatttaattctcccaaaccttaaaacaacaaaaaactagttttcctt

SEQ ID NO: 766611 - DNA, 586 bp, Homo sapiens
gatccttgtgtgtctgctcatatttatcagctattggagtgttagcaacctgattggaagctctgatttgacaatgaggttcgggtcatggttgagataggtcttcagacaacctattggcataagtagctttagtcattttctcttgtatttatcagaggccctggaaacttttatattttcctgtctgaagygtgtagtcttagctgcatgtgtcttagaaactagtgagacagtgacctggggatctcagtattcaatgagtattcctattttcaaaatggtgcacctgctctaaccaagggctgatgtctggtagtttagaggatttattttatatccttcattggtaaacctctggtcttcttgctgcagttggaaaggggaagtcacctatgttatgggaggatgggacaagtagaaatgggtgaaaatgtgaggattaactgcttgttaaactgacctttaaccagtcatttaatttttttctttatttttagttgatacacaataattgtatatatttatcagatacagagtgatagactgatatgagaatagaatgtgtaatgatgaaatcaggata

SEQ ID NO: 766612 - DNA, 618 bp, Homo sapiens
taaagatttttcttttattattttcttggaatatttatctgttatctatttatcttacaaggtatgaactggagtctatatggcaccttttgataccactcagcgaaaaaataaaaatgtctgcctgagatttttttctgtcatttgttctagttattgcaacatttgccaaatcacaagaaaggagaatatataaaaatatatctgtttcaagcctaatctttgagttttcwcaagggcatttggaattctgttgcaattcagagagacttgggtttaagtaatttttattccttggggaacaagaagtaaaagaggaactggacactacaagtggatgacgttttcctttgggtaaagacagtgtctgagaaatagctgaccattcaataaatgtcatcctttgaaagagaagttcaccgcatttctgtgtgaggggaaagtgccaggttgcagtgaactcagttctaatccagaaacgtgaactctacaaaacagtagaacactgaagttgcataaagtctagcatattcattcattcatctgtagcttacatgtcatcataggttaggtcagtaggaagtaccaaacttaatgcaggagtgtcagggacaaatt

SEQ ID NO: 766613 - DNA, 509 bp, Homo sapiens
gatgtgcttatttcacattgcatgcctgtatcaaaacatctcatgtacttcataaatatatatacctactatgtacccatagaaacttaaaaaataaaaaataaatagaaaataatgatagtttatagaaaaaagtttgcaaataaagcttttatttttgcatggtaaacaaaaaaatcaagtttcaacatatgatcattgttggtttggttgaaaaaacaaaatcaatattgtattaagggttcagcaagcactttctgcaaggaaccagatagtaaatattttagcctttcgggatcatatgatttcagtcacaattactctattctaccactgtrgtgtaagagcagccatcaaaaaaatgtgtgaacaaatgagtttggctacatcccaataaaactgtatttatgggcactgaaatttgaattttgtataattttcacatatgaagctaatgattcttcttttggtttgttttcaaccatttaaaaatgttaaaaaacattctg

SEQ ID NO: 766614 - DNA, 631 bp, Homo sapiens
ttaaaaatgtgaagtgtcatatgaacatgtaataaaatgctgtgattacaataaaagcagagacgattaaagatgacatacaataagccacatatatcttatgtgcagcacagacagaatcagtaaaataatcaccttgctacttccttccctgcattttgctacttccagaaaggcattctctgaaaaccagtgatatgctggagctggctccagtcccctgcttaccagaggtgtttggcatatctctgctgtgtatttagtggcatcaccttgatagggagccaccatgggagaaattacatcatgaaaatggcaaattttataaactgagtatatttttcacagagagctattaacatttgccagcacatcactgcattctgatatgctcaaaaaaagaagaagaaaaaaaaggtkggggaataaaaagcaaaggcatgaagtaaatgaaagaattatgttatttatcttacttagactatataacttaagaaacacttccttgacatgtggaaatgctctgatgttgaaaattgcagttgcatacaggtttgttccaatggactaactggattcagggtttatatcaatctaagagtattgtttttgttttgttttgttttaagag

SEQ ID NO: 766615 - DNA, 586 bp, Homo sapiens
aataactggaaggcaagctgtatcatttcatttaaaaatcattaacaaatgtttctgcctcacattcctgtggttccttattgcttactctgcatagaagctgttcattcatctcctcagccagggactgtgtcattagttgtggctattggtcatttcctgtctcattcagcaagtaatcatattattttgactgggaagagaatgagtcctgagctgtgaactcagtctcacaataacttgaggatgtatttctttgaatgtgggagaaaacgaaaacagagcaggaaaataacattcattgascccctatgatatcccaagctcttcaatggcattttcttctttttttagtcacataggtctattttcaaccaaaattttggggtaactatcatccattggccactgttttaggtgctgcggatatagaaatgaacaatcagaccaaaaaaaatcacattctgtgagcttatgttctggtgggggagaaaaaaatgtgctagtaaaatttagtaaaaaatatattagtaaaatatatatgcttacatatgctactgcggtatatgcgatatcctcgtattac

SEQ ID NO: 766616 - DNA, 597 bp, Homo sapiens
catgatatctgatggcagcagcatggaacttggtacagttgaaatagcccaagttcaaatcctgactcagatactaagctcagtaactttacgtaagtagcataattatatggatcctcccttcttcatctataaaatgatgtggtgaactgattacaggaatggccctaattcttcactcattccctgtatctcattctggactgactgtgtctcataagctgttagtaaacatgacrcaagctgagattttttttttttttttttttttaagacagagtcccgctctgtggcccaggctggagtgcagtggcctgatcttggctcactgcaaactccacctcctgggttcaagcaattctcttgcctcagcctcccatgtatctgggattacaggagtgcaccaccacacctggctaatttttgttatttttagtagagacagagtttcaccatgttggctaggctgatctcaaactcctgacctcaggtgatctgcctgccttggcctcccaaagtgctggaattataggcatgagccactgtatccggctgcaagctgagctttgaaatactgtttccatttccactgttgaa

SEQ ID NO: 766617 - DNA, 662 bp, Homo sapiens
aagaaggagtaaaaactgggacaacctctgaacaacctcctataaatagaaacaaaaccaaaatgtcgataaaaaccacgcgcagttcctccatgacatgagcaggcaataaccaagagggtccctttcaggaggccatatgacatggaacccagacaatgactttccaaaccccaacatctgcacctytttccacagtcagaccagcaccagcacagaaggttctaccctggccagccttgggcagagaaaccttcccaccttgccactcccaagagacaaacaaatcaggcaattaaaaagggtgagagagaaagggaacagattaatttttagagccagtttgcacatcaaaaccagacctcagctaccaaagaaatcagacaaattcatgaaataagagtctgagggtcggttttagcgcaatgtcaccatccacaccgttaggctagtcgggcaaacattttgactccaaatccacatatctaagacattggccagtgggggacgtccccttattccctctttccttggttactaggcactaatctaagcactgtgatatcagaagatgatgagacagatactctgcagtatgtcctcaaatgtggcaactgttgagaagtcttggataacgctagggattgtccaagaaacacaga

SEQ ID NO: 766618 - DNA, 572 bp, Homo sapiens
agaatccattttcttccttttactagcttccagaggttgccacattcttggctcacatctgtcccccttccatcttcaaagccagaaatggctcattaaatctttctcctattgagtttcctatcgggtctttctctgacatttgcttctgcctcccacttccacttataaggacccttgtgatgacattggaccgatccaggataatgtcttggtcagcaaccttaatttcatatgcaaccttaattcccctttgccatgtaagatgacatattcacaagttccagggattacaacatggacatcttcagagaagtgggggattattctgcttacagcaaatagcctgggtctactttaggttgtgagttctttgggggctgagctgtactgtattcatccagagattccttgggagcmattcagtgcccagtatgcaccagatgtttataatttattcaatatatttgttccttccttccctctctctttcacagcggtccacccccatcatggtctgatagccctcccaacctctctggcctccctgcccattgtccctcacaggtgct

SEQ ID NO: 766619 - DNA, 587 bp, Homo sapiens
aaatgttttatatttttttttaagtaaaatggacccagtaagaaaattaaaaataccagaacatacactttaaactgtctgatttaataaaacagtggggggtaaagttgggtgtatctatgtgtattttcatataatgagatggactttggtttagggacatttcctgaaaacactgggtttggagtttagaccccaagaagttagctgtggcctcatgtttggtgtttgagtcacgaatgtgggsaagccatggctgatgtgtcagctcacaaacgggaacttacaaagatgatttctcattcattgttgctgttaccttcaaattttcttacctctgttttccttagttttctttttatgcctttcagtttttctttcaccagagtaaaccgtgtggctttttgtttgtttgttgtggtttgcattgttgccaagataaaatgcctgttgtggactaagtgggcccactcaggccagcttgattgtatattggaaagctgatctttccctcttggagggagggagaggacactggttggtgtgtttaaaaactgttctttctgaggcgggcagatcatgaggtc

SEQ ID NO: 766620 - DNA, 662 bp, Homo sapiens
atcgccaatagacctgccttacaagacaaagaaaagcctttcaataaaattcaacaccctttcatgctaattctcttaataaactaggtattgaaagaacataactcaaaataataagagccatgtatgacaaacccacagccagcattatactgaatgtacaaaagctcgaagccttctacttgaaaaccaacacaagacaaggatgccctctctcacacctctttttttttttgagacggagtctccctgtcgcccaggctggagtgcagtggcgcgatctctgctcactgcaggctccgcctcccaggttcaagccattctcctgcctcagcctcccgagcatctgggactacaggtgccccccacctcgcccggctaattttttgtatttttagtagagactgggtttcaccgtgttagccaggatggtctcgatctcctgacctcgtgaccctcctgcctcagcctcccaaartgctggaattacaggcgtgagccaccgcgcctggcctcaccactcttattcagcatagccagagcaatttgaagtcctagccagagcagtcagacaagttaaagaaataaaggcatccagataggaagagaggaagtcaaactatctctgtttgcagatgacataactctatatttaaaaaacc

SEQ ID NO: 766621 - DNA, 558 bp, Homo sapiens
  misc_feature 298: n = A,T,C or G
actttgtctcccagactggagtgtggtggtgtgaatattggcttactgcagcctggacctccctggcacaactggtcctcccgcctcagccccacaagtagctgggactacaggtcaatgacaccactcccagataatttttgtatatgtatactttttcttgtagaggcaggatttcgccagtgttgcccaggcttggtctcgaactcctaagctcaagaaatccacccactgtggcctcccaaagtgcaaagattacaggcatgagccatttgcccgactgaaaaattcatttgtnataaataaactcagcatattagaaagaaaaaggaacataaactgatcaatggaatccataaaaacttgcagtaatgttataattaatggtgaattacyggatgttttcccctaatgtcaagcataagacaaagaggtccattattaccacttctattcaacattatactgggggtattactacatgctgcagggcattaaagaggaataataggcatacagatcaaaaagaaaaagaattcaaactatgtatttttaaaa

SEQ ID NO: 766622 - DNA, 605 bp, Homo sapiens
ttaaatggccatactgcccacaacaatttacaaattcaatgctattaccattaaattaccaatgacattcctcagaaaactagaaaaaaatattttaaaattcatatgtaacccaaaaatgaggctgaatagccaaggcaatcctaagccgaaaggacaaagctgaaggcatcacattacctgactttatactacagtgttacactaaccaaaacagcatggtaccaataccaaaacaggcacatagacyaatggaacagaatagagagccccaaaataaggccacacacctatgacggcctgatctttgagaaagctaaaaaacaaaataaagcaaaacaaaaaaaaggaaatggggaaaagagtccctattcaataaatggtgctgggaaaactggttagccatatgcagaagactgaagctggaccccttccttacaccacgtaaaaaaatcaactcaacatggattaaagacctaaaagtcaaatccaaaattataaaaatcctagaagacaaaccagccaataccatcctggacaaacgaataggcaaagaggttatgacaagacacaaaaagcaatcacaagaagaacaaaaattgaca

SEQ ID NO: 766623 - DNA, 609 bp, Homo sapiens
cctaagggaagctattgtttgcacaatgtcctcagccaggaagcacagctcaggtggcagcagttccccagactgcaagtgtggcaccagaaggctgacaaaatgctcctggcattgccggcctgcaaccccagcccctaaggacacggacccratcaccaagaacgcacaaactctgatgaggacaagtgtctctccgagtccctacctggcagcagcgcctgcaaagcaacccctgtcaccctccagaggaggctcgtgggagcccatcagccgtgtcgggaccttgggaccctccactcagacacctgttctaagagcttcccccgagaggggccgagggagggtactacacgcaaggccaatatgtcaatgaagtaccctgtgctgttcattaaaacctgaaaatgaagcttgggaatttcattaacaatccaagtgcaaagaagagaggtttttggggatatttttaacacatctataatctttcattaacagctagaaatttagattgccgtacataagtgatagacaatgaaacagagaaggcatttctgagagtctctcggctgtcagcattgtgagcagctgggagggtcactccgtagt

SEQ ID NO: 766624 - DNA, 613 bp, Homo sapiens
gacacaaaaatgatgtaagtgactattttctcaattgtcccaaatagctagaaccattctggatgcaaaggagagaagttgattcatcgcaacaacagatgctgtcggcccttcgggctgaattcccgggacccacatctcatcctgcttgtcaaacctcttgattcagtgaatccctggttcattcagaaaacaaaactcatcactttcaaagccaaagaatcatcatgaggaagcttcatgtaaatttccaaaatgtaaaagaaaatattccaagagcactggtcttcgaaacagaccrcggagggttaaaagccaaggcctcctcccacaaataaaagaaacccaaaatgttctacctgttttatctaaacaacgacgcaataaacagcttgaaaacttatcaggtattgagaaatacgtggtttatcaaggaaacccaagataagaggaaggcagagaaacaaccgcggtcaacaagcgggggctgtggcgccctgggggctccgcagtgggttcctcgggctgagcactgaacgtcagcactgcctgggggaagctcgttgactacagcatcttaggccccaccgaagagaggttggagatgcagcca

SEQ ID NO: 766625 - DNA, 598 bp, Homo sapiens
attgtagcataagtgtttccccacattattgtagattcccaagtctcatttttaataaccgttatgttttttcaaggacggtaatttaccaaagttttttcctgtagttggtcacttatttccagtgttcctgggttgtaaatgtttcagggaacatatggaccaaattattaatcgtcaaagcactcacatttcctgtttatacagccttgtgcaacaggggttgcagaatgaggagctggcatcatcgctgtccttgaggaatttgctatttatggggtggagagagagggtgatacatattaaacaatgatggggcaatgcaacagcacatataaatacagggaaaggyggtggtgctagaaaagactttaaacatacaaataaaaatattttaaatggtagtgccaaccgtaagtcaaagcgcgtgtgtgtgtgtgtgttccaaagaaaaaatgtgtgtgtgtatgtgtgtgtgttttccagagaaaaatcgagagacattgacttgtcgtaaacgttagtaacaatagagccactgaaaagacattcctgaccacactttgtggcgttgcgaggaactggatccaagatgcgc

SEQ ID NO: 766626 - DNA, 598 bp, Homo sapiens
attgtagcataagtgtttccccacattattgtagattcccaagtctcatttttaataaccgttatgttttttcaaggacggtaatttaccaaagttttttcctgtagttggtcacttatttccagtgttcctgggttgtaaatgtttcagggaacatatggaccaaattattaatcgtcaaagcactcacatttcctgtttatacagccttgtgcaacaggggttgcagaatgaggagctggcatcatcgctgtccttgaggaatttgctatttatggggtggagagagagggtgatacatattaaacaatgatggggcaatgcaacagcacatataaatacagggaaaggcggtggtgctagaaaagactttaaacatacaaataaaaatattttaaatggtagtgccaaccgtaagtcaaagcgcgygtgtgtgtgtgtgttccaaagaaaaaatgtgtgtgtgtatgtgtgtgtgttttccagagaaaaatcgagagacattgacttgtcgtaaacgttagtaacaatagagccactgaaaagacattcctgaccacactttgtggcgttgcgaggaactggatccaagatgcgc

SEQ ID NO: 766627 - DNA, 598 bp, Homo sapiens
attgtagcataagtgtttccccacattattgtagattcccaagtctcatttttaataaccgttatgttttttcaaggacggtaatttaccaaagttttttcctgtagttggtcacttatttccagtgttcctgggttgtaaatgtttcagggaacatatggaccaaattattaatcgtcaaagcactcacatttcctgtttatacagccttgtgcaacaggggttgcagaatgaggagctggcatcatcgctgtccttgaggaatttgctatttatggggtggagagagagggtgatacatattaaacaatgatggggcaatgcaacagcacatataaatacagggaaaggcggtggtgctagaaaagactttaaacatacaaataaaaatattttaaatggtagtgccaaccgtaagtcaaagcgcgtgtgtgtgtgtgtgttccaragaaaaaatgtgtgtgtgtatgtgtgtgtgttttccagagaaaaatcgagagacattgacttgtcgtaaacgttagtaacaatagagccactgaaaagacattcctgaccacactttgtggcgttgcgaggaactggatccaagatgcgc

SEQ ID NO: 766628 - DNA, 482 bp, Homo sapiens
aatttgtttctttatgaattgtgattttggtgtcaaatcaaaaaatatttgcccaccttaaggtcacaaagccttcttgctaggaattttatggttttatgcttttaggttttatatttagaactgagacctattttgagttaatttttataggctgtgcaaggtatgrattgaaggttattttgtcttgcatgtgggtaagcaatcatttcagtatcatttgttgaaaagattatcctttatctattaaattgtctttgcacctttgtaaaaaaaaagcccacaagttatccatatatgtgtgggtctatttctgaactctcttttattccattgatcatttattgatgctgatatcagtgctatactgtcaagattgccatagctttacaataagtcttgacatcagctagttctttctcaacacggttttggctattttggtccttagcatgcatttccatatgaattttagaatcagt

SEQ ID NO: 766629 - DNA, 391 bp, Homo sapiens
ttgcttttgccttgctacttggatgtgaagatgaaggctggggctctcacactagtccacccttgccttagagcccagattccatggctcttcgtgattcctctgtcaacatgagccatgaggagatcccatctcttactgaggataccaagtgttcaccctggagctggggaaataaccagtaagtggactcaggattgagcrtacagaggggctaaaagatctcaccaagtcaccacacccccacttgactccatttcaactaggggaccatggggatgtgtgagcccagagccagtgcccaagagtccacattgcaggtacttccccttcctctgtgcgcagtaaagctatgaacagcatggatcccttgggaaaggctgggggaaag

SEQ ID NO: 766630 - DNA, 391 bp, Homo sapiens
ttgcttttgccttgctacttggatgtgaagatgaaggctggggctctcacactagtccacccttgccttagagcccagattccatggctcttcgtgattcctctgtcaacatgagccatgaggagatcccatctcttactgaggataccaagtgttcaccctggagctggggaaataaccagtaagtggactcaggattgagcgyacagaggggctaaaagatctcaccaagtcaccacacccccacttgactccatttcaactaggggaccatggggatgtgtgagcccagagccagtgcccaagagtccacattgcaggtacttccccttcctctgtgcgcagtaaagctatgaacagcatggatcccttgggaaaggctgggggaaag

SEQ ID NO: 766631 - DNA, 630 bp, Homo sapiens
taaacatattaattcttagttttcacatctaaaaataatggaataatattctttgaaatgcttgggcaggttaaaataaatgatgcagagagaatacttagcagaaaaccttccatatagtgagcactcagtaaataacagacattatcattggttattatcatcacaatcatcaccattatcatatttgttgaataaaacataattttttattacctatcctggagcttagtctgaaaatatgctaaatttaaaataaaacgacaactttgggggagattcgtgcacatttgcggcttataatttaggagagtgggagtgtggggatgttaagttgaatattagccaaataaagaggtatatatgcrtgtgcatgtgtgtgttaatgtttcaaaggctgcaataacaacaagaaaagaatgtttgaagctcagagatgtgtgagaagaagatgttctggggaaactgaaaacagttcagtttagctgaaatttaaagtttggtagagtacagtgtgttaggtttctgcagataaatagacatttatttatttatttataagtattggctcatttgattataaaggctaatcccacaatctgcaagctgtagacccaggagagctgatga

SEQ ID NO: 766632 - DNA, 630 bp, Homo sapiens
taaacatattaattcttagttttcacatctaaaaataatggaataatattctttgaaatgcttgggcaggttaaaataaatgatgcagagagaatacttagcagaaaaccttccatatagtgagcactcagtaaataacagacattatcattggttattatcatcacaatcatcaccattatcatatttgttgaataaaacataattttttattacctatcctggagcttagtctgaaaatatgctaaatttaaaataaaacgacaactttgggggagattcgtgcacatttgcggcttataatttaggagagtgggagtgtggggatgttaagttgaatattagccaaataaagaggtatatatgcatgtgcatgtgtgtgttaatgtttcaaaggctgcaataacaacaagaaaagaatgtttgaagctcagagatgtgtgagaagaagatrttctggggaaactgaaaacagttcagtttagctgaaatttaaagtttggtagagtacagtgtgttaggtttctgcagataaatagacatttatttatttatttataagtattggctcatttgattataaaggctaatcccacaatctgcaagctgtagacccaggagagctgatga

SEQ ID NO: 766633 - DNA, 594 bp, Homo sapiens
taaagaggcttccagcccatcacctatcaatagaaatctagactggcttccctctggcctcagaaactgcgtttctaagtattaatcttttttttttttaaattttcatagaaactttcctcattaaatgcctgactgctcatgccatccagcaagtacctttattaccaattcctatcagatgattcatctacttcttaataaactggaggtgactgaatgaaaaaatgggcttatattcttcacagaaaagaaaaatatatattctttctttgaataagatggagggactaacaaagattcgctccttgaccaaatttgaatcagtctttttctgaagtctcttctcaagcagatcctgacatctgggcccccatgttcatttctacactgaccaattttarcaagaatcctgctaagtcagtttagttaaaatcctgaatcctattggtaagtgaccaccttcaatatctaatcagattcctcacctcaccttatcccctaggtgatgtctgtcactctggcctagcttcagtaagaatattatttggtcaatttagccagaatccttacccctgacgtttcccctgagta

SEQ ID NO: 766634 - DNA, 480 bp, Homo sapiens
tttgtcacttaaaacacaaacacattgcacagctgtatcaaaacatttttatagcactagtttataagctttttttttctattttttccctttttgttaaaattaagacacaaatatattctttagcctaaacctacacaggatgagaatcaacagtatctctattttccacctctgcatcttctcccattggaaggtcctcaggagccaataacacacatagagctgttatctcctgtgataacaatgcctaacaaygccttcttctggatacctcctggaggaccagcctgaggctgttttacagttaaatgtacatatatggagtatactgtaagtataacaataaaaagttagaacagtaggatgtttacagtagtttcaccacaaacaccttattaatgtattgcactgtggccttgcaatggctacaatctcactaggagatagaacatttttcagcccattataatcttaggg

SEQ ID NO: 766635 - DNA, 480 bp, Homo sapiens
tttgtcacttaaaacacaaacacattgcacagctgtatcaaaacatttttatagcactagtttataagctttttttttctattttttccctttttgttaaaattaagacacaaatatattctttagcctaaacctacacaggatgagaatcaacagtatctctattttccacctctgcatcttctcccattggaaggtcctcaggagccaataacacacatagagctgttatctcctgtgataacaatgcctaacaacgccttcttctggatacctcctggaggaccagcctgaggctgttttacagttaaatrtacatatatggagtatactgtaagtataacaataaaaagttagaacagtaggatgtttacagtagtttcaccacaaacaccttattaatgtattgcactgtggccttgcaatggctacaatctcactaggagatagaacatttttcagcccattataatcttaggg

SEQ ID NO: 766636 - DNA, 472 bp, Homo sapiens
tggatattagcaagagctatgtaagcaggggcttgatagacatttgcacaggggggctcctgctcttgtaagcaggccaccatgctctcaagaagtccaggccatccccctgtgagaggaaccaggagattcctggaggagaacagaggtgcctggccccaaggccccaggcaaatacaagaggccttcttggacattcccaccagcctgttgccagtgaacmcagccacatgagccacccctaggcaaagaccgcccaatcaaccagacactgccaaaaaaaaaaaaaaaaaaaatcattgtctgtttaaagcccctaaattatgggactatctgctgcacagccacagagaactgacacatgaagttcacgttcaacagtaaagtggaacatggacaatcctgaaggtgagctgtggaaacattctcagcatcctgagtcctgtttatctcgaggttgcacctatttctt

SEQ ID NO: 766637 - DNA, 619 bp, Homo sapiens
actctccagtggaaggaggctcctcccctgggctccagggcttgtatcttggggaaaggaagtcaagctggattttcacccacttctctgcctccctcccatcgctcccagatcatctgaccattcacaggaagtccatggtggggtgtggctgtttttaaggactttggcattgtttcaggaaaggaaaaaaaaaaaaaagctaaacaaacaactgctcaaaacactaaaacaattctctgatttgtttcaaatttgtataggggatggggttttcataaatagccaggctggtggtggtgtggagatgtgatcttttgggcatattaataacaactgcctccctcaccaagactaggccctatgttaagtgcttctggggcttgatcttatttaatccatacatccctgggccatactgtgattatgaggaggagtttcaragaggttaaggggcttacccaagggcacacagctgcaaagtggttagagcaaagatcttaagccatgtattttttttctttttttttcttcttttgtgacagggtcttactctgttgcccaggcttgagtgcagtgatgcaaacatggctcactgcaacctggacctcccgggctc

SEQ ID NO: 766638 - DNA, 487 bp, Homo sapiens
ggtgcctttcataaagtctttttttttggggggagacagagtctggctctgtcgcccaggctggaatgcagtaatgccatctcagctcactgcaacctctgcctcccgagttcaggcatgcctcagccccccgagtagccaggattacaggcctgcgccaccatggctggctaatttttgtacttttaatagagatggtgtttcaccatgttgaccacccgccttggcctcccaaagtgctgggattacagatgtgagccatcgcgcccggccttcataaagtctttaaataaaaatattgaaatctttttagaagcrtctgcatatcagtaagcatccctagatgagtctcaatgcacttcagtgcattgttcattcggaacgttctactgtaagttatctttagtaagatttcgccatttctgtaagacttcactgcttaccagctaatgtataagctggaaggaattcagttttccaaaaatga

SEQ ID NO: 766639 - DNA, 710 bp, Homo sapiens
ttggatggaatttagacctctaggttctgggatcctaaagaactgaagtaattagccagacatggtggtgttcacctgtagtcccagctacaggttgaggtgggaggatcacttgaacccaggagttttagaggctgcagtgagctatgatcacaccactgcactccagccccagggccacagtgagaccctgtctcaaaaaaaaaaaaaaaamaaggaactgaagtgaagtcagaatatcttcttttcaggccttagagaaagatcgttatgagcatagtcccaaatctggatttctctgaagccaggtcctcccttggcttaccattctgtcttccactgataacttgaggcacgtagccattaactggactgcccagctgttcctggcctagggaggagccagaacccccaaccaatagtaatgaggatggtgatgcgagccttgggtcctccctaacttggctactgtgttacagaagcaatatccaaggcagtgtcatctgcaacaatgctgtgatcgagaagggtgcagacatcaaggactgcttgattggaagtggccagaggattgaagccaaaggtaaaccagattacaatcacagattccatttttacttctcacaccagcactgataatgccaaaggctggtgaggatgtgggaaacaagcacatacgtacactgcgggcgagaacataaattgataaa

SEQ ID NO: 766640 - DNA, 588 bp, Homo sapiens
cgtgtagcatataacacaggtacttaaggcataaacaacacagctcagtcagaaacagcccagagttgaaacaaatactattgtgaccttctcactagggatgaagattcagcagttcacaatgaaattgagattaataaaatgctcatgctttaattaataggaacagagaaaccagactctaaaccattccccattgccaatgagtttgttatgttgataatttgatgacaacttcagagacttaaaagcacagggaggctggggagtcstatctagataaaagatttgctaaatgaaattactgaaggtgaacctggaaacattctgtaaagttagctaaattatctttacgttttttagaaatagggtctcactctgttgcccaggctggagtgcagtggcatgatcttagatcattacagtgtcatactcctgggctcaagtgatcctcccagcctcagtctcctaagtagctgggatcacaggtgtgtgacaccatgcctggctcaaattctttttactttgaaggccctgctagaaattgctgctgctctaattcaccactcagagaggagaggcaaaact

SEQ ID NO: 766641 - DNA, 386 bp, Homo sapiens
agacaacaaacactttcctttggaagtgatggagttgcacagaggatgagatgtgtttggtctcagtgactcttacatggtgcattctctgggaacagaggcaggagaggggctgatggaacagcacctccgtctgtatgctaggccctgtkctttcagacccacgcctttcttttcacactaagaacagatggcaaccagacattgagtggaggggtctgttccttgtgatccttggggattttgcattcagtttagcaaaaagtcatcaaaacgcaaagagagaaatgagcctacagcctgttcacaattatgcaggacttgtttggcattcactgtactgacagatttaaacacttttgcagatatcgaatgataacagcatt

SEQ ID NO: 766642 - DNA, 503 bp, Homo sapiens
attgttctgcaggtctttttgtgaaaatattctataggctgtaaggtttactttattggaaactagcagttttctaaagtgattgtaccattttatactttcatcaacagtttgtaagagttgcgtttgcttcacgtcttcatcaacacttggtgttgtcagtctttttaattttaaccattctagtaggtatgtatgtagtggtatctcattgtggttttaatttacatttccctgatggtaatgatgctgaacaccttttcatgtgtttattggccatttatatatgttcatgaagtgtctgttcaaagcatttgtctattttttaattgagttgtttgcctttccattattgattrtaggaattcttaatatagtccagatgcaagtcgtttgtgagatatgtgttgtgaatattttccaccagtctgtggctttttatttaatggtgtctcttgaagaaaagtttttaatgatgatgaaatccaaattactgatttttt

SEQ ID NO: 766643 - DNA, 641 bp, Homo sapiens
gcatagtcagcaaaagccggtaattccaaggaacccacttaactgttttaatgtcttagggtgaggataagccagtataggctgtattcgttccttgctgagggccctggtccctctggctaagattaggcctagatatttgacctgctgtaggcaaagctgggccttcgacctagacaccttgtacccttgattagctagaaagttcaagagatctagagtagcctgctggcatgaggcttccaaactggcagccaaaagtaaatcatccacatattgaaggaccagagtgcctggacttgagaagtggcctagaccttgggccagtgcctgactaaacagatgagggctatccctaaacccctggggcaagaccttccacgtaagttgggacttgtggtctgtgggatcctcaaaggcaaagaggaactgggagtcagagkgcaggggaatacagaagaaggcatacttgaggtccagaaccgtgaaccattctgcttcctccggtatttgagagagcagggtattggggttgggtaccactggatatagaggaattactgcctcattgatgagtctaagatcttgcactagtctccactgaccattcagtttttgtactcccagaattggggtgttgc

SEQ ID NO: 766644 - DNA, 621 bp, Homo sapiens
acttggtgccctgtgttccagccacttcagctccagccgtggctaaaaggggccaaagtacagcttgagccatggcttcagagggtccaagccccaagctttggcagtttccccatggtgttgggcctgcaggtgcacagaagaccagatttgaggtttgagaacctctgcctagattacagaggatgtatggaaatgcctgaatgtctaggcaaaagtctgctgcaggaatggagctctcacggagagcctctcctagggcaatgcagaggggaaatgtgaggttggagcccccacagagtccccattagggcactgtcaagtggagctgtgagaagagggccaccatccttcagaccccagaatggtagatccactgacakcttgtatcatgcacctggaaaagcttcaggcactcaatgccagcctgggggctgtaccctgcagagccacaggggcagagctgcccaagactttgggagcccagctcttgtatcagcatgctctgggtgtgagacatggagtcaaaaaagattattttggagctttaagatttaatgagtgcccagccaggttttggacttgtatggagcctgtggcccctttgttttggccaatttc

SEQ ID NO: 766645 - DNA, 515 bp, Homo sapiens
gtggccttaaaagtccacagacatagaaaaaaataactggagtagaaactgaagagaagataggttgtaccaaactgttacccaatcatgcccaatatcccttgaagacagagcaaaggaagattttaaaggtacatttgaaggccttatatctaatggtcttttcataccctgcactagcgtttgtaacactctagtcttgccagtaaaraaaccaaatgtgtgagaatatcaattttgcaagacctcaggataatcaacagatttttgttccttgcttcccagtagtacctaactcagataccatcttggcatcaattctacctgaaaccacttgcttcactgtagtgtatttttgctctgcctttttatttattgattgatttattttggatgtgcctctagaccacttctaggacagtaaataccttttagctttcacctggagaagataacaatatacctggacaatcatgggttttattgaagccccctcctgtttttcccagttcctc

SEQ ID NO: 766646 - DNA, 765 bp, Homo sapiens
atctagattaacattatctatataaaaattacaatacagtgttgtagggtttaaaatatggagaaagaacattattggcatttatttaagtagagaggaggtaaagaaagtaaagtgttctaaaggctttctaatcatagagtggctcatagagcttattagaaggcagaatctcagaactatcattgaatcagaatttctattttaacaaaatcctctatgattcatatgcatattaaggtttgggaagtattgttcccaaaaggtgtgtatcatctgaaaagggagtaaaagaaccaattgatattagatttttgcatatctagaatttattttgtagtctctatggtaaccactcaaggaatgctaaaagactgcataattttcaaacacgggggaaagtgaaaaagtaaaaaataatcagctcaaaataaascaaggaaagaaaggaaaagaaacagaacaggttgaatacatagaaaccaaatataagtaagcaaaatatccatattagaagacaatgattatccgactagattttcaaagacaaaaacaattacatatacaagatgatgtttgtatttccatgtaaatgtgtatagcaatttacaatttatagtttttcacatacgctaaggctgagaaacattaagactaggttattaataacctgaagagcagtgggttgtcatattaaggtcctctacaaagtaacatacaaatcccaggatgataccaatctagaaaatcacttatactctttaa

SEQ ID NO: 766647 - DNA, 765 bp, Homo sapiens
atctagattaacattatctatataaaaattacaatacagtgttgtagggtttaaaatatggagaaagaacattattggcatttatttaagtagagaggaggtaaagaaagtaaagtgttctaaaggctttctaatcatagagtggctcatagagcttattagaaggcagaatctcagaactatcattgaatcagaatttctattttaacaaaatcctctatgattcatatgcatattaaggtttgggaagtattgttcccaaaaggtgtgtatcatctgaaaagggagtaaaagaaccaattgatattagatttttgcatatctagaatttattttgtagtctctatggtaaccactcaaggaatgctaaaagactgcataattttcaaacacgggggaaagtgaaaaagtaaaaaataatcagctcaaaataaaccaaggaaagaaaggaaaagaaacagaacaggttgaatacatagaaaccaaatataagtaagcaaaatatccatattagaagacaatgattatccgactagattttcaaagacaaaaacaattacatatacaagatgatgtttrtatttccatgtaaatgtgtatagcaatttacaatttatagtttttcacatacgctaaggctgagaaacattaagactaggttattaataacctgaagagcagtgggttgtcatattaaggtcctctacaaagtaacatacaaatcccaggatgataccaatctagaaaatcacttatactctttaa

SEQ ID NO: 766648 - DNA, 638 bp, Homo sapiens
attgcatgctgcatcctagatgtacataagcagactgtgttactaaatttaatacatgcaccagggctggtcaacatctacgaatataaaggcatatgtctggtagaattttgtataacctcggtggaatcagttcatataggaatgaatrtaaatggagaaatcttcaatggactctcttctctacctattggcatcttgatacttttcctagcctgatagcagaggtcatcctaccctagtagtatttcattacacatttttttctgatctcacattacatttcaaattgcataacttttcaataatgaattctctgcatgtgtacatgtgaccaacactctactaagagctttacaaatattttttatattcctcattcattcaaaaactatctattgagcacctaccatatgccatgcattgctttaggctgtggtgataaagtttcacaaagcttatgtgcaagtgcagagacacagaaaatatcaacatgtagctcattaattccagaacataagtgataatgagaaaataaattcaagtaaggcaaaataagttttaggtaagggcatttaatgagggcatttaggaaaagcctctctgaacagccacctgaattatcaaacgcatgagtc

SEQ ID NO: 766649 - DNA, 587 bp, Homo sapiens
atgatcccatcaccaaggtagtgatcatagtacctagtatgaagctttccaacccgtgtccctttctcacctcccctctcaagcagtctccagttctattgtgctcatctttgcatacttgtgtattcaatatgtaatgccctggctgggcgccgtggctcacgcctgtaatcccagcactgtgggaggctgaggcaggtggatcacctgaggttaggagttcaagatcagcctgggcaacatggagaaaccctgcctctactaaaaatacaaaaattagctgggtgtggtggcacatgcctataatcccagcgactcaggaagytgaggcaggagaatagcttgaatccaggagtcagaggttgcaatgagctgagatcatgccactgcactccagcctgggtgacagagcaagactctgtttcaaaatatatctgtttatatatatatatatatggcacccagttataagtgagaacatgcagtatttggttttctggtcccacattagtgcacttaggataatggcctccagctacatccatgttgttgtaaaggacatgagttcattctttgttaaatggctg

SEQ ID NO: 766650 - DNA, 623 bp, Homo sapiens
ttaataattcagctttcaaaaccgactgtgttttcactggaatgcagaattggggtctatgctttctcatgagaagtcagagcaggagggattctgggaagatggtgtgacactcactgagggatggcttggtcagcttaagggcatgtgaagctgaggggcaattccctgaggcagtgtcaaaatggttcaaccaaatcatcttcagggagacattatttatggtatacctcccatgactctttcaggaaactacagcccagtatcatcaggccttcctgactttgcacttggtgtaccctctgcctrgtattcccttttctagtctgaagtacaggtggattatgtgattcttgagcactgggaaaagtcctgcacttaaaatgtaaatgacatgagtctgctgtggtgcctgaaatccccacaccagtcatttcaaaggttataaatttgaaggaaggtcttaaatatttccaattttttgtagttaattgagctgaatcacattatcgtattaatcataaaagagaccaaggtgcaaaagaatgggacattggatagatcagttttgttgggaaattaaatgaagaagaagagaggacacatgcttccagtagagtggg

SEQ ID NO: 766651 - DNA, 626 bp, Homo sapiens
  misc_feature 1, 2, 3, 4, 5, 6, 7, 8, 9, 10, 11, 12, 13, 14, 15, 16, 17,18, 19, 20, 21: n = A,T,C or G
nnnnnnnnnnnnnnnnnnnnnatcaagcaagtaatatttcaaacagagttttcaagagatacatttttttcagcctgtataaattgtcttctgagaaatgtgcatgcagataatagaatacattatgtaacaataaagaagcagccacaatttgccagtcccacccctggatttttaaagagaaggcagaaaataaatagttagatgacatgttagggaaattccctatcagtgaggtgtaacttgtccacaggtctcccggaacacctgatatcgtttggctctstgtccccacccaaatctcaccttgaattgtaataatccccacgtgtcatgggggggacccagtgggaggtaattgaattatgggagtgggtttttcccatgatagtgaatatgactcatcttccaccataattttgaggcccccatagccatgtggaactgtgagtccatcaaacttctttcctttctaaattaccaagtcttgggtatgtctttatttgcagaatgagaaccgactaatacaacatccttttgtgcattgaggagaattgactggccttgtttctcactaaaacctaagcctccccagggggcaacgttgcttatcattgtagccctcc

SEQ ID NO: 766652 - DNA, 636 bp, Homo sapiens
gagtcttagccactacagtttttaaataaaacatagaaacccagagacttgcccaataataaaatctacattggttaggtgtggtggcacatacctataatcccagctacttggaaggctgaggtgggaggatcacttgagacctgggcaacaaagcgagaccctgtctcaaaagaataaaaaatctacactgaaggtgctcctaaacttcttttgtcatctgtcatatctattaatattaactaccaatgatttgtatatactttacgttatctccactccttctaagaacactacatagtgttatctccattttgagaaaaggaaattgatccttagagagctacagtccatttattcacttattcatttatttatttattgaataaatattcattaaagcctttgtcatgtgccaatttccaggtactagattatatagcttrtaagtaatggaattagagttagaactctgactataaaaccagttctgttttcttagtgccaagatagcatttgtcctgtaactcatttactgagtgagtagtactgatgtgaacaaattagatcatttcttttgccaaggaccatagatgttccctaaacccatgctgccaatggtcataaggataatta

SEQ ID NO: 766653 - DNA, 606 bp, Homo sapiens
catattatcaacttttttctgtaaagcatttaacattgcagtaatgtactatgaaattaatttaatatcctccacttctgcctataaatctatagatgaatgtaaatttagtgtttttgtatgtataatgatgagtgtatgaaataacctttactaaagacctctaataagcagaatgttcaacccatggctaaggwtcctagaaagtgaaaagaagaaagtttctagtgcgcctgctgtgtctcatgcattttacatgtattttcttatctaatctttccagtaagctatggaaagagatatttctccatttaacgaagaagaaaattgaaggcaaacacaatttagtaatttactcagcactacagagccagtaagtaatggaaccgtcattcccacctggatttatgtgcattttccagtgtaccatgttgtctcttgaccctgtaagaactttttatgttgcagatgccacaagatcttcatactagtaggtgccatagtggataaaaggttcataaatgccataaagagatatgctcaaaatactctggcagattagatgaagattagataaagatgaaaacgtctggtagttatgggtgt

SEQ ID NO: 766654 - DNA, 617 bp, Homo sapiens
atatgtaatactattccccttaatgttttcatattaataaatattgagatttgactagaaaaataaaatcacacatatgcatagtattatgtagagagagatacagaagtgtgacattgtgtttatactcccaattattcatcaaatattaatcagcctgtgcttttgttccatcaaactggtaagtgcttgagggtataaactaaattggataccatttctcagttagragagtttctggcaagatttttttaaaaaaagcaaaacaaggatactctaaacatttgaaaccacacatgaaggtagacacaatttggatctgaatgtggacatgtctaatagagcatttctctatgtggtgagttaaataacaatatccagttaactacatagaacgaggttcaaagtacagatcttgtcatgtaatgtgagtgactcacaatgcctcgagtatggaataagaaagagagaattgcaaaaaaaattatagatttagatgagattttgctaatgtttttgaactttttcttcctttatgtgaattgtgaattataaaaaaaaagaatgttcttacttagtcattgatcacttcatccttcatacatatatatatatat

SEQ ID NO: 766655 - DNA, 648 bp, Homo sapiens
aagtgataatcaattcctgttggcattgctaaaaacttccaaaaagtttattaattctacaaataataggttaagattatgtgacttgccaaaaaccacattattcttaagaatactacctaatcaaagaggtgcagatcccagctgctgtcttctacaagtacaccaaaaagaacagagaaactgttatttatagtcaaattgcaatttattagagctgttattttgtcaacaygttacttcagtggtttgtttgacattcttctagatggactctctctggtcctgtcaattttttcagtctttcgaagagcctgtcagtaaaaaatataaaaatcatagttgtctaatgaggtcttgccatatgcgtacatgcacatctatgatatgcatggcattttaaatctgtggataaaataaatgtgaatacttgtttattattttttccatgggttctgaactaattattcaagtaattaggttttatcttcttttagataattgaccttcatacaatgaaagatcccttaatttttataaatatctaaaatgccatatatttgttgtttttatttcgtgttttgatgtgacacaagcaccaatttccttgcaatacatagttttctaaaaataaatcatattagtaac

SEQ ID NO: 766656 - DNA, 648 bp, Homo sapiens
aagtgataatcaattcctgttggcattgctaaaaacttccaaaaagtttattaattctacaaataataggttaagattatgtgacttgccaaaaaccacattattcttaagaatactacctaatcaaagaggtgcagatcccagctgctgtcttctacaagtacaccaaaaagaacagagaaactgttatttatagtcaaattgcaatttattagagctgttattttgtcaacacgttacttcagtggtttgtttgacattcttctagatggactctctctggtcctgtcaattttttcagtctttcgaagagcctgtcagtaaaaaatataaaaatcatagttgtctaatgaggtcttgccatatgcrtacatgcacatctatgatatgcatggcattttaaatctgtggataaaataaatgtgaatacttgtttattattttttccatgggttctgaactaattattcaagtaattaggttttatcttcttttagataattgaccttcatacaatgaaagatcccttaatttttataaatatctaaaatgccatatatttgttgtttttatttcgtgttttgatgtgacacaagcaccaatttccttgcaatacatagttttctaaaaataaatcatattagtaac

SEQ ID NO: 766657 - DNA, 648 bp, Homo sapiens
aagtgataatcaattcctgttggcattgctaaaaacttccaaaaagtttattaattctacaaataataggttaagattatgtgacttgccaaaaaccacattattcttaagaatactacctaatcaaagaggtgcagatcccagctgctgtcttctacaagtacaccaaaaagaacagagaaactgttatttatagtcaaattgcaatttattagagctgttattttgtcaacacgttacttcagtggtttgtttgacattcttctagatggactctctctggtcctgtcaattttttcagtctttcgaagagcctgtcagtaaaaaatataaaaatcatagttgtctaatgaggtcttgccatatgcgtacatgcacatctatgatatgcatggcattttaaatctgtggataaaataaatgtgaatacttgtttattattttttccatgggttctgaactaattattcaagtaattaggktttatcttcttttagataattgaccttcatacaatgaaagatcccttaatttttataaatatctaaaatgccatatatttgttgtttttatttcgtgttttgatgtgacacaagcaccaatttccttgcaatacatagttttctaaaaataaatcatattagtaac

SEQ ID NO: 766658 - DNA, 610 bp, Homo sapiens
aacgaggtcaaatttaataaatatatattctttgtaattttcacttttagtgtcttgtttggcaaaagaaaacatcctcattcttgaggtgatactgttttcctatgtgatcttctaaatgttttacatttctatctttaaatgttaaatgtttaatacccctggaatttattttgtgcattttgtgaartaaatgtccactcttcctacacccaattatcacagattcatttatcgactggagtcaacagaccactgttttccacagatacagcatctataaattaattatccacatatatgtggacctattttgtaacttcttattctgttgcatttgtttgttttgtctaacattgtgcaatctgcaataccatccttttaaccactgtgtctttaaaataaattttgacatcatgtatggaaagctcttcctatcaccaaatttgttcttaaaatttatattgccaacttttggacttgtaatattccaaacaaattttgggattgacttactaaattacttgaaaattacatttaggatgtttgattgcaaaaaaaaaaaaaaaaaaaaaaaaatggggcatggttcatggttctgtggttcttg

SEQ ID NO: 766659 - DNA, 610 bp, Homo sapiens
aacgaggtcaaatttaataaatatatattctttgtaattttcacttttagtgtcttgtttggcaaaagaaaacatcctcattcttgaggtgatactgttttcctatgtgatcttctaaatgttttacatttctatctttaaatgttaaatgtttaatacccctggaatttattttgtgcattttgtgaagtaaatgtccactcttcctacacccaattatcacagattcatttatcgactggagtcaacagaccactgttttccacagatacagcatctataaattaattatccacatatatgtggacctattttgtaacttcttattctgttgcatttgtttgttttgtctaacattgtgcaatctgcaataccatccttttaaccactgtgkctttaaaataaattttgacatcatgtatggaaagctcttcctatcaccaaatttgttcttaaaatttatattgccaacttttggacttgtaatattccaaacaaattttgggattgacttactaaattacttgaaaattacatttaggatgtttgattgcaaaaaaaaaaaaaaaaaaaaaaaaatggggcatggttcatggttctgtggttcttg

SEQ ID NO: 766660 - DNA, 504 bp, Homo sapiens
aagaagtgaaaatagccttaactgatgacattccaccattgtaatttgtttctgccccaccctaactgatcaatgtactttgtaatctcccccacccttaagaaggttctttgtaattctccccacccttgagaatgtactttgtgagatccaccccctgcccgcaaaacattgctcctaactccaccgcctgtcccaaaacctataagaactaatgataatccaccaccctttgctgagtcctttttcggactcagcccacctgcacccaggtgaaataaacagccttgttgctcagacaaagcctgtttggtggtctcttcacatggacacatgagacacwaataataagtatgaagtgttctgagttttgtaagtcattctagcaaattttctaacctgaaaggataggaacctccaaaattttagccctctgttcagaagtaaaagtagcctaggaaccccaaaattgtggcttgtgtctgcagtaagtggctgactgtg

SEQ ID NO: 766661 - DNA, 616 bp, Homo sapiens
atcctgtcagtgggtaaaactttaagcagagcacctggatgtgcacttcatttggaaggaaaaatgaccagacgtgattatagaccaattctttgcctgtgtccaatattttgcctcaatatccaggaacttggaaggaagataattggaagagtgatggtaagaaattttgaagaagaggtatatggatagacctctccaaatgggcaaagactttgaagatatttrtcccatgtgaatacttaccaaagagtgacttcagtagaggaagatttaaataatgaagtggatagggtaacctattctgctgaaactaattgacctttttccccagacatccttgtcatcatacagtggactctttaaaaaagtgtccatggtggtaagggtggtgattatgcatgagctttgcaaaatggctttctacttactaaggccaacatggctaaaatcactgctgattaatgctaattttaagggccaattggacactactccactatgaagaaaaggaacagtatgcctggtatataaaaaatcttttagaatgtcttttagtatttccatgccctgtgattaaggtcaatggaaaattacagtgacctagtccaggcag

SEQ ID NO: 766662 - DNA, 619 bp, Homo sapiens
ctgtctttcttgatgattaatttcaaagagatagtttcaatgtccttagggaagatgttttgggggcttaattctggcaagaagcataatggccttttaaaaaattcacacatatttcaagaagacagagacacatcttacaatgataagttttctaaggcaaatgctctaagaaaaggaagggagaagtcttttcaattattttccataggagtaattcaacctcttatttttatttgtacttgtcttttaccatgttagagttctccagtaaaacaaaaccattcattaggttctgtttcttgttttcccaaaaatcagaaaccttatataagtagtgtgtgtatatgtagtgtgtgtgtatgtgtgtatatatatatatataatgtaatgtgtatgtatgtgtgtatatatatatatatatatatatatatatatatatatatgtaatgrggaattggctcacagaataatgtaggctgaaaatcacaagatctgtattcaaaagacccagaggagatgctggtgtcttcagttgagtctgaaatccttggaaccaggaacatactgtggctttagttccagaaaaagtctgtttagccaagggtgtaagttccag

SEQ ID NO: 766663 - DNA, 619 bp, Homo sapiens
ctcacacctgtaatcccagcactttgggaggctgaggtgggcggattacgagatcaggaaatcgaggccatcctggccaacttggtgaaaccccgtctctactaaaaatacaagtattagccaggcgtggtggcgtgggcctgtaatcctagctactggggacgctgaggcaggagaatcgctkaaacccaggaggcggaggttgcagtgagccaagattgcaccactgcactccagcctggtgacagagcaagattccatctcaaaaaatacatataaataaataaataatgagaatcccagcaggagggtgggactggggagttggtcagttctctggctaccaggaagagctctgggcaggggtgttgccaggtatcactcatcctgagcaggcggtgccctcagtccacttgccagacagcgtatggcagggagagcctggcaaggccaccgggcctcttctgctgacctgccgtgggcagatggggctgccagtgtgggtcccggccctgagcaccacacggggctgtgggtccttgggggccactccaggccctgggcctcagtttcctcatatgtaaaatgcaatcataataatacccgttcatgttggtca

SEQ ID NO: 766664 - DNA, 649 bp, Homo sapiens
gttctacatatttcttttgatctatatgctgaggaaagatgctaaagtttaaaacagcaaaatccgtctgcataactgtttctgttgcactaaatcttagcaaaaaataaatatgtctttagactgttgcattacataacaaagaagcagtaaggttccttagtgcactaagattgctctaaggaaccttaactgctattgtggaatggcacaaattcttttattagctgtgtaggcttcctaccagagtagctttccccgaagttacccatcattaaggtgttctgtatctttaaacaaaatcaaggattttcagtatggccagagtgctttatgggaatggtcagctgagtttgtcatgtgaaatgtagtagagcagtttcaggttaaaacatcatttcattttgaaacgagtcaaccttatctttcacccttgcataatgttttgagtctctgtagatatagactaatragaggttacaggtcttttgctgttattttgttttttaacactgaacatttgctatgtgcctggcattgtgctgtatactcacttttgcatagtggaaattaattgtcttcaaaggattctatagtatgtagttacacatattttggaaaaatcaagcagtgggaaaaagaaaaataa

SEQ ID NO: 766665 - DNA, 463 bp, Homo sapiens
ttgtagaggcagggtctccctgtgttgctcagggtgctcgaactcctgggatcaagccttcctcccacctcctgcctcagcctcccaaggtgctgagattacaggtgtgagtcactgcacccagtcaagataatgtttttaacctgcaaatgaaaaatgagttggcatcctcatctgctatatctgttctccaaaccctgtcagccatgggaaaaatcgastgagacgatgttcttctttttgagaaagataaatggacctcagaaagggacattatagtgataggaggagtagattggattttaaatcagacccaagatggagaaaagtaacactcagaattagagcaggaatttcggtgttaaacagcaaacctgcattgcccttccctgggagtggattaacaacagctgtagtgacatggcctcctacaaacatgtgaaggtggtttcattgcttccat

SEQ ID NO: 766666 - DNA, 642 bp, Homo sapiens
tctcacaaaggccgtatcccgatggctctgcaaacccccactagattaacactgctgcaacataattttcctcatgaaatgcactgaagcataactaaaaaaatgtaagtagcagctatcaggcccttaatgaggctataaatacagcacgaaaataattcataaaactatttcctggtgaaaaactgtcctttacctagacctctttgcttgccccattaataacagccattggctttctttactaactcgctttgtaagaaaggaacgaagcctttatcattttgtgactcatgctgctttacccttgtaggagaaacaaccatatagctatacaaagtgcagacacctcatggcacagtaggcagctaggcccactcactatcccggtgactggctccatccatcagttgttcctgctgcagaattgcacaccatcttcttttagggtcataggcagtgtaaatatgaaatctgtggatatcaatagccartggtcctgggctgaacccaggggtcatgttataccttctcaccaatttccctgggctgtcttccttgaacagatgggtaaatggaggctggggctactggaatgagctcacagggcagggttgcctgaagagtctagacagagctaga

SEQ ID NO: 766667 - DNA, 602 bp, Homo sapiens
gcctgctcaggacctgctcccctctgccccaggatggctgccaccccaccccagcaaagggccaggccactcacggcactccttctcatcactcttgtcgaagcagtcaggcagcccgtcacactgccaggcgcccgggatgcaccgtccattgctgcacatgaagttgcctggtatgttgcactcattggtgaagttgttcccggggagcagctggctctctgtcagagagaggggacaggtcagayggcacagcaacagcagggacctcagcgcccctcaactgaaaggtgtgtggtttggtataggtgagacttctggtagatgactcaacctctctgaccttcagtttcctcatctgtgaaatggactaataatctgccccagtccacctccagagattctgagaggactaaatggagaaatacagggaacaaacatacttgaatgtcaggcacaaaatgggtgttcactgactttttttctttctccatcaaagactggttgtaaaatccaaatgttcttttctggccatcagcagtggttaaaaattaaaattctagacaggagtgagcactggactcccaatgtctccaacatta

SEQ ID NO: 766668 - DNA, 567 bp, Homo sapiens
aaaaaatacctgcgtcagtgtgctgaatgtagaatgacttcctatctgtatatttgtgatataaaagtagttcttattgtaggttggggtccaaattgcttaacagctactaaccaacaggttaccttctactgagtccccaacttgcctccttgtagcagtgccttctgctcccagaacctggaagcatctacccgtgacagatctagattccttataatctaagctcaaaaagaggctcagagagaaaaagatgtttcctcaaccaccagaccttgcctgtctcagcaacaactgaaatggagacactccgctccctccaaaagacagacaccctgcttcccacccaggggctayatcttcctgtgatggtcccaatggctcctactccactagaattttaagacactcaaaacagagacccgcaaaatagtaggggctcccttcccttatcatgacccccaatccacagagtggagtttaactcatgggcagtttgctggaaaataactccctggcctaaccaatgttcatctgttctctgggccaagaaccccatggttcatt

SEQ ID NO: 766669 - DNA, 636 bp, Homo sapiens
ttcctatgcccgctcctaccttttaaaataagcaagttattatctgagcgtgaagagacatgttttagttctgtaatcttaaaatgcatgcaaatagggactgtccacaagatggaggaataatcctaatttgaaggaataatccacaaaatgtttatagtattttagcacagggaagcaactgtccatttttccctccttctttttctctctccatttcgatagacactctgttgtgggctctgggctacattagaacacattccctcctgtagtttaaaagttgttcatgagttgtcgggggaagaaaggcacccaacagaaatttgtggagcattatggtaaatgaagagatagaggtttgcataagttatgttgagaggtcygagtgggggcttgtacattgtcttgggggactagggagaaaacccctggagaggtgggctggccaggatacccagggcacctctgctgacccagggaccttgagttttacccgctgtggaatggggatttgaaacagcatgtgacgtggtcagatttgttctacagctgtgtgaaggatgcttttagaagccaagactggagccaggaaagccagtaaggaagccattagtgccaaagaggtaagagaag

SEQ ID NO: 766670 - DNA, 588 bp, Homo sapiens
ggacacctggagaggtgggctgcaggaaggatctgtggctcccttggcccccagtgcagcctgccacagcggggacatgcagggggaagccgtgcaagccgtgtgctgaattcttgctttcttctcggtcagctgctccccagagcagctccytaagcctgggtgacagcctcccaggctccctgcacagaccccatggagtcctaaggggcctgctccaggtaaggtcctgaggcgcatgccctaggcctctggcagctgctgtcttgggctctccctgtcccttgagccaggcctctggctcatcctcctttccgacaagttggggggctgacctctgttactcaaagccctgggattctcctcaattttgcaggcttccttcaagtctgttcttgccccagaaccagctccatatccagactcactgacccacaggcctcaggccagatcggtggaaagaggagagggctctgcatagggggaaagaatcgcctacaaggatgggcacccccacttcaccactgaagatgcctgtggtggggcaggtgggatgggacagctgagtgattggggtgtgtgtgtgtg

SEQ ID NO: 766671 - DNA, 588 bp, Homo sapiens
ggacacctggagaggtgggctgcaggaaggatctgtggctcccttggcccccagtgcagcctgccacagcggggacatgcagggggaagccgtgcaagccgtgtgctgaattcttgctttcttctcggtcagctgctccccagagcagctccctaagcctgggtgacagcctcccaggctccctgcacagaccccatggagtcytaaggggcctgctccaggtaaggtcctgaggcgcatgccctaggcctctggcagctgctgtcttgggctctccctgtcccttgagccaggcctctggctcatcctcctttccgacaagttggggggctgacctctgttactcaaagccctgggattctcctcaattttgcaggcttccttcaagtctgttcttgccccagaaccagctccatatccagactcactgacccacaggcctcaggccagatcggtggaaagaggagagggctctgcatagggggaaagaatcgcctacaaggatgggcacccccacttcaccactgaagatgcctgtggtggggcaggtgggatgggacagctgagtgattggggtgtgtgtgtgtg

SEQ ID NO: 766672 - DNA, 588 bp, Homo sapiens
ggacacctggagaggtgggctgcaggaaggatctgtggctcccttggcccccagtgcagcctgccacagcggggacatgcagggggaagccgtgcaagccgtgtgctgaattcttgctttcttctcggtcagctgctccccagagcagctccctaagcctgggtgacagcctcccaggctccctgcacagaccccatggagtcctaaggggcctgctccaggtaaggtcytgaggcgcatgccctaggcctctggcagctgctgtcttgggctctccctgtcccttgagccaggcctctggctcatcctcctttccgacaagttggggggctgacctctgttactcaaagccctgggattctcctcaattttgcaggcttccttcaagtctgttcttgccccagaaccagctccatatccagactcactgacccacaggcctcaggccagatcggtggaaagaggagagggctctgcatagggggaaagaatcgcctacaaggatgggcacccccacttcaccactgaagatgcctgtggtggggcaggtgggatgggacagctgagtgattggggtgtgtgtgtgtg

SEQ ID NO: 766673 - DNA, 595 bp, Homo sapiens
ggggacccggtggtgatgtctgcagcccgagcagcaggaatgaaggtaaaggccagtgggaggaggggactggctgacagaggagggtgggactgcccaggtcagcccccggccccttcagccctcattgtcttcattcattcaacaaatgcctactaagcacccactgtgtaccaggctgtgtggcttagggccacagagatgaataagacatgggccttgccctgggggcccttctgcaccctctgcctagaacagcaccctgctgggggcctgcccagtgtggacctactcagatttccctctccctagggtagasaagtaggcaggcctgtttgggttctgaagttttgaccaggtcccagcctttccaccatgagaatgcccacccctccctggaccccagtggcaacctgagttgggcatctaggtgtggctttctgtgtgaaggctccccccccgcagctgcctgcaggaggacgggaggttgcccaagaggctggtcacgagggggtcttgtgctctgaacagcatgcaggcagtgctggaaccctcctggactttgggcagccctcccgtactcggggcctgcagc

SEQ ID NO: 766674 - DNA, 566 bp, Homo sapiens
aaggaaatatcccaaattaacaatggtcctgtgtgaacataggctaatgcacagctctgtgctgggatgggaggctggtggtggtgatggtgcttagagagtccagtcaggagaatgggtaaattctgcattgagcacagaatggttcagggcaaggcacatgggctaatgcttagagcaggcggtgactattgctatgctccaagcctggcaaggggtgttgccaaggtgagcaggcagcattcccgtctgttcacacccactcttctctcccagtcgtggtcctcaggttggcttgacagcgatggcctytattcaaagaaagcagccgccagagcaagactaaagcctgtcctaacccttgacaaaatgtcacactcatgccttttttcctactaccggagactaagggttgtgatggaaacaagggagctgcgatggggctgtgaccaagtgaaaatgagagagtaaggaatttactgctttgcttgttgtgaagaatggtggcaaacattcaaacattggtttgggtttttttttccccagtgaagtataaaaacatcttt

SEQ ID NO: 766675 - DNA, 607 bp, Homo sapiens
tgcctgtaatcccagctactcaggaggctgaggcagaattgtttgaacccaagaggtggaggtttcagtgagcagagattgcaccactgaactccagcctggaagacagggcaagactctgtctcaaaaaaggagaatggactctacagggcctgaagaagctggacttaattttgctcaataccaaagctgcctcttgcaggcacgttcccaaatgttcccagaggacagccccactgagtcaggctaggcatgccggccagggatgagaaaacctctagccagcacctgttccctcaggagtccttgtgggcccargcaacttttaaaagatgaattttcacttaattcttttgaaagctctaacatggatgaataaataaattggcacccataacttatatattatttataggttagacttttaaaatagctctttttgtttgtgaggcaaatatgtatggatggaaaccattctaagactgacatttctgtgacacgagaaagaaactataaaagacttctcaactaagtaaggtagggcttccctgtctggaagagttctgcatgtgaagctgctgcttttatcaattttttgggtgaggaa

SEQ ID NO: 766676 - DNA, 633 bp, Homo sapiens
aacgttgccatagaaacagcaggatcctctctcaggagggttggcacatagggcagctggggctgaggaaggctctggagataattccggggcatccagcctctttagatctgcaagagtctgtgagcccagtaggaagccaactccccactccactcagcagcacttggtaaacctcagctttgctccccagaagggtaggacaggatgttctttgagttatagcagcaggactattaggcagcagagctgtgattagggcataaaagtctgtggttgccaggcacaaaccgtgcttcaccttttatagccagctagcttgagatgtcaaaagtatttagagacttttgctttttttctctactcatcaactttatgaccctaaacrcattcttccttctctttctgtcacacatttaccagtccctgaaccgagtttgtaactcacttgtgagtctagaaggctttctgaagagctttaagttatttcaaatcagattggttgggcagagtagagagtgggggcatttctttctttccttctttttttttttttttttttttttgaaacagagtcttgctctgtcgcccaggctggagtgcagtggcgcgatctcggctcactgcaaactt

SEQ ID NO: 766677 - DNA, 613 bp, Homo sapiens
aacagttctagaaatgttatgactctgggacttacagagccttttttgttttgtttcagtttttactctgactgtactgttagtagtatggtctatgcttgtgctctcctctcagatttgtttgtttgtttgtttgtttgagacagggttttgctctattgcctgggctggagtgcagtgacgccatcacagctcactgcagccttgaactctcaggatccttgatcctcccacctcagcctcctgagtagctgggaccacaggcaagcrtcaccacacctggcaaatttgtttgtattttttgtagatggtgttttgccatatagcccagactggtcttgaactcttgagctcaagcagtctgcccaccttagcttcctgaagtgctggcattactggcatgagccgccacgcccagcatttggatatttctataacagggttctctttcgtgggctgtagtgtagaccacacttacccttcatgatggagaatataattcctctccttttacaacctaagctaaagctcagtgtgtttgtttggttgtggtaaagtctggggtgggggtttgatttggggctttagatagtaaatgttctgatattttgat

SEQ ID NO: 766678 - DNA, 518 bp, Homo sapiens
ccacttggagggtttatgttatggatttccaggacagaggtatgagacccagctcctcaacttctaacacctcaaagcccaatgcagtcaaacccagcataacataaactgttaaccaaaatgcatctcaccttccacttttaaaaggaaaaggaatgatgycaaaatgtcattagggattttctaatcaatagaaaagatatgtcccaagatccggacacatatgttcaagctaaccttttgcttccagagatctgtgcaatgagaaagaatgaccagaacacactgaatgatgcttaaagacagactgagtcttacacttactgaagcagcaaaagcaccactgcattttagcaagatcgtctcctagcaaaggttgagaaagaaatagcttttcatgtagaaaaaagaagaaaagaaagtttgcatacgtagcccacctgcctcagaaaagagttagtttatgtcatcacatcctctatgccatcatttataaagcacagacaaatttcagagat

SEQ ID NO: 766679 - DNA, 632 bp, Homo sapiens
gacttcctgttagcaagtgcttttcccacacttgagactgcctctctcctctctaagtcctggattttaggcctccttccccttctacccaagctcacccccccttgtcataacctgatgagggctgagggaggtggtacaggagatgagttaagtgtggggccacttgccagctaagaacccttgacccaagtttccttttctggaaaacagacaataacagcaccttcttagagtggctataaggacataacaagccccttccctccccctgtccacactcaacaaggggctctattctttcctgaaggtctgtggttgcctccggaggctggagggcagctctggagtctggcttggctttctatttgcaaccattccatatcccttgtccccaccccactccctccctagggccacacctctccacaatgcrgaagccatggggtactctgggatttatgtccgtggtgtgtaggggaaactcctggaacaaatgagcggctgtgcacgtggttgtgtttggttttggactcagagggcacctctggttttatgggtctgtccttggtcttatgctggctgcctgccaggttccaggggtccacatccctggaatcactacctaggcc

SEQ ID NO: 766680 - DNA, 497 bp, Homo sapiens
acttccagatactacaaaaagagtgtttcaaacctgctctatgaaagggactgttcaacactgtgacttcaattgaaacatcccaatgaagcttctgagaatgctactgtctagagtttatatgaagacaatcccatttccaccgaaatcctcaaagctatccaaatatcctcttgcagattttacaaaaagagtgtttcaaaackgctctatcaaaagaaaggttcatcactgttagttgagggcgcacatcacaaataagtttctgagaatgcttctgtctagttttcaggggaagatatttcctttttcaccataggcctgaaagcgctccaaatgtccacatccagatactacaaaaagagtgtttcaaacctgctctatgaaagggaatgttcaactctgtgacctgaatgcaaacatcacaaagaagtttctgggaatgctgctgtctgctttttatatgtaatcccgtttccaacgaaatcctcaaagct

SEQ ID NO: 766681 - DNA, 346 bp, Homo sapiens
cgggaggaagggagaaaaaaggaaagaaagcaagaacgtgagaaagaaagaaagaatacgagaaaagaaggaagaaaagggagggagaaaggaagggagggaggagggaaggaagaataagagggaagaaggaaagaaggaaggaaggagaaaaaagaaaaagaaagaaaggaaaaraaaaaagaaaaaaggaagaggaaaagaagaaaggaaggaagaaggcaagggaagggaagagaagacaaaggaagatggaaagaaggaaggaaaaccgcaaatattagaaattctgtgtttgttagagaatatgccatactgttttttttttttttcacttgaaaggaaa

SEQ ID NO: 766682 - DNA, 480 bp, Homo sapiens
gttcaacactgttagttgagggcgcacatcacaaataagtttctgagaatgcttctgtctagttttcaggggaagatatttcctttttcaccataggcctgaaagcgctccaaatgtccacatccagatactacaaaaagagtgtttcaaacctgctctatgaaagggaatgttcaacwctgtgacttgaatgcaaacatcacaaagaagtttctgggaatgctgctgtctgctttttatatgtaatcccgtttccaacgaaatcctcaaagctagacaaatatccacttgcagattccacaaaaggagtgtttcaaaactgctctttcaaaacgatgattcaattctgttagttgagggcgcacatcacaaataagtttctgagaatgcttctgtctagttttcaggggaagatatttcctttttcaccataggcctgaaagctctccaaatgtccacgtccagatactacaaaaagag

SEQ ID NO: 766683 - DNA, 603 bp, Homo sapiens
tttctgagctttatttattgtgagaaatgtgaataaaaattgtattgtaactatttttgcaaagttattatgatacttaaatgagattatgtgtacaaatgacttaataaaccactttgtatttattctttcaacaaatatttattgagtttctactaccattcaggcattaagccatagtaagcgctcataaatactagccactatgatgttcctcataattggcagcattctcttataatgccaggaaggaaatattccaaatcaataattcatattgcaatttcgggagtcccttcgctggtagaggwggcgtggttaactaaaaggtcatttttcatccagtgaaaaggcatgcttagaaaatctatattgcttacttttcgagatctctttgtcataattaccggaatttgttctgattttgaaagcaaaaactgaggtttcctgttctgtaattagtatttattcattcagtagattactttttaaaggacccttagtccactagaaagacaaatgaacacaggttgccataaaaaaaggatatttcaaatctagtaaaggggacaagatagttgaataagaatcaaaatacatgat

SEQ ID NO: 766684 - DNA, 569 bp, Homo sapiens
caaaatgaaaggatggaggaagatctaccaagcaaatggaaaacaaaaaaaggcaggggttgcaatcctagtctctgataaaacagactttaaaccaacaaagatcaaaagagacaaagaaggccacctacataatcggtaaagggatcaaytcaacaagaagagctaactgtcctcaatatacatgcacccaatacaggagcacccagattcataaagcaagtcctgacgtgacctacaaagagttgatttttgtatatggtaaaaggaaggggcccaacttcaattctctgtatatggatagccagttattcctatatcatttattaaatagagagttcttttcccattgtttcttattgtcaattttgttgaagatcagatggttgtaggtgtgcagcattgtttctgcactctctattctgtactattagtctagatgtctgttttttatgccagtacaatgctgttttggttactgtaccctatagtttgaagctgaatagtgtgctgcctccagctttgtgcattttgcttataattgctttggctgtttgggatcttttttg

SEQ ID NO: 766685 - DNA, 671 bp, Homo sapiens
gcgctattgcagtccaacctgggtgacagagcaagactccatccgtcttaacaaaaaaaaaaaaaaaaaaagagaaaaacagaaacatcactgattattagagaaatgcaaatcaaaaccaaaatgagacaccatctcataccagtcagaatggcgattaaaaagtcaaaraacaacagatcctggtaaggttgcacagaaataggattgcttttacactgttggtgggaatataaatcatttcaaccattgtggaatatactgtggcaattgctcaaagatctagaaccagaataccatttgacccaacaatcccataactgggtatatacccaaaggtatataaatcattctattacaaagataaagacacatgtatgttcattgcagcactcttcacaatagcaaagacatggaattaaacataaatgtccatcaatgataaactggataaagaaaatgtagcacattttcatcatggaatactatgtagtcataaaaaggaattagatcatgtcctttgcagagacatggatggagctggaagccattatcctcagcaaactaacacaggaacagaaaccaagcaccacatgttctcatttataagtgggagctgatcaatgagaacacatggacacaaggaggggaacaacacacactggagcctg

SEQ ID NO: 766686 - DNA, 624 bp, Homo sapiens
ctcagtaataaaaatgaataaactcctgatacctccaacaacatagaaaaatctcaaaagcattaggttaagtgaaagaagccagccaccgagggctacttattgtataattccatttgtctaatattctagaaaagagaaaacttacagtatgatggttaattttgtrtgcctgcttagctaagccatggtacccagttttttgttgtaatttttttttagagagaaagatcttgctatgttgcccaggttggtctcaaactcctgggctcaagtgattctcccatcttagcctcccaaaatgcttggatgacagacatgagcccccacgcctgtcctggtacctagtttttcatgaaatatcagtacagatgtgctttgaaggtgttttttgttgtggtggtggtaaaatacatgtaacataaaatttgttatcttaaatatttttgacagtacaatttagtagttttaagttcattcacattgttgtacaacctatctccagaaatcttttcgtcttacagaacggcaggtctatacccattaaacaataactctccactccccttcccccagaccctggaaatcaaccttctaccttctgtctctgtgaatttgactact

SEQ ID NO: 766687 - DNA, 620 bp, Homo sapiens
atttatatatgtgatggaatactacacagatataaaaagtaatgcattaacagcattttcagtgacctggatgagactggagactattattctaagtgatgtaactcaggaattgaaaaccaaacattgtatgttctcactgatatgtgggagctagcctatgagtatgcaaaggcataagaatgatacaatggactttggggacttgggggaaagaatgggaaggagtgagggataaaagactacaaattcggtgcaytgtgtacttctcaggtgatgagtgcaccaaaatcccacaaatcacaactaaagaactactcatgtaaccaaataccatctgtaccccaataacttatggaaaaaagaacccattttctggggatgaggcatgtataatttcccctaaagcacagaactgtgcagatgaaagtggacacctgaacaaagtaggcatttgcctggagaaagaataaatctgctccatgccacttttacactgattagattgttcctgacttatgacacactcttcaaaatacttgcacatctattattccatttgtactaagagtctaaccaaaacaaaatgaagctccaatctcatcttttagaatagataa

SEQ ID NO: 766688 - DNA, 618 bp, Homo sapiens
tacttcagggatatattgtatatttgcaaagatcagactatgaaaattcatgaataatattaacttattcagaagtgcaaccatccagaacacaggcataagcaaagaagaactctgaatcatatgtgtctgccctaaaccagggaggattctgggctactggtaattatctatgtcttgatgtaagtgatgattacatgggtatttactttgtraaagttcatggagctttgcacctatgatttgtccatttgactctgtattatacatcatttctttaaaaaatttgcagaaaagctcctgccctgaacgacaattataggaaacccccgacatatcctccttcagagcctatttactcttgctttacataaaatttaagcaaagtgagttattataatttcttggccgttaacagttgtcaatggaagttactggaggtaaagagggagcagtggtagattttatcagtctcatgtacatggacaacgtgaaaagtctggcataaacaggagggtagagagaatagaaagaaaaaaaacataaaaatcagacacaagatgacacaaaacagaaccacatcaggcttctcagcatagaagcaaatggttctataaa

SEQ ID NO: 766689 - DNA, 628 bp, Homo sapiens
atgaattccgaggatagtataaagattgcccaagaacatataataatgcattaaattcagagtccaaataattgataaatacgcatttttaaaacttattccttagccaaagagagaagcagagcctaagcctccaagcattcttctgaacactttaaggatttatgatctgggcccgactggctactggaagacctaggataaaggtagaatcctggctgtatctccaactagcgattcctttccctagcctcactgttctcatctataaaatcawggaatctattctagttctaagttttaatgacataagaggttagttgctaagtgtgaccagacaggtagctggctttacctacgaggtccgattccaccacccccaccatcacccctttttggaggatctatacagctgtaagattttcatttatcttctgggcacaagcctgcacacacacacacacacacacacacacacacactagcataagttgtttcataagttgtttctctttctgttgcatccagttgatgagaataaagtccattgttttaatattaaatctatgttataatgaatcttctctaggaacagcttgtttcaacatcatctgtcaagaatgtatta

SEQ ID NO: 766690 - DNA, 630 bp, Homo sapiens
tcatttttgagcttccagggaaaataattatcttttgattcaaagtgttaagaaagctttcttctgcccatttctggtgtttcctttcatttctttgccatgaggtaagttgtccaggtgacttattgctccagagagcagccagtgtcgtcattgcctttgaagcccctgggacatttgagatataactccatagccagtgctggcataaatagcatttcattattatattagtctagtacagaatatatagcccyatggtcaatcctacatggcaatgttcataaacctaccacaaagtgactagaattaatagaatgtatatatttccatttccttttttaaaaaattattcatatacctgaatctacaaaggctgagtcacttccaaagtccagtccactgggtccatgctgattaaactttgggagtcatcctgatttgtggcccgcaagggaagaacaaaaatttaatcgttcctgggtgttgtttataatgccaagaagacctttataattgattctgatgaaagtccatttgagagccaagaatgagtgtgctggtccatctgaatcaatgatttggaatttgagtgggtttgttctctgccactcaggaacccactgagat

SEQ ID NO: 766691 - DNA, 651 bp, Homo sapiens
gtggctgttcccaagcccaagggcagggaaaaagcttttctgagttttcagtcctcaggagaaatctccatccctgtcactcaggaggggattttcctttgtcacatccaggaaaaccccacaagctctgagccctcagttgatttgcacmctagtcccagatggagaaaacaaccccaagcacccgtctgatcgcatttgtgacagtaattatccaggcattggacaccaagtcattaccagtgaatgaattattactagaaacagttagtgtccaataatgaagttaatgggagataatatgacagtcattagactgacatggctctcttcattgttgaagaaagaggaacagtcatcaaaagctggcaacaggcaggcaggattaatctatgtcaggcagtgtttacgatacgtctcctggactctcttcttgtggcagggccatgattagagggttagtgtttcctgttggaagtcagcatcagctgttcagaagagagcccactgtgctgcaataaaactgtcagtcttgcagctccctgaccataggatgcccttgcacatggttatgttttcgcacgctctgttccctctgtctgaaatgtcccttttctttcacctgtaaaattcctacacttccttccatcc

SEQ ID NO: 766692 - DNA, 330 bp, Homo sapiens
tattctgtatctggcttatttcacttagcataatgttttccaggttcacccacgttgttgcaaatgacagtatttccttcaaaaagagggctgtttttccctaattgtcctgtaaacctcctggagttgaatgtcgttggcscggcttgagttatgtgcccttccctgtgtaatcactgtgacagggcaatgagacgcttggatcggccagacctgtatcatgtgcccaccttgggaattgggggccaaggtcagtcccacccaaattcatggcctgagcatgggggagacgaggaccccaaaggaagctatgcgcactgtttccagaag

SEQ ID NO: 766693 - DNA, 578 bp, Homo sapiens
ttcaagatgagatttgggtggggacacagccaaaccatatcagggggatagacttgagggctgaatacaaaaaccagtcacacctcattcttgcccactgcctgactgccagactctttcacccaactcagcaagggaagcctttgcatttttttcccacaactaatcccaccccaaagggtgaacagttgctactcatgagatggtgctataggtgggattactcccagcaaccatggaacttgtgtgtctgagagtgactcctttgaagggaattatcacaatggacttttctatcctagaagacagttggataagggactcttctttctggtgtcagtccagccccttgctataaaaacagaggaaacttttcagttgtaacagtacactttggcttttcgcatggcattkcctggggtgtcatcagcaaacacactatcatgaaaaactcctaagaggggagtcagagaaatctagatgaaagtgggagttaacatcaggaagttgcaagcatgttgcttgatttatatgaataacaacaaataacaaacaacaacaccctgtcttggtcatgg

SEQ ID NO: 766694 - DNA, 601 bp, Homo sapiens
gacctaaggcactctcagagtcccccagacactctagggagcattttgtgatcacttgcattgtccaaacactcgatgtgctcagattaaactggaatgccccggctggaggattcttctgcagtcactcagtttcagaggggctcatcagaaggcacaatgggagataaagttagctccccttccagcactgccaagtgaagggaagataccatttgaatgtactaactcacattccttctcttctcccagcaccaagcctcttaacctcaggaagggtcacgtgggttgagccagccactgcctctctgctggggggtgacagaactttgacagagttctcctcaaacccagaaggaaagggctgtgacaaacatgtaggcatctgctccccgcaactccctacaccccagaccctaggccctgggagaggctcrtgcttgccagtggccagtcacaggaagggacacatgaggatgtgcaggggacgaggggctcgaggagatgggaaggcagtgcttgggtttgaggacggggttggcgatgcattcctcagaggaggagcacagcccaaacctagtgcagtgagagtcccaggtgg

SEQ ID NO: 766695 - DNA, 619 bp, Homo sapiens
gagctgggggttttgttcttaagaagtcaggcaaattttacattcccttccatatcagactcactggctttcagttaaaattgggcttaaataggttctccacgaatctccaaatgcagagacttcaggaagaggtgcctggagcacgccctggcatccaccacataccctacaagatacccacactacattggagaagcaggaatctaagccctccaggcrgtaaggcttgtttcagaggcaataacaaatgatgccaggaggccaccgcggcacctctggaagccagaagcctgccttcttcctgcctggcgcagacctgagctcctcccctatttctatatctgcaagggactctgggccccatgacaggagcccatgtatgcaggcagggttgaccaactagcaccaggtaggtgagggtcaagaaaaatgtgctcctccctggggccagggcccagagactctatagatcccatcttcccctggtagcacccttggagctcagcatggcagagtgtgccttctgaactcatgggttgcaattccaagtggcacagcttctgctcgcctcctctgggaaggcctagatcagagaacacagccaagctggcttcag

SEQ ID NO: 766696 - DNA, 605 bp, Homo sapiens
gcaatcccagctactcgggaggctgaagcaggggaattgcttgtatctgggaggtggaggttgcagtgagacgagatcacgccactgcactccagcctagtgaaagagcgagactctgtctaaaaataaaataaaataaaataaawctccaatattcacaatgaacatcattgcaaacatcaccctaaaagccactcaacaaaatactagcaaaacaatttcaacagtacattaaaagtatcatacaccctgatcaagtgggatttatccccaggatgcaagtgtgatacatagaccagtaagtgtgatataccacattaacacaatgaaggacaaaaatcatattattatctaaatagatggggttgactaaactcaacatccttttatgattaaaaaaaaaaaacctctcaacaaattaggtatagaaggattgcacctcaacataataaatgtgacaagctcatacctaccatcatattcaatgatggaaagctgaaggcttttcctctaagatcaggagcaagacaagcacgtccactcttgtcacttctatttgatacagtgctataagtcctaggcagagcaattaggcaagaaaaaga

SEQ ID NO: 766697 - DNA, 605 bp, Homo sapiens
gcaatcccagctactcgggaggctgaagcaggggaattgcttgtatctgggaggtggaggttgcagtgagacgagatcacgccactgcactccagcctagtgaaagagcgagactctgtctaaaaataaaataaaataaaataaaactccaatattcacaatgaacatcattgcaaacatcaycctaaaagccactcaacaaaatactagcaaaacaatttcaacagtacattaaaagtatcatacaccctgatcaagtgggatttatccccaggatgcaagtgtgatacatagaccagtaagtgtgatataccacattaacacaatgaaggacaaaaatcatattattatctaaatagatggggttgactaaactcaacatccttttatgattaaaaaaaaaaaacctctcaacaaattaggtatagaaggattgcacctcaacataataaatgtgacaagctcatacctaccatcatattcaatgatggaaagctgaaggcttttcctctaagatcaggagcaagacaagcacgtccactcttgtcacttctatttgatacagtgctataagtcctaggcagagcaattaggcaagaaaaaga

SEQ ID NO: 766698 - DNA, 641 bp, Homo sapiens
cctcccacagagagcagagcttgtccacatggagcacctggagacgaaatccttggcatttccaaaactcccgttttagggggtttggacagaatgacattggctttgtgggttgggcagggcaccatgttctcagtaagtagtgcataagtggctgctgggactcagttgtgccatcctctgcaagactcctaacaagtgtacaagccacagatgccttcagggaaacaaagtctggctaaccccacccccacccctgggcccccagmtgtggcccttcccatcaagaccctgctcatggggaggctgctgagcttctacttcatggataggacttttttatttttaattttttatttttagagactccctatgttgcccaggctggtcttgaactcctaggctcaagcaatcctctcacctcagcctcccaaagtgctgggattgcaggtgtgagccactgcacctggcctggatagtgggttgtgtctctgctctgcctgccctgcaggaatggctgctcctcaccggggtgggcatcaggagacttggggtttgagccccaaatgtctgaaagggatctctggtctgcagatctggctggacaaagcagccttgggcatgtgagagcctggagctgg

SEQ ID NO: 766699 - DNA, 511 bp, Homo sapiens
ttttgttccgagctttgaagaatgagtagcatttctcaatgtgagaaaggggagagagaattccatacagaggtaaacgtatggtaaacagagggttaaagtgcacagcattttttggggaaaacatcacccagggtagttggagtgtrgggtgtgttatgggaagtagaaaaggaagtgaggccagcttgttaagacctttgaatgtgatattaaagggcttacatgagggctttaaaggcccttgattaaaacattctcatgattataactattttagaagtgtcattctggcttctggatactgacacaatggggacccaacaggggctcctggctatctctgtcaacctagttctgggagtgtctcagaaatggtgcaactgatggatctgagaatctaatgtgataattgtgagaagtttctagagggacagcaaatggttggagcccagtgtatgtgtttgcgactgcagactgcaggggaaaagggacagtgctgtaggtgggg

SEQ ID NO: 766700 - DNA, 415 bp, Homo sapiens
acattattattctgattagttacctatccccataacagggagctacagagtgctttgcaaatagtaatgctttaacctcgcctccaaaaaaaaaaaaagaacagcctgatgtggagaacatttataattgtcttgtagttayagtgtgtatcttcattataatcattcttacaataaatacagaagtgctaaacagaccattatcacagtggcctgtgggctgaggcacaggaactgaggggtgctgcagacaccagtgcttctccagggctggccaggacaccttcagagaggctagtgaagaggagaggaatgtagggtgaatttgaaatgtgattaatagagtcaatgcagcacatgctagaaacagatacagagttttttggttgttttttaactattttaccagatgata

SEQ ID NO: 766701 - DNA, 627 bp, Homo sapiens
tgacatgaaaaaaggaaaatgtgacacatacacaagacaaaaaagcaggccacagaaactcccaataaaggtattcaggtatcatatttaacaaagacttcaaggaagtagttttaaatatgttcaaaaaatgaaagtaagtcatgtttcaaaaggtaaagaaaggtacattagtagtactaatgtaatttccactaacagccacctgcatcagcaatgaaatctcccatatctaccatccttcagtttattcatgtgaccttatttctcctggatgccagccaagagctcgggtgccatgagtggggatgcaaagggctgtcacactgaccctttgcccttgctggyggaaggcagccacctcacatgaaaaggcagagggtccactgatctgttaatatttaagctgtctgcagatggtagagctaaaagagcagtgttatgctccctctgtggcctctggggtcatgggcatcccctcagatgctgctgggaggccggaacaaaattggctcctgcgggcgcccaaaaatgcttttcctgcatctgttcacctgtgtgcccctcccatgaggggtgaagaacagcaattctgagtgagttgagcttgcctctgccagcacagaa

SEQ ID NO: 766702 - DNA, 627 bp, Homo sapiens
tgacatgaaaaaaggaaaatgtgacacatacacaagacaaaaaagcaggccacagaaactcccaataaaggtattcaggtatcatatttaacaaagacttcaaggaagtagttttaaatatgttcaaaaaatgaaagtaagtcatgtttcaaaaggtaaagaaaggtacattagtagtactaatgtaatttccactaacagccacctgcatcagcaatgaaatctcccatatctaccatccttcagtttattcatgtgaccttatttctcctggatgccagccaagagctcgggtgccatgagtggggatgcaaagggctgtcacactgaccctttgcccttgctggcggaaggcagccacctcacatgaaaaggcagagggtccactgatctgttaatatttaagctgtctgcagatggtagagctaaaagagcagtgttatgctccctctgtggcytctggggtcatgggcatcccctcagatgctgctgggaggccggaacaaaattggctcctgcgggcgcccaaaaatgcttttcctgcatctgttcacctgtgtgcccctcccatgaggggtgaagaacagcaattctgagtgagttgagcttgcctctgccagcacagaa

SEQ ID NO: 766703 - DNA, 593 bp, Homo sapiens
cacataaacccacacacaccaacacatacccacacatgcaaacacacatgccatcttttcatagtagcattttgtttgcttgtttactacaatttgagctcttataaacaactctttggattcagttttattgtcttttgagtaaatgaaaactattgcagggtagaatggttgaaagagcatgagttgtcttattrgcaatatcatattcagtggttccttgttaacactaatagcccattattccatgacattttccttatgaaattgattagtcaattatcactgaattgtaaatatatttgagaattctgaaacaatatttttcttttgtgaaagaggtggttagtggtaacttcttttgaattcgaggctaaagaacaaaagtgttatggtccattaagttgtactcagcagaaaagtattctttctatttagtgttataaaagttttattcataaaggactttataattttaccttttcaagatgtgaaattgtttgcttttcattgtttttggtttcttgtcaaataaaagccttaaaatgtttttacttctccactcagcccatctttcaactctccacaccata

SEQ ID NO: 766704 - DNA, 584 bp, Homo sapiens
ctacattcttttttcttattaggggctgttttaattcctggagctgctctcggtcaaattttaggtggcttccttgtttcaaaattcagaatgacatgtaaaaacacaatgaagtttgcactgttcacatctggagttgcacttacgctgagttttgtatttatgtatgccaaatgtgaaaatgagccatttgctggtgtatctgaatcatataatgggtaaatacawttcagtgctttttgatattaataccagaataatagactaagcatttccaagcatatgttttcttaagtggtgagaaattggctttttaaaaatttggaagaccttttttcctatgtaagaacatgtggttttgtttttagtttagataattgatgtcttcttaaaagttggggatatttatacaaagaacatttaaggagcaactttcatatactgggcactatacttcctcagtgatacaaagattaatactgtaggatttttgcctctaagcgattcacatcctagggagaatttcacattatatgcttttattgatttaaatttttagaaatggaaataactccataattatg

SEQ ID NO: 766705 - DNA, 661 bp, Homo sapiens
aatcaggcaagagaaagaaataaatggcataaaaattggtaaagaggaagtcaaactattattgtttgctgatgacacaattgtatgcatagaaaatcctaaagactactccataaagctcctagaactgataaattaattcagcaaagtttcaggatacaaaataaatattcacaaatcagtagctcagctatatatcaatagcaatcaagctgagaatcaaattaagaactcaaccccttttgcaatagctgtaaaaaaaaaaaaaaaaaaaaaactccaaaatacttaggcgtgtacctaacaaaggaggtgaaagacctctccacggaaaactacaaaacactgctgaaagaagtcctgtatgacactaacaaatggagacacatcctatgctcatggatkggtagaatcaatatagtgaaaatgaccatagtgccaaaagcaatctacaaatccaatgcaatttccattaaaataccaacattattcttcacataactagaaaacacaatcctaaaattcatatggaaccaaaaaagagcctgcatagccaaaacaagactaagcaaaaataacaaatctggaggcatcccattacctgatttcaaattatactgtaaggccatagtcaccaaaacaacatggtactggtataaaa

SEQ ID NO: 766706 - DNA, 591 bp, Homo sapiens
atgaacaaataaatagctgaatcaatgatcaacatgagctacttatggtcaacatagttgctacttgattcaaatcctattccccaaacctgctaacctgaatatcctaatgacccttcactctgacagtagtctggcatatcccttcccacaataaaaaaaaattcagtagagttaagagatgttcttgggtcaaatatatcattgaaacatataaggagaaaatattctaaaagtagattaaatgacccagaaagaaaatgagtaatagagttattaaatgacaaagttcaaaattatttgtctttacaacactttagatggaatagtcccctattttatattccctatagaattctgacatttgatatttttatgcactcttaaaattttgaatcagtcagatatttygtttttattgctatcaacataaagtggctggctaacatgattgaaaatggaatttattagaaagttgtcaagaaacttaggacatcagtaggaataatcagagatccaatttgggtaaaaggaccaaggtgaagtgtgctttgaaggtcaaggatgctaacactgctgaacattctccca

SEQ ID NO: 766707 - DNA, 645 bp, Homo sapiens
ctctggtgctttcagatgcatgcaagtagctgctgggtgcaaagcaagcagatggccaaaaccagggctgctcctgcccatttctaaataactgactgtcatctgctattgttgctactgtgggggcactgtcaggggcaccagatgtccaggggtcagcaccatgattcctcgtgtgaagaaatgggtcctaaggttcttaaagtgtccaggggtcaagaccctgattcctccttatgtgaagaaatgggtcctaaggttcttcargtgtccagggggcagcaccctgattcctcctcgtgaagaaatgggtcctaaggttctttaagtgtccagggggcagcaccctgattcctcatgtgaagaaatgggtcctaaggttctttaagtgtccagggggcagcaccctgattcctcctcatgtgaagaaatgggtcctaaggttaagtgtccaggggtcaagaccctgattcctcctcatgtgaagaaatgggtcctaaggttctttaagtgtcccaggggtcagcaccctgattcctcctcatgtgaagaaatgggtcctaaggttctttaagtgtccaggggtcagcaccctgattcctcctcacgtgaagaaatggatcctaaggttctttaaaggaagct

SEQ ID NO: 766708 - DNA, 590 bp, Homo sapiens
catttgctttttctggacatttcatataaatagaaccatactgtatatggtctgttgtaactggcatctttcacttgacacaacattttaaggttaatccatgtagcatatataagtttttattcctttttctcgacatatactatttcattgcatgaacataccacattttgtttacctattcagttaatggacattyaggttgtctcaaattttttggctattatgaataatgctgttatggacaaagatgtgcaagtttttgtgcagacacatgttttcaattttcttgagttataaaaacttggagtagaactagtgggtcatatagcaaccaaattcttttaaaaacatgactgacacaaaaagacttttaaaagtttgtggaaaaatggaattaaaagaaaaaatttatttcaacctaagctctaccaagttcaattttgtaatcaatgatagcagccatttaatccatcctaaagaactgagggtcttgagaattttaccatggcaatgcagtagtttttacactattaactgaagaaaatgggtgtcctttatagattctttaagattaggaaacaaaaaga

SEQ ID NO: 766709 - DNA, 569 bp, Homo sapiens
catgaagtgtcaatgattttatcatttttgcatccaaacttcaccgtaagtttgatgtttgttcttgcttcaattttaacagaattcatgttgctttgataggggctcttttcaacctgatgtctttattttttatttatttatttttctgagacagggtctcactctgtcacccaggctgggtggcatggtcatacctcartgcagccttggaactctttggctcaagagatcctcctgcctcagtagctaggatcctcctcctctcaagtagctaggagtacaggtgcaagctaccatgcccagctaatttttaaattttttgtagagacagggaggtctctgtatgttacccaggttggtcttgaactcctaagctcaagccatcttcctgtctcaacttcccaaagtgctggtattagaggtatgagccactgtgcctggcctcaaactgatgtcttatccttcttagtgccccaaaccagatactgttcagacatgttataacaagttactatgggtttattttgttgcaaaaaaagctttgaaatctacgcatagttttttca

SEQ ID NO: 766710 - DNA, 572 bp, Homo sapiens
gtatataggatataataatagcctctcacctaatagcacgcctgttccttcacccagctttactttcgttatagcagtttttttgtttgtttgttttgttttgttttgagacagagtctttctgtcatccaggctggagtgcagtggcgcagtcttggctcactgcaacctctgcctctcaggctgaaacgatcctcccacctcagcctccacagtagccaggacttacaggcacacaccaccatgcctggctactttttatatttttagtagagacatgggttttgycatgttgcccaggcaggtctcgaactcctgagctcaagcaattcacctgccttggtttcccaaaatgctgggattacaggtgtgagccactgtgcctggcccatcatagcacttttaccatttagcatgttatacaggttatttttttgttgtggtgttcactgctatgttcctagggtctagaaaggtaactaatagatactgggtgctttgttaatatttgttgattgaatacatttctaatattcagtgcctttttctgttgggaaatgtaaaatgagcag

SEQ ID NO: 766711 - DNA, 621 bp, Homo sapiens
ttacttttggtatgatctatcatgctcttttttgaggcagagttttgctcttgttacccaggctggagtgcaatagcacgatcttggctcactgcaacctcctcctcccaggttcaagcaattctcctgcctcagcttcccagagtagctgggattatgggcacatgctgccacacccagctaattttttatttttaatagagacggggtttcaccatgttgtccaggctggtctcaaactcctgacctcaggtgatccacccacctcggcctcccaaagtgctgggattacaggcctaagccactgcacccagcctatcatgctcttttaagaatgggacaaactgaagttccaagaaagtcagagtgccataggaattatgtggaatcaaaaagtggrtatatatttggagatattgaaagattttttatatttttgattctgaagctaactgggaaaaaaggatcccacttttcttgctaaagtatgagtcagcctcaagactgaagtacatttgtgcttcttctactttcaaaaagataaaaagtattctgttttatatacagaatactattatggttgtctattgctaagtggaaataaaaatataaaggggaaaa

SEQ ID NO: 766712 - DNA, 613 bp, Homo sapiens
ctgcttcgctggatttgagacatcagtatgtattcacccacttcatccttgggcctttaaacaagctgccatttacaaactaggttcaagagagtgaaatggtattttaaacataatgcacatgtagtagttacctcctgcagcygacttcccactcagtacataggcctttgattggagctgttcctcatggagtggatttgggggcccagcactttctcttccaaccctggttctgggtccagaagatatactcttaggcaggtctaaaaattaatcaagcttggatgtcttctctccagatcctgcatttctggcacagaaatttgtctcagtctgagtgagaggatgccaggcaaatccacagcactaaatgtggctccaattaacagcatcttttattctctcctcaaagggaggttggcccctggatctggctcctcgcaggcattgaacagtatgtgcgtaaccctcagagtggagcagaaacacacctcttgttttgtttctggatttactattttgagtggatttaagaaaaaaaaaaacgctttttttattattattttcctcacttcccaatgcttttacttcaggtacatgcacacaaaca

SEQ ID NO: 766713 - DNA, 599 bp, Homo sapiens
agagaatggagcggggagcacacacctcggagctcttgtagcccaggagcagataggtggccatcacctcgttgtatctctggcccaccagcgagtcctggatctcttcccgtgtataacccatggacaccatcagctctgcacagggggacatacagttaagactggcctcaactcctaggcaagcttaacctcacagcccggcacagcctcacctgtccgccgggggtccttgtagtcagggagtggctccacgtaaggctttagttcatcatcttcgtgacccacattcatccatcgatctttcatgatttgctggggagcacagagaaggaaaagggcagggggaagraactcagctggaaagtttctgtggggaccccaggcccttccgccagttgggctccactgctcacctctaaagtgcctctcttgctgggattaagaatgagaaatttcttaagcaggttttcacagtccgtggacatgtagaatggaatacggtattttcccctcagtacccgttcccgcagctcctgcaggaggatccagggttagaaaattgaaatcaccccaaggccaaaggaagaaacctaata

SEQ ID NO: 766714 - DNA, 624 bp, Homo sapiens
ctacgagggactagatactatgccagtcacctgctcccaattatgagtaagaccatgtctaaagatgcttgtgtttttcgatgggtgacactggtgttttcaacagaacaagttttgtcgtgtgtgtgtctgtgtgttttgtggttcaggattgtctgaggcagtacagatgccaaaacatccttgtgccactcattaattgccagaggtaacccctaattatggcaaaccaaaaacttttaaataattccaaatgcctgctagggaacagttctgccccaagtagagaaccactgatggaaaacacgatgagtaaagagcagtactaaatgttaaattaataaatagcatgataggttatctacaaaaaacttttaattcctattacaggcatattaaaagttcacttatagtgtctgtagtattttattgaataggtgtatcttatgctccatcatttcccttccattcatcagggaggrtatttacatagctagtaccacaaaattgtcaaccaatagttttaaaacaattacacgatctttaccaatcaaaatcttttaactgtagcaggatatctgaagaatagcttatgagatgcctcaagaggctactatgcttcag

SEQ ID NO: 766715 - DNA, 653 bp, Homo sapiens
gtaggaaccaatagataaaaaaaattttggctgggcacagtgactcatgcctgtaatcccagcactttgggatgccgaggcagaaggatcacttgagtccaggagttcgagaccagcccaggcaacataacaaaaccacgtctctacaaaaaatacaaaaattagctgggcctggtgacacacacctatagttccagctactctggagactgaggtggaaagattgcttgtgctcaggtgtttgaggctgcagggaactgtgattgtgctgctgcacgccagcctgggtgacagagcgacaccttatttcttaaaaaaaaaaaaaaaaaaagaaagaaaaaaaaaaagaaattgaagtacttgcttctgaggggaactcaagaatgagaaggatagagagctgttattctttatcagtctcaagcaggggtcagcaaaccacggcccatgggtcaaattcatcaggctrtctgtctttacaaatagtgctttattggaatacagccacaccaaatcatttatggattctctgtggctgcttttgtgccaaattagttgctacaacaagagagtttagcagtagtgacagagactgtatgaaccacagtctcaaatattcactttctggctctttacagaagaaatttgccaac

SEQ ID NO: 766716 - DNA, 548 bp, Homo sapiens
agtgtcaatttgattggattgaaggatacgaagtattgatcctgggtgagtctgtgagggtgctgccaaaggagattaacatttgagtctgggctgggaaagggagacccacccttaacctgggtgggtgccatctaatcagctgctagtggggctagaagataaagcaggcagaaaaatatgaaaagacaagactggcctcacctcccagcctacaactttctcccatgctagatgcttcctgccctcaaacatcaaattccaagttcttcagttgygggacttggactggctctccttgctcctcagcttgcaggcagcctattgtgggaccttgtgatcatgtaagtcaatacttaataaactcccctttatatacatatatcctattagttctgtccctctagagaaccctaatacacatacacaagggagtaccaaaaaacatgtagctcgaagggtcagatgactgaagcttatatagcatcctgagctacagaaagaaacaggggatgggagttctcaggggttatgagggtgaggggagg

SEQ ID NO: 766717 - DNA, 548 bp, Homo sapiens
agtgtcaatttgattggattgaaggatacgaagtattgatcctgggtgagtctgtgagggtgctgccaaaggagattaacatttgagtctgggctgggaaagggagacccacccttaacctgggtgggtgccatctaatcagctgctagtggggctagaagataaagcaggcagaaaaatatgaaaagacaagactggcctcacctcccagcctacaactttctcccatgctagatgcttcctgccctcaaacatcaaattccaagttcttcagttgcgggactyggactggctctccttgctcctcagcttgcaggcagcctattgtgggaccttgtgatcatgtaagtcaatacttaataaactcccctttatatacatatatcctattagttctgtccctctagagaaccctaatacacatacacaagggagtaccaaaaaacatgtagctcgaagggtcagatgactgaagcttatatagcatcctgagctacagaaagaaacaggggatgggagttctcaggggttatgagggtgaggggagg

SEQ ID NO: 766718 - DNA, 601 bp, Homo sapiens
ttactccattccatgtgagatgtccttggatcctcctaacagtcaatgaggtcaggatcatcttgcccttttagagatgaaggactgaggctcagagaagccaagtaattcacctaaggccacgtagctagcaagaagcggagccaggactcaacctaagtctgagctcctgccacttctctagggacctctggtccacctgactgcactggagggtgatgggtggttctggggcaggccttgctgggggtggatttaaggctcaatgactccaatggcccaggggaccatgatccaggcacttccccaggaacatggcgccaggctcagcctctctgggaggacatttgttcccagactgaggtgggacccccttggtccatgcggtcaccgccagagggccacgtgttgtccaggtgagggcaaggggaggccccccacccccaatcccagtttccggakaaaccaagcaggctccccctcatggagtctgggagctcctgtcacctctcatctcaacccgaggtcttgctgacccttccccagggatgtcagatttgctcagggaatcagatttcctccacgtgggtgtctgaagcct

SEQ ID NO: 766719 - DNA, 472 bp, Homo sapiens
cctagtggggttcagaatgctgcaggtgtgcccggtgggagcatcggccagggaggggagagcctatgttggatctggagccaggatggggtactgacctaggagaatccacctgccacatacaggtatcacaacaggtcccttgtttctggatggagggtcctcatggccatcttccacacaacaggaccaccccttgttctgtgcatggttctgggaggcttttctgcttacattagtccctgtggaggtgggacctgagcgccccctgactgtcctctcaggcccatctcctggcctggytggcagctccctggccctggggaccagccactgcggtgtgggaggccggggcattcccaccaagcctgcacttcttgagtagagggccctgagtgtcctggcccttggttgactcagggctgctttcctctggctgtgggcacagatgaggtgctggtctcataaccac

SEQ ID NO: 766720 - DNA, 630 bp, Homo sapiens
ggtaaactgaggcactgagtggcaaagtcacttgcccaaggtcacacagaggaaggggaaccacgttcattagggtgaacttgggtcctttacaaaggaggatgggaaactgaggcatggagatggcaggtaactgcctgaggtcaccagcacctgagctttggtatctgtcatgctccccsctcaccagacccctccccaagctggggacctgcccaggacctctgagctgtctcctgtggtctaagagcctcatacttcctcttccctgcctggattctgccttcgtttcctgaggccccactgtgtgctgggcctggggctggtactgacagtaggtgatgtcatttaacacatgtgtcagggaggaatcagggaaggcctcatagggtaggtgtcatttgcactttggagccaggtgggagggcattattcctggaggggaacagccttggcagaggcattgtgagcagtcaggcctgtgcgggctgagggggagcagtccgggtgcatgtggtgggtggcatgtgcttctgcctcggccgagtgcttttctgcagcccagatgctggcctgtgacgtcagcaggtggcccagctggcgtcgctgcccgctggtgccctcgggagg

SEQ ID NO: 766721 - DNA, 450 bp, Homo sapiens
taactgcagcctcaaactcctgggttcaagggatcctcctgccttagcctctggagtagctgggactacaggtatacatcaccatgccaggctaattttttttttcttctgtagagacagggatctcactctgctgcccaggttggtctcaagctcctggcctcaagagatcctcccgtctcagcctcccaaatcactgtaattacaggggtgagccacagtgcccacacagattttattyacagtttttctttaagagacttgatgtttttttgttgtatatttcatttttatggtctaaaagtaaattagcaatatttttaaaaggcaagcaatgaagtgacttgtttgcatggaaaccacaatatcataaaatacaataagcacaatgttaccatgacaagagaactttttaaaattccaactccaacaataagactacctcaaagt

SEQ ID NO: 766722 - DNA, 631 bp, Homo sapiens
gatgtattaaaaaatgtatattccttcctaaaggtgaatgaaattatctcttcattacaactgggtacaatctttcataaataaaaatacaggagaatttcctgaactcgggaggcgaaggttgcagagagccaagatagcgccattgcgctccagcctgggcaacaagagcgaaactcccatcacaaaaaaagaaagaaagaaaaaaataacatatgtatacatgtgccatgttggtgtgctgcacccattaactcgtcatttaacattaggtatatctcctaatgctatcygtcccccatccccccgaccccacaacagtccctggtatatgatgttccccttccagtgtccatgtgttctcattgttcaattcccacctatgagtgagaacatgcggtgtttggttttttgtccttgcgatgtatacatatgtaacaaacctgcacgttgtgcacatgtaccctaaaacttaaagtataataataataaaattaaaaagaaaaaagaaaaaaataacatagtttggcacttgcttttgtgcaagatcttaaaattgcttccccccaaaaaaattattaccacactttttcaaaggttctaaaactgaactttaacatctattaacata

SEQ ID NO: 766723 - DNA, 761 bp, Homo sapiens
agcactttgggaggctgaggcgggtggatcccttgagattaggagtttgagaccagtctggccaacatggtgaaaccctgtctctactaaaaatacaaaaaatcagccagtgtggtggcacacacctgtaatcctgtaatcccagctactagggaggctgaggcagaaaaattgtttgaacctgggaggtggaggttgcactgagccaagattttgccactgcactccagcctgggcaacagagagagactcaatcttagaaaataaaacaacaacaaaaaagtattgtttactgtgggccaggaactgtctaaagtggttcacatagaatatttattttcgccggrcacagaggctcacacctgtaatcccagcactttgggaggccgaggtaggtggatcacctgaggttaggagttcaagaccagcctggccaacgtggtgaaacactgtctcttctaaaaatacaaaaattagctgagtgtggtggtgggcgcctgtaatcccagctactcgggagactgaggcaggagaatcacttgaacccgggaggcagaggttgcagtgagccgagattgtgccattgcaatccagcctgggcgacaagagcaaaactccatctcaaaaaaaaaaaaagaatatttattttcattttaccaagtgctccaccagtattaagttcttccttctgctcctctcttctccatggtagaccttcagagttggaaattaaatgtttccctcactccctctgttctgca

SEQ ID NO: 766724 - DNA, 563 bp, Homo sapiens
ctttcccttcaaaaaacaacatggcaaaataacttgcaagatctctagccaattaagaaccctggatctgaagactgactccgtgggatttcataaaacttggctccccatcaaaaggccacaattactctttcttgactacaagcatcatctctggattatccacacctcttccatctccaaagataactaaaaaaatacagggtaactaaatgagtataaaaacacatgaacctggccaggtgcagtggctcccccctgtaattctagcactttgggaggcagaggtggatcacttgaggtcaggagttcaagaccagcctggtcaacatggtgaaacccgtctctacaaaaaacacaaaaattagccggacatggtggcacatgcctgtaatcccagctattcaggaggctgaggcaggagaatygcttgaaactgggaggcagaggttgcagtgagccaagactgtaccagtgtgctccagcctgggcgacagagggagactccatctcaaaaaaacaaacaaacaaacaaaaaaaaacaaacacaaaaaacacatgaa

SEQ ID NO: 766725 - DNA, 433 bp, Homo sapiens
ctaagtcatgcgctccagtccaaggatgagacagaattgactctgacaggagaacataaactaaaagtgatagagatgaaaatatagaaagattttggtatctgaaaacaacatatttctattactacctgcattagtctgttttcacactgctataaagatgctacctgaaactgggtaatttttttattttaaattttgaagaaacttaatttcctcatattctgctataccttactctgtatggaaaatatcttttttaaaatagtacattttctyaaaggttatgactcctatcttagagaaatttttatttttgcttattttaaaaaaaaattcctggactaataaatccaaaatctctgctatagctgagtctgatcctttttccttctgtatttcaatggttttgggggaaggagtggcgtttggt

SEQ ID NO: 766726 - DNA, 645 bp, Homo sapiens
cagaatggggagagaatatgcaaaccctctgtctatgagtgaggagcctcatcattttatgctctagcaccttgctgctccctacatcacatctccatacatcagaagagcatgggcaatattgctgttccagctaataggcagccagaccattcgcacttatagaaacaggaaaaagaggtggcattggctaatgacagctgaaaaggctaagctccatgatcaacagaattggaaaaaagaaagaccacaaaattaaaataaaaagtgggacamagaaggaaaggaatggcacgctgcagaagtggcaggcagaagatatggcattagatgttagaagtagtaaagatgacaaaaattaccagcagcaagaggggacagtggacaagagagctgttagcgaagagacagggaagaaagactagagcagtctggcagcttaatagcaaatagaatctcagctgctcttgctggcaccatgtgaggaatttagagatggactgaacttactcctaccccaaaagtcattttattacaaagtagaagagcaattgatatctgaaccattaagataaatgactgttttctattgttaaaattgccaaccaaccccatttaaaagctttaggacttacagggctaaga

SEQ ID NO: 766727 - DNA, 507 bp, Homo sapiens
cttaaaattatcgaggtatgggaataccgcagagatatcataagttcaatttcagaccactacaataaagctaatgccacaattaagcaagtcacacaatttttaaatgtttccagtgcatataacagttatatttacactaaactgtagtmtactgtgtacaatagcattatgtctaaaaaacgtacaaaccttgatttaaaattactttattgctaaaaaatcgtaatgattatttgagctatcagtgagtggtaatctttttttactggtgaaaggtcttgcctcagtgttgatggctgctaagtaatcaaggtggtggttgatcaaggttggggtggctgtagcaattttgtaaaataagacaacattgaagattactgcacaattgattctttctttcataaaagatttctctgtagcatgtgtttctgcttgatagtattttacccaccttagaatctctttaaaaattgtagtcagtcttcccccaagttctactgctac

SEQ ID NO: 766728 - DNA, 600 bp, Homo sapiens
tcatgaattatttcagaattttaagatttaatagagaagttttcaaacaagagcattttttcaaattaggtataagaagtaacccccaatacatggcaaaaatacaaaaaattgaaaatcatctgtaaaaagataagagacacgaaagacatatgtaggtgrtatattatggaagtaacagagtttcaaaaggggcacaagaaacagatggaggagaataacaggaagttagaattaaagaagttttactgaggttaggaaagacatgaaactttatatgaaaaagatgcacctttgtcttaaataggaataattttcaagtgacacacactagacataccctggtgaaattacgtaactcaaaaaaaaaaaaagaaaaaatatttttaagcttcttgtggcaaccatgaaaatgtggcagcctctcagatctcttgctgcagagaacgtaattaacggatggccccatctgcagtccctctgaatccaccactaagtttatggggatgctatgcttcctgcaggctgcatgcaatgagtaagcatggcagggatcctacagcaggccagtcctacaagatgtgggactcttccaatgga

SEQ ID NO: 766729 - DNA, 569 bp, Homo sapiens
agttctgcaggctgtacagaaaatttacaatcatggcagaagacaaaggggaagcaggtacatcttacatggccaaagaaagaagaagagagaagggggagatgccagacacttttaaacaaccagatctcatgagaattcactatcaccagaattgcaagggagaaatctgcccccatgattcaatcacctcccaccaggacccttctccaacactggggattgcaattcaatatgagatttaggtggggacacggagccaaaccgtatcaaccctgattttgtggcactcrctgatgttgggagacaattctctatgagtctttcatgtttctacgtatcttacaagcagaggcaccaactatcttttcaaagatctttgtagagcaaagggcctcagaagatagagatagtgcttcccccaggagcaaaggacagctttgtttgctgtcctgcataataaagctactgtctctccccaggacaagggtcaggtgggtttgcttgcaacacactataaaagatttgggtttcctaagctctaggtttctcagctagctgtaaagcaa

SEQ ID NO: 766730 - DNA, 538 bp, Homo sapiens
gatgagatcacaaagtatctaccagtttttacatctatccatccagccatccattcatccatccatccatccgtccatccatccatccatccgagacagaagagaagagatttgaagagccctctagccctccaactttaggagaaagggagaagagaaggaaccatcagaagagactgaaaaggaggcatcaatgacagaggaggggaatcaataaaatgttggaagctgaattaagaaagagtatcaagaaggaaagagtaatcaactgtgtcaaaagctgctgttaggtagaagcaattgactattgagtttagcaacatggaggtcattggtgacctcaacaaagttgtttccatggaatgtggggtggaacatgactggagagggttcakgtgaaatcagagggaggaaggtgagacagggagaagacagaaacttgtttgaggagtttttctataaaggggagcagagaaagggggtagtggctggaggggcatgaagagtcaagtccaggttttgtaaaggtaggaaagac

SEQ ID NO: 766731 - DNA, 619 bp, Homo sapiens
gtactgttccaagttgctaaattttggactaatttgttattcagcaatagataactaatacatgaggcttggaaaagttaaaggcacacagattgtaaggagcaaagatagaaatggatacctgaatttttggctccctcgtccttgctaacacactgtaaggtaaggggatgtgctttggtcaaggaataggctgaggcagacatccaggccaaagtgactgagcgagtttagggtgcaggcacatacttcacttgttatataacctgtttgtgcaagctcatcgcctggctcagagttactgttgtctgtagaaggtaccactgcccagctgacactgtgcaggcactcttgggcatggctcaacatggcttttgygcagatgctggcacccagactgagagtgaagctactgacccctatcaaggagagtgactgtctggcagatggacaggagggagccaggaaccggcttgtgcaagggagaaagagttatgctgctgaccctaaagataagggagagctggccacgcaggtgtgtgtgggagcacacagagcaagcagctgactcaaagcggagagtgtgagagagctagtgtaattaagctgctgatgagag

SEQ ID NO: 766732 - DNA, 479 bp, Homo sapiens
gcttgcagacactgaccggtcagtgacacccagggttctggggctgccacaccctccttcccctcccaggtctgcaagcctcctcagtcttcttttggatgtcccccagcttcacctgcacacttcccgtgaggcagctctatagagggagtgatcagaaggaagacctttgtggtatatggaccagatytcccaacctgcccccacttgccagtgccatgacattgagtaagttacttcacctctccgtgctcagttacctcctctctaaaatggagacagtaatagatccacctcttaggtgtgccatgggcattaaatgagataaagctggtcaattacttagcctggcacatgattgttcataaatattagtctcctttccctcattcctccactcctctgggaagacaggcttcacgtctgtatgtcccacataaatatcaaattctagaaggtgcacctgtgaccttggcaca

SEQ ID NO: 766733 - DNA, 397 bp, Homo sapiens
cttccagggaaacttgaagcttaaaccaaacttgagggaatagtgcatgtgacttccagactccaaaggtgatgtgccctgtttccccctgtactgaccgagcaagctactgactgctgatttctgtttccaaacttcccaatcccacctctcagagctgctatggacagcatggcagagcctgcactgaygttggctttgcaacttgggttcatgccctccactggcatcactcaattccattcagttattcttctcatttctatatagttttagatttgctgtttctgtttattgtttccactttccactcatgtcctagtaggagtcattagactcagattcaagtcctagtgctgctgccaagatgccaataacacagatgctagagatacaa

SEQ ID NO: 766734 - DNA, 564 bp, Homo sapiens
ctgtaatcccaacacttcgggaggccggggggcaggcggcaggggggatccctgaggtcaggagttcgagaccagcctgaccaatgtggtgaaaccccgtctctactgaaaatacaaaaattagctgggcgtggtggcatgtgcctctaatcccagctatttgggaggctgaggcataagaattacttaaacccaggaggcagaggttgcagtgagccgagatggcaccactgcactccagackggacaacagagcaagactccatctcaaaaaaaaaaaatacataaaaaatagtgtcaagtgagagaatatttatctccatctgaattcattgtaatgttttatgtctgatttttagagtgaagatgaagctggatgtagctcagttgatgaagaaagttacaagactctgaagcagcaggaagaagtatttcgaaatttagatgctcagtatgaaatggcaagatcacaaacccacacacaaagaggaatgggtttgggtttcacatcttcaatgcgaggaatggatgcagtttgaaaatgatcacacttgtaaagtttgg

SEQ ID NO: 766735 - DNA, 539 bp, Homo sapiens
ccaggtgacataatgagaactgatgacaacacaccccaccatctacttcaggtcctgcggttttgagacagagatgagagtcataccgatctcacaggtgacaaacatgaggtcagagaggtgagcagactggcccatgattacatagcaggcagcgaccaagccaggtgtggagcccaggcctgtccaactccagagtccgcggcacgggcatccagtttcytgactggccactgctgtttgtgtccctcaggatgcttgggtccctctctcctcctcaaccacggtccagtcgtttatggagaactgtgtggccaggaggagggagcccaactgggcctgagtccttatagccacatgccctttgaccactgctaggctgtctcagtactgtaggcccagaatgaccggtagtctgggtgttaggagattgcatccaaagcccttcatgaccatgaagccattcccatcagactcacttctctcatctgaaaaacggctttttttttggcagcatatggaaaaggggtatatcctta

SEQ ID NO: 766736 - DNA, 539 bp, Homo sapiens
ccaggtgacataatgagaactgatgacaacacaccccaccatctacttcaggtcctgcggttttgagacagagatgagagtcataccgatctcacaggtgacaaacatgaggtcagagaggtgagcagactggcccatgattacatagcaggcagcgaccaagccaggtgtggagcccaggcctgtccaactccagagtccgcggcacgggcatccagtttcctgactggccactgctgtttgtgtccctcaggatgcttgggtccctctctcctcctcaaccacggtccagtcgtttatggagaactgtgtggccaggaggagggagcccaactgggcytgagtccttatagccacatgccctttgaccactgctaggctgtctcagtactgtaggcccagaatgaccggtagtctgggtgttaggagattgcatccaaagcccttcatgaccatgaagccattcccatcagactcacttctctcatctgaaaaacggctttttttttggcagcatatggaaaaggggtatatcctta

SEQ ID NO: 766737 - DNA, 539 bp, Homo sapiens
ccaggtgacataatgagaactgatgacaacacaccccaccatctacttcaggtcctgcggttttgagacagagatgagagtcataccgatctcacaggtgacaaacatgaggtcagagaggtgagcagactggcccatgattacatagcaggcagcgaccaagccaggtgtggagcccaggcctgtccaactccagagtccgcggcacgggcatccagtttcctgactggccactgctgtttgtgtccctcaggatgcttgggtccctctctcctcctcaaccacggtccagtcgtttatggagaactgtgtggccaggaggagggagcccaactgggcctgagtcyttatagccacatgccctttgaccactgctaggctgtctcagtactgtaggcccagaatgaccggtagtctgggtgttaggagattgcatccaaagcccttcatgaccatgaagccattcccatcagactcacttctctcatctgaaaaacggctttttttttggcagcatatggaaaaggggtatatcctta

SEQ ID NO: 766738 - DNA, 496 bp, Homo sapiens
aatacaaaaaaattagccgggtatggtggcaggagcctgtaatcccagctactcggaagactgaggcaggagaatcgcttgaacctgggaggcggaggttgcagtgagctgaaatcacgccattgcactccagtctgggcaacaagagcaaaactccatctcaaaaacaaacaaataaacaaacaaacaagaaaaaccagctgggcgcggtggctcatgcctgtagcctgtaatcccagcactttgggaggctaaggcgggcggatcatgaggtcaggagttcaagaccwgcctggccaacatagtgaaacccctctctactaaaaatacaaaaattacccaggcatggtggtgcatgcctgtaatcccagctacttgggaggctgaggcaggagaatcacttgaacctgggaggtggaggttgcagtgagtcgagatcacgccactgcactgcagcctgggtgacagcgcgagactctttcggaaaaacaaaaac

SEQ ID NO: 766739 - DNA, 523 bp, Homo sapiens
taggggtcagtcccctgggtgtggtctcatctgtgggactccactccctaccccaagccccagtgccttaggtctctttcacccttgggtgtcccctcacagctgccacttggagctacagatgcccactgggcactggcctggctagtacttgagggcttgcctctcctagacccatatccagccttacttctctatgaagcatcaggttctgtgatggtggtacaagygcccgggtaaattaggcccctgaaccctgggtggtgggggacagggagtgtgatgttgagcatgtggggtgcaggaataggacacccaaattggagcagcctttggaatgtggaatcccacttccctctttggaaagataggttgaggggagctgagtgaggacatagtactaatgtgtgcctggaatctagggctgatgtctgtttcattcaggatatttgggactgctggtttcagaatacaggaaggactaactgaaaaccaagactatgcactggggaggatcctgggg

SEQ ID NO: 766740 - DNA, 508 bp, Homo sapiens
cccaaagatgatttttttttttgagacggactacagacacgtgccaccacgcccggcaaattttttgttttttagtagagttggggtttcacgttgttagccaggatggtctcaatctcctgacctcgtgatctgcccgcctcagccttccaaagtgctgggattacaggtatgagccacygcgcccagccagtaaattctttttattactgtagtagatgatacttgattaaatgccatctcgggtgctttcattgtcaacaaaggtgctcccatctctaagcttacataaaatgtaattttaaaaagacatttctttagatgtacctgttcacatttttgttaatagtctctcatgtctagttttggaggctggaatgttcaagggagccacaaaaatctctgtcagttggtgttttgaataattgttctgaaatatactcccaggcttgaaacttggatctggcctttttttttttttttttaacttgaattttttttttttttg

SEQ ID NO: 766741 - DNA, 628 bp, Homo sapiens
cagacatcattttttccccagtgtatttgacccacaattggtggaactcatagacacagagggctggctgtactttatttccctattgttctttctcataaaatagaaagttgaaattaatgtatacgtttaaagccaactgttaaaacacagccttatatatttgggtattatttttttctgcccacatrttccgactagatcgatgcctttattaaattttaagattcaacttcagttttcatcatgatgtagagatatcagttttatagattgtatgtttatttgccataattgggttttcactatttagattacaccccaaatgacagtttttttttttccttgagtcggagtctcgctcttgttacccaagctggagtgcagtagcacgatgttgtctcactacaacctctgcctcctgggttcaagcgattctcctgcctcaggctcctgagtagctgggattataggagcccccaccacgcctggctaatttttgtacttttagtaaagatggggtttcgccatgttggccaggctggtctcgaactcctgacctcaggtgagccactgtgcccagccatgatgacaatttttaacagctattttaatccacacttacagt

SEQ ID NO: 766742 - DNA, 524 bp, Homo sapiens
tcaaagtgactgagtgagtcagagtcttatgacgcttaagctgctccctgagagccaagtcaggcactcagaaaccgggttagctcttcgaggatcagataggcccacttagaaaattatctccgtgcctggagtggtacctacattgcatcacaggggagccaagtggctgcaactttatatatatatataaaatctcaggccagattctcgggaagcataagaaaacttaagcagtttttggaagctgttgtaactttctcaagttattaaagtatcctttcatrtctgaaatggcaacatacccatggttgttctaatgtcttgaaagagttattgcaatttaaaaaggcacaggattttttttttcaggaaaggtgtttaaactcatcacacatttttaatgatcttctttgtttaagagatgatttcactctagtgcacccattttaagatgtctataattatgttaaatagggaatggtaaaaatagtttaaaaatatataattgagttttttctatt

SEQ ID NO: 766743 - DNA, 524 bp, Homo sapiens
tcaaagtgactgagtgagtcagagtcttatgacgcttaagctgctccctgagagccaagtcaggcactcagaaaccgggttagctcttcgaggatcagataggcccacttagaaaattatctccgtgcctggagtggtacctacattgcatcacaggggagccaagtggctgcaactttatatatatatataaaatctcaggccagattctcgggaagcataagaaaacttaagcagtttttggaagctgttgtaactttctcaagttattaaagtatcctttcatgtctgaaatggcaacatacccayggttgttctaatgtcttgaaagagttattgcaatttaaaaaggcacaggattttttttttcaggaaaggtgtttaaactcatcacacatttttaatgatcttctttgtttaagagatgatttcactctagtgcacccattttaagatgtctataattatgttaaatagggaatggtaaaaatagtttaaaaatatataattgagttttttctatt

SEQ ID NO: 766744 - DNA, 584 bp, Homo sapiens
tgttatgccaggtaagtgcttttgtgtcaccttctgtgtgtgagaggttcaggatcaactccccaggatcaaggaggattgagtagcaagcttcaggatggctagggctgcccaaccttcgtcattagtactggacagttcagacattgccagatctctctggacaccctgtgtggtttgggtttcctcttccaagaaccctgttggtagggggataaacaaaccactgggcttcagcattttggatttgggctagcagctgcagtggagctatctgggaaagccagcagagtcagggaccttggggacccattggatgtgtcttgagggcaaccttcctacagggaagaagaagccataggtcccacaggaatcggagcccgaggsgagctgctgctgcaaataaggtggtgctccatttcagctaatctgggctccaggcagctgagtgaacagcaggagtcatttccagttgttctggctgttctatcacaggtgtagactcactgtggctattttctctgaggagccaaaaaatgcatgcctgtttttacagacccaaaagacccaggaatctcttccag

SEQ ID NO: 766745 - DNA, 584 bp, Homo sapiens
tgttatgccaggtaagtgcttttgtgtcaccttctgtgtgtgagaggttcaggatcaactccccaggatcaaggaggattgagtagcaagcttcaggatggctagggctgcccaaccttcgtcattagtactggacagttcagacattgccagatctctctggacaccctgtgtggtttgggtttcctcttccaagaaccctgttggtagggggataaacaaaccactgggcttcagcattttggatttgggctagcagctgcagtggagctatctgggaaagccagcagagtcagggaccttggggacccattggatgtgtcttgagggcaaccttcctacagggaagaagaagccataggtcccacaggaatcggagcccgaggcsagctgctgctgcaaataaggtggtgctccatttcagctaatctgggctccaggcagctgagtgaacagcaggagtcatttccagttgttctggctgttctatcacaggtgtagactcactgtggctattttctctgaggagccaaaaaatgcatgcctgtttttacagacccaaaagacccaggaatctcttccag

SEQ ID NO: 766746 - DNA, 602 bp, Homo sapiens
aggctgtttacagtgatttttttttaatgtaagtataaggagcatagtctaaaacagtgatggatagtatagcatagtaaatatataaagcaatgtcatagtcacttattattatcaagtgttacctgctgtgtacagttgcactgctccgctttcacatggctggcagcacagtaggtttatttacaccagcatcaccaggaacacatgcgcaatgcattgtgctatgatcaatggctactatgtcattaggtgataggaggtttttaactacattataatcttatgggaccattgtatacatgatccatcattgattgaaatgtccttacgtggtacaggattttgtgtgtgtgtgtrtatatatatatatatatatgaaattatatgccataagcaaatgaagtgttttccttgtaggaatgaaagactgttcaatatttcaaaatcaatgtcatttattaaattaacaggataaagaagaaaaatcacatgtttatatcagtcgatgcacaaaaagcatttgacaaattcaacacccctattagtttcctaaggaaactaaccaccacaaatgtactgtttgaaaacaatacaaattc

SEQ ID NO: 766747 - DNA, 632 bp, Homo sapiens
atacaaattcagtctctcaaagctctggaggccacaagtccaaaatcaaggtgtcagcaaagccatgctccctgccagatctcccggggagagaaaccattcccagccttttacagcttacagtgtctcctatgctcctcagctaacagtggcaccgctggaactcctacctctgtcttcatatcacatgtttctcttggtgtctgttttctcctctatgtgtttcatacaaaggcattygtattttggatgtggggacaccaacataatccaggatgatctaatctcaggatgtttaactacattccatctgcaaagacccattttccaaataaaatcacagtcaccacgtctggggacaagggagtggacatgtcgttatcgggggccaccatcaagcctgctgtaacgtctgttcatgacaacgtctcagcaaggcaggaggaaatgggtcgtcctcagtttgtgataaagagcacttacaaaacaacaaaacaaaacaaaaaaacacttagaattaaccttactgatgaaagactggatgttaccccctaagagtaagaacccaccaaggatatccactcttcccattcagtatagtgctggaagctcaagtccattcaaaattgcaa

SEQ ID NO: 766748 - DNA, 693 bp, Homo sapiens
ttgataaaaggggttacgaatctatagcaattggccagacgtgggattttccaggtttcagaatttcctagttagctgagggttacttgaatatcctcctcctgacaggcaaacacaaatacatagagtttttattaaaaatcagtctatatgcttatttaaaaatacaaatatgtgtgtatttttattacttgaaaaacagaaattctagaatagtaaatttttattcctattttgttcatctggcttcatctggtgatcagcaccttcatccttcattttcaattattcattttggaaacggcagtggagttagttttatttttgaagtttacagtgaacctgaactcaagaatcaaccaggagcatctggttggtgcagattgtaagcctgatagtatccttctgtgaggatgaccacttaggtgctcagaaatgtgttacttgataaggcaaaaagttcagttcctgctgagttaagaattagagaacagcgcagcttgcgtcattgagaagcctcgacctccatraggttcctagctggcgtttcagccttaaacaatggcaacagacacagcagagcattaactatttgtatgcctcgagtataatgtaagtgaaaggaacactatagcaagatgatttttcaggactaaatttctactaattaattctggaaagtaaaattgcatt

SEQ ID NO: 766749 - DNA, 657 bp, Homo sapiens
ttacagttgtttttatatttccagatctttgcatctataaaactgattaacagattgaatcattcattcattcagtcaaccaagtattaatcaatgtaggcatcatttttcaacatattttgttgcctctctgtcatatataagttgtgggcttagcaaaacccaacttagatttcagcttttaagtgaagaaggaaactacctaatcaccatcctctgaatttttttttattttttgtctcaatcataaagattagagtattttaattaatatttttaaacaattgaacacatgaatggagtttgagaaatgagaaaaaccccaaatacggaaatgagattttggttactcattatcttcactatatttctgtaataraatcatctgccaaagaatgcctttttgaatttccttgttaaatctcttcctataaaatgagcttcgctaattaactcagtgaattccagaaatcaaagcttataactactaaatttgtttaatgaatggactatcagtgtaatagaatattcacttataatgggttgcttggtaactattatatttaatatcaaaaataatatatagacatgacaacaaatcaaacaatgcaatcctgctagcccttctccagctgacaggttaaaaattttaaatat

SEQ ID NO: 766750 - DNA, 646 bp, Homo sapiens
gtcacaaaaccagcatagcttcaacaggaaaagattacccaagcccatataggaagttgtggttcatttgacgagggtatgttggaggattagctaccaaaaattaaaatctgatcccccttccttactcacaaactcttcactcccatatgcagctatgtacttacaatggtcatcttctaagtattttaagctcaggatattcaaatttgagttcctgatattttgcccaaatcagtatctgcccacacattttccatttcagttgagagcagtccttcaatcttgctgtcatttgacttgaaaatcttagagacatgcgtaactgctcctccttctctcatgacatctcatccaacatttgaagagatgatgttctctctaccttcagaatatattaataatcaaactacttctcatttatttttctccatccttgcgtgaactttgagcatctatcatctctggyataggtgactgcagaagacttctaaataattccactgctctgatctcgctccttcttgtctatgctcagtaaggtagctagaggagtcctgggtaccgacaggtcagattatgtcccttccctgcacaaagcttaaacctaaaatccaagtaaactgcaaggctctagacctttctt

SEQ ID NO: 766751 - DNA, 690 bp, Homo sapiens
tgtcatgatattccacccttgaatatttcagaatgcatataaaactgacaactacaattctattttcttgcctgagaatataaaaagataattcttaatgtcatgtagttcccagttcaaattcaaatttctgcaattacagcaagaattttcgagccccattcggtgaacatgarggtggtgagctgagagttaggagtatggcttgtgggccccttgaaactaattgatttgccttgtgagtatcagaagcattcttcctgcttcccaggcctcagtttatctgtacttcgaggtggctcatggaggtggtctctcaagccccagccatatcaccaggctactgcatctcttcctttgggcttgtgtgaccaccacagggagcactgagagagatctcttggttgggaggctccttttctgggggtccggaaggcatagtggcatcaagcgagggtcactgtggcccagtggctggtctgggcccttgcaggatgcagaatttgtaggcacaaataaatctgtctcattctaacatgcactgaccagaggcacccaacagtggtccgtgactggattcagccctggatgggctgggtttgtgctgtgtgggacatggggagaaaattgggggattccatacacaaaaatctagatttccaacttcttctgaaaaatgggaagatctag

SEQ ID NO: 766752 - DNA, 591 bp, Homo sapiens
ctgtattctttaagtctctattatttaagcattctgttatatgagatgagcaagacagaccagctcctgcccttaggtaacctgcagttaccagacaatgagagctggtgatgactgagtgctttctacaaattccttataataaccctataaagcaagtgctctttttattaccaccctgtatttcagatgagaaaattgaggctcagagaggttagggcacttgcccaaggtcactgcaagtaagtaatagcaccattctgactccagaatccttcctctgagccacaggtcacactgccatctgagtcattttgcactgaatcctggttgagtaaataaatggacaagtagtcacaacagggctgttagctgaaaagtgacagagccattcccactgcctgcacttgcaagctccaggcatacccagatgttctttatctraatctggagccacactttgtaaatatcgggccactagtggggaagaatctgagtgatgtggaatatctagcactggccttgggcttggggacctttgctttccatttaattaatctaaggtttctcaatcttgccactattgacatt

SEQ ID NO: 766753 - DNA, 605 bp, Homo sapiens
ctctgaaggtataacatccatcagcttccacatctgtaaataagagatgaggttatttatagatgtggaagctaaagctccgagagaaggtgtcttgcccaatatcttgctggcaagtgctggcacaaccagatatgggaatctcttgtttgactccaaaatcaacgggctatccaaataccagagcagcctctctgcaaagtcctttctccwtcagttcatttattgattaatggaatcattccagatgtttactgagcatctactgtgtgcctcagcatgggtgttggtgctgggaattgagggtgagtaatttatatggtccctgtcctcgtggagccacacacctctcttgccaaggccaggaacagacagaaaaccttgttacttgtttttcttctgtattgtttttttcatttttaaattcccttttatctgcattcccctcccactagcccataggaaatggttgtcatgtgtcaaccgtatattgttttgtttgggtttgtttttgcttttgcttttagagatcgggactcactctgtcatccaggttggagtgcagtggcatgatcatggctcattgcaacctaaaactcctgggc

SEQ ID NO: 766754 - DNA, 517 bp, Homo sapiens
agattgctgctgttgtgtccagtattggagcaacatcattcaaggtcacaactctgaagttcaagatcagacaactgccatctgaggtcagaatcctctaatccatcattggagccaaggagtccatggccagagagttgctcttcataattaaaactctagcgggcaaggtcagaatgctgatgtcccaggttggaactaatgtacggggttggaattctgaggtkcaaggtcagaacacttcggcagtcttcatgatcagaattctggcaggcacattcagaagactggtgtttggagttggaagtcttattccctgcttgttatattgggagtctcatctcttctgtgtgtccttaacccttcatcatccgtcttcctggcagcagttattgaagaaatgcaaatcacagaagatccccaaacccccatttatccagcggggtcctgatacataggcctctctctcttattgtgtctgatgcccatccactcaggtcgtgctgataagggcgac

SEQ ID NO: 766755 - DNA, 618 bp, Homo sapiens
agagtttcctgcagatgtgtgaagaaccatcctggaacacatcaagggaactgtggtataagacttactccagacataagagtaatccttacacttaggattagcaagtggaatttaaggagtctcaatttggctcaaaataagcaggagctttttgctaatttggccagtctgacaatagtacaaatagcacaaagtcgtaatagagttgtactgaaagcaaataaccaaacaatgcataattgtgaattggagaaattatacaacacagcctttataaatagaaagctgaactaaataaaggctaaagtcatctacatctgaagaacctctccatgcatagtacctaatatggtttagatatatcgccacccaaatctcttgtkgaattgtaggtcccataatccccatgtgtcatgggagggacctagtgggaggtaactgagtcgggggctgggtttttcccaggctgttatcatgatagtgaatacgtatcatgagatatgatagttttataaagcatagttcccctgcacacactgtcttgcctgcctccacgtaagatgtgacttttctcctccttcgccttctgccataattgtgagtccacatggaact

SEQ ID NO: 766756 - DNA, 589 bp, Homo sapiens
gttaagtatcccttatctgaaatatgtggaaccagaagtgttatcaattttggatgtttttgaatttagaaatatttgcatatgcataatgagatatcttggggatgagacacaaatctaaacatgaaattcatttatgtttcatacatatcccatacacataccttaacagtaattatatacaatattttcaataattgtatttatgaaacagagtttatgtacattgaaccatcagaaagcaaaggtgtcaggtcatggaagtttccatttatggcatcatagggcgcactacagcctcaaacttttgggctyacaggatccttctggctcagcctcctgagcagctgagtctataggtgtggaccatcacgtctggctctatattatgttttaaatcatctcttcaaacagaaacaattctaggtaaacagtaattctccaggtagtgtttcttgacttgaccaattggcatgatgccttcatctgttgagagctttccatgaactcagtattagatgggatcctactgtactggatgggacttcacagtaatgtcactttgttaggctcatcagagtctaaacca

SEQ ID NO: 766757 - DNA, 623 bp, Homo sapiens
gataagaacgcattactgagatggtgaaagcaaagcaaaagagttaaacttttatttgataggcaatgaaaagccactgaaggaagccatttgtgatcataaaagtgccatgatcagattggaatcattctggcatcaatgtaaaggacacatggaaagaggtacatgtgcagatttttttcaggctcgatatttgcaatcagtgctcatgatcaactgcagcatacttcactaaatattccattgycaccaaaggaatttattcctctgagcacagtagccagcactggttccacaaaccatgagtttgttggatgtccaagagatattcctctgattccacttgggattttatctgtccatgacaaaattccaattctgaatgaacgccattccttgaagaccagaagcatcacatgacttttgtactgcagatacttaaagggaaagcaatgagatgaagtgagaagttatttgcttttctaagcctgatagaccagccagtgcttttatagaaggctgctcctcctctatctgtctgcgacaatttcccaggtggaataatgacagaagagactgaaaaaatattcccagggatctggaggtgtaaagaggcctactaa

SEQ ID NO: 766758 - DNA, 623 bp, Homo sapiens
gataagaacgcattactgagatggtgaaagcaaagcaaaagagttaaacttttatttgataggcaatgaaaagccactgaaggaagccatttgtgatcataaaagtgccatgatcagattggaatcattctggcatcaatgtaaaggacacatggaaagaggtacatgtgcagatttttttcaggctcgatatttgcaatcagtgctcatgatcaactgcagcatacttcactaaatattccattgtcaccaaaggaatttattcctctgagcacagtagccagcactggttccacaaaccatgagtttgttggatgtccaagagatattcctctgattccacttgggattttatctgtccatgacaaaattccaattctgaatgaaygccattccttgaagaccagaagcatcacatgacttttgtactgcagatacttaaagggaaagcaatgagatgaagtgagaagttatttgcttttctaagcctgatagaccagccagtgcttttatagaaggctgctcctcctctatctgtctgcgacaatttcccaggtggaataatgacagaagagactgaaaaaatattcccagggatctggaggtgtaaagaggcctactaa

SEQ ID NO: 766759 - DNA, 623 bp, Homo sapiens
gataagaacgcattactgagatggtgaaagcaaagcaaaagagttaaacttttatttgataggcaatgaaaagccactgaaggaagccatttgtgatcataaaagtgccatgatcagattggaatcattctggcatcaatgtaaaggacacatggaaagaggtacatgtgcagatttttttcaggctcgatatttgcaatcagtgctcatgatcaactgcagcatacttcactaaatattccattgtcaccaaaggaatttattcctctgagcacagtagccagcactggttccacaaaccatgagtttgttggatgtccaagagatattcctctgattccacttgggattttatctgtccatgacaaaattccaattctgaatgaacgccattccttgaagaccrgaagcatcacatgacttttgtactgcagatacttaaagggaaagcaatgagatgaagtgagaagttatttgcttttctaagcctgatagaccagccagtgcttttatagaaggctgctcctcctctatctgtctgcgacaatttcccaggtggaataatgacagaagagactgaaaaaatattcccagggatctggaggtgtaaagaggcctactaa

SEQ ID NO: 766760 - DNA, 557 bp, Homo sapiens; identical to SEQ ID NO: 736918

SEQ ID NO: 766761 - DNA, 516 bp, Homo sapiens
aaataaaatacaaaatgtgattttgaaaagtaaataactcattactgagttatattcgcatttctctgaaagagaaatttagaaaatttagaatcataaagggatcgttctaagtaagctacagatagttccctctgattccttcatcagcctgccctgacctaatattttatttgataayatgagggaatctctttgaaaaatgtatgaccaccacaccccatcccagttccatcaacctaggatgacaatttttgtactggtcagacactgtggtttatatttaaagaaagcattcccactctgtcttttttcatttaattatagatacagaatcccatgcagatttcttgtatcaatattaatacctttggatgtatgttctacttgttgataaagtttctgaactagagtaagaattattcatgcaagaaaaactgcttttaatgataatcaagtttctctactttagagccatagaaagtggatgaatactccgtaagtgagcacatcttt

SEQ ID NO: 766762 - DNA, 591 bp, Homo sapiens
agactatgagcttcttgagggcagagactatgcctggcttgttcatgtttgggtggaagatttaactgtgggcatgacatgatctgattacttaaaaaaaaaatcaggctgggcacagtggctcatgcttgtaatcccagcaatttgggaggccgaagttgggggtggtcacctgaggttgggagttcgagaccagcctcaccaacgyggagaaaccccgtctctactaaaaatacaaaattagctgggcgtgctagtgcatgcctgtaatcccagctactcgggaggctgaggcaggagaataacttgaacttgggaggtggaggttgcggtgagctgagatcacaccattgcacttcagcctcgcaacaagagcaaaattctgtctcaaaaaaaaaaaaaagaaatttctctgactggggtgtgtgcgtgtgtgtgtgtgtgtgtgtgtgtgtgtgtgtggtggaggaggaggaggggaaaaggagaggaaagaggtaggtagaccagttagatgctattctaatcatccaggcaagatatgactgtggcttggattacataaattaaaacataaattaagcaaaaatt

SEQ ID NO: 766763 - DNA, 640 bp, Homo sapiens
gattgaggaaaccaagagcgtagagataagctaggaagattttttaaaaaatagaattagttctgcagaaaccagagcatccaaaagactaagactcaaatcaaactaaaaacaattgtatgaaaaaatttcaaatttgtttaaaaacaattaaagaaaatcaaataaaattgaaacaaacaaaaaaaataatgagccatatacagtgaaggcaggagggcaggagtttagataatcagaaaaaaaaaaaaaatttctcttttacccttggtgatgtcttttttttttttttctttcarattgagtctcactctgttgcccaggctggagcacagtggcgtgatcttggctcactgcaacctccagggttcaagggaacctgtaaaggaaaccagtagcttatctgtaccagtggcatatctgtataatctcttagaaaatcaagggttcaaaatcaaacaccttgctagtttgcgattcagtgattcaagaatgaattctgcagttggaggactctctaggcccttcagtgttccacttactttttctgctcttattccctctcttcttctacacgccagcgtcctcttctgcactggatggtatcatgattttcaggaaggagagtcaaaaagggaaa

SEQ ID NO: 766764 - DNA, 510 bp, Homo sapiens
aggggcagagaacagcaggtatgagtgccccgaaataggaagtttggcatgtctgaggaacgcaaagaagatcatgaagggttagtgggagaacactgcagaataaggtgggcagagttaagatcacagagggttgtaaaccatggccagtgacttaggaaaagggaacccacctagggatgaactcttaaaaaggattatctattttgccttttctggagggctctggcctatttcctgttttattctttaggcactgttcaagaaggacatcaggacaagtttgactgtctaraagagttcttgtaatagagtggtatttaagctatcacagcagtgggcacaatcagaatttcaaaactgcaagaggttggactgttctgaatttgaatcttgaagtttcagttcagcctgtcatcttctcttttaaccttctatttggaaatactttcaaacttacagataaagtcgtgagaatagtataaggaataccatgttgtctaccttttt

SEQ ID NO: 766765 - DNA, 576 bp, Homo sapiens
aggtgctctgtttttttccatccagtctttccctgctgtttgaccagcatctggcgtagaggaggcagtcaatatatatgtattaattaaatgaatacttggaaccagatgtgatattcaaagtatttcataactagaaggtacaggcatgatccagttgggatggatgctcattgtaaacaactggtacagccttttgggcaaaccggttgaatattagccctggctgagacactaagtgcagcagytggaaatcttatactctccctttaacagtgtattaagcatgttcggggaacaggcattgccaaagtgaaggtctcgattactgtagctataatttgcagaaggaaggggaactcacacctcctgagcatttaatcttgtgccaagtcttgggctggcccttttatgactattatttaatttaacttcatggctgatgttgttttatttcaaaataaacccaaattgcctacaccagcattctttttcctctgggcctctccttccctctctatgtgcccactttagccatgcacctggcaggtaaaaaggcactcctgagacctcagt

SEQ ID NO: 766766 - DNA, 576 bp, Homo sapiens
aggtgctctgtttttttccatccagtctttccctgctgtttgaccagcatctggcgtagaggaggcagtcaatatatatgtattaattaaatgaatacttggaaccagatgtgatattcaaagtatttcataactagaaggtacaggcatgatccagttgggatggatgctcattgtaaacaactggtacagccttttgggcaaaccggttgaatattagccctggctgagacactaagtgcagcagctggaaatcttatactctccstttaacagtgtattaagcatgttcggggaacaggcattgccaaagtgaaggtctcgattactgtagctataatttgcagaaggaaggggaactcacacctcctgagcatttaatcttgtgccaagtcttgggctggcccttttatgactattatttaatttaacttcatggctgatgttgttttatttcaaaataaacccaaattgcctacaccagcattctttttcctctgggcctctccttccctctctatgtgcccactttagccatgcacctggcaggtaaaaaggcactcctgagacctcagt

SEQ ID NO: 766767 - DNA, 644 bp, Homo sapiens
agtgtcttttttctttctgacatcattttgaaatagcagaatatattaccttcattccaattaatgtcatacatagctattcctcaatagattttctgttcacaatgacctttctttttatttggctccgaataaaatgtatcattagtttgaaaacttaccgacttttcacaacagatgtattttaaccagttctgtttcacttataaatttataaatatattctgtttacctctatttattatgttgatgtttcacatatggcttgtatttgtgtagagttctaagttggatatcaagaagttggtcttcgaaatcttttttattgaagactttttttctgtaaaatgtacmtctcaaaaaaattaaattggtgaaacttatgctggtagcatatttgctattgtattaaatttattggaagttgatggtttactatgattttaggtctctggtttccattatgactgtaggaatttgggttacttcatatcaggagctcagcttcctcatttgtatcctggaaggcttgcctactttcttggttagaatgtaatttgaacatggtaaaatatcagggaattaattcttaaaaaccattaagcctgatttgtttgggcctattaatatataacatgttgtga

SEQ ID NO: 766768 - DNA, 606 bp, Homo sapiens
cagtaatagcattgtgtctaaaaaccaatgtgcatatcttaattttaaaatattttactgctaaaaatgctaatgattgatcatatgagccttcactgagttataatctttttgctagtggatgatcttgactcagtgcttatggctactaacttatcaggctggtggttgctaaaggttggggtggctgtgacaatgtcttaaaataaaacaatgacgtttgctgtgtcaactgacatttcccttcacaaaatatttctccgtaccatgtaatgctctttgatagcattttagccacagaacttctttcaaaattacagtcaatcctctcgaaccctgccactgttttatcaactaaatttatctactattcctaaccctttgttgtcatttcaacaaagttcagagcattctcactaggagytgatttcatctcaaggaatcactttctttgctcctgcataagaagcaatcctcattcattaaagttttattatgagtttgtaacaattcagtcacttcttcaggctctactgctaattctagttctcttgctattcccatcaatctgcagtttcttcctccactacaatctggaagccctca

SEQ ID NO: 766769 - DNA, 548 bp, Homo sapiens
gaaagacatggaggacaagggaggttttgtgggccaggcctgaaaaagaggtcccatttctctggccagactgggaacagtggtgtagtagacaaaataagggctctcaaaaatgtccatgtcctcatccctatgtgaacctgtgagcatgttgccttaagtaccaaagagactttgcaggagtgattaaggtcagagtayttgtcagacctctgagcccaagctaagccatcatatcccctgtgacctgcacgtatacatccagatggcctgaagcaagtgaagaatcacaaaagaagtgaaaatggccagttcctgccttaactgatgacattccaccattgtgatttgtttctgccccaccttaactgagcgattaaccttgtgaaattccttcccctggctcagaagctccctgactgagcaccttgtgaccctgggccctgccctccggagaacaactccctttgactgtaattttccactacctacccaaatcctataaaacggccccacccctaatctcccttcgctgactcttttcggac

SEQ ID NO: 766770 - DNA, 646 bp, Homo sapiens
caagagaaaaaaacaaaccacacatatatacatatatagcactgaaaactaggaataagccatgccagatattgacaaatttcattgtagattatcaaaatatcacatcccttaatatcaccattgatttcaccaaaaaagttcttaagaacagggaaagttttcaataactctaactcacaagcttgaattttatattggtaacagttgttttccttgaagtaacaggttcgttaccttcattttcaagaaaatgtctgccaaaatccccamgtctgattcaccatagtttgcctgtcagtcactcccaagtaaaactggtgtttcatgaaaaaagcagctagtttcatttctcaactcaaacaaacatcacattttggtaagcataagtgttatacgtacttcttattttatcacacagaatattaagacgaactacacaaaagatgaagacaatagtaataatttttactgcttgatgaagtagtaaaatagtagtaacttttactgcatcatcaagcagtaaaaattatttctaattatgctagttttttaagtgaaattattgtgcctggtggggaagaatataatgactacaagtatactctggtgtcactgccttgatctgtgctgaagtgccaacagt

SEQ ID NO: 766771 - DNA, 646 bp, Homo sapiens
gtgaatgtacttaaagccactgaactgtacacttaaaattgctaaaatggtgaattttaagttatgtgtatttatcacaatgagaaatataatagcctatcaatcacagcagcatctccaaacatttgaaaagtagttgtatatgcatctgaaatctattattcatacaatcgacagttttgccccaccttcgaaatcttcastcattccacagcgagcctctgagggccatttggactttctttgggcacaattgattagaccaagaatgagcggttagccccagttggactattcagaaccttgtcctaagaatttggaatttgattttagaaacttgttattagtctctgtgtagaggtaaaggtgaggtaatattgttgggagttatagggcagtcatctttttccatgttcattttttattcaacaaatatttattttttgtctactctgtggtaggcattgtgcaggatgctgggattcagtggcatccctgccctcctgaaacagagcaagcctgaccgtagggagatgatctctaaagttatttctcatatttttgttagacctgatgttttgcacactgttttctagtaaatgaacaacacagtatgccatgattttttaaaattacatttaacttc

SEQ ID NO: 766772 - DNA, 646 bp, Homo sapiens
gtgaatgtacttaaagccactgaactgtacacttaaaattgctaaaatggtgaattttaagttatgtgtatttatcacaatgagaaatataatagcctatcaatcacagcagcatctccaaacatttgaaaagtagttgtatatgcatctgaaatctattattcatacaatcgacagttttgccccaccttcgaaatcttcagtcattccacagcgagcctctgagggccatttggactttctttgggcacaattgattagaccaagaatgagcggttagccccagttggactattcagaaccttgtcctaagaatttggaatttgattttagaaacttgttattagtctctgtgtagrggtaaaggtgaggtaatattgttgggagttatagggcagtcatctttttccatgttcattttttattcaacaaatatttattttttgtctactctgtggtaggcattgtgcaggatgctgggattcagtggcatccctgccctcctgaaacagagcaagcctgaccgtagggagatgatctctaaagttatttctcatatttttgttagacctgatgttttgcacactgttttctagtaaatgaacaacacagtatgccatgattttttaaaattacatttaacttc

SEQ ID NO: 766773 - DNA, 563 bp, Homo sapiens
aattgcttgatatttgaattttttttctttttgtgagacagggtctcactccattgctcaggctggagtgcagtggtgcaatcgtggctcactgcagcctctggagcaatcatgacttgctgcagccttgacctccaggctccagtgatcctcccacctcagcctcctgtacagctgggactacagatgtgtgccaccacacctggcttttacatttttttctggasatggggtcatctacaactatgttgctcaggcttgctatgttcccacttcagcctcctaaagtgttgggattacaggcgtgggccaccacacccagcccgaaaattgttttgataatttgtggaaaaaaagtattgtgtgggttgtgtttacatctgtcagacctgggtagcttgtgtccctctaagtggttattataaaagagtttgaagacaatagatataaggtatgtacactgctgaggcacctgttagaaatgttaaatgaagatttccattgcactctggagctgggaatatggaatggaattgtagcccacagagttgttccattcccat

SEQ ID NO: 766774 - DNA, 627 bp, Homo sapiens
tagtggacagaagatattcgggcaagaatagagagactagagggtgtttaaaagccctagctaaggaataacccaaatggataattactttaattctcttttcaaaagtccaatataatcatttgcattaagtaaaaaaattgtatataaaacatttatatgtagtatatttatataaatatataaaaatatatattatatattatatataatatataatgtttatatattgtagataacatatataaacatgtatatatatataaacatgtatatatataagcatattatatatatatatgtttgcttatattgggttcacagatacagaatgtaaaacagttttttgcagaacatttcttgaggaatacactcaggaggtgcagctatgaagaagtgatgaggaatgtctcaaatcrgtctgtgaactcagcatcacatttttttttccagccacttggggatgagtgcttcagttcagaaggaagatcagggccaaacatcatagcaagcagcactcagtaactatgcttaaatttctcaaagagctcaggcaattactgcattggaatatataaatattatatatatatatttactcatataatataaatattatatatattt

SEQ ID NO: 766775 - DNA, 600 bp, Homo sapiens
tcagtttatgttgtacaatgtagatggcctcttactaatgtaaaatgatttgtagtggaaacatttatatttttataataaacataatgaaaatattttttacagattggaatacagaagtggtctttgaagttttttaaaaatatataaaactatgtgcttatttaaacagcaaaataatgaaatttacataagtcacaaaaatatgcttctgggcttttattctccattagtgaggagggatttacattgtataatccacatgtttttggtctacatctcattatgaataagccagaaaaataatcagtaaatgttatttcaaagttaataaacacaactgtaatagrcagttctcttttgattgcaaataacagaaaacaaataaattggattaattttctaaaaaagaaaatgtttagaataagtgacagaattatctggggataaactccctagctaagagatcagacacagattgaaccaggaattcaaacaatgtcaacagggttaattctctcattctttgtcttcttcccttggccctattttttttccaactgggttgatttgcaagctatacctttctacaaggtaaaa

SEQ ID NO: 766776 - DNA, 600 bp, Homo sapiens
tcaatatttattacattgttaagcacttaaatgatttaagactaaatttaaaacttgtgatttcctttaattatgatgaagtaagattataatctgaaagaatattttatttaaaattatgatggatatctatataaatgtaagatttactgaccaaaaatggaattcattttcaatgtggatgttatttccctatttgttaatctgcagtgtgatgataagtttcccattggcttttatatttctttattttttcctttaattgtatttatatgagaaagataactagggacttcaattaggacacattggaggggtcagaamccacataatggaattaagtcatgaagtttggagatagaggcattccaagagtggagtgacctttgagaattttgtggtggaagtgaaatttatataggtctctattttgattttagagtagaaatagtgtcgtgatagtatgatttataataagaaatatgtatttgatcttcaaactgttttctggcacccagcttcttaaaagtcttgaaatctccaaagtgttaagtatcttttttatatgctaattagaggactgatggctgagagcttctg

SEQ ID NO: 766777 - DNA, 613 bp, Homo sapiens
acagagaaccactattctagggcggtgcagacaggaaatatggagttggagcccccaaacagagcattcaccagggcactgcctagtgtagctatgggaagggggcagctgccctcccgacttcaaaatggtagagctatgggtagtttgcaccttgatcctggaaaagccacaggaattcaactcttaaccatgagagcatccaaagggtctggaccctgcagagccacaggtactgagctgcccaaggccttgggagaccattccttgcatcagtgtggcctgtatatgagacatggagccaaaggagattattttagaactttaagatttaatgtctgcttcactgagtttcagacttctgtggggtctgttacctstttcttttgaccaaattctcccttttagaatgagaatgtccactcaatgctgctaccaccattgtatcttgggagtaaataacttgtatttggtctcacaggcagaagaaactcatctccagataatatttggactaagaacttagaattttgagttaatgctggaatgagctaagactttggggcactattgtgaaggcataattccatcttgaaatgtgagaagaacatga

SEQ ID NO: 766778 - DNA, 675 bp, Homo sapiens
tcaactcagggttaaatggattaagggctgtgcaagatgtgctttgttaaacaaagcttgaaggcagcatgctctttaagagtcatcaccactccctaatctcaagtacccagggacacaaaacactgcggaaggcggaaggccgcagggacccctgcctaggaaagccaggtattgtccaaggtttctccccatgtgatagtctgaaatatggcctcgtgagaagggaaagacctgaccgtcccccagcctgacacccgtaaakggtctgtgctgaggaggattagtaaaagaggaaggaacgcctctttgcagttgagacaagaggaaggcatctgtctcctgcccgtacccgggcaatggaatgtctcggtgtaaaacccgactgtatattccatctactgagataggggaaaaccgccttagggctggaggtgggacatgcaggcagcaatactgctctttaaggcattgagatgtttatgtgtatacatatctaaagcacagcacttacttctttaccttgtttatgatgcagagacctttgttcacgtgtttacctgctgaccttctctcccctattatcctatgaccctgccacctccccctctctgagaaacacccaataatgatcaataaatactaagggaactcagaggccggcaggatcctccg

SEQ ID NO: 766779 - DNA, 642 bp, Homo sapiens
gcataagcacattaataaatgtgtatgtttggcctggtgtggtggctcacgcctgtaatcccagcactttgggaggccgaggtgggcagataacctgaggtcaggagttcaagtccagcctgaccaacatggagcaaccccatttctactaaaaatacaaaattagccgggtgtggtggcgcatgcctataatcccagctactcgagaggctgaggcaggagaattgcttgaacccgagaggyggaggtttcgttgagccgagattgagccactgcactccagcctgggcaacaagagcaaaactccgtctcaaaaaaaaaaagtgtatgtttcttctcctgttaatttgtctattgtcagttcattttagcagtgaacactcagagggtggaggggaagcccctacaagagctttaaaagctactgatgcttgggtctcactcagagattctgatatattcagcccaggtgtaagattttaaaagctgcccaggtgatcctaatgccaaggctgaggcccctggaggaaccctgcagagctgcactcactactcagcaatcccaatccacacgtgaagggttaagcaggagtacatttgggtgcagggggcagggcattgttttgggactcaggggcctct

SEQ ID NO: 766780 - DNA, 642 bp, Homo sapiens
gcataagcacattaataaatgtgtatgtttggcctggtgtggtggctcacgcctgtaatcccagcactttgggaggccgaggtgggcagataacctgaggtcaggagttcaagtccagcctgaccaacatggagcaaccccatttctactaaaaatacaaaattagccgggtgtggtggcgcatgcctataatcccagctactcgagaggctgaggcaggagaattgcttgaacccgagaggtggaggtttcgttgagccgagattgagccactgcactccagcctgggcaacaagagcaaaactccgtctcaaaaaaaaaaagtgtatgtttcttctcctgttaatttgtctattgtcagttcattttagcagtgaacrctcagagggtggaggggaagcccctacaagagctttaaaagctactgatgcttgggtctcactcagagattctgatatattcagcccaggtgtaagattttaaaagctgcccaggtgatcctaatgccaaggctgaggcccctggaggaaccctgcagagctgcactcactactcagcaatcccaatccacacgtgaagggttaagcaggagtacatttgggtgcagggggcagggcattgttttgggactcaggggcctct

SEQ ID NO: 766781 - DNA, 538 bp, Homo sapiens
gtagcacataagagtacaaactggatccacaagcaattcctactgccctgaaaaaactatcctaagtccaattcacatctggaggcgagggctggagagccctgaaaaaggtaagcaggttttcaaagacgtcaacgtaaagtcgccaccgccgccgtctccgcctttaaggattaaaaaaaaaaataaaagccgcccctacctcgggcgcaagacctcagagggagagctgcggcagctgcagtggcctcaggcctttagcgtctaaagactggttgcaccccgactccacctaccgggcaaccacgccgccagccccgcctccgcctmcaccaatagcggcccggcggcccgggcacgatgaccaatcgaacgccggaggaggcgtggcgtcgctgggggaccacgcgccgtcccaacaggctggaagggtgccgccacgactggcccctccaggtaggccgccgcccgcgggcgcacagcgctacccggccagctcgctgcggcatcaacggcttctcagcgtcagcgctattat

SEQ ID NO: 766782 - DNA, 641 bp, Homo sapiens
aatcataacagtctctcagactacagcgaaatcaaattagaattcaagattaagaaattcactcaaaaccacacaactacattgaacaacctgctcctgaatgactcctgggtaaacaataaaattaaggcagaaatcgagaagttctttgaaactaatgagaaccaagagacaacgtaccagaatctcaagaatgcagctaaagcagtttatagcactaaatgcccacatcaaaaaactagaaagatctctaattaacaatccaacatcacaactaaaagaactagagraccaagagcaaacagatcctaaagctagcagaagacaagaaataatcaagatcagagttgaactgaaggagatagagacataaaaaactcttcaaaaaaaatcagtgaatccaggaggtggttttttgaaaaaattaatcaaatagatagactgttacctagactaataaagaagaaaagagaaaataatcaaataaacacaatcagaaatgataagggggatattaccactgaccccacagaaatataaacaaacactggagaatactataaacacctctatgcacataaactagaaaatctagaagaaactgataaacaccctgccaagactgaaccaggaagaaattg

SEQ ID NO: 766783 - DNA, 560 bp, Homo sapiens
cttctttacaggccctgttgatgctgtatattacatcttctttaccatcaccagcttcttgtttccatcctattagaagaaaaagtttgtaaatcctgatgctttctgtgctataatgattaattttccttttttttttttggtttaacaaagaaaacctatcataataaacagccttccccttagatatagggaaatattcccctatatctaagtattcccatcatgacgttaagttttgttctggaaacaaacatagttaaaacagaaagggaaagatggatgattccatccaaactttaataatgtagattttyttttagttcaggtattctaaaagtagatatgtttattgctctattggaaggacaaacattaaaagatgaatatttaccatcttcattcagagataattttttaccactgaatcctgaggatcaaaacacttcaagctttgaacaaaggtggaatcaaagtcaagtgttaaggtactaaaattattttcactacaatagttattcaaatccgtggtagagaaaaactctgcttttctgatctgt

SEQ ID NO: 766784 - DNA, 616 bp, Homo sapiens
gatacacccctatttttttttccattttcctagatgtggggtatccattggacatatgtaccgtactgaatttaatatagaatgtcataaattacaagatgtaacattattttatacactgagatggagaatcaaactgcaacgcagtacttccctgatcatcctgagtgattcaygagttagttatactagcctcttatttctttgaggtgtacgttttctgagggaatctgccatttctcctgccatgagttgcattgcttggctcgtgataggcatttttatttttgcatgtaattttgtaacaaatgctaacactgctttatcttctttttgtttttgtttattgagacggagtcttgctctgtttcccaggctggagtgcagtggtgcaatctcggctcactgcaacctctgtctcccaggttcaagcgattctcctgcctcagcctcctgagtagctgggattacaggcatgtgccaccatgctcggctactttttgtattttttgtagagatggggtttcaccatgttggtcaggcttgtcttgaactcctgacctcaggtgatctgccccactcagcctcccaaagtgctgggattacaggtgtgagc

SEQ ID NO: 766785 - DNA, 659 bp, Homo sapiens
tctccaagtccccactagactcaggagcccagctggcttcacccagtgtatcttgcaccagggctgcaggtggagctgcctgccagtcccgcgccgtgcacccgcactcctcagccctcgggctgttgatgggaccaggcactgtggagtgggggtggcactcgtcagggagactcaggccgcacaggatcccacagcggtggcggggggcgggaggctcaggcatggcaggctgcaggtcccgagccctgccctgcagggaggcagctaaggccyggcgagaaatctggcccggcgagaaatctagcgcggcgccggtgggccagcactgctgggggacccggtgcaccctccgcagctgctggcctgggtgctaagcccctcactgcccggggctggcagggccggccggtcgctccgaatgcggggcctgccaagcccactcccaccgggaactccagctggcccacaagcaccatgcgcagcccgggttcccgcccatgcctctccctccacacctccctgcaagctgagggagccagctccggccttggccagcccagagaatggctcccacagtgcagcggcaggctgaagggctcctcaagcgcggtcagaatgggcgccgaggccgaggaggcaccgagagcgagtgaggg

SEQ ID NO: 766786 - DNA, 659 bp, Homo sapiens
tctccaagtccccactagactcaggagcccagctggcttcacccagtgtatcttgcaccagggctgcaggtggagctgcctgccagtcccgcgccgtgcacccgcactcctcagccctcgggctgttgatgggaccaggcactgtggagtgggggtggcactcgtcagggagactcaggccgcacaggatcccacagcggtggcggggggcgggaggctcaggcatggcaggctgcaggtcccgagccctgccctgcagggaggcagctaaggcccggcgagaaatctggcccggcgagaaatctagcgcggcgccggtgggccagcactgctgggggacccggtgcaccctccgcagctgctggcctgggtgctaagcccctcactgcccggggctggcagggccrgccggtcgctccgaatgcggggcctgccaagcccactcccaccgggaactccagctggcccacaagcaccatgcgcagcccgggttcccgcccatgcctctccctccacacctccctgcaagctgagggagccagctccggccttggccagcccagagaatggctcccacagtgcagcggcaggctgaagggctcctcaagcgcggtcagaatgggcgccgaggccgaggaggcaccgagagcgagtgaggg

SEQ ID NO: 766787 - DNA, 659 bp, Homo sapiens
tctccaagtccccactagactcaggagcccagctggcttcacccagtgtatcttgcaccagggctgcaggtggagctgcctgccagtcccgcgccgtgcacccgcactcctcagccctcgggctgttgatgggaccaggcactgtggagtgggggtggcactcgtcagggagactcaggccgcacaggatcccacagcggtggcggggggcgggaggctcaggcatggcaggctgcaggtcccgagccctgccctgcagggaggcagctaaggcccggcgagaaatctggcccggcgagaaatctagcgcggcgccggtgggccagcactgctgggggacccggtgcaccctccgcagctgctggcctgggtgctaagcccctcactgcccggggctggcagggccggccggtcgctccgaatgcggggcctgccaagcccactcccaccsggaactccagctggcccacaagcaccatgcgcagcccgggttcccgcccatgcctctccctccacacctccctgcaagctgagggagccagctccggccttggccagcccagagaatggctcccacagtgcagcggcaggctgaagggctcctcaagcgcggtcagaatgggcgccgaggccgaggaggcaccgagagcgagtgaggg

SEQ ID NO: 766788 - DNA, 635 bp, Homo sapiens
ttttaaactaccctaattacaaaaatctaaattggcaaaaccaatcaaagtagcattccaactcatctaaatagatggccaaagaggtttttgttttttttttttgagatggagtcttgctctgtcacccagtgtggagtgcagcggcgtgatctcggctcactgcaaactccgcctcctgggttcacgtcattttcctgcctcagcctcctaagtagcttggactacaggcgcctgccaccacgcccggctaatttttttttttttttctatttttagtagagatggggtttcaccatgttagccaggatggtctcgatctcctgacctcgtgatccgcccgccttggcctcccaaagtgctggtattacaggcgtgagccacctcgcctggccgttttttgttttgttttgttttgttttgttttgttttgttttgtttcaatagagtcagggtstcatcatgttgcagcccagtaggtctcagccttattttacccagcccctattcaggatggagtcactctggtttgaacgactctgacattatctacgtggaaatagcatcagatcccatgggtggagggctcatttcccaagaaccccatctccccgaaactgctgaaattacagatg

SEQ ID NO: 766789 - DNA, 563 bp, Homo sapiens
cttcaaaatcctctgggtgcactggagaagaaatgagcaaagtgaagcaaatgttttcctctttgaaaacaggaaagttgagaatgaacactaagatataaatcctctgttctgtgtggaggaaacagtgaacaaaggaactcttatttaaacaaagataaatcagagtamtaggaaacaactccccacaagcagcatctcaccagctcccgacatagccagtttgcccactgcaaatggccaaacattaagcgtacaaattgcatgcgataccaccactaactttatagcatctgtggaatgctgacaaaaacacaggagaccagcactttgggaagccgaggcatgcagatcacaaggtttggagattgagaccatcctagctaacatggtgaaaccccgtctctactaaaaatactaaaaattagccaggcgtggtggcatgcacctgtagtcgcagctactcaggaggctgaggcaggaaaatcacttgaacccgggaggcggaggttgcagagagtcaagatcgcaccactgcactccagcctgggagacagagcaag

SEQ ID NO: 766790 - DNA, 563 bp, Homo sapiens
cttcaaaatcctctgggtgcactggagaagaaatgagcaaagtgaagcaaatgttttcctctttgaaaacaggaaagttgagaatgaacactaagatataaatcctctgttctgtgtggaggaaacagtgaacaaaggaactcttatttaaacaaagataaatcagagtactaggaaacaactccccacaagcagcatctcaccagctcccgacatagccagtttgcccactgcaaatggccaaacattaagcgtacaaattgcatgcgataccaccactaactttatagcatctgtggaatgctgacaaaaacacaggagaccagcactttgggaagccgaggcatgcagatcacaagrtttggagattgagaccatcctagctaacatggtgaaaccccgtctctactaaaaatactaaaaattagccaggcgtggtggcatgcacctgtagtcgcagctactcaggaggctgaggcaggaaaatcacttgaacccgggaggcggaggttgcagagagtcaagatcgcaccactgcactccagcctgggagacagagcaag

SEQ ID NO: 766791 - DNA, 641 bp, Homo sapiens
gtagggtgattatagttaacaacaatgtaggctatatatatatattttgtttgtttgtttgtttttgtttttgttttttgagacagagaaaagtatatcaaaaacaaagatggtctataaaatctaccatttttattccctaaattatcaatatcatttttacacatgccttattacatatgtgctgtgaatacatccaccataactcatgttttgatgtgtaaatacatgagtgtaaacaggcaattcccctaaataaaacctaatatacagaaatctaaattaacaaataaaaaagattatttatggccaggcattgtggcttatgcctgtgacccagcattttgggaggccgaggtgggagggttgcacaagcccaggagttggagaycagtctgggcaacacagggagatcccatctctacaaaaaatgacgaaattagttgggcctgatggcatgcaagccgatagtctcaggtacttgagaggctaagaggatcacttgagtctgagagatcaaggctgaaagtgatacctaattgatggtgccactgcacttcagtctgggcaacagaacaagactctgtctcaaaaaaaagaaaaagaaaggaaaagattatttaaatttgagttgatatttt

SEQ ID NO: 766792 - DNA, 510 bp, Homo sapiens
tctcacatcatacttgcttggatagatcacacccctagttaactgcaactccccacctgctccgtgcctgcagccatgcagttaaaagacataaaactgtgctagctggtctcctattaaatttgggaccatgaattttcatgcagtcttycatgctgcccagcagtcatacagtgtttccctaatcccttctctctcacattctcccctagattattttatactttctcctctcccttatttaacacttcctccctacagctttgctgagatagttgaagcaatcagaagaaatcatccccacctccctcccctataactgcccatctgcacctgtgcccacactccaaccttcccttcttcttaggaatcacctgtctctgctgctggtgaagtcccaccacctgtgcacttagagtcacccctgactcatgctcaaggacaggttctgccattctcatctctctcttctgcatcctcagtctccccctcctgatgataattcccata

SEQ ID NO: 766793 - DNA, 615 bp, Homo sapiens
tcctaagtctctggaaggatgaggtttttaaatgcacctttccccagggcaaggggtgctttttaactttaatttttacaaaacagccaaactactctttcaagaacaacaagaataacaaaatcttccccaaggagacctctttccagatggtaaaaggctggcataattattttaaaattctccctccctgggcatcctgttaacacaaatgtaaacctggatttctgcctcaggcttgtccctcctgatgtgttcacagtgttaatgaatgacatcattctctacctgggtgaccaaggcagaaacctgggagtcaggtttggctcttcttttagacttgtctrccacatccaagcaattagcaagtcttgtcatttctacctcctcaatatcaaccggttatgtccactgccttccaacctcattcccactaagttccctaatgtctcctctgaattttatggcgaatccttctgatttggtgttcacattatggtctggatatttactaaactgtaaatgtgatcgtatgacttgtctacatacagcttaccagtgacttctcattgtttttaggccgaaatccagaagcagtccagcatcttcctcact

SEQ ID NO: 766794 - DNA, 637 bp, Homo sapiens
catgctttgggtcatttaacacaattaattcacataaatataattcgtataaaaatttttatctgtaatatcaggtgaagtacctctgaaattattttgtgctgagttgacttttcttttctttttttttttgagatggagcttcactctgtcacccaggctggagtgcagtggcgcaatctcagctcactgcagcctccgcctccggggttcaagagattctcttgcttcagcctcccaagtagctgggattacaagtgtccactaccatgcctggctaatttttgtatttttagcagagrcggggttttgccatgttggccaggctggtcttgaactcctgacctcaggtgatctgcccacctcggcctcccaaagtgctgggattataggtgtgagccactgtgcccagctgagttgacttttgttagtttgagttgctaagaaatacttagtatatacattcttactacatttttcctgatttgaaaaggaaaaaaaagtctgttttctctctccctagcaaactatacatcccaagctccctagaacatattttacacatagaaatacctttttactgttatagacatgtttatgaaagtttctcgagcactgaaattttctaaataaaatt

SEQ ID NO: 766795 - DNA, 624 bp, Homo sapiens
taaatggagaacagctccactgcttcttttctcttgagcacattgtctgtgaaccaatgtttaggtgggttttcagcgacaatcaaggtgtccctccagagtgtctggggtgcaagaagcaatgacaggaaagcaatctcggagaaggaaaggaaagcaaatgggagagcaggaggaacaaagagggggaagaaaaaagatacacagaagaaccatctattgatctagaatgtttggaaatgtttattttggttgacagaaggctgcccttcatctcattcacagtcaaacaagtcttaaagatgtcatttaacaccaaaactaaactgggcatcagttaatttgtttcatatcatgatcaaagtcttatgattttaacttctagttrttattgtgaatctctaagaaaaactctggttctattgagtccagatagatggattttactgcattcattgtataccatggacaattgtttcagatgccatttgttgtcccgagttgtcatgtcctagcctgcctcactggttccaatctattatttcaacagaaaagagataacatttccatggaagaggaaacaggaaattccaacagatcagcaacaggtggagtgctaacctg

SEQ ID NO: 766796 - DNA, 668 bp, Homo sapiens
cttgctctgtcacccaggctggagtgcaatggcgcgatctcggctcactgcaacctccgcctcccaggttcaagcgattctcctgcctcagcctcccgagtagctgggattacaggcacccaccaccatgtctggctaatattgttatttttagtagagayggggtttcaccatattggccaggctggtctcgaactcctgacctcaggtgatacacctgcctcggcttcccaaagtgctgggattacaggcgtaagcactgcacccagccaaggtgttttttgtttgtttgtttgtttgtttttaaataacggaacatttactgtatgacttggccataaatacgaggtgtttatccaagtaaaatgatagcttatctctatacaaagatacgtacataaattttcctagcatctttatttgtaatagccccaagctggaaacaaagcaaatgtttgtcaatagggtaatggataaacaagctgtagtaaatctttatgtattagtttgttagggctgccataacaaaataccccttagtggcttcaacaacagaaatgtattttctcagttttggaggctaaaagtccaagatcaagatgtcagtaggtttgatttctcctaaggcctctcttctgtggttgccttctccttgtgttcttattatg

SEQ ID NO: 766797 - DNA, 668 bp, Homo sapiens
cttgctctgtcacccaggctggagtgcaatggcgcgatctcggctcactgcaacctccgcctcccaggttcaagcgattctcctgcctcagcctcccgagtagctgggattacaggcacccaccaccatgtctggctaatattgttatttttagtagagatggggtttcaccatattggccaggctggtctcgaactcctgacctcaggtgatmcacctgcctcggcttcccaaagtgctgggattacaggcgtaagcactgcacccagccaaggtgttttttgtttgtttgtttgtttgtttttaaataacggaacatttactgtatgacttggccataaatacgaggtgtttatccaagtaaaatgatagcttatctctatacaaagatacgtacataaattttcctagcatctttatttgtaatagccccaagctggaaacaaagcaaatgtttgtcaatagggtaatggataaacaagctgtagtaaatctttatgtattagtttgttagggctgccataacaaaataccccttagtggcttcaacaacagaaatgtattttctcagttttggaggctaaaagtccaagatcaagatgtcagtaggtttgatttctcctaaggcctctcttctgtggttgccttctccttgtgttcttattatg

SEQ ID NO: 766798 - DNA, 668 bp, Homo sapiens
cttgctctgtcacccaggctggagtgcaatggcgcgatctcggctcactgcaacctccgcctcccaggttcaagcgattctcctgcctcagcctcccgagtagctgggattacaggcacccaccaccatgtctggctaatattgttatttttagtagagatggggtttcaccatattggccaggctggtctcgaactcctgacctcaggtgatacacctgcctcggcttcccaaagtgctgggattacaggcgtaagcactgcacccagccaaggtgttttttgtttgtttgtttgtttgtttttaaataacggaacatttactgtatgacttggccrtaaatacgaggtgtttatccaagtaaaatgatagcttatctctatacaaagatacgtacataaattttcctagcatctttatttgtaatagccccaagctggaaacaaagcaaatgtttgtcaatagggtaatggataaacaagctgtagtaaatctttatgtattagtttgttagggctgccataacaaaataccccttagtggcttcaacaacagaaatgtattttctcagttttggaggctaaaagtccaagatcaagatgtcagtaggtttgatttctcctaaggcctctcttctgtggttgccttctccttgtgttcttattatg

SEQ ID NO: 766799 - DNA, 615 bp, Homo sapiens
agcacctgctattttgcttgtgctgcactgctgtcctcctttcccctggaggaagcacctccagtcttttggtaactgttcctttccctgctctcatcatggggatgcaagaagaatacctgcttttttagacacaattgattggctgatgggtgggcacttcgaacctagtttgtccaatcagatcactttcttggggtttttcttactaaaactgtgatgagttacatcatgctggagatagaagctatgggatgaagagtttctgactggtggtttccatgttttcttccatctggagaaagttagtgtgtgctgagagagaatgaagcccacacagagagaggcagaaatgacagctggagrgagaggtttggcattgtttgaggttctggttctggtttcatttattcctgagaaccagtgatatccctgacctttccataattttcatttttccacatttccttatattttttgtgctaataatttcctcatttatcaagttaattcaagttaggctcctgtcataccaaacaccgtccacagtttgttatgtatttaagacatatatttctaatttctctttcaatgccggagatcctgaaatatctc

SEQ ID NO: 766800 - DNA, 490 bp, Homo sapiens
tgaagctgtttccatctcccagtggtggtatatgatttatccttggaggaaatctgctattttgcttaggaaaatcctttaaagagatttttggctatgtttatgaaagggcagacccaaggcctagaaggagaagttgaaccaggaaagtgaaattgcccagtagagtggattttctttcttgggggcaaagatggttatgatgttaatttagggctgccctgagaacaccagaggcaaggacttayagctctgagaattgaagggaaaaatacatgacaaaggtgactttaatttgaagaagatgtaggccctagcaacatagttttagcctaaggtttaaagaagaaaatagcccctatcctgtaaatgctgtgagaagcttagggtgcagagatgtctgagatccactttttagttttcctgtgctgtgtatcgtccttggtccttggatgcctttagttaagagtggtacatacaacaggggcaa

SEQ ID NO: 766801 - DNA, 589 bp, Homo sapiens
gtgtgtgtgtgtgtgtgtttctttgcagccttagccatggtggagctcagtgttaggcagaagagcaaagaatataagcacgtgctttacagtgacagaacagtcccagatgggttgccacataaaatgcaggatgcttagttaaatttgaatttcaaataaacaataaaaaaaatttagtataaatatgccccaaatattgcatagggcatccttatactgaaaatgatttgttatttacctgaaatttaaatttaactgggcatcttttaattttatttgctcattctggcagccctgagtcccagggttagctgctcataaagaaatagagtgtatacacagttattttatacaatgggcagagagagatgaatctcaccacttaggatttcatgtacaattagccccttgtatagacacttaacttgcacctctggaagcayaagctttatgtggtaacttgtcaaggtcagagcatccctggaccagcatttgaagaagacgtgtgcctaagtaggaaaatcgtttttcttctctgctcatgcagacagcatagttagtaattgagtaaatgtctttgacatta

SEQ ID NO: 766802 - DNA, 626 bp, Homo sapiens
tgagaactaccacacacacatactaagctatatacatgctgtgactatttttatttttaagagggggtggcagtcaagacaatgtggtttcttttacaggtaacactacaattcaattttaatgtctttttccctctcatgtcacctttattttttggttcttttgaataacaaggaaaaagataaatcgagagtcataaagagttctttggggtaaactgaggggatataaccacctaattatgaatttcctgaatgtgcaacttgaccagcagcaactggacgtgattagtatggtgggcctcacctccagctgttctacaaaaacaagtcagtgaaggatttccaaggcacattttcctctggacttgttttaagtttaacaatgcaaacagtgcrtgttgctcttttttttttttttaataggtgacagattgtcagaaaagaaacaagagttttctacaacaaaaaactggcttatggaacatatacttctgcttgagttgaatgtgttgggctgagtgtaagaaaatgcaagctgcaaatctgtcttacatgtggaaccaaagctggaaatgtgtgctttagaggcaactgtaaaattgtatttccttctggcatatggg

SEQ ID NO: 766803 - DNA, 632 bp, Homo sapiens
agaaccagcttttggtttcactggttttcccagtctctatttcattaacttttgctttaatcttgattacatccttccttttgctgtcttcaggtttagtatgcttttctttttccagtgtcttatggtggtgaatcgattactgatttgagagctttctttttattgtaggcattaacagctataaatttccctagaagcattgcttgagctttatcccatacattttggtatgccatgtcttcattttcattcatctcaatgtatttcttagtgtattytcttatttctcttttgatttcctcttcggcccactgactatttaagagtgagctgtttgtgggttttctaaatacctttctattattgactctaatttcattctattgtggtcagagaacatactgtgtattcattctatcattttaatctattgaggtttcatggcctagcgtgcagaatgttcctagtgtagttgagaagaatattctgctgttgttaggtgcagtgctcatcactggaaataaagatcacaaaaaatgtatattctgtgtactttttttcttttttttttttttaagataaggtctcactctgtcacccaggctggagtgcagtggcatgatcttgtc

SEQ ID NO: 766804 - DNA, 583 bp, Homo sapiens
aaaaggggcacagactgaagatgaatggctactcatctagaatgagaggagcaagcgtcccttattcttttctcttcctagacaatatccagcttatgtgagggagagaaggaagaggctttcattttctttcttctgtccttatatccctgagtcctggcgaccacaacagggtgcaacccatgggtgtcaatgtggcttttcacccatgttaacagaggggctgggggtgggattatccactcttacccacatactgcctttctccctgctgtcagtagccttcaggttccctatatctcatttatgccatggatactagcatgacctctatccttgaaatgggagtcttggtttaatcggcaagaattaatcatgctcatgtgagctgtcccttttracttctgttgtcttatgcctctggatccctcagatccagttttctttcctagagcttcaacccaaagcttggaatttaggttgggacaaaaatttgtctcagcagggtgcacggactcattaagtcccaggtgaagctgtggaactgggtcctcttccaacaaggagagaaaagggagtcttg

SEQ ID NO: 766805 - DNA, 538 bp, Homo sapiens
tttcatggaaataaaccatacacagaagttattacattaataagttggctgaatcactaaatcaaagtacaggtcaaataaaaccctagaaaaaagtaaaagctcaaaatagctatcaataagtaaacttttcagcagcaaactttcattttaccataaaagagaagcaactgaggagagacacatattgaacttgcttcacgtgcctcctttgccttgactataagcctcgtgtttccagtagagagctaaggagcagaatggcactagaggagtgcgttttcactagagaagcactgcctctaatactccyctctggggtgactccatgactttcagtagctcaatttcctcaacaactgaaacagctgttttagaaaataagccaactcatctacaggccttaagttatacaactgcagagagaagaggtgccaagttcaggaagcccaacagagaccaaatcagagccagacgctggggaactccaggtttaatatgccttccactactcacttccacactccaagaaatgtct

SEQ ID NO: 766806 - DNA, 621 bp, Homo sapiens
tcagggattatactagtactttagagttagggagtaattaaatgagattatattagagaggcttagacaacaattttaatgttaatagttatataattattaatagtgttaaatacatatttaaatagtatttataaattataaaagataaattatattataatgtataaacactttaaatacatattatataagcaccatttatatgtttkatatttaaagttaaatataaaatgctatttatatagcatttatatagtatgtatttaaagaataattagcacatcatgatttcatgagtattatagcccaggataaagctaaagtagttagaactttaaggtcaatataaagacaaacattaagttaacaactacatagatggtatgtagatttggcaaaattcatgaaggtagtaatcaaataactaaagtttgaaagctactgcaaaaaggaaggtaatgtgcttaacatagtgtctggcacatcgcagatgttcaagattcattcaaaactatcattaattttcttaggggcttttgaaattacgttgtagatcttttcttgataaccaaggaactgcctaacaatggaacccagaaagaatgagaactgaggtag

SEQ ID NO: 766807 - DNA, 607 bp, Homo sapiens
ccagataaaaggactccgatttctaatgtggcttaaaatttgcttgagtctttatgacagagtcaatacctccaagtagacatttggagccacattttcagttcattgccagccacatccaaatggctccatgttatttatagcactccagtattctatgaccacaacctgtcactttgaaaacagcatttgcagccgggcgyggtggctcgtgcctgtaatcccagcactttgggaggccgaggtgggaggatcacgagatcaggagatcgagaccatcctggctaacacagtgaaatcccgtctctactaaaaataaaaaaattagccaggcgtcgtggcgggcgcctgtagtcccagctactcaggaggctgaggcaggagaatggcgtgaacccgggaggcagaggttgcagtgagtggagatcgtgccactgcactccagcctgggcgacagaacgagactctgtcttaaaaaaaaaaaaagaaagaaagaaagaaagaaaatagcatttgccagtgtcttataggaatttgatctattaaggaacccaaaatattttgtcctctcaatttccaattctgccttcctcaatgtgggtttttt

SEQ ID NO: 766808 - DNA, 481 bp, Homo sapiens
ttttaaaaaggcaatttaatgcaatttgtttcaaaatgtcatattttagcatatttagagctgtcagcaactgggtcatcaacagcaaaataaccagtatggatttttcagctacgttaattagatttgcctcttagaatcgcttgtatgtaatgatgttaatcagtgratgacattccctttagactggccagccctgcctctccagtccctgctgaagtggacaataatttgtggcctgaaatggcttcttttttatatagagtgagtgtgaactgataatcaatgctagtagctgagccaaagaaatagaggtgattgaagtgtgaagatggaaaaattagcatctccttctatcaaagttgtaggagaccagggcacaaacaccttgtgcttactaggtggaggaactggggaagcaacaggggataagggtaggttctttcacgggatccactccaataagaaaaaaaaaaaatga

SEQ ID NO: 766809 - DNA, 622 bp, Homo sapiens
atacgcctaattacataatgaattaagtacctaacagtggttgcctctgaagagaaggaatgggaattaggagagaatttaaaaagaactgttatggtttacttgaaaattatcacattttctttggagtaacctgaaccaaaggattttaaatgtattaataaaaatatcattaaattgtaattatttamttatatttgtcacttaaacataatgttgtacaatctgttttcttagccattatattaaatgggttcttttttttgtttgctttgtttttttgagatggagtcttactctgtcacacaggctggattgcagtggtgtgatctcaggtcattgcaacctccgcctcccagtttcaagtgattcttctgcctcagcctcctgagtagctgggattacaggcatgcaccaccacgcctggataatttttgtattttttagtagagatggggttttgctatgttggccaggctggtctcaaactccaggcctcaagtgatccaactgccttggcctcccaaagtgctgggatcacaggaggttcaattattgaggttagcgcataactatgaataaaaataggttttaaaggtatagcatattctatttaataaat

SEQ ID NO: 766810 - DNA, 623 bp, Homo sapiens
aataaaggaattcagttgacatggatttggcactcacccagcactgtatgtgccattgctactagagtgtcttcctggatgtcccataggcacctgatgatcaataagtcccaaattggcttcagtccccacttgctgtgcagacatgccctgcctgtccctgtgcacagaacagccatctatccagggatgttcatatatrtcatctcattcaatcctcacatccacccataaaatagaaattatcacccctagtcaatacatgaagaaactgaagctcagagaggctaagtgcaacagctcgggctgccataataaaataccatgggtggggcgatttaaacaacagacatttattttcttacagttctagaggctagaagtccaagatcaaggtgttggcagagctagctcctcctgagggctgtgagagactcactccttggcttgttgatggctgtcttttccctgtgtctccttgtatcatctttcctctgcacggctctgtgttcacttttctctttttataaggacaccagtcatgttggattacagcccaccttaatgacctcattttagcttgactacctttgaaaagaacctatctctaaataaagccacat

SEQ ID NO: 766811 - DNA, 620 bp, Homo sapiens
acttttcctaagtctctggaaggatgaggtttttaaatgcacctttccccagggcaaggggtgctttttaactttaatttttacaaaacagccaaactactctttcaagaacaacaagaataacaaaatcttccccaaggagacctctttccagatggtaaaaggctggcataattattttaaaattctccctccctgggcatcctgttaacacaaatgtaaacctggatttctgcctcaggcttgtccctcctgatgtgttcacagtgttaatgaatgacatcattctctacctgggtgaccaaggcagaaacctgggagtcaggtttggctcttcttttagacttgtctrccacatccaagcaattagcaagtcttgtcatttctacctcctcaatatcaaccggttatgtccactgccttccaacctcattcccactaagttccctaatgtctcctctgaattttatggcgaatccttctgatttggtgttcacattatggtctggatatttactaaactgtaaatgtgatcgtatgacttgtctacatacagcttaccagtgacttctcattgtttttaggccgaaatccagaagcagtccagcatcttcctcact

SEQ ID NO: 766812 - DNA, 588 bp, Homo sapiens
aatgtcaaagacatttactcaattactaactatgctgtctgcatgagcagagaagaaaaacgattttcctacttaggcacacgtcttcttcaaatgctggtccagggatgctctgaccttgacaagttaccacataaagcttrtgcttccagaggtgcaagttaagtgtctatacaaggggctaattgtacatgaaatcctaagtggtgagattcatctctctctgcccattgtataaaataactgtgtatacactctatttctttatgagcagctaaccctgggactcagggctgccagaatgagcaaataaaattaaaagatgcccagttaaatttaaatttcaggtaaataacaaatcattttcagtataaggatgccctatgcaatatttggggcatatttatactaaattttttttattgtttatttgaaattcaaatttaactaagcatcctgcattttatgtggcaacccatctgggactgttctgtcactgtaaagcacgtgcttatattctttgctcttctgcctaacactgagctccaccatggctaaggctgcaaagaaacacacacacacacacac

SEQ ID NO: 766813 - DNA, 489 bp, Homo sapiens
tgcccctgttgtatgtaccactcttaactaaaggcatccaaggaccaaggacgatacacagcacaggaaaactaaaaagtggatctcagacatctctgcaccctaagcttctcacagcatttacaggataggggctattttcttctttaaaccttaggctaaaactatgttgctagggcctacatcttcttcaaattaaagtcacctttgtcatgtatttttcccttcaattctcagagctrtaagtccttgcctctggtgttctcagggcagccctaaattaacatcataaccatctttgcccccaagaaagaaaatccactctactgggcaatttcactttcctggttcaacttctccttctaggccttgggtctgccctttcataaacatagccaaaaatctctttaaaggattttcctaagcaaaatagcagatttcctccaaggataaatcatataccaccactgggagatggaaacagcttca

SEQ ID NO: 766814 - DNA, 614 bp, Homo sapiens
gcacctgctattttgcttgtgctgcactgctgtcctcctttcccctggaggaagcacctccagtcttttggtaactgttcctttccctgctctcatcatggggatgcaagaagaatacctgcttttttagacacaattgattggctgatgggtgggcacttcgaacctagtttgtccaatcagatcactttcttggggtttttcttactaaaactgtgatgagttacatcatgctggagatagaagctatgggatgaagagtttctgactggtggtttccatgttttcttccatctggagaaagttagtgtgtgctgagagagaatgaagcccacacagagagaggcagaaatgacagctggagrgagaggtttggcattgtttgaggttctggttctggtttcatttattcctgagaaccagtgatatccctgacctttccataattttcatttttccacatttccttatattttttgtgctaataatttcctcatttatcaagttaattcaagttaggctcctgtcataccaaacaccgtccacagtttgttatgtatttaagacatatatttctaatttctctttcaatgccggagatcctgaaatatctc

SEQ ID NO: 766815 - DNA, 600 bp, Homo sapiens
ccaagaagagaaaaagatccaaataagctaaattagaaatgaaacaggagatatcacaactaatagcacagaaatacacgattcaaggctactatgaacacctataagtgcctaaactagaaaacctagagaagatggataaattcctggaaatatacaatcttcctagattaaactaggaaaatatagaaactgaacaggccaataacaagcagcaagattgaaattgtaataaaaaaaaattgccaacaaaaaaagtccaggaccagatggagtcacagctgaattctatcagatatttaaaaaattggtatgaatcctattgacactattccaaaagakagagaaagagggaatcccccctaaatcatctatgaagccagcatcatcctaataccaaaaccagggaaggatataacaaaaaaaaagaaaatacagaccaatattcctgatgaacatagatgcaaaaatcctcaacaaaatactagcaaactgaatccaacagcatatcaaaaagataatccaacatgatcaaatggatttcgtaccaggattgcagggatgctttaatatatgtaagtcaataaatgtgatatacca

SEQ ID NO: 766816 - DNA, 557 bp, Homo sapiens
actccaactgttgctgatctgttggaatttcctgtttcctcttccatggaaatgttttctcttttctgttgaaataatagattggaaccagtgaggcaggctaggacatgacaaytcgggacaacaaatggcatctgaaacaattgtccatggtatacaatgaatgcagtaaaatccatctatctggactcaatagaaccagagtttttcttagagattcacaataataactagaagttaaaatcataagactttgatcatgatatgaaacaaattaactgatgcccagtttagttttggtgttaaatgacatctttaagacttgtttgactgtgaatgagatgaagggcagccttctgtcaaccaaaataaacatttccaaacattctagatcaatagatggttcttctgtgtatcttttttcttccccctctttgttcctcctgctctcccatttgctttcctttccttctccgagattgctttcctgtcattgcttcttgcaccccagacactctggagggacaccttgattgtcgctgaaaacccacctaaac

SEQ ID NO: 766817 - DNA, 557 bp, Homo sapiens
actccaactgttgctgatctgttggaatttcctgtttcctcttccatggaaatgttttctcttttctgttgaaataatagattggaaccagtgaggcaggctaggacatgacaactcgggacaacaaatggcatctgaaacaattgtccatggtatacaatgaatgcagtaaaatccatctatctggactcaatagaaccagagtttttcttagagattcacaataayaactagaagttaaaatcataagactttgatcatgatatgaaacaaattaactgatgcccagtttagttttggtgttaaatgacatctttaagacttgtttgactgtgaatgagatgaagggcagccttctgtcaaccaaaataaacatttccaaacattctagatcaatagatggttcttctgtgtatcttttttcttccccctctttgttcctcctgctctcccatttgctttcctttccttctccgagattgctttcctgtcattgcttcttgcaccccagacactctggagggacaccttgattgtcgctgaaaacccacctaaac

SEQ ID NO: 766818 - DNA, 501 bp, Homo sapiens
ggtcaactgggggacaaaataaaaggctctcttggttggttggttctgcacagatcctgaaagcaggcttcaggcctatactataacaatccctctgactttggcaataaaatgaaggagaaacatcacagaaaataccaaaggaagaaccagtcaaatcccattatcacaaactcccagaaatttgtttaattattttaatattttcaatatagctgactggagtgaacattagttaacatgagtaagtgataaattggatctaaattgtcatttgtatctatasagatgttgctataaagaagtatgtccaagttagattttcacctaggcaggttgggaaaaaaaagatgaaaaaatatgtgcattctaactattttctacaaactatatacatagtagattattccattgttgacacttctgaatcatatggccatggaaattaaggggatcccttaattgaacccctcaattgaaagaggagcaaactaaagcaca

SEQ ID NO: 766819 - DNA, 634 bp, Homo sapiens
cttagtgccattatgatttggtttgctactgttgtaagagagttaatttcctgtgatccattgttgccattcttagtgatctccccctcttggagcataatatttttgtacaaactagggaaggtggtaataatataattgaataagaatatgmgttttaaggaaatagttctaattaaagtactttttcaaatgtcactgaaagaattgtttttgtaacagtatgcaaaatgatactgtattgttagaacaaaaatctgtggagtgttaatactttgtaagccaaattaaagtttctaagcagtataaaatgagaatgacatcatcctttcctagtatttccaagtcttagagtacattttcacaagtaaggtataattcttgagtgattttgcaggagaatagaaaagagtataatcacttgttctccttaaacattaaataggggtagttttaaacatctttgttctggagagttgtagatgagacattaggcttgatttcttttcttcacttgtaaaggagaacctattgttttcagtatttactaaaattttgactttacggaactttaaacctgaaagggattttcaagatcttttttagaaaatgagatgtcagttctatcttctaa

SEQ ID NO: 766820 - DNA, 619 bp, Homo sapiens
tgtgtctgctataatgcagtggctccaatactgcccccagttcctgatactcttcttctgtgatttactaatttttgttgtcaaaattacccaagatcagctctttcactttttaagatatttttatcacataacatttaaaattatattttattactttaaaaatgttggttcattgcatataaaattttccaaatgcagccaggtgcggtgtctcatgcctgtaatcccagcattttgggaggctgaggcgggtggatcacctgaggccgggagttttaacccagcatgtccaacatggagaaaccccttatgtattaagaatataaaattrgccaggcatggtagcgcacgtctgtaatcccagctactcaggaggctgaggcaggagaatcgcttgaacctgggaggcagaagttgcagtgagccgagattgtgccactgcactccagcctgggtgacagagtaagactctgtctcaaagaaaaaaaaaagaaatttctaaaagcacaaacaataaaaaactcaataaaaaatctccactattcagagaaaactactattagtatcttactgtctgtccttccagatatagtcaacagatattgactaagtgcct

SEQ ID NO: 766821 - DNA, 619 bp, Homo sapiens
tgtgtctgctataatgcagtggctccaatactgcccccagttcctgatactcttcttctgtgatttactaatttttgttgtcaaaattacccaagatcagctctttcactttttaagatatttttatcacataacatttaaaattatattttattactttaaaaatgttggttcattgcatataaaattttccaaatgcagccaggtgcggtgtctcatgcctgtaatcccagcattttgggaggctgaggcgggtggatcacctgaggccgggagttttaacccagcatgtccaacatggagaaaccccttatgtattaagaatataaaattagccrggcatggtagcgcacgtctgtaatcccagctactcaggaggctgaggcaggagaatcgcttgaacctgggaggcagaagttgcagtgagccgagattgtgccactgcactccagcctgggtgacagagtaagactctgtctcaaagaaaaaaaaaagaaatttctaaaagcacaaacaataaaaaactcaataaaaaatctccactattcagagaaaactactattagtatcttactgtctgtccttccagatatagtcaacagatattgactaagtgcct

SEQ ID NO: 766822 - DNA, 619 bp, Homo sapiens
tgtgtctgctataatgcagtggctccaatactgcccccagttcctgatactcttcttctgtgatttactaatttttgttgtcaaaattacccaagatcagctctttcactttttaagatatttttatcacataacatttaaaattatattttattactttaaaaatgttggttcattgcatataaaattttccaaatgcagccaggtgcggtgtctcatgcctgtaatcccagcattttgggaggctgaggcgggtggatcacctgaggccgggagttttaacccagcatgtccaacatggagaaaccccttatgtattaagaatataaaattagccaggcatggtrgcgcacgtctgtaatcccagctactcaggaggctgaggcaggagaatcgcttgaacctgggaggcagaagttgcagtgagccgagattgtgccactgcactccagcctgggtgacagagtaagactctgtctcaaagaaaaaaaaaagaaatttctaaaagcacaaacaataaaaaactcaataaaaaatctccactattcagagaaaactactattagtatcttactgtctgtccttccagatatagtcaacagatattgactaagtgcct

SEQ ID NO: 766823 - DNA, 619 bp, Homo sapiens
tgtgtctgctataatgcagtggctccaatactgcccccagttcctgatactcttcttctgtgatttactaatttttgttgtcaaaattacccaagatcagctctttcactttttaagatatttttatcacataacatttaaaattatattttattactttaaaaatgttggttcattgcatataaaattttccaaatgcagccaggtgcggtgtctcatgcctgtaatcccagcattttgggaggctgaggcgggtggatcacctgaggccgggagttttaacccagcatgtccaacatggagaaaccccttatgtattaagaatataaaattagccaggcatggtagcgcacgtctgtaatcccagctactcaggaggctgaggcaggagaatcgcttgaacctgggaggcagaagttgcagtgagccgagattgtgccactgcrctccagcctgggtgacagagtaagactctgtctcaaagaaaaaaaaaagaaatttctaaaagcacaaacaataaaaaactcaataaaaaatctccactattcagagaaaactactattagtatcttactgtctgtccttccagatatagtcaacagatattgactaagtgcct

SEQ ID NO: 766824 - DNA, 534 bp, Homo sapiens
ttttatatatgaaaaatcaattttttagtttaaaaatatcatttagagctgtattaggctgcaagtaacagaaaactaggtgcattatttttccattgctgtgtaacaaatgatcacacacttggtggcttaaatcaaacaaatttatcatcttacagttctggaggtcagggggccaaaaggcatctcattgggccaaaatggaagtgccttcaaggctgtgcttccttctgggggctccaagggagcatctgtttccctgccttgtccagtctctagaggctgcctgtattccctggctcacaatccctttctctgttttcaaagccagcaatgacaggctgagtygtttgcatatgtgcactcccacctttgcttttgttatcacacctccttctctgaatcagatctctctcttgcctccctcttccactttctttttaaagccagtgtctcactttgttgcccaggctggagtgcggtggcacaatcatagcttactgcagcctcaaccttctgggctcaagcaatcct

SEQ ID NO: 766825 - DNA, 520 bp, Homo sapiens
acaccctatgcaaatgtctgattggttgcggaaggtgacctatcagaggctgaagtgaagttacaacgttatactcctatgcaamtgaagacttggcctgtgaccagcccgtttggttgcagaaggggaccaatcaaaggtacttttaatttttcgtctgccatccagaaaaaagcagggggcttgcaaagggagtagcctctggtcttttgttacttgggcatggaaagttggggttttccttttgactgagttataggaagtcagtgtgaattgaccttaggttccctccctccagaccctattctcctgcctcaataataattcactaagccagactttcgtttagtgacggttttctgttatctgtattttattgtagatttctaaagatttttttaagttttttttaaaagatgtattttaaaaaccgtgtttcagtcgtaagcttctctgacattctgatcaaagtccttaccagaaaactgtatcaacatctgattatttcttgtggtgttga

SEQ ID NO: 766826 - DNA, 586 bp, Homo sapiens
tacttcttaactgaattatcatagtcctctctcaggttctagattgcctcatatccagtatattctccacctgactgatgattgattgtattgaaatatagatatgaacatgtacttcttgcctacaaattatttgacagcttctcaatgtcagcaaataaattccgtgctccttagttgagcacaatctttcctaatctacctcctgtctagctcactagtctcatcccttcactcctctagaaatacgcttagttccagttttattgaagtagttatttttaaaaactagcagattatttccctcacctgggccttcattcatgctattttcttgtacagggttaacaactcatttcacgtgattttagcttaaatattagcttttcagaaaggccttcttgacaactctwcctaaagtagccctgagttaatcctcttatatattggctcccctgtatcatgtcatcctgtcactgcctttttctttgttttcttgtgtaatgtgagtctctcccattggaatattgcaccctgaagcagggaaattgtctgttttggtcactgttttatcctttgagtttaa

SEQ ID NO: 766827 - DNA, 641 bp, Homo sapiens
tatccaaaaagagaaaagcaaaacagaaacacatacatcttctaagagattgtgggagaataaaggattccattgagccaacaaagcagagggtagagtaattctgcccacccgccatctccagatcaaagtgccagaagagagacacgttggagatgctgagagggatatgaaggcagagaggactttgaaagaccactgtgtgtgtcagycccaggccagcctggagcagccccagccaagtataccctgcagtgtggtactattaggcaaagagaagacttctttttggctcttccaataggatgagcaactggttttcacagaagtatcccagttttagcactgaacttcttgcttccttggaaacctctcaagcttaggcaagccaaaacagttagttcttcatcttatttcccaaaccatacttgctttatgtacaagagactcaagaatcctgtgatttcacgggggtctggtgtacatgtttcagcagttttaataacatttgtccttccatggagtacacatcttagcacagaatgaggaaacttcatggcaatgtgttgtcatggacagcttaagccatggacaatagggggaaggtggtagatgataagcagaagtcatgtagcaccaac

SEQ ID NO: 766828 - DNA, 640 bp, Homo sapiens
tcacctgacttgtctgaattccaacccttctctctggtttacagagacatttgctgaattgttgttgaagctttcagtttcaaagcagaatgacattctgggcccattctagggatagcgttgaaaaattgaatgtgtaatcttagagatttggtaggattatcgatatatgtgagggctatggagtgagttatagatatgaattctaaggttactatataatasctggaaggctttcaacataccacacaacctctcagattcttagtccatttatatgtgaacagagataaaggggataataataattaatttccatggacatttggaagaattgagactcatcaaaaaagagtaattcatggcttataatagtaagtttataattaaattgtttgttatcattatcattggaaaatttacagtatttttgtcagactcactttcttttttaagttaacatttttgcttcattgtatttagtttctgagtttataataggtattaatttgcatggttttgtaatatataaggtgctttgagctctctgaggaaaagccttatgtaattagaaaacattattcactgcactgatgtgtgaatgctcaaggctctagacacatccatcttaaaggaaata

SEQ ID NO: 766829 - DNA, 640 bp, Homo sapiens
tcacctgacttgtctgaattccaacccttctctctggtttacagagacatttgctgaattgttgttgaagctttcagtttcaaagcagaatgacattctgggcccattctagggatagcgttgaaaaattgaatgtgtaatcttagagatttggtaggattatcgatatatgtgagggctatggagtgagttatagatatgaattctaaggttactatataatagctggaaggctttcaacataccacacaacctctcagattcttagtccatttatatgtgaacagagataaaggggataataataattaatttccatggacatttggaagaattgagactcatcaaaaaagagtaattcatggcttrtaatagtaagtttataattaaattgtttgttatcattatcattggaaaatttacagtatttttgtcagactcactttcttttttaagttaacatttttgcttcattgtatttagtttctgagtttataataggtattaatttgcatggttttgtaatatataaggtgctttgagctctctgaggaaaagccttatgtaattagaaaacattattcactgcactgatgtgtgaatgctcaaggctctagacacatccatcttaaaggaaata

SEQ ID NO: 766830 - DNA, 494 bp, Homo sapiens
taaagcttctgtaaacatttgtacataagtcttcatatggacatatgctttacttctcttgggtgaaacttttaactctaaaagagtagaaagtttttctgtcttatccactaccccaacttagtgcttagcacastgtgtggccacggtagaagttaaaacactcgttgactaaaataatatgatatcttagagactttatcttgtcaacaggtcagtggatggacaaattatggctatatcaataccatggaatattgcttcacagtaaaagagaagtgttattgattttcgcagcaagatagatacatctcaggataattattttaagtagaagaagtcagaccataaagagtacatacagtttgattccatgtatataaaattctagccaattaaaagcaagccttgcattaataatgacagaagcagatcagtgattacctggggagtcagagggtcaagaggggtgggagggagaagtaacagaggca

SEQ ID NO: 766831 - DNA, 494 bp, Homo sapiens
taaagcttctgtaaacatttgtacataagtcttcatatggacatatgctttacttctcttgggtgaaacttttaactctaaaagagtagaaagtttttctgtcttatccactaccccaacttagtgcttagcacagtgtgtggccacggtagaagttaaaacactcgttgactaaaataatatgatatmttagagactttatcttgtcaacaggtcagtggatggacaaattatggctatatcaataccatggaatattgcttcacagtaaaagagaagtgttattgattttcgcagcaagatagatacatctcaggataattattttaagtagaagaagtcagaccataaagagtacatacagtttgattccatgtatataaaattctagccaattaaaagcaagccttgcattaataatgacagaagcagatcagtgattacctggggagtcagagggtcaagaggggtgggagggagaagtaacagaggca

SEQ ID NO: 766832 - DNA, 494 bp, Homo sapiens
taaagcttctgtaaacatttgtacataagtcttcatatggacatatgctttacttctcttgggtgaaacttttaactctaaaagagtagaaagtttttctgtcttatccactaccccaacttagtgcttagcacagtgtgtggccacggtagaagttaaaacactcgttgactaaaataatatgatatcttagagactttatcttgtcaacaggtcagtggatgracaaattatggctatatcaataccatggaatattgcttcacagtaaaagagaagtgttattgattttcgcagcaagatagatacatctcaggataattattttaagtagaagaagtcagaccataaagagtacatacagtttgattccatgtatataaaattctagccaattaaaagcaagccttgcattaataatgacagaagcagatcagtgattacctggggagtcagagggtcaagaggggtgggagggagaagtaacagaggca

SEQ ID NO: 766833 - DNA, 546 bp, Homo sapiens
attcatgaggaatccgtgcccaggacccaaacacttattagaccccacctccaacattggaatcaaatttcaacacgggatttggaggaaacaaacatccaaaatataacacctactaataccttctgttcttatagtcaagattctcactctgaatagataataaagaaagaagagaaaacccataccacctacctaagcagtttaacccaatttttkgtttaaaaatatacaaataagtaaacataaatcaattagcagaaatttaatcaaagctagcaacacaaaagacaatgaaaaaggggaaaaaagaaaagaaaaagacaactggctctggataaatcagtaaaattcatggaagaaaatataactttaaatgcattttgtttaaatgcttacagcaattcaaagatttttctttcattaaacaaacaaatatgctccttttagaaaagagaaaccttcaaaaaggaagagttaatgtcaatttaaaatattggccaaatttttagaagttaacagtagaactggagaaaagatcaagta

SEQ ID NO: 766834 - DNA, 517 bp, Homo sapiens
agttacttctaggattatcttctgtagatttccaaacttcttgactctttacagcagctctagcctttcctagttgagttggtttcatttagctatctggtggggctccctttctgtaggggaatttgttcatgttgacctaagggcacacagctgccgtcagcctctggggcacaggatctccgtacaaagcaaccctgtactgtaggaagttctccacacatgtctgcacacaggagttctgtcattaacatggtcccggtcacccggtggaatgcacagagggtggggaaagtggcttctttctcaaaagccttctttttataagscttggatccctgacaactggaattttcttttatagctgaaaaaacatatttcccttaaacaccacccaggcagtcgtatgtccttaaggtcaaagagatgagacaagaattgaagaggacccaactacagatcaatttgcctaaatgtagagtttgtctgcctatgaaatgaagaagttgcttccata

SEQ ID NO: 766835 - DNA, 525 bp, Homo sapiens
aaatattggtaattttatatcataatatttaagttgcagatcaagaagagtaaatatcactcaaagattttatctgctcttctggcaaaggggttagtgcatttttggttgtatcaggatagttgtgtcatgttaggcagaattatgatcttcttaatgtctttatttggagattaggtataatttarggagatgtctatgggtaccaggtcgacagggagtggacttgtgatgtttaattttatttgacaatttgaccgggccacaagatacccaaatacacatttgggtatctgggtgggtctgtgagtgtttctggaagaggttagcatttgaactggtgaactgaataaagcgtagagtccaaatggtcctccccagcatgggtgggcatcatctaatctgttgaaggcctgaagagaacaaaaggcagaaggaggaatctgtccctttcgtttcctgcctcactgcttgagctggagcatgttttctcatcttctcctgccctcagattgggatttacgc

SEQ ID NO: 766836 - DNA, 470 bp, Homo sapiens
caaaaaaacaaacaaaaaagccctggaattatcattgacttatctcttttactcacaccccctcaaccaatctatcaggaaatcctgtcaacaataagctcaaatacacctctgaatcttacctctactgttcgttccctcctcctcaaccaccctagttcaagccacgatcacgcccracttgaacgaccacaatagcatatggggaagacaaaaaaggaaaaaaaatggcactatagagagcatggagggtaaagggacaatagaaaaatactttctgattcaacagttcttgttgtcactgccatccccagcaccagcccaaacagagggacgttctacaaagtaccttggtagtactcttcaaatggtggctatcttcagagaatgagtctggaatctggcagaacgaggggaatgttttctctctttacttctctgccgcagctttactcatttctagaaaagca

SEQ ID NO: 766837 - DNA, 588 bp, Homo sapiens
ttaattcctctctgccatgttgcttgttgcctgtctccctagggtcaggtctttccagatatctactttcttcccttcccttcaccacccccagcaccagcaaaaggccttaaacatagaaagtgttaaagaaatgtatgttggctgagcatcgtggctcacactcgtaatcccagcactttgggaggcctaggtggatggatcacttgaggccaggagtttgagaccagtctgacaaacatgatgaaactctacaaaaaaaatacaaaaattagccaggtgtggtagcatgcatctatagtcccagctacttgggaagctaaggcacgagaatcgcttgaacccgggaggcagaggttgcagtgagccgagatcttaccaccacactccagcctgggtgacrgagtaagattctgtctcaaaaaaactaaaattaaaaagaaataaaaagaaatgtatgttggcccagtgtgtggtgacttatgcctgtaatcccaggagtttgggaggctgaggcatgaggatcacttgaggccaggaggtccagaccagcctgggcaacatgaccctacaaaaaattacaaatac

SEQ ID NO: 766838 - DNA, 588 bp, Homo sapiens
ttaattcctctctgccatgttgcttgttgcctgtctccctagggtcaggtctttccagatatctactttcttcccttcccttcaccacccccagcaccagcaaaaggccttaaacatagaaagtgttaaagaaatgtatgttggctgagcatcgtggctcacactcgtaatcccagcactttgggaggcctaggtggatggatcacttgaggccaggagtttgagaccagtctgacaaacatgatgaaactctacaaaaaaaatacaaaaattagccaggtgtggtagcatgcatctatagtcccagctacttgggaagctaaggcacgagaatcgcttgaacccgggaggcagaggttgcagtgagccgagatcttaccaccacactccagcctgggtgacagagtragattctgtctcaaaaaaactaaaattaaaaagaaataaaaagaaatgtatgttggcccagtgtgtggtgacttatgcctgtaatcccaggagtttgggaggctgaggcatgaggatcacttgaggccaggaggtccagaccagcctgggcaacatgaccctacaaaaaattacaaatac

SEQ ID NO: 766839 - DNA, 631 bp, Homo sapiens
ctcttagtatgatgaattatctttaactgtagtttctaattctgtctaaaaattatacatatttctctgatgaattcagatcagaaatacagcaatataagtatagtttatccagttaattcattctcttcaaacaatagaaatcgtgaaaaatatcaattcccttttcttggtgacctaaacttgtaattagattttatacttttcaaaacaaaaatggcaaacaaaaataagtgtccagtaaaaataatggaaataaagtaaatctaaccgttcagaacaggaaaaaaasaaagcaaatgggagggagagggatgggggaagagagaggtagagagagatagaggaagagagagcacaatgaaataatcaatttttaggcacattaaatatggaggaactgaaaataatattaaaatgcctttcttattattgtaccttatgtcactagagaaaacaaattttgaagagagaaaattataagatgttaacagtcaatattttcttttactctttgtataaattctacggaatttttactaaatggcaattcaataaataatcagagatgacatactatactccaagttactacctgtttcattattctattataaatttatatacagtt

SEQ ID NO: 766840 - DNA, 567 bp, Homo sapiens
caggaagctgaggcaggtggatcatttgagctcaggagtttgaggttgcagtgagctatgttcacaccatagcactccagcctggatgacaccgtgagaacctgtctccaatttaaaaaaaaaaaaaatccaattcttcatgaaattcttactcattagttctatatccattgatatcccttggataaactattactatgatgattgctaaatgatgattgkctaattccatcattctgtctatatctattgacattctactataggaagatttgttctttctcattaatttttattggcaaaatctcatgagttcgtattttgttcaattgataaaattcattatcattatccattttgatgtttaaatttatttgacatcctggaagccctttcaagttgacatcagtttcatttgtcacagctatgattctctgagaacgttcttattttctggctgaaaacactctgtacttacctagttctgccccagccctggtatcaggctttattctaagaagctttgatttcttttggtagagaatggtatttagaaaccaagaactg

SEQ ID NO: 766841 - DNA, 538 bp, Homo sapiens
ccacgtgaaattgtgagtccactaaacctctttttctttataaattacccagacttggggatgtctttatcagcagcatgaaaatggactaatacatgtagcctcagattctaggaacttggcaaaccctatttgaaggtgggagtgaagatggtgggtaacttgactttccctgtaattccagcataagtctagagaccagtgtcattggatcagaagcatagtatattcccttgaacaaattactgtgactctgactggccaagacttcttcccatgaccctgcctagaactagggactgatcactcccccaaatgcaatggacaaaggatgtgaaagggaagcaccctccaaggaaaactgaactgctgtgatcagaagaaaggagataracgctgggcagggctccactacaaaatggctgctggaataaagaagaaagctctgaatagatcaagacgcacaacttagtggtgagtagaaatcagaacatttgaggtagaaagaataacaaatgcaaacgctggggtcagaaat

SEQ ID NO: 766842 - DNA, 589 bp, Homo sapiens
cgaagcaatgagaccccaaatccccatgagccaactcttaaacatggcctttagcatttataacaataggaacagggcacaggaagaggtgaaaatgaaaataattggcctaatagtacaactgttaatgactgctttaagtctcttgctgcctcaggtttacctatcccaagaaaatattgtaagatctgcatctagggcgcccacacaagagccgctgactcactggcccctgggccaaaatcagtgtgctttccagaagcaagacggccactgtagaatggatgccccaggattaaaagggagcctgagccactcagacccataagggccaagagaatagtggattcatagggstggaggtcttctatggcttacactagacaccttaccttctcaacagaggaacctcaggtaacccttgatatggcaggtaaaaaatactgagttcttattggatacaggatcagcctactcagttccaacccatttctcagggccattatcttccacttatgtaccataagggggactgatgaccagccaaaaattagaagattcactaacccccttggtcacacagagggac

SEQ ID NO: 766843 - DNA, 576 bp, Homo sapiens
aactccagatatgccaccttaagagctgtaacactcaccgcaaaggtctgcatcttcattcctgagccagcgagaccacaaacccaccagaaggaagaaactccgaacacatccgaacatcagaaggaacaaactccggacacgccacctttaagaactgtaacactcaccacgagggtccacggcttcattcttgaagtcagtgagaccaagaacccaccaattccagacacactagcttccagaggacatttctagacacactttgggccagaagggacccactgccttgaagttaagaacccagtcctggaaggattcatcatctgctaamtaaagtacccttgggcccgaaataaccaacagcggtagacaggctgtactcaccttgatgagtactgggtctcacctttggtcagagtcagtgccatgctggctttagttgtggtccagcatattcccagctgtgatgtttagggtgagaggcttcttatgcttgaggaaaggagagaaaagattgaaggagactttgccttgcagcataatatcagctaagccacagtggagtagagcacc

SEQ ID NO: 766844 - DNA, 573 bp, Homo sapiens
tttgtcacaggggaactccaaattaatggtacctcaatgaaataccactacatacacatgaacatggccagatataaaaagactaatgataccaaatgtcaaacagaatgtggaacacctggaactcttgtaaattgctgacgcaagagcaaagcaggataggctctttaggtaataattyggtattgtcttataaagttaaacatatatttaccttatcttccagccattctacttctgtgtattcatcttagagaaaagaaaacatatgccacataaagatttgtatacaaacgttcatggcaactttattcaacatagacaaaaactagaaacaacttatatgtccactaacaggtgaatggataagtaaattttgatacattcatacaatggaatactacttagcaataaaaaggatcaacctaatgatatgtggaacaacacagataaatcctaaaagcatcatgttgagtgaaaaagccagacctaaaagaccatatactttattcttccattgtatgatattctagaaaaagctgaagtgcagtgatgggatccagatcagtggtt

SEQ ID NO: 766845 - DNA, 543 bp, Homo sapiens
actcactcaataactatttactatcttagtttgggttcccttgaagcagagcctgacacaagtatttgggtgcatctgatgtactgagggagtgttttcagaaaattctattaaggaagtgaaggaagcaggatgggcaggggaaggagctgagcaaggatgaggtcttgagtgtagtctggcgttgccatgactcacaggggctccagagcataaatggcaccacagagctgccccaccttgagataatggggctgtgctgtcatacccctgtattagttggccagtggtcccccgagggtggcgatatacctcccagtgtctctgggtgaagcagctcctgtgagtgaaagatgrttatctggagaaggccacatgtgtaaacctgtagcaccaactctcacagcagaagctgaggcctgggtgtaacctgacactgtaagcatgaccaaccatcttgatttgctcaggaccaagggattcctgggatgcatgggcaccaacagtgtctactacattgactgagggtcttgataaaagttt

SEQ ID NO: 766846 - DNA, 658 bp, Homo sapiens
aggggctggagatgcagctagtgctgggatgtggagttatgacactggccttcagcatcatctaataaatagagtttcctggattagctcctctcagtacatttttggctgcttctttggattgccttctcacatgtcaataatttggcaatgtcattgtttatagagagaattaaatagtaaatcaatcwatcttctagtgtggttgatccaaatttgctttttgtcatcaatagttttggaaattgtttttcagttgtacactttatttccataaatgtcacatttgggacaatagagttgttgtcacatttgggaaactgttaaacataaaattagacaatttagttctttatgtaatttctacattctttgaggcatatttttctatcttgtcatctttaatatttctgggacttttagtcaagtcaaattgatacacccttaggagtatcaatttgatactggccaaagcatctttaaaatgcttaaaatagaaaaaatataaaaagataatgaacagaatcagaaatcttgaaaattaaatatatttcaatagctgactgtgattttaatttatgcattattttgtctcataattcctgtcacttttacttataattcttctcataaggatcctagacatatttaaagtcat

SEQ ID NO: 766847 - DNA, 628 bp, Homo sapiens
ctcagaagccacgtgctccaggacacagttaaaatgttgtggaataaggccaggcgtggtggctcacgcctgtaatcccagcactttgggagacgaaggtgggtggatctcgaggtcaggagatcaagaccatcctggctagcacagtgaaactccatctctactaaaaatacaaaaaattagctgggtgtggtggcgggcrcctgtagtcccagctactcgggaggctgaggcaggagaatggcgtgaacccgggaggcagagcttgtggtgagcccagatggtgccactgcactccagcctgggagacggagcaagactccttctcaaaaaaaaaaaaaaaaaatgttgcggaataagcagtcaactaagagaaacactgtatttcttaacaacatgtacgtacatgtctttctcctcctcctgctccacactactttagaatgtaaagcaaattgcacacatgtattagttagggttctctagagggacagaactaataggagatatatatgtatgggaatatatgtatgggaatttattacgtattaacttgcatgatcacaaggtcccacaataggctgtctgcaggctgaggagcaaggagagccagtccaagtcccaaaac

SEQ ID NO: 766848 - DNA, 628 bp, Homo sapiens
ctcagaagccacgtgctccaggacacagttaaaatgttgtggaataaggccaggcgtggtggctcacgcctgtaatcccagcactttgggagacgaaggtgggtggatctcgaggtcaggagatcaagaccatcctggctagcacagtgaaactccatctctactaaaaatacaaaaaattagctgggtgtggtggcgggcgcctgtagtcccagctactcgggaggctgaggcaggagaatggcgtgaacccgggaggcagagcttgtggtgagcccagatggtgccactgcactccagcctgggagacrgagcaagactccttctcaaaaaaaaaaaaaaaaaatgttgcggaataagcagtcaactaagagaaacactgtatttcttaacaacatgtacgtacatgtctttctcctcctcctgctccacactactttagaatgtaaagcaaattgcacacatgtattagttagggttctctagagggacagaactaataggagatatatatgtatgggaatatatgtatgggaatttattacgtattaacttgcatgatcacaaggtcccacaataggctgtctgcaggctgaggagcaaggagagccagtccaagtcccaaaac

SEQ ID NO: 766849 - DNA, 487 bp, Homo sapiens
tgaagctgtttccatctcccagtggtggtatatgatttatccttggaggaaatctgctattttgcttaggaaaatcctttaaagagatttttggctatgtttatgaaagggcagacccaaggcctagaaggagaagttgaaccaggaaagtgaaattgcccagtagagtggattttctttcttgggggcaaagatggttatgatgttaatttagggctgccctgagaacaccagaggcaaggacttayagctctgagaattgaagggaaaaatacatgacaaaggtgactttaatttgaagaagatgtaggccctagcaacatagttttagcctaaggtttaaagaagaaaatagcccctatcctgtaaatgctgtgagaagcttagggtgcagagatgtctgagatccactttttagttttcctgtgctgtgtatcgtccttggtccttggatgcctttagttaagagtggtacatacaacagggg

SEQ ID NO: 766850 - DNA, 469 bp, Homo sapiens
aatttttctataaatttaaatttatttcaaaatggaaagtttaaaatataaacaagactggacaagcctaggtactttgggttgggcattattggggaagtctcaaaaagggcccaggcaggaaaagtcacagtcctctgtctcctcacatttgatagacaatgttatttttacaacttgttaggttaaaattagattcacacaaacatcggggaaggcagcatctcakttttcagcacaaaccacagagaacattcacagatattgtcaaaactcaatgtttctcttttgaattgtcactcttcataatttccccattccagttcattggttcagttcttttttaatctcaaagtatctcgtctttttatgtcatacctgtaagtcaacaataaattaaaagatcagtgatctttgagttttaaatatcccaaaaggtgtttttattattacccatttcttttgtttg

SEQ ID NO: 766851 - DNA, 603 bp, Homo sapiens
attggcaagcaactgagggaggattctggccaacagccagagaagaacagtccagcaacccacgtagaacagagtcctgccacatgacaaggtatgagcttagaagaggactgtccctctgtctagggttcagataaaacccagataagataaccagttcagcacagtttgcccaggatgtctccagttttagcaccagaagccccacatcccaagaaaccactcagtcttgagcaaccccagacagttggtcaccacagactgacctgtagatggccccttgaatgtgcccttgggagagaccctgagccaragaacctagtaaggccacactcagatttccgacctacagaaattgtgggataataaatgtttattcttttaagctgctaaactctggggtaatgtatcatgcagcattgcagatattgaaaactaacatccttgttcttacccaaaagattgaaagatcaagagaaatgttaaatcagctatagaacaataaagaagctgcattttctttgtacatctgcatgcagcgtgagttaaattagcagcctcatcacgagtgtactccacatcctgagtgtgactcaggaacac

SEQ ID NO: 766852 - DNA, 617 bp, Homo sapiens
tttcctaagtctctggaaggatgaggtttttaaatgcacctttccccagggcaaggggtgctttttaactttaatttttacaaaacagccaaactactctttcaagaacaacaagaataacaaaatcttccccaaggagacctctttccagatggtaaaaggctggcataattattttaaaattctccctccctgggcatcctgttaacacaaatgtaaacctggatttctgcctcaggcttgtccctcctgatgtgttcacagtgttaatgaatgacatcattctctacctgggtgaccaaggcagaaacctgggagtcaggtttggctcttcttttagacttgtctrccacatccaagcaattagcaagtcttgtcatttctacctcctcaatatcaaccggttatgtccactgccttccaacctcattcccactaagttccctaatgtctcctctgaattttatggcgaatccttctgatttggtgttcacattatggtctggatatttactaaactgtaaatgtgatcgtatgacttgtctacatacagcttaccagtgacttctcattgtttttaggccgaaatccagaagcagtccagcatcttcctcact

SEQ ID NO: 766853 - DNA, 609 bp, Homo sapiens
gatttgaatccaggtcagcttaatgtcaaagacatttactcaattactaactatgctgtctgcatgagcagagaagaaaaacgattttcctacttaggcacacgtcttcttcaaatgctggtccagggatgctctgaccttgacaagttaccacataaagcttrtgcttccagaggtgcaagttaagtgtctatacaaggggctaattgtacatgaaatcctaagtggtgagattcatctctctctgcccattgtataaaataactgtgtatacactctatttctttatgagcagctaaccctgggactcagggctgccagaatgagcaaataaaattaaaagatgcccagttaaatttaaatttcaggtaaataacaaatcattttcagtataaggatgccctatgcaatatttggggcatatttatactaaattttttttattgtttatttgaaattcaaatttaactaagcatcctgcattttatgtggcaacccatctgggactgttctgtcactgtaaagcacgtgcttatattctttgctcttctgcctaacactgagctccaccatggctaaggctgcaaagaaacacacacacacacacac

SEQ ID NO: 766854 - DNA, 612 bp, Homo sapiens
gccttgaacttctgggctcaagggatcctacagactcagcctcctaattagctggaactacaggcatgcaccaccatgcctagccaattattttattcttttgttgcccaggctggtctccaactcctggcctcaagtgatcctcccacctcagcctccccagtcactgggattacagacatcagccaccatgactggtgaaaatatttttaaaacaaacaacagaaataatcagtggtttgaattttatgtaaaatacaatcattyattctttttctttttaagaattattcttttcaatctataatgtgatgataacaaaaggactaatcattgcatacggaagtactctgaaaggaaatagatcattgtgattaggcaagatgagacacttcagaggctgtactgccaagtttaattataaaattaagtgtcattcaaagaaatttttattgcaaaagtatgtgatttacttctgtaggcagttattacaatactgcctcaatccagaaggaatatgagatggtgaggcatctcttggttcaattccaaaactgaaaattaaactacaatttccttagaactcaggaataaaactcatcatggctcatt

SEQ ID NO: 766855 - DNA, 468 bp, Homo sapiens
aagaggggaaatggtgcaagaaaaagaaacaaaaaccaatgcaaaaggatgaaaaaggaaaataaaaattaaaggtaagatagatagaaagctcaagatatgacaatgattataatcaatataatgaaccaaactcttcagttaaatgactaagattatcagactaaaatcctgaatgtttaaaataaaaactcaaaacttaaagacwcagaggagcagttgaataaaaggattgaaagagacaaatacaaaccaaaataagactatagtagccatattaatgccaaacccatattctgaggtgtaaaacattatcaggtataaagaaagacactatataataataaaagtttccactcacccagaaagatatcaaatgaacaaatgagtaaattgccatgaattaagttgcatcttccagtgattgggaaaacacatccacagataggaagcaggtctgtccaaacc

SEQ ID NO: 766856 - DNA, 608 bp, Homo sapiens
ataaacagtcatatactaaatcatcacagctttgctactctttaccatcaaaagatgtcttctctgtttaatttcccaagcttataagtagaacatcaccctgctgtacatataggtatatagaggtgcattctttgtgataggaagtgattaatattgcaaagaaaatggacatcatcctccactgagatgatcaattaaaatgtaatgctttcacacttgtacttttgtttgtagagagatgcaasgacttaaaaaaagcattctctgtgcaatttcttatgcaaaatgctcttagatataatatactcagaagttttaaaatactaattggcagtgtaatgcactgtttgtatggaaaaaatatttctaagatgtaatatagaaccaaatgagaataaatgattggatttttttttcagtcatcttttaagccaataggtagccaggctaaactagtctaggtcctagcaacaaagagatatggaatgtcttgttctccttggactcatcttctgttgaagaggtagacatatttcataatttattccaatcagtttgatgatgataacatgttctatgaagcaacagatcttaatgatcccatt

SEQ ID NO: 766857 - DNA, 619 bp, Homo sapiens
attttaaaactgtatgcttatatgtttccattttcattgtgaaatatgtaaggcacaaaaaaggaacaaagagtaaatcagtgagcacccatgtacctgtagcccggcttaagagagaagacgctgctggttcaggtaggagaggctcctggaatatcccatcctcatcttacctctgtccttctttcctagaggttactttaccactgttcgcagctgggtggttttcatcttgtgtagttcttcatatttttaatatgtatgcatgtacaggattcctcaaaatacaggattttgttttgcacgttcaaggtttgttctgatagcatcctactatatatgttttttagtaacttgcttttttwaaaaataaacaacagtaaaattcatccatgtggatacatgtagctatagcttattgatttttccatgtgaaccttttgaaatactggatattaattcaagacaagttctttaaatttgagcctaaaacccagtagcactctgtacattgaaaatttcagattcataagaaaccatcagtcctgactggaacttcataatttgttcatttgtctgtgttttgggggaaaaaactttaaaacctcaaccatttatc

SEQ ID NO: 766858 - DNA, 627 bp, Homo sapiens
tcatgaggtcaggagatcaagaccatcctggctaacaaggtgagaccccgtctctactaaaaatacaaaaaaaaaattagccgggcgcggtggcgggcgcctgtagtcccagctactcgggaggctgaggcaggagaatggcgtgaacccgggaggcggagcttgcagtgagccgagattgcgccactgcagtccgtagtccggcctgggcgacagagcgagactccgtctcaaaaaaaaaaaagtaagacccacggctgggtgcggtggctcatgcctgtaatcccrgcactttgggaggccgaggcaggcagatcacgaggtcaggagattgagaccatcctggctaacactgtgaaaccccgtctctactaaaaatacaaaaagtagccaggcgtggtggcacacgcctatagtcccagctacttgagaggctgaggcacaagaatggcttgaatccaggaggtggaggttgttgcagtcagccgagatcttgccactgcactccagcctgggtgacagagcgggactccgtctcaaaaaaaaaaaaaaaaaaaggaagaccgactaaaaacaaactgctcccaaggaacttaaccttgtcccagaacaaagcaagagaatgtt

SEQ ID NO: 766859 - DNA, 561 bp, Homo sapiens
cagctgggtcttcctggagagctaagattttggcacttggggctaggatagccaaagagcactgcaagagaaagtgcagcagcagcaatgatatggaatctacaatgctcaggactggttcacaaactgctgcgcattggaatcagctggagggctttacaaaggttggctcccaggcccagacactgtgatttaattgacccagagtatgatctgggcatcaggacttttaaaagcttcccrggtgattctaatgtgcagtgaagtttgggaacccttgatctgggtgagtctgaggacagcagtgcacagttagctcggcctgtgtgaggggtcttggagccctaagttaccctaaacattgtccttccatagtgaccagtatcctttctttgagaaaaccagtcaattaggtgaattccccagaaggggctaggctggccttcttcttcagtgtggccctcagatacaggcctcagcatcacctggatggagggcgtcattagtatcagggctccagaaaaaaagaattgattaatttcttgggatccaggagcccat

SEQ ID NO: 766860 - DNA, 591 bp, Homo sapiens
cttctcctacctcctggcaggggctggcaatgtttgccattccttgacttgtaggagcgttgcctcgatctctgccttcatctccctgtggtggtctttctatgtgtttgtctatgtcccaatttcccctttttacagacaccaktcatattggattagggtcccaccccacttcagtatgacctcatcttaactaattacatctgcagcaatcatattccaagtaaggtcacattcggatccaccttctcttttcgctcagttcatatagttgaattcaggaaagttaaatgtgtaagtactgcggctcctgagaatattatggagtagaatgcaaaatctgtgggaatttgaaaggaaaaccatgggaaagagacatggcagtgtctctcttgactttacggtaggcccatcccagcttgagaccactgcattctctgtgtgcaaacatcagacacagatgtgcagtaggtgggcccaagtcatgggtcatatttctttttttcaatatgacatcagtgcatgattggcagaggctggcattggcccagaacggtctgagttatggtctcagtcttgaagctctctagt

SEQ ID NO: 766861 - DNA, 610 bp, Homo sapiens
atggaaggcttttcagttttacattagaggctactacttgttttttttttttttttctaattgtaaagcaggcaaaaatcatcacagaaaacagatctcaaaagaattgcacttagtgttgtgacctagttggtttcttcattctttgaaacattatttgatttttcctcccgtattagctgttatgtatgccggttacataaccttaatttttcatggaaaatatggatgtcatcaattaataggactacccctgctgttgttatggctggcttcttctagaatgttcccactggggaaactgaggcttaggtttgmtactgcaggatttgccattgtaatgttttccttttagtaacatcatcattatgaatataattcttgttctcatccagtagagagccttggttaccggcaacccagttcaagcctttgaatagatacatagggatcacctctctagtgtgaagatgaaaataatataatttgtttaccaccttgagttgtttaccacaggctgtgaaaaatatgttttgaatttaaaagtgtgaaaaacaagtgtgctagctatcaaaaaagctctcccctcaaagtaaacatgtttatagag

SEQ ID NO: 766862 - DNA, 596 bp, Homo sapiens
acccaaagaagatatgtaaacagtcaataagcatatgaaaagatgatcaacatcactaataattagggaaatgcaaatcaaagccacaatgcaatattacaagttggcaactctcaaaaaaaaaaaaaaaagaacccaaattaagtgttgatgaggatgtagagaaattggaacccttgcacactgttgatgggaattcaaagtggtgcagccattaaggaaaacagtatggaggttcctcaaaatattaaaaatagaactactgtatgatccagcaatcccatttctgggtatatatccaaaagaattgaaatcaggatcttgaaaaagaattaaaatcaggatcttgactagatagctgtactcccatgttcactgtagcactaactgcagcactattcacaataaccaagaggtagaagcaacccagatgtccatagacagatgagyggataaagaagatgtgatataaccatgcaaaaatggaatattatgcagccttaaaaaagaaggaaatcctttcacatgctacaacatgggttaatcggaaggacattatgctgacaaaatgaaccagtcacaaaaggacaaatact

SEQ ID NO: 766863 - DNA, 525 bp, Homo sapiens
gaaatagagcataactgtcaacaagttacagcccaaatctctgctgcttcagaggaccttccagaggtccccttaattgaccctgacctcaacttctatactgatgaaagctcatttgtagaaaagggactttggaaagcaggatacgcggtggccagtgataatgcaatacttgaaagtaaccccctcgctccaggtaccagtgcacagttggcagaattggtagcactcacctgagcactggaactgggagaaggaaagtgagtaaatatatatacagattccaaatatgcttacctagtccttcatgcccatgctgcaatatggaaagaaagggaattcttaacctcagmgggaacacctgttaagcatcaagaagcgattatgaaattattgcgagctgtgcaaaaacctaaagaggtggcagtcttacactgctggtgccatcaaaaagggagagagagggaagcagaaggaaactgccgagcagatgctggagccaaaaaagcctcatgatgggatcct

SEQ ID NO: 766864 - DNA, 502 bp, Homo sapiens
ctctaccctgaagtcagactgctggagtttggatcccaactcctccattggataattgtgaatcattgagcagattattctaaccctgtgcttctcaaactttcatgtgcacatgaatcatctcaggaacttgttaaaatgcgggttttgatttaatacatctgaggaggggctggggttttgcatttctaaggagctcccagttcatattgatggtacagacagggtggggactgccaggcccagtgcaaaacgaggggcccctggttcaaaaagcgagaagaaaatattgttaaaggtactaaaatataaagcttttttytttcttccagtctcactcagcttgttatgctgtgttttgttatttaatgttgtaaagaaatgctggaattttaaattattagtatggtttataatttatctttatgttgttcaatatcatttttaaatgcaaatataagagcatttaactcatatatggattcactgaaattatacaatt

SEQ ID NO: 766865 - DNA, 607 bp, Homo sapiens
ggagtttttggactgagatgatggggttttccaaatatgaaatcatgtcatctgcaaacagaaacaacttgacttcctctcttcctatttgaatacctttatttctttctcttgcctgattgccctggccagaacttccaatactatgttaaatagaagtggtgagagagggcatctttgtcttgtaccagttttcaaagggaaagcttccagcttttgcccattctatatgatattggctgtgggtttgtcatagatagctcttattattttgagatatgttccatcaatacctagtttattgagagtttttaacacgaagggatattgaattttatcaaaggccttttctgcatctattgagataatgatgtggtttttgtctttggttctgyttatatgatggattacatttattgattggcatatattgaaccagccttgcatcccagggatgaagccgacttgattatggtggataagttttttgatgtgctgctagatttggtttatcagtactttattgaggatatttgcactgatgttcaactgggatactgcaaacttttaaacatcttttgttcattaagagtcacatgaaattaaa

SEQ ID NO: 766866 - DNA, 624 bp, Homo sapiens
catccaagttcagagctaccgggattgatcagaacagccatccattccagattgtgtttttgccatatctaaaggaaggtattaaatatattatgtatttggggttttctcaaaggtagtttacagagagtagatatgctaccaaaaggtttataaaaacaaaataaccatgaccaaaaaaaaaaaaaaaaaaaaccccaaccttccacagcaccttttctctaatatccataaaaatgttgggtaattcttggaggaggcaaattttgctgacgttgatctacaaaggaagtagttctttacaaggccagaatatgcagtaatacataacagctcttccccaycgccccccccataaggtctgcttacttggatacttgttcatctgcctgtactaagcagcctgcaaccctgtcctattattattactgatgctaatcagtctctactgagcacaggtcagaaccaggacagaatgccagctccagtctgtaaggcatcacattttgtgagccattaatgagcgttcatgaatttaaaaaaagcagaaaaaagaaaggagaactcagtttgcatttggagagtgagatagtaaatagagaatagaaaagaatttacatacat

SEQ ID NO: 766867 - DNA, 595 bp, Homo sapiens
cgtctcaaaaaaaaaagaaaagaaaaaaaagaaagaaatgaccttttagagctaaaatacatgattattttagctctaagaaattccattaagaattaaaagccagtagggcctcaactgagactcaaattagtctgggagataaagtacaagaaagatctcaaaacagagcaacattacaaagagatggagatcttgtgagaaaatataagagtgggaggataggccgggcgcagtggctcacacttgtaatcccagcactttgggaggccgaggcgggcggatcacgaggtcaggagtttgagaccacggtgaaaccccgtctctactaaaaaatacaraacattagccgggcgtggtggggggcgcctgtagtcccagctacttggagaggctgaggcaggagaatggcgtgaacccgggaggcagagcttgcagtgagctgagatcgagccactgcactccagcctgggtgacagaacaagactccgtctcaaaaaaaaaaaaaaaaaaaaaaaaaaaaaagggtgggaggatatccttcctcccgaagaactaatatgtacataataggagttctaaaatgagaagatgc

SEQ ID NO: 766868 - DNA, 595 bp, Homo sapiens
cgtctcaaaaaaaaaagaaaagaaaaaaaagaaagaaatgaccttttagagctaaaatacatgattattttagctctaagaaattccattaagaattaaaagccagtagggcctcaactgagactcaaattagtctgggagataaagtacaagaaagatctcaaaacagagcaacattacaaagagatggagatcttgtgagaaaatataagagtgggaggataggccgggcgcagtggctcacacttgtaatcccagcactttgggaggccgaggcgggcggatcacgaggtcaggagtttgagaccacggtgaaaccccgtctctactaaaaaatacagaacattagccgggcgtggtggsgggcgcctgtagtcccagctacttggagaggctgaggcaggagaatggcgtgaacccgggaggcagagcttgcagtgagctgagatcgagccactgcactccagcctgggtgacagaacaagactccgtctcaaaaaaaaaaaaaaaaaaaaaaaaaaaaaagggtgggaggatatccttcctcccgaagaactaatatgtacataataggagttctaaaatgagaagatgc

SEQ ID NO: 766869 - DNA, 595 bp, Homo sapiens
cgtctcaaaaaaaaaagaaaagaaaaaaaagaaagaaatgaccttttagagctaaaatacatgattattttagctctaagaaattccattaagaattaaaagccagtagggcctcaactgagactcaaattagtctgggagataaagtacaagaaagatctcaaaacagagcaacattacaaagagatggagatcttgtgagaaaatataagagtgggaggataggccgggcgcagtggctcacacttgtaatcccagcactttgggaggccgaggcgggcggatcacgaggtcaggagtttgagaccacggtgaaaccccgtctctactaaaaaatacagaacattagccgggcgtggtggggggygcctgtagtcccagctacttggagaggctgaggcaggagaatggcgtgaacccgggaggcagagcttgcagtgagctgagatcgagccactgcactccagcctgggtgacagaacaagactccgtctcaaaaaaaaaaaaaaaaaaaaaaaaaaaaaagggtgggaggatatccttcctcccgaagaactaatatgtacataataggagttctaaaatgagaagatgc

SEQ ID NO: 766870 - DNA, 579 bp, Homo sapiens
gctcaggaggattagtaaaagaggaaggaacacctctgtgcagttgagataagaggaaggcatctgtctcctgctcgtccctgggcaatggaatgtctcggtgtaaagcccgattgtatattccatctactgagataggggaaaaccgccttagggctggaggtgggacatactggcagcaatactgctctttaaggcattgagatgtttatgtatatkcacatcaaaagcacagcacttttttctttaccatgtttatgatgcagagacatttgttcacatgttttcctgctgaccttctctctactattataccctattatcctggcacatccccctgtccgggaaatgcctgctaatgatcaataaatactaagggaacttagaggccggtgcgggcacgggtcctccgtatgctgaacgccggtcccctgggcccatttttctttctctacaatttgtctctgtgtctctttcttttccaagcctctcgttccacctgacgagaaatgcccacaggcgtggaggggcaacccaccccttcaggaatagatcttggtttcaagaatagttggatcc

SEQ ID NO: 766871 - DNA, 553 bp, Homo sapiens
catttaaatctaatttttcttttttctttttttttttgagacagagtttcgctcttgttgcccggactggagtgcaatggcgcgatcttggctcaccgcaacctccacctcccgggttcaaacgattctcctgcctcagcctcctgagtagctgggactacaggcgtgtgccaccacgcccrgctaattttgtatttttagtagagatggggtttctccacgctggccaggctggtctcgaactcctgacctcaggtgatccacctgcctcggcctcccaaagtgttggcattacaggagtgagccaccgtgcccggccaaatctaatttttcaataactgaaacacaaagggaatttggactagtgaagcttatcaaaaactaatcccaacctcaaggtcttcagagagaagagaagaatgcgttgccttttgagccatttcctgaagctgtagttgggtcttttggagagctgtttggcattccatttgattggattcaagagcttttaccttcttcgtgagtgacctgattatttcagttcttttatgta

SEQ ID NO: 766872 - DNA, 609 bp, Homo sapiens
ctatttttgcccaagctggtctagaactcctgggctcaagtaatccttccacctcagctttccgaagtgctaagattacaagcgtgagccaccatgtctggccgattgtgttttttatggctgtgtagtattccatggtgtatatgtaccagactttgtttacccaatacacctgtacttccaactgaccggatataaatcaaaagttcccacagyccaatcctcaggttcagtaatttgctagaatagctcacaaaactcgggaaaacactttacttatatttattggtttgtcataaagaatgcaactaagaaacagctacgtggaaagagatgcatggaggatatagtatggggcgggagtgtgcagagcttccatgcgccctccgatgtgtccctctagcacttcattgagttcaccaactcagaagctctctgaactctgtcctctagggactttgtggagacttcattatggaggtgtgactgattaaatcactggccactgggcccagtggctcacgcctgtaatcccagcactttgggaggttgagacagatggatcgcttgagcccaggagttcaagaccagcctgggcaacatggtgaa

SEQ ID NO: 766873 - DNA, 559 bp, Homo sapiens
ttagatgaatatcctgcatgccaaattgttaatagtagctatctgggttgggaaaaggggtgtttcattttctaaattacatatttctttgatgtttgaatattttatggagcatgtgttactttcaaaattagagagaaaatcagattattatacaaaatttaattcccagtgctagccaggttgctgtggtgggggcacagaacttactggagatacttagactatgatttgatcctaattctggctcgggaagcagttgtctgcttcaggtgctgaagatgcagtttgacccctgcagctcctcargaaacctacaaaactccctcctctgtggtctggtgacccccgacctcaccccaggccaagcggcaaagtgctactgtcccctctcagctgctggtgggaggtactggcgctcctgctcccacggaagtgagtttttctggacagaggtagagtgaggcttggagttgacaaggccctcgtcctcctgccaaggagaagagctgcctgtggcccaaggtggtttaacgcctctgatgataacagcttagca

SEQ ID NO: 766874 - DNA, 546 bp, Homo sapiens
gaagacagtttttctatggatggggaggagggggaggatgttttggggatgattcaagcacattactttatgttgcattttatttctgttattacactgtaatatataatgaaatataattatacaactcaccataatggagaatcagtgggagccctgagcttgttttcctgcaactaggcagtcccacctgagtgtgatgggaatcagtgacagatcatcgggcattagattctcataaggagcacacaacctagatccctcgcatgcacagttcacaatagggttctcactcctatgagaatctaatgccactgctgatctgacaggaggtagaactcaggcgttaatgtgagcgatggggagcagctgtaagtacagatgattttgctcacttgcckgcctgtctcctcctacagtacggcccagtttctaacaggccactaactggtggcagtctgtggcctgggggttggagacccctgccttaggtgattcttccaggctagcttgggaaacactgctgtagagcgtaggctcctccct

SEQ ID NO: 766875 - DNA, 465 bp, Homo sapiens
cctcctcacagcagccagaggagtcctttgaaagtcaggtcatgtcattcctgtgttctaaaccaccagtggctccccagtgccctgaggataaagttgaagacccagcacaatctccaccccagctccagccccacttcttcttcactggctggctctcagttcctcaaatgagcaatcctccttcctgcctccctccctctgcaagtgcyggccttctgcttggaatgcttctccggctccttattcccttctgcctttaactcctcttcatccttcaggtctccagggaaaatcagggttcagggaggccttctttctctctctctctctctctcttttttttttttttttgagacagcatctcactctgtcgcccaggctggagtgcagtggagcgatctcggctcactgcagcctcaacctctgcgtctcagcctcctgagtagctgggatcacaggcac

SEQ ID NO: 766876 - DNA, 628 bp, Homo sapiens
ctgggctggcgaaagtgcaggtagctccttggtcgcctgacccagtgccttggatgctgcccgtgtgctgggccggaggacaccattccctcgcgcacaacaagccctgtgaggcatcacggaggggacgggagctcacacctcaacctagagaccccgtctactcacaaccacttttaaggaatgcagctaaacagggggctcagatccctgttcagggcccttctcacgatcccaccgtaacagcccagccctgygggtgcctggctgcagtctccttctccccagcacttccagacctggcagcccggcccaataccagcggccgtggggcctgacctggactgaaccccggagcccggacaggctggtcactgcagggcggggcctgaattctgcagctgctcctgaggccaaaagctgttctgagggtggggtgggctgccaggctccaccgacgccctcccgcactgcaggcgcctctctggagcctcacatatgtccaccatcagattccatggtctgcggtctgtggagacggtggggaccgactctctcaacacctctgtgtgaactggatcccctgggggactggggggagtaacagaaaagctcacagagtgcccct

SEQ ID NO: 766877 - DNA, 608 bp, Homo sapiens
cacctattaaaaggaaagaggaagggatgtagcactttggaccttggatggcgcgtgtagaatttcctacttgtctctgcttcagagatgaatccacgtggccctgggaaatgaaccttcttaccaagatcgccctccgctggtgacagagccaagtctccgggctcctagttcacagctcttcctacaacaccaggctggctctccgcgtctgatccagagccaggcccgcccatgaccgcaggctggtgttcacwctaggcagcttttaagacggggagggatagcaggaacagttatgacttttttttggatacataatatgtgcacatactgatggggtacctgtggtagtttgcgacatgcacggaatgtgtaatgatcacgtcagggttttaggctgcacatccccttgagcacttatcatttctagtgctgtgagtgttaaaagtcctctcttctaggtatcctgaaatatacaatacattgctgccaactatggttaccctattgtactatcaaacatgagaacttattccttctaactgttgggtaattgtacccataccaattcctaatgagtactgtacccattagtaatggatact

SEQ ID NO: 766878 - DNA, 496 bp, Homo sapiens
caacctccgcctcccgggttcaagtgattctactgcctcagcctcccgagtagctgggactacagatgcgtgccaccacgcccagctaatgtttgcatttttaacagagacgagggtttcaccatattggtcaggctggtctcgaactcctgacctcaggtgatccacctgtctcagcctcccaaaatgctgggattacaggtktgagccaccgtgcctggccggaagatattatttctgtcattttgctttgtttttgaagtggcttataagcgtttttatctctaatttcctgcattgctgtcttcttttgtgtttatttatctattttttttgagagggagttttgctcttgttgctcaagctggaatgcaatggcacaatctcgactcactgcaacctctgcctcccgggttcaagcaactctcctgcctcagcctcctgagtagctgggattacaggcgcacaccaccatgcccggctaattttttgtatt

SEQ ID NO: 766879 - DNA, 622 bp, Homo sapiens
ggctaatccttgatgtttgacctttatacggtgctgtgttttcaaagagaaagaacacatgggtttgggtactgcagtgtggaagcaggaagatcacagatgatcctctagggggaccttgtgcttcccataaccacagctctgaggttgagagagttaatattgctctgggagcaaaactagttatatcattgtccattttgtgtacattgtttttctttcttttctttttttttttttttttgaggcagagtctcactctgtcgcccaggckggagtgtggtggcacgatctcggctcactgcaagctccgcctcccaggttcacgccattctcctgcctcagcctcccgagtagctgggactacaggcacctgccaccatgcccagctaattttttgtatttttagtacagatggggtttcaccatgttagccaggatggtctcgatctcctgacctcgtgatctgcctgcctcagcctcccaaagtgctgggattacaggcatgagccactgtgcccggccgtgtatgttgttcattacattgcccacatcatttcacttgatatgaatgcaaacatttatgcttttttctgaatcgggatattaaaatgcatttact

SEQ ID NO: 766880 - DNA, 622 bp, Homo sapiens
ggctaatccttgatgtttgacctttatacggtgctgtgttttcaaagagaaagaacacatgggtttgggtactgcagtgtggaagcaggaagatcacagatgatcctctagggggaccttgtgcttcccataaccacagctctgaggttgagagagttaatattgctctgggagcaaaactagttatatcattgtccattttgtgtacattgtttttctttcttttctttttttttttttttttgaggcagagtctcactctgtcgcccaggcgggagtgtggtggcacgatctcggctcactgcaagctccgcctcccaggttcacgccattctcctgcctcagcctcccgagtagctgggactacaggcacctgccaccatgcccagctaattttttgtatttttagtasagatggggtttcaccatgttagccaggatggtctcgatctcctgacctcgtgatctgcctgcctcagcctcccaaagtgctgggattacaggcatgagccactgtgcccggccgtgtatgttgttcattacattgcccacatcatttcacttgatatgaatgcaaacatttatgcttttttctgaatcgggatattaaaatgcatttact

SEQ ID NO: 766881 - DNA, 473 bp, Homo sapiens
ttagctccatcgcagcatagctgcaaatcaatcaccgtcttccagaattcctggatatttctttttttctaatcagaaagacagtagcaacacctggtgccgaagaagtgtagagatgctgatttgtgtttagagcatgctcagagttgaccttctcaaatcaagaggaaaataaagagaaraagagagaattcctcggccctggccagaaatggagggtggacttacagccaggtgctcaggtaccagattggtggttactcttctggcctcgagggcatcagcattgctgacatgaacacagcagcccctttcagtcaggttttgctttcagttatccacgatcaaccaccgtctgaaaatatgcagtggatcactccagaaataaatcatttataaattctaaactgtgtgccattctgagtagagtgatgaagcctggcacagtccttctccaccttatccctgacatg

SEQ ID NO: 766882 - DNA, 635 bp, Homo sapiens
ctctttcctttataaattacccagtctctggtatttcctcatagcagtgtgagaacagactaatacagtgaattgctaccagtagagtgaggcgttgctgaagagacacctgaaaatgtggaagtgactttggagctggatgacaggcagattggaacagtttagagtgttcagaagaaaataggaaaatgtgggaaagtttggaacttcctagagacttgttgaatggttttcaccaaaatgctgatagtgatatgaacaatgaagtccagactgaggtggtctcagatggagaagaggaacttcttgggaactgaagcaaaggtgactcttgctatgcttcagcaatgagactggcatttttcccctgccctatagatctgtggaactttgaacttgagagagatgatttagggtatgtagtggaaaaaattcctaagctacaaagcattcaagaggaaacagaacacaaaagtttggaaaatttgcagcrtgatcatgcaatagaaaagaaaacccactggggggagaaattcaagcccgctacagaaatttgcataagtaatgaggagcctaatgttaatcccaaagacaatggggaaaatgtctccagggcatgtcagagaccttcatgg

SEQ ID NO: 766883 - DNA, 653 bp, Homo sapiens
acagactgcaaatcctcagaggagggcagcctagaaaataggagtgcagcttttttcgtatgatttgcttgttttataaaattagtcagccatgtggctgtgtgtgtcacagcataagatgacaattcataagagagaaattgtcactkttcataattcagaggctagaatgattgcactgttcctccaaaagatgaatattcccagccattataaaagcataatggcatttgacagatgcactggaaacaccatggaacccaagagccatttgtcactgctggcatttagattgtcagagtctttgagttctgtcggaccttaacattttgattcggattagaaacaataaaatgaaaagtgccgtgttaaaagaagtacaggtaaccatagaaatgtgtaagtttcctactttttcaaaaacctgcaatgaaaacccacatgtacatgtcagaaaagcttttcctgcatgtgggatggtcccagtttgaagtttgaatcctgaagccattgaaagctcagttcttcatgagtacccagcccccctcagggttagatcagacatgctttagacaatgaccaccaatgagcccagaaaaccccctttgtagggaagaatttgcttctaggatccaggattggaaagaacccta

SEQ ID NO: 766884 - DNA, 600 bp, Homo sapiens
cgctatcataggaaggaaaatatactgatttaaagagatgattgaggaataaatgatgattttgaagcacatagcacttaactaagcatagtataagaacagctaaattaaaaagtattttcaacaccattgcacatttctcattttctccaataagttgaatgtcagtagaaaagaaattctaggaggatagtgccaagttgaaaattaaaaaaaaatattcaatacaaaactcaagaagccaataatctgtagaaaaatccacctcaataaactataacattttgaactacttgctggcaaatgacagagaatgaaagaagmagcttactaaaattcaaaaatgacagcaaagcaaatccaggttttgtctcatagctatgtaatgaagatgactttctgcttaaattaactgctacaattcaatgacggtctgttgatactcagggttactcaatgtttttcacatttccattatgataatttttaaataagccaaaatttgtactgaacactttttattgtattgaaatacttaagatggatagtgagatattatgcatgcattttagttacattgtcagtattgtcagttttcta

SEQ ID NO: 766885 - DNA, 614 bp, Homo sapiens
atctgctctgtcactttcaaaaactgaaacatcatatccatttctagagcaacaggtgcttggagttccccctctgtaggggtgagtgaagtattggcctcgggcccttcatggtctctccacagatctttgtccagatcaacgaatacatttttccaagtggctgcctgtgttgaaaataatgttcaaaaaggatagygtattccctaacagctgcttcagataataaaatgatgacattttattggtgcatttccttctctaatgtgcttctgcacacatcatctcatatgatgacagcctagaaacttccgacagcagcaacatatcatagagcgattttgtacctcatcctctcaaccacatttgctttcaaacagcaacaagaaactgtaccaagaaaatcaaacagttgggcctggcttgagtaggcagtgagatagtgaggcaggagactaggatctggaggcagggaacctaaggctgcttcacgccaacttcctagaactaaattgcaaggaaaaccctaactttccacgcctaagtcacaaaaggccagaggctactcccatttgcaagccctccactttttctgcatggcagatgggaaattg

SEQ ID NO: 766886 - DNA, 597 bp, Homo sapiens
ccggccggtatttacatgttccctatttacagaccaaacctccctcttcccacgctcctccctgctccggcagtgggcaaaggaaagaaggggcctctcctgtgccccacccccacctctccaatcccctagcccgggtgctctccgcccttccctccctcccttccccgccgcctgctggcccctttgggggcacagcttaggtcgctgtattccaaagcccgggtggctctttgaggtcaagtggcgtggtgggggtggggaggggaccgccctgaccggggcgggcggccttgaggtctttcagtgatcaacagattgggggcccttctcccgagacctcccgggggccagcttcgttctggcctcaagaactcagtggggaggcaaggcaggttttcaccctccagcgcmtgcggtgctaagcggtcctccagtcctccctgtacccccagcccagactgcatacccatcctactcgaagacactggctgggagtcaccggggcacgtgaacttgaaggactagaatctcaactcttggcctgcaaaatggatgggaaagtgagaagactgggaagggccagccacttagttt

SEQ ID NO: 766887 - DNA, 646 bp, Homo sapiens
tactgtctgtgttctataaattgaaaaacaaaacctggataacagcacatctgtttatagcatgttttactgaatattttaaacccactgttgagatctatttctcagaaaaaaaaaaaaagatttatttcaaagtattactgctcattgacaatgcacctggtcacccaagagctctgatagataygttaatggagattaatgttgttttcattgctgctaatgcaacgtacattctgcagtccatggatcaagcagtcatttggaccttcaagtcttattaaagaaatacatttcataaggctatagctgctatagatagtgattacactaatggatatgggcaaagtaaattgaaaatattctggaaaggatttaccattctagatcccattaagaacatttgtgattcatgagaaaaggtcaagatatcaacgtgagcaagagattggaagcagttgattccaacttttatggataactttgtggagttcaagacttcagtgaagaaagtaactgcagatgtggtggaaatagcaagagaactagaattaaaagcagaggctgaagatgtgactgaattgctgcaatctcatgaacaacttaaacagatgaggcattgcttcttattgttgagcaaagaaaa

SEQ ID NO: 766888 - DNA, 568 bp, Homo sapiens
tagctgacaaaatctgagcttatgaaaccacaattctttttatagtgggcggcaagcaaatctacccaatctttgacctagacggaggctgtattagtttgttctcatgctgccaataaagacatacctgagactggtaatttatacaaaaaaagaggtttaatggactcacagttctacatggctggggaggccttacaatcatggcagcaggcaaaggaggagaaagatacatcttacatggtagcaggcaagagagcttgtgcaggagaattgccctttgtaaaaccatcaaatctcgtgagacttattcactaccacaagaacagtatgggggaaaccacccccatgatccaatgatctccacctggtcccatccttgacatgtggggattattacaattcaaggtgaaatttgggtggagacamaatcataccatattattctgcacctggcccctcccaaatctcatgtcctcacatttcaaaaccaatcatgccttcccaaaagttccccaaagtcttaactcatttcagtattaactaaaaggccacagcccagcctcat

SEQ ID NO: 766889 - DNA, 649 bp, Homo sapiens
aagctgtttaaatagccccattatgctagtaaaatcctagtgctttcaggaaccacagggaaggctacatgcaattggacctggcactttaattgaaattacttgcgtgcatcaatgaataaaagaacgccatggtgactaaaagcattgctcatcatgttccctcaattctttataccttttctccaaaaaactactctgtcgattctttgactatttaaatgtcattgttattctagccacaaatgagtttttgacattctgaataamcagttggcttgcatggtccaaatgggaggaggaatgtcaagaagatgctcctgagagtgacagagagcatggaaggacatggtacgtgagaccatctgagtcaattctgtgaaagggttggaagcagcagctttatctctactgtaatggataaactccagatctcggtggctttatagaagggcataaaatccaaatggctgcaggggagggaccctcttgtttggtagactgccttatgagtagttcatataaggggacttagactctatctgtcttggggcactttccttctccagagtctcagattcctccccattcagtctatggacaaggaaagagacagtaggggatcctgattcaggcctggaaatggcat

SEQ ID NO: 766890 - DNA, 432 bp, Homo sapiens
gacatcaactggctgagtcatgctgtctacacggctgtttaatgcctcattcttggtgaatgtttccttgcgggcagtgccatgagatgcaaagatattcaaacttccaatctacagccacaggcagaggcacatgcctctttcccagatctttttttctatgatctttctatcgctcttcttccaagcccccatccaatcagccaaacgagaggttacttcctgtaagttcctatttattyttacctccagccataaaaatggctgtgaccatctgatcctctaaacattgagagtgttactcctcattgctgtctctcagggacaccatcagaaggtttacagaaatattatggaatatctactcacaccaaaggtggaactgtagagtagcaacagtgctttctcagcttggacccccatagagagcca

SEQ ID NO: 766891 - DNA, 432 bp, Homo sapiens
gacatcaactggctgagtcatgctgtctacacggctgtttaatgcctcattcttggtgaatgtttccttgcgggcagtgccatgagatgcaaagatattcaaacttccaatctacagccacaggcagaggcacatgcctctttcccagatctttttttctatgatctttctatcgctcttcttccaagcccccatccaatcagccaaacgagaggttacttcctgtaagttcctatttattcttacctccagccataaaaatggctgtgaccatctgatcctytaaacattgagagtgttactcctcattgctgtctctcagggacaccatcagaaggtttacagaaatattatggaatatctactcacaccaaaggtggaactgtagagtagcaacagtgctttctcagcttggacccccatagagagcca

SEQ ID NO: 766892 - DNA, 624 bp, Homo sapiens
aatttttggttgcatttagagaagagaacagtgcatcaagctacttggacgaaaaatatctttctggttcaagtttctgaggatgagcaattattacattttcagattcacaatgcagaggaatagttttaaatagtctgaaagaactatttagatgccagccacaccttaaataaatgtgctcattctacatgcaagtctaaatatacatgtaaatgaagaaatttgaagaaaccctagtggattcactctttccagcttaaagcacactccattattttcctaaacatatggatgtggtccaagaaaatatctagatagaagtcatttttcccaacaatatgacaaaatatatgatttctttgctgcttcgtcagtgattggagtgtgatatagactgtaactttctacagttagaaaatcagccatgagaacagtggcttcagtgtctgattacmttcaccaagtatgtctgtttattaatcttgatgttgtttgctatgtaatggaggtaatgcagatagggaaaaaaaaatgtctgagctgtgcatggattgctatggaaacagcagctgaccaatcaatggagagtagtcagaacatatgcctcctctcctctgcagt

SEQ ID NO: 766893 - DNA, 562 bp, Homo sapiens
gctaattcctaatatttattctcaagtaaacacactaagatgactggcttccaccaacatgccagccatctagatatgttttgaatcattatgcaacaaactcaattcacaagctcaggtcttttggagttcttataccaaagatcagaaaactayagatgaatcctaactggtctccaaacaaaagggaaggaaagtcttgtttccccaaaacaggattagcattccacagtatcaagaaacccagtttatcttattgtctcataaacttggatttgtcatcactctgccctgatggggaagaggcagcttacagaatctgcacaggatttttatgtatagtgaattagtgtgttgtggtgttggcctccttctcaccctcaccctcgcagcattccttcccttcttcctcccctcccccacctacatacctctttggagcaccaggcacattttgggtggattagcagacattcttcacatgaggtggcacttccactagtgcatatgttgagacctttaaagcaagataaagatgcactaattagttcctggctataaa

SEQ ID NO: 766894 - DNA, 624 bp, Homo sapiens
agtttctttcacttataaccattttgagactcatccttgctgtgtgaattcatagtttgtttcttcttatatctgaacactattccactgtatcaatgtaccatggcgtgtttggtaattcatctgtcgatggacatttgagytgtttctagttttgactattacaaacaaaaagattataaataaggccaggtgtggtggttcatacctgtaatcccagcactttgggaagctgaggcaggtggatcacctgagatcaggagctggagatcagcctggccaatgtggcgaaacctcatctgtactaaaaatacaaaaattagccaggcatggtggcaggcacctgtaaccccagctactcaggaggttgaggcaggagaatcccttgatctttggaagtattatttgcagtgagccaagatcacgtcactgcactccagcctgggcaacagagcgggacttcatctcgagaaaaaaaaaaaagttataagtattcatgtacaagtttttgtatgaacatacactttcatttctttagggtaaatatttagaatggaatggctgcatcacatggtagctatataactttttaataaatggtcaaatggttttcctaagttgtta

SEQ ID NO: 766895 - DNA, 587 bp, Homo sapiens
tggagcttaaaccaaaccactgatgccagggagccagccagccacccttccctgctgcagtgtgtgacgggacacacagatgcccctgcgcccggctcctctctatggaggtttaagcatctcttgagcagttacacatcacttgccccttcctctcaccttcccccatctgtgggatattggtgcaggattgtggcatctgtgcacgtgaatcacacaccccaggtgcaggggctgacatggagcactgtgtctgggcggaragcctcggcgtgccaggtgtgcatccaggcctcttctgctatcaggtgtttcccctcggcctaggcgggacccttctgcagctaggaaccccgtgcaggagtgcagctggcctctcccttcctcactgggtcacagacatgctttactcatgtccccttagagcctcatgctctggaggtgccttccccacccccaaacgcctcctggaaactgtggagactgtgtgacctcaaccttgtgggtgcctcctttttttctcagttagaacaacaaaataaaacactcttaatccactccatacggaagaaacccatgaacaagaa

SEQ ID NO: 766896 - DNA, 585 bp, Homo sapiens
ccgttttctcgatgttgggattcttcccaagaatgttttcaggacagaacacttcattttgtggagctgaagtcttctggctccgatagaggagatgatttgtcagctgtgacgtcagctgaaggcagtggaagtgtatgcctgggaatagcctccctacatggctyttcccacagctgcgggttctgggggtgagcaggcatgctgcggaaggagccaagaagcctagtctgtgggctcaggtgagctgcaggagctcagaactctccagttaggtgcgaggccgtgagccacaaagggccattggttctacagagagagaggcccaagatttcaaaaaggcgacactttgaaattttaggttagcctccactgataaaaacagttctccttttatttatctcatggataagtgcaatgtaactactaaaatgcacctcccctgactaggactcttgctacagcagggtgatggtgagtggtggagaccatgggacacaggagttcttgcttaaaaccatcagggccaaggattatgtaagaatagggattatatttagaggaccttgaagaaacaaccatgcc

SEQ ID NO: 766897 - DNA, 588 bp, Homo sapiens
ctctggcaagggatcctcaatggctatctccaaggctctccatattgagaagagttttttgttgttgttgttgttgttgttttctgagacagagtctcaccctgtcgcccaggctggagtgcagtggtgcaatctcagctcactgcaacctccgcctcctgggttcaagcgattctcctgcctcggcctcccaagtagctgggactacaggtgcgtgccaccaggcccggctaattttttgtatttttagtagagacagggtttcaccgtgttagccaggatggtctcaatctcctgacctcktgatccacctgcctcggcctcccaaagttctgggattacaggcgtgagccaccgcgcccggccgaaaagctcccttttttaagccactcctaggatggtggctcctaacttttacctgtgcaccagccccgatgaaattttcaccaacccacggtagaaagagaaaaataaatgtgagttatgagttttttaaaaacttaatttgttcctctttgataactgttctataatctaagatttttgtcctttctacttttctctgtcacttaagatggatgcctttta

SEQ ID NO: 766898 - DNA, 574 bp, Homo sapiens
aacctcaagaatatatgcccgacttgcccatggtcacaaaataatgacttagactaaatagtctttttctcatggggcaagcccaaatcattctgtaaatatccctccacctcagaaccacatagcctcaagtacttacattaaacattcttgaacaaatgkattctaattaacaatgaacaccaagaacagcattaatctgtgaatccatgaacataatggtaagaaacagcagaagcaactgtgctgaagaatggagatagtaaacaagggatggggccaattcaaaagggccacatactttgacactgaggagtgtgtacgtgtgtgtccacatgtacatatgtgtaagagagaggagagcatgttgtcaggaaacagttcaagccctgccatgatgatggcaggagataatgtgtatggcagttgtttgcgagtgatctccatgtttcttagcctcatccagctgcactgccttcttctcctatcccattactcaacgttactgctgcctagtgtgtgccacacactgggggatcccaaagcttgagaactgaggccacttcccacaatg

SEQ ID NO: 766899 - DNA, 545 bp, Homo sapiens
caataaatacctagtaagttccaaattttcccacatcttcctgtcttctgaactttccaagtctctaaggagtttcaaactttcccacatttttctgtctcttctgagccctccaaacagttccaaccttggactgttacccagttccaaagctgcttgcacattttcaggtttctttatatcagcaccctacttctggtaccaacttactgtattggtccattctcacattgctaataaagacattcccaaacctaggtaatttgtaaaggaaagaggtttaattgactcacagttcakcatggctggggaggcctcaggaaacttacaataatggagaaagtagaagcaaacatgtctttctttacatggcagcaggaaggaaaagtgccaaacaaaagcagggaaaagcccctcataaaaccgtcagatctcatgagaagttgctcactatcatgataacagcatgagggtaactgtccccatgattaaattacctcccatcaggttcttcccatgacacatagggattatgggaattacaa

SEQ ID NO: 766900 - DNA, 611 bp, Homo sapiens
aactgacccatctttcttcccactgtattttgcagttgctaacacttgctgttgcatatggataaatatgttgagtattgtaaagactcttcagaaaagtaatgtacaggttacttgctcaggtggatttcttgttggcctcattctttgatctgttccatattarctggtttgactcatggggaccttggttaaggaacatacatactccaaactcagtattatcctcctggcagtcataatagtattcttcctgatgtattatatcttctcaaaagttttaattgcctgcatgcagtcatttgcttaatgccaaatggtctccctttgtctagagtgataaaaactcaagcgagtagtaacaaagactctgtaacctctgacatgttgtgactgaaaaacaaaaaatgatggtaactggcaatagcactgatgctataagttttggtcacactcttaactaggtgagatctgagcaaaaggagaatattgttaaacaaaatgtgtgggaggccatagttttgtactcagctcctgcaccgtgtcccaacagaccaaaatggagtcactcaccaaacgaaaattaagtcatttatttggccttctgaaaa

SEQ ID NO: 766901 - DNA, 589 bp, Homo sapiens
cacaaatcatataaaaatgatttttaaatttcttggccaggcgcagtgactcacgcctgtaatcccagcactttaggaggccgaggtgggtggatcacgaggtcaggagttggagaacagcctggccaacatggtaaaaccccaactctactaaaaatacaaaaaaaaaaattagcaggggggtggtggcgggcgcctgtaatcccagctacttgggaggctgaggcgaggagaatygcttgaacctgggaggcggaggttgcagtgagcggagatcgcgccactgcactccagcccaggcaacagtgtgagactccataaaaaaaaatatatatatatatcagtaagaaaatgcaactcttataaactcagacaataatagttgttatcaaaacaactattttgataaataattatcaaaacaataatagttgaaagcacccttgagctggcaaaagcagataaaagccagagggagtcaacatttgaagaataaaatactgggtgagtgtcccattttatgatttttttctttttttgcctggaggcagagcatagtaacatgcatgctgcattggtttgtgcaaac

SEQ ID NO: 766902 - DNA, 623 bp, Homo sapiens
agggccttctgaagggatcctggttaaagaaaagcagttggtcataataaagagtaaacattaattaagtgactctcccacaaagtgtaaaaactagtagcattagttatccaaattttgtcatctgatctaccccaacagtttcagaagacagtggagaaaaaatattaatgtaaggcctaggcaaggagttataatacacaaacacagagcagacaagtaattgacttgaaagtagcttatctaaattagcatttttaaacactttcatatatcagacataaatggtcagtcttgctctcaaggagattatagcagcattagacgagaggaagtgagatgtagactgtcttcaaatgttcgttaatgccacatctctttttgcttcattcattctctagtgtttatttatatctgyggcaaggataaaagtcaagaagatatttgtatgattgtgtaagaaccagctatttaaacacatctcactcccacttaatcaaaaatgcctgagtagagttggaattcaaggatagttttgaaggagagaagaaagatgatttgattgaatcattccaatagttgaagtagactacttagccatcttatctgaaggtatcaagctt

SEQ ID NO: 766903 - DNA, 633 bp, Homo sapiens
ttgtagtccaatagtaataaagacagtatggtattggcaaacatagatcaatgagatggaatagagagcttagaaccagtgttaagcataaatgaatgtttgatttattatgatgctactgtacagaagtatagaaaacacaaacctttcagtaaaccatgctagaataattgactatcaattttttttamgtgaactcctatcaccatattaaaaataaatccatttgtgaggatgtaaattgatctttaagatctaacagttaatggtaaaaagctataaagcttttaaaaagaatatagagaaatatatttagacctttcggtagaaaagcatttcttaaacaagatccaaaacacagagccataaagacttacaaagaggaatagactaaatgaataattaccaataatcaaaagatactttattaaagagacaacatcagttacagagtaggaaaagatatttaaattatccataatgaacaaagaaccggtatccagaatatataacaaacttttcaaaatcaaagtgaaaagagacagatatttcaacacaaaaattggctaagaattaggaagaggctcaaaacagaatatctaagtgaccagtaagtaagtttaaagtttatgt

SEQ ID NO: 766904 - DNA, 596 bp, Homo sapiens
ctaggtctaaataaggatcagagagcaaagctgaggagtaaactcatacataaacagaacacaggacattctacttaaagacacaaataataaggaaaaatgcctcatgaagtagcctcatgaagtagcaatccttctgcaattactgaacatttccctgcaacttttctgtgtttttcargcaattttctttattttccctcacatgaaatgacacagacctgcaatttctcactcctttcattcaaattgtgtgtcattttccaggggctcaggcacttactgttttatatccgtacaaatgtgtgtatgtatatatatgcacacatatagggaaaaataggaacattgacttgacaaaatatgctttatactatctttaacaaaagagacaataggtaggtctaaaaaatacattttgaaagtgtaagtataaaaagaagatacaacaattgttttacaagagaaagtgttcctcagtttcccattcttttccaaaggtaaaatagaatgaaactgatcaaaagtaatgactgtgaataggaccacagtctcaagtcattctttctacttcttaggccaagaatgtattagaa

SEQ ID NO: 766905 - DNA, 638 bp, Homo sapiens
tttttattactgttttaaatatttgtaacattataggaaaacaagccataaagaatattcattttgaaaccaaaggtagaatttagaccagactccgctgtaatgatctaaatatttaatcttgttaagggtgtggagaaatgtctctagacatggacatatgaactaatatgacctttcaggagtgccatctaggaatgcatttcaacattttaaatgtgcagctgttttgatctattaattcaacatagagaaattaatcctaaaggaagagggaaaatattcaagcacgaacatattgtatagtgttgtttatattgatgaaaaattaaactatrtgttcatatggaattgataaaactaatgctactacaaataataatactaatcatatgtcacctttattgagtttttacgatgtgtcagcaaaatagtaagcactttacatgtgttatgtcacttaattttctccacatcctaataatataggtactataattgtccccatttttcagacaatgaagctagctaagcggtagagatgttaaataccatctcaaggtcttatagccagtgagtggcagaattgaacacatattataaattcataatatggagtcattaagaaagagataagc

SEQ ID NO: 766906 - DNA, 530 bp, Homo sapiens; identical to SEQ ID NO: 728629

SEQ ID NO: 766907 - DNA, 570 bp, Homo sapiens
ccttgttattgtctttatttgaattaagtatggtttaaggagatgtgaatgggtgctaagttgacaaggaatggacttaattttgggaatacctagaaacctgacaaagcattgctttgggtgtgtctgtgacggtgtttgcagaggaggttagtgtgtgcatctgagtggaccaggtggggaagatccgccctcagtgttggcaggcaycagctaattgcctggggccctggagagaacaaatacagaaggtgaactgtctctctcagagccgggacacactttttttctgccttggacatcagaaatttgattccatgaaagtgcattatcacattgactttgtaagccttgtgcatgtacataaaaatgttgaaacttcctcagtaaaagaggtgtgctatttgtgcacctgcgtttgtgaaagataaaatttctcaagatcttggttctttggttgactacttgtgcagtggtgacccatcacaggttggtttgttgagacagggtcttactcaggcgcccaggctggagtggagtggctccatcttggctcactgcaacctctgc

SEQ ID NO: 766908 - DNA, 570 bp, Homo sapiens
ccttgttattgtctttatttgaattaagtatggtttaaggagatgtgaatgggtgctaagttgacaaggaatggacttaattttgggaatacctagaaacctgacaaagcattgctttgggtgtgtctgtgacggtgtttgcagaggaggttagtgtgtgcatctgagtggaccaggtggggaagatccgccctcagtgttggcaggcatcagctaattgcctggggccctggagagaacaaatacagaaggtgaactgtctctctcagagcygggacacactttttttctgccttggacatcagaaatttgattccatgaaagtgcattatcacattgactttgtaagccttgtgcatgtacataaaaatgttgaaacttcctcagtaaaagaggtgtgctatttgtgcacctgcgtttgtgaaagataaaatttctcaagatcttggttctttggttgactacttgtgcagtggtgacccatcacaggttggtttgttgagacagggtcttactcaggcgcccaggctggagtggagtggctccatcttggctcactgcaacctctgc

SEQ ID NO: 766909 - DNA, 623 bp, Homo sapiens
aattttgtcaaatgaggtattgtataggggccagtgagttatgtaattaagaatattctcaacaacaattttacagtattgttcctatgtcagtctgatgtatatttggatatataaggtgactctacaagttttaaatacaactttaaatacttttcttagattagaagtcttatttttcataatgagagtaatataccctytttacttctctttttgactacataccatctcctagctatatgaacttgagtgaattactgcccatgtgtcttgtacattccctcatgtgcaaaatggagactaatgttagtgactttgtggttggaatttgaggaattcagaaattctccagaaggacctaatctctacttttccatgataacactaaagatattaatacaaacaataagtttcacttgccctggaaggattagatcaattcaaggtgataggaaatactgacaattaactatatgtcccttggtttaaaattggaaacatgtattattattcaacacatgtaacttggttagtagatgtactcattcatatagagtatgaaataacacaagttaaactgttgatatttcagttctgaaaattggtataattctagggta

SEQ ID NO: 766910 - DNA, 479 bp, Homo sapiens
cacttcttttccttagcaactttccctcagacattcttttggttatgactgtagaaagcgagccaacctacaacttctggacgacagtatcgccatatacatagctgggaaccaactgatctttctgaatttgaaaaccaaggaacagatctacctgcgaagtagcagtggtgaaggaattggcgtcattggggtatgccttcaataaattagaaaaaaaccccaaaaaaccctatctttttgcttgttctgtggaccagccaacatggttgttagatgccaacaccatgcacmgtattgtgggttcacatgagatgcacagctgtctttattccaaggcattttcaattcagttattacagacactcattcactgtcactacctctgtgcactattataatattattatgtctttttgcagataaggaaatgggcttatagaggttaggtgacttccccatagtcgtgcaagtttttc

SEQ ID NO: 766911 - DNA, 454 bp, Homo sapiens
  misc_feature 87, 89, 108: n = A,T,C or G
tttttccccatctttccccagtcttggcccaggatcctttaagtagctggcttgaatggccacacatctgtataatggctttctttngntttcttatgctccatcggntgctcactgcaacctctaaactctggctcaagtgatcctttgcctaaacctcttcagaagcctggactactggtgtgcacacacacccagctaattttttattttttgtagagacagggtctcactacattgcccaggcttccaacaaattattttagattgcatatattatygccaacattcccttaatagggaccagtcccactgacatgaacactatttgcttctttaaagtacagtggtacatctttggattagaaaagttgagatggagccattggacaacacagcactaggaagctctcctcctaccccatctgctaatgagataagacaggaaactgga

SEQ ID NO: 766912 - DNA, 585 bp, Homo sapiens
taggtaccactgcggtatgtaccaatgaagtaggggaaacctggagaataggaattaaccaccctcacctatgcctccatttctccctgctgtcggaaaactgagtaccttgggcctgtttatgccatgaagcatggtctccttccatggggtgagaggtttactccgcagaattggtcctgctttacattgtgcctgttgcctggctttggatccctcagaccgggattttctttctagggcctcaacctgaagcttggaatcgaggttgggactgaaaaagtattttagaggctgtttgtatstatttagagtgtctcaaatgtgccctgccaaatttgcagttctcagccagcaggggccattcctgttaactttcatatcagaaacagagctagggggagccctctcacttagaaaaggaaaaaaagaaaaacagtttagggggcaaaaagaggagagagtctgggggaagaaccccttgcttagtgcaactgagcctttctaatccttgtatctgtcccccagttcagactagattgaattccttggccaggggaggagagggtcaattggcgtggtggg

SEQ ID NO: 766913 - DNA, 630 bp, Homo sapiens
attaagaggcaagcctgaaccaggagccggggctatagctgtgaaaaggggcagtgggtggagctctgacctttaaggaactcaggctcagcaggagaaatagataacatataccccaataaaaactagtaagaaggagcacttgaggcctggtaagtgctttgataagaacaagtgaacatacaaggtaccacactgtactcygctcatgattctcagccctcactgcagagtctcacattatgcttctgtggcttctggggccatttgtcacaatggtaattttttgttgaatctctattctttccacttgactgtaaacttcgttgctgttcatgatttcccctagcacagttctggcacatggagagccctcaataaattactgctgaatgaatgaatgaattagacaaaacaaaacacatagatccttgccccaccatacaaactaaactttgaggcatagaaatgtacaaagatgtaaatactactaatctttcaatggtggcaacaagagcactttttttttgaaatggagtctcgctctgtcgccaggctggagtgcagtggcgcgatctcagctcactgcaacctccccctcccaggttcaagtgatttcccctgcctcag

SEQ ID NO: 766914 - DNA, 626 bp, Homo sapiens
gagtctctaagaacaaattgccatttgtaaaaaaaagaagttaaatatttaggagacctgattagtgaagggaagtagaaaataaacccaaagaaaatatcgaggatagtggctctgcctttgccttagacaaagagaaacctccaaaatttttaggtttaactggctattgtaggttatggatgaactcatatgctcaaaagacagagattctgtatctcaagttactaaagaggaacccaatcccttgcaatggtccccaaaggaaattcaggcagtaaaaragctaaagcaggccctcatcacagccccggccctggcccttctgtctttaaagaaactattccatctgttcgtcacagtagatcagggcatggcccttggagtgctcactcaaatctggggagggaagaggcaacctgttgcttttgtctccaagcttctcaatcctgtctctcaggggtggcctgaatgtgtgcaagcagtagctgccacagccctgctggtagaaaagagttgaaaactaacctttggtggggccctaatagtaagcattccataccaggtcaggaatgtatcaaattgaaaagccgggagatagttaacggattctcagtttctaaaat

SEQ ID NO: 766915 - DNA, 550 bp, Homo sapiens
gttgggtggcccaatctatttcttccttagtgtactggaaagggggcagttcactggtgggagaggggagcgaggcctccatgaaggtattttttgagacggctgcctctttagctttttggtcagctaaccgttttcctcatgcagtttcatcagaacccttctggtgtcctctacagtgcactactgccacttcccagggcaaatgaacagcctctaggagctctaagatttgaggcccatacttartaggagtatcccaagctgttaggtacccccctttcctttcagatagccacatggacatgagacaccagaaaggcgtatttaaaatctgtatacatggttattctttttctttccctagttttagggctctggttagtgcaatgagtttggctacttgcactgaggtccccggggacagagctttagcctccagaactagatgaagggacactatagtgtaccctgcatatctagttccattccagacaaaactactttaatctgaaaaccatatttcgtccggattatctaggggctgatt

SEQ ID NO: 766916 - DNA, 636 bp, Homo sapiens
agttatggagaaaaaattctggaaaatatacatgtcagaattcaaaccaaattccggagccctgaggtccacatccttctgcattgtctatgaatcattactgaaaagctgtgttctgtaggggaagatagctcaaccagcttagagctgttgattctgcagtcaacttctgattccttccgtgggtcttacactcgaattttccagcagagagattaaytgaccagtgactatcaagaggaggctgactcttttgagctgccaccccatgccattggcatggctggcatccacttctggcctgaccagcaggggccacaatggtagggtccttggcagagcacatggctgccccatggaaggagctgccatcacagtggttaaaggcttaaactctaattggacagacctgagctcaaaatttgtctctgccactataaggtttgggctttaggcaaattagctaacttctctaaggctgtttgcttatctgcttaatgtggataattatgtatcatgagactgatataaggataaaactaaaccaggtgtggaatacacataacatggcacctggcacataaaaagcccttaacaatcattccaagagcctcatccctcctcagggccgtgggc

SEQ ID NO: 766917 - DNA, 612 bp, Homo sapiens
ttcttaatttcaaaaaatgtatagtgctatcagttgacttgaagacgttaatctgtgcaccaggaataaaatatatgttgtgtgcacgggtttgttttttgtttttttttttttttgagagggagtcttgctctgtcacccaggctggagtgcaatggtgcaatcttggctcactgcaaactctgcctcccaggttcaagcaatttttctgcctcagcctcccaagtagctgrgattacaggcacgtgccaccatgccttgtatttttctgagaggtggggtttcactatgttggccaggcttgtctggaattcctgacctcaggtgatctgccaggcttggtctcccaaagtgctgggattacaggcatgaaccaccgtgcctggccgtgtgtgtgtttttttaacctctaggtaacactttagcctccaaggtaaactgagtaggataaaaatttggggttggtttcctgtttatttttgcttctaattttcaattattgttgtttattctcttttgggttttacttatgtatacatctctataaaactattgatgtttttagtttgcaattgaaggcttttatttggttctttgaatagacattttgtt

SEQ ID NO: 766918 - DNA, 666 bp, Homo sapiens
gtgtggcttactattgctattattggatagtattccaacccagatgttgctattcataaatgggagtgctgcattccatattgtctcttgaattggtcctttccttcctagataatgccactgaggaagaggtgggctaaagcctgctccatgccaagcaatctgggtggcagactgggattggatgccagtgttgtataaagaagaagaattaaaagcttgccaccaatgccagcacagtttgtgccatgatttctgatttttgtcttttccatctaattgacctttaggtccgcaatgtctccagttaacatagattgttttctagccagtgggccaggacagggggtccatggacgggggtaggaactattgaagggaatccattctgtatagtcagcacaattagggcgactgggccgggaatggttgattagcacaccagttacgttaatagaaccaagacttaataagtacatgattttacyatagtgactcaaccatgtttgagcttgaattgtaagacagctatggctgagtgacgtttttgtggtgatacacaaagggagcccttccagtggagcggtataattaatgacattattctgagagtctaactgttctatgtcagggggagtttgggatcctggagcccactctccctga

SEQ ID NO: 766919 - DNA, 503 bp, Homo sapiens
gggctggagtgcagtggtgagatcatggcttagtgcagcttctacctcctgggctcaagcgatcctcccacctcagcctcctgagtagttgtagtcctgaatagctgggactatagacgggtgccaccatgcccagctagttttcctgtatttttgtagaaacagggttttaccatgttgcctaggctggtcttgaactcctgaggtcaagsgatccacccaccttggcctcccaaagtgctgggattacaagtgtgagccatgatgaccggccatagggtgtcttctgttagagtgaaggcattgattgggaagtaatgggctcttcaaaatcagagtggggacatatgaaaagatcctaaggaaggtggggtcattacatccctaaatattgttgagtcttctttgccagcagaagcagcccttttactgctgtctgacccactaaatcctaaggtggggtgtgcacaatagcactccatcatcaaatggaaatggtaaat

SEQ ID NO: 766920 - DNA, 660 bp, Homo sapiens
atataacaaaatagaaagaaatactcatatatagtcctcatttctgcatctggtcatatggtcatagctgtttatataacatagctgtatctatttatagataccttcttccactacccatgacttattccttttgccctcagtaagcacctaagcttgccatggttctttgcttggtgggtgaccccaatcwtcatttctgaaacctgggccattagcagttcttcctgaactcggttgtagttctccattgactttaatcacaggacatggtagtactaataggtgccctaaggaatctcttgtattacaaatatactttgtcttcttctattgtgtagtagcagcccaatttccctttggtaatcaggatcaatcatcccaaccaacacagcactcccttatttgcctgttaattcataggtaagaggagcccaaagtggcagggtggcagttttaacttgtaattcaatggaatcattgttgaatctcctggtggaagcattcctccctttgtaactaagacctgtagaccagctgagcataaggtcacaggaacagaagcaaacattttgctaggggattacctatggtaatagtgagtggtgccactcccatttctatctcctgattcctggaccggtgactcctggctatgga

SEQ ID NO: 766921 - DNA, 640 bp, Homo sapiens
aaaatagaaagaaatactcatatatagtcctcatttctgcatctggtcatatggtcatagctgtttatataacatagctgtatctatttatagataccttcttccactacccatgacttattccttttgccctcagtaagcacctaagcttgccatggttctttgcttggtgggtgaccccaatcttcatttctgaaacctgggccattagcagttcttcctgaactsggttgtagttctccattgactttaatcacaggacatggtagtactaataggtgccctaaggaatctcttgtattacaaatatactttgtcttcttctattgtgtagtagcagcccaatttccctttggtaatcaggatcaatcatcccaaccaacacagcactcccttatttgcctgttaattcataggtaagaggagcccaaagtggcagggtggcagttttaacttgtaattcaatggaatcattgttgaatctcctggtggaagcattcctccctttgtaactaagacctgtagaccagctgagcataaggtcacaggaacagaagcaaacattttgctaggggattacctatggtaatagtgagtggtgccactcccatttctatctcctgattcctggaccggtgac

SEQ ID NO: 766922 - DNA, 640 bp, Homo sapiens
aaaatagaaagaaatactcatatatagtcctcatttctgcatctggtcatatggtcatagctgtttatataacatagctgtatctatttatagataccttcttccactacccatgacttattccttttgccctcagtaagcacctaagcttgccatggttctttgcttggtgggtgaccccaatcttcatttctgaaacctgggccattagcagttcttcctgaactcggttgtagttctccattgactttaatcacaggacatggtagtactaataggtgccctaaggaatctcttgtattmcaaatatactttgtcttcttctattgtgtagtagcagcccaatttccctttggtaatcaggatcaatcatcccaaccaacacagcactcccttatttgcctgttaattcataggtaagaggagcccaaagtggcagggtggcagttttaacttgtaattcaatggaatcattgttgaatctcctggtggaagcattcctccctttgtaactaagacctgtagaccagctgagcataaggtcacaggaacagaagcaaacattttgctaggggattacctatggtaatagtgagtggtgccactcccatttctatctcctgattcctggaccggtgac

SEQ ID NO: 766923 - DNA, 540 bp, Homo sapiens
ccaacctgcttttccttcccaccttcacccatcccgcactttcaggctccccttagggactgttacctgcaggagtcttgctagctttctagcaacttaactttgatgtggctttaagagaggtgcctgagcttccatttgccacactctggggaatcccccaaatgctaacctgtccactctacaacaagctccggcagctgagctgttctgggccacctgccaaatatcatatgatactcccttgatgtcgggtgacagtaaaattcaccgactcctgggtggaggccctttyctttgaagcctgctctgctcacccaaccacacacagcccacttacacggcatcaccaattagagttggggaaatgcaggtggtggccccgggctacaccaagctccactgctgccttgctctctgggtcagatctgtctcaagcagagcaaattactgctggaatcaccagggctgtgaggagcttcagagaatgaccaaggttagcacttagaggactgagccctgggcggtgtgctctaaatg

SEQ ID NO: 766924 - DNA, 633 bp, Homo sapiens
gtccagggaggtctgactctcctgagaattcatatggctttgaggaaaatgtgattgggttggaatcctggttaggggcagctacattcccagaaactgtgttctagctagcctgtggccagatccttcccatttaatattgtcctctgtatgacagcaatattatgaaaacaccttgataatatataatgtgacatatgaatatttaaagactcatgtattcctggaaagtwtgactttagttcaaccttctcaatttatagatgagtagaaatgacttgattaatgccacataattagtctcagatctaaaagaaacaaaacgttcccagatttcttttcatataccttatatggtaggcagcctccaagatggcctccaatacctgcctcctggtattaataccttggtgtagtcaactcccacattgtaccgggattggttttcttggcaacaattgcctgcaatcatgggtgactaatgaggaaattcaagatttcttttgtttaaaagaactctgacaatgcctgacaccactacatgtgttttacaagtttccaaaacacttgctagaaaatcttcaatccacaaatccagccagtggaatcaactttgagtttggtttttgttta

SEQ ID NO: 766925 - DNA, 610 bp, Homo sapiens
caagtaccacagggcatgctacaatgtcagaggggcccaaattctgtggtaagtcaggagttcagatatacatttctggaaatacaaaaaggaatttttaaagctacttcccaaatgttcaaataaaattaataaattattactataaacccaagaaccacttactcttcagactatatttcatttctcaccaagttttctctgttaaatatgattaccytgtccagtttaacctcaaaaactacctttctagattttagtattaatcattattacattaaaaatctttcattattgccatctctgttcgatcttcacatagttaagttcatgcctgttcagcctctgtaaacagaaaactatggtctcctatgagtatcactctagcttccagtgtacagaaaggaattcatccttgtagtaaaacttctagttcagtttgttttaatacataaacgactcattatttaatattctctcctttgttacatacttctagtcttgactccttcatttggaccctgtgttagttctgaaaaacaacctttctgctatttgtttcttcatcttgatctgtctccaaattactaacctcttgacatcaattttg

SEQ ID NO: 766926 - DNA, 465 bp, Homo sapiens
attttgctagctagtgaagagttctgttcagtaattagagtcttggagttcctgggtacattatcacagcagagaaaagagccaagagccttataaaatacagacccaaaatgtgccacaaggaactgccctcaagttagctggcattagattgtatcagctagaaggcacttttcccycccagtttacattatctcaggaagaagaaaaaattttatgttgaataaagttttaatttttgacgattcaagaaataccattattaaaaatgattcatgaacagagttgtgcctcctaaatctgcacaatggagatgtcaaatttcctcactttattaaccataaatttggtatctgctgaatattaacatgcctcctttaatctaaccataacaatattatttttttcaaaaataaaatttttttttttaaaccatggaacgtccgggtataacacagacctgtt

SEQ ID NO: 766927 - DNA, 561 bp, Homo sapiens
agtttacaagtattttcaaatctttgagaaaataaataacttacaaacttaatgacctatttcatctataccttgtcctcatctgaacatgtgagatggatttaaaaagataaaatacttcccctgaccctagaggagcaaaaaactatatggcatacaacaaacacctgtctgatattattgttgatgacatttgtccagctaaataaagcttatttttctcaggccacaaatgtatttctcaaatcctggaaaaatgaacagcaaaaaataattctctattctcccatcttcaaaggcacatgtyttaaagtgtaagttttcctttaatgaaaacatagtaaatggtatttctttaaaatgattagctgaacaatgtttgactatgaaactataagaaaggttaagtgtttttgtttgtttaagtgattgatttaagaatttcaggacacagtaggttgtttttgtcattaaaaatgtttcccaacaaagcaagtatgcaagactttagttaactctttttcatatccacaaacttctgttaaaaaaagagttgggata

SEQ ID NO: 766928 - DNA, 540 bp, Homo sapiens
tttatcttatgttttataaacatttaaatgcggttatcaacatgcccatgtgtgacaaaaatttattagcaaactcagtcaactgaaattgtaaaagtgatgcacagccaaaagttactaacaccatgcaaacctgacagtctgctccccagataaaaatataattgtagaaaattggtctgccattaatttttaatatgctgtctaatttaggcagtgtattaaggatccttgttgagtcacaaggtaatatatctccctgaaacttgttagaggttgctaaatattacgcagttgatgctagtaaagaattggtataagtccctaaagaacagttctaatagatgatgtattatttattccattarcattatttgctcttcagctccccagtgccaatgattttagtataatccttaccttttataagcaacagatctgaaataataagaaagagaatttctatggcaaaaataagaatcaacaggcatagtcaaataataactgctggctgcattctgatgaatttctcttaatttc

SEQ ID NO: 766929 - DNA, 562 bp, Homo sapiens
atgtgtagctcaggaataaacccaggagtttataaataactttaacaaattgttttactgacctcaaccttctctgaaatttcgctagtagtttctggtctatttgtgcccctcttttctttttttgctttctttcttttytttttttttttttttttttttgagacagattcttgctctgttgcccaggccagagtgcagtggcacaatcttggctcagggcaacctccacctcctgggttcaagcgattctcgtgcctcagcctcccaagtagctgggatcataggcgcccactaccacacccagctaatttttgtatttttggtagagatggggttttgccatgtttgccaggctggtctcaaactcctggccttcagtgatgtgccttcctcagcctccaaaagtgctgagattacaggtgtgatccaccgtgcctggcccttgcccctcctttctgatcctccaggtaaaagctgaggttttatctagccctctctgctataaactttttgcaattgaaactgtatgctactcccttatggtcacagtaagcagtga

SEQ ID NO: 766930 - DNA, 582 bp, Homo sapiens
ttaattactgtgagcattaaggtgataaatgagttattagtattaaagatgaattattaataactgattaacccattcatatttattctaattttaggaattatcatttaaggattacattttatgtaaatatcaatgtttctaaaaacttagctgatagtttgttatgtaagtgaaggagatctatttggaactatggagtttttgcctggaaaattgttttataatatattcataatatggaatattatgttatgtcataatttattatatagcatgtcatgttatatattcataatatataactataaatatrtagccatatattttctattttttatattttattttattttaaggtctggtatatatgtgcagaatgtgcaggtttgttacataggtaaacgtgtgccatggtagtttgctgcacctatcaactcatcacctaggtattaagccttgcatgcgttagctatttatcctgatactctccctccccgcaaccccctgacaggccccaatgtgtgttgttcccctccctgtgtccatgtgttctaattgttcagctcccacttataagtg

SEQ ID NO: 766931 - DNA, 628 bp, Homo sapiens
taagatttaaataagattgccagatccttccatttatccatggtagcaaaaatagtttgtttcatatataaaatatttatgtaaaacacccaaaaagcacttaagtataaaatctgctacagcgtaagcattatgtrattattacctattgttaatattattgtagtttgtttagtgtacattttaagtcctggtatttacactgtgttaatcttataggtagctttatatatacttctctctaaattgagttttttaaacttgattcttttgaattttctcctcttcagtgtatatgcttccttttcagtctttactgatatagcttagatataaaaagatttttctaaagtcagcatcaaatactttaatacttggaagcagatgtaccttgctgtatgtagtatcagtctactctggctttgtagtctcagatttgtcatttgtgatcagagtgttggacatcaaaggatgtgaagtggttctctattttgtaaccagaaactatcctgatattttgaaataattgcctattaataaagcattttagtttcatgtttgtaaagaaaactacataagtcgtctgcttttttgttgttgctgttttgttttgttttgttttgttttt

SEQ ID NO: 766932 - DNA, 628 bp, Homo sapiens
taagatttaaataagattgccagatccttccatttatccatggtagcaaaaatagtttgtttcatatataaaatatttatgtaaaacacccaaaaagcacttaagtataaaatctgctacagcgtaagcattatgtgattattacctattgttaatattattgtagtttgtttagtgtacattttaagtcctggtatttacactgtgttaatcttataggtagctttatatatacttctctctaaattgagttttttaaacttgattcttttgaattttctcctcttcagtgtatatgcttccttttcagtctttactgatayagcttagatataaaaagatttttctaaagtcagcatcaaatactttaatacttggaagcagatgtaccttgctgtatgtagtatcagtctactctggctttgtagtctcagatttgtcatttgtgatcagagtgttggacatcaaaggatgtgaagtggttctctattttgtaaccagaaactatcctgatattttgaaataattgcctattaataaagcattttagtttcatgtttgtaaagaaaactacataagtcgtctgcttttttgttgttgctgttttgttttgttttgttttgttttt

SEQ ID NO: 766933 - DNA, 626 bp, Homo sapiens
aacaaccctacttccacaccctcaaaaattacccaactctccacactattttcaaatattttggaataaatatgcatgacactgataatcagaagatctattatactattaaagttctaattctagcctttctcatgctgtgtgtatgtaatgtgtgtcctggtgtgtcctgcaagtttctctctgctcccatttgtcacacgcagggcatcctcgtgacaaatttaagctataaaagaaagaggatatttgaaattagaattgctgggaaaggcatcttgtagtttatttgcacacaagtactggctgatttttttttattaccacacccacattccttgaaaagcctgactttctttatgtggaaatttctaaaccacacattttgcatgcaggcttcctagcctcctacaccaagcaatagcttctcctttttttgaccttcaatttaggcgataacaacyataacataatatacaattttctctggtttgtggatgttactttagactgtaaactctttaaaagagggcttttctcttcctttttgtacccccacagagatcagactgaagctggttaagcaaaatgccctatttacttcgtcagttatatagtaagacaga

SEQ ID NO: 766934 - DNA, 429 bp, Homo sapiens
cgcctggccctgccctcttccctagaaatctttatcctgcaactctgaagtagctctaaagagctctagaatgcacaactagtcatagccaggcacagctgggagtgtaactagacgaggcataaaaatgtggagtctttttagtgtaaatatttgtcagccacatttcccttcgtaatatgaacgtgtaagttacagatgtaggttttcaagtattggacgtgtaattttaagcttyctagtttggtttaatttgggcgttcgagatatgtctctgggattctaacgtttgaattcggctgggagagatctaaatgaggtccacagtttcagaaggttaaacttttgccctgtgaacacttgaattcttggttcctggtaggttagcaacagaactgtcggatttgggataaataaaccgttagagtt

SEQ ID NO: 766935 - DNA, 539 bp, Homo sapiens
cagcaaagtaaataagttttgacctaggttatagtctctcttttccagaacagtcaaatagaatgtaagcggtggaaaataaaatttcctgttttgtgttaaacattttcaagttttcactttgtctkttagttaccctgactgttcttgcacctttcactccctttggtttcatctttcacttgagtgatgtcttttccatcatttcttttgaagctcttaaatctctttatacagttttctcattggtatcatgagggggtactcttcacaaaactggccgctatccatccattgcacctataggagaagtcatgttttaattggcatcatgatttaataaataaagtgtccacacatataaagggacaacaaaaagtagctcataatacatattccacaactgaataaagtgactccaaacattaggtgtcatttatatagaacgttggtgatagtcttgttggtctgatatctttaagtcattaaactaatgggaaggactctcatgggtcattatttttagactttggaggaag

SEQ ID NO: 766936 - DNA, 539 bp, Homo sapiens
cagcaaagtaaataagttttgacctaggttatagtctctcttttccagaacagtcaaatagaatgtaagcggtggaaaataaaatttcctgttttgtgttaaacattttcaagttttcactttgtcttttagttaccctgactgttcttgcacctttcactccctttggtttcatctttcacttgagtgatgtcttttccatcatttcttttgaagctcttaaatctctttatacagttttctcattggtatcatgagggggtactcttcacaaaactggccrctatccatccattgcacctataggagaagtcatgttttaattggcatcatgatttaataaataaagtgtccacacatataaagggacaacaaaaagtagctcataatacatattccacaactgaataaagtgactccaaacattaggtgtcatttatatagaacgttggtgatagtcttgttggtctgatatctttaagtcattaaactaatgggaaggactctcatgggtcattatttttagactttggaggaag

SEQ ID NO: 766937 - DNA, 547 bp, Homo sapiens
tttttaatactcaaattacaagtgtctcccaggaaagctaagggaaaatgcagggaaacttaagatgtaagagaaagtaaatgctttcaagagaacagaaagggaagttaagttgtattaggttgaaagaatgcttgtaaggttacaagaagtggtacttcaccagccttttcaaaaagtgtttatataaatcttctctgatgcaaaacaaaacagcaattagagrtcatgaattactcacctgttattttagtgaaatgttttatacaaaaattaaaatttgctgaatcatgtgccatttttgtctcctcagctttgtctgaaatactccattcactaggcctttgtaccaattagcaggcttcccccagtcattgtctgatggtagctaccaaaattatagttaacatggtgctatagtttgaatgtgtcctctataagttcaagagttggaaacttggtacccaatgcagcagtgttgaggggtaggactttggggaggtaattgggtcataagtactccacctcatgagtggattaattcctt

SEQ ID NO: 766938 - DNA, 489 bp, Homo sapiens; identical to SEQ ID NO: 766813

SEQ ID NO: 766939 - DNA, 659 bp, Homo sapiens
catgctttgggtcatttaacacaattaattcacataaatataattcgtataaaaatttttatctgtaatatcaggtgaagtacctctgaaattattttgtgctgagttgacttttcttttctttttttttttgagatggagcttcactctgtcacccaggctggagtgcagtggcgcaatctcagctcactgcagcctccgcctccggggttcaagagattctcttgcttcagcctcccaagtagctgggattacaagtgtccactaccatgcctggctaatttttgtatttttagcagagrcggggttttgccatgttggccaggctggtcttgaactcctgacctcaggtgatctgcccacctcggcctcccaaagtgctgggattataggtgtgagccactgtgcccagctgagttgacttttgttagtttgagttgctaagaaatacttagtatatacattcttactacatttttcctgatttgaaaaggaaaaaaaagtctgttttctctctccctagcaaactatacattccaagctccctagaacatattttacacatagaaatacctttttactgttatagacatgtttatgaaagtttctcgagcactgaaattttctaaataaaattctatttcttatgatttgttact

SEQ ID NO: 766940 - DNA, 601 bp, Homo sapiens
tatggtatatcacatttattgacttacatatattaaagcatccctgcaatcctggtacgaaatccatttgatcatgttggattatctttttgatatgctgttggattcagtttgctagtattttgttgaggatttttgcatctatgttcatcaggaatattggtctgtattttctttttttttgttatatccttccctggttttggtattaggatgatgctggcttcatagatgatttaggggggattccctctttctctmtcttttggaatagtgtcaataggattcataccaattttttaaatatctgatagaattcagctgtgactccatctggtcctggactttttttgttggcaatttttttttattacaatttcaatcttgctgcttgttattggcctgttcagtttctatattttcctagtttaatctaggaagattgtatatttccaggaatttatccatcttctctaggttttctagtttaggcacttataggtgttcatagtagccttgaatcgtgtatttctgtgctattagttgtgatatctcctgtttcatttctaatttagcttatttggatctttttctcttcttg

SEQ ID NO: 766941 - DNA, 617 bp, Homo sapiens
taaatggagaacagctccactgcttcttttctcttgagcacattgtctgtgaaccaatgtttaggtgggttttcagcgacaatcaaggtgtccctccagagtgtctggggtgcaagaagcaatgacaggaaagcaatctcggagaaggaaaggaaagcaaatgggagagcaggaggaacaaagagggggaagaaaaaagatacacagaagaaccatctattgatctagaatgtttggaaatgtttattttggttgacagaaggctgcccttcatctcattcacagtcaaacaagtcttaaagatgtcatttaacaccaaaactaaactgggcatcagttaatttgtttcatatcatgatcaaagtcttatgattttaacttctagttrttattgtgaatctctaagaaaaactctggttctattgagtccagatagatggattttactgcattcattgtataccatggacaattgtttcagatgccatttgttgtcccgagttgtcatgtcctagcctgcctcactggttccaatctattatttcaacagaaaagagaaaacatttccatggaagaggaaacaggaaattccaacagatcagcaacagttggagtgc

SEQ ID NO: 766942 - DNA, 600 bp, Homo sapiens
gtgctgcactgctgtcctcctttcccctggaggaagcacctccagtcttttggtaactgttcctttccctgctctcatcatggggatgcaagaagaatacctgcttttttagacacaattgattggctgatgggtgggcacttcgaacctagtttgtccaatcagatcactttcttggggtttttcttactaaaactgtgatgagttacatcatgctggagatagaagctatgggatgaagagtttctgactggtggtttccatgttttcttccatctggagaaagttagtgtgtgctgagagagaatgaagcccacacagagagaggcagaaatgacagctggagrgagaggtttggcattgtttgaggttctggttctggtttcatttattcctgagaaccagtgatatccctgacctttccataattttcatttttccacatttccttatattttttgtgctaataatttcctcatttatcaagttaattcaagttaggctcctgtcataccaaacaccgtccacagtttgttatgtatttaagacatacatttctaatttctctttcaatgccggagatcctgaaatatctctgag

SEQ ID NO: 766943 - DNA, 675 bp, Homo sapiens
agaatatttagttgagaagtatggaaaatatgatatgctatttatttgaatgatactcggtaggcatgtaatgtgatgattaaatcagttaagaatatgtgatagattttttttaaaaaaacatctcatttaaaatgcatgtcttttgtttttatgattattgaaaaatggttttcagaatacaaaatgagaatcaaaaattggtaattagatattctgtgtttctcaaatggayggactttataattgggtggagttatgttaaaagctagaaaaactgaagaagttaagaaagaattgaaaattcccattaagagaaaaaagaaaaagctgcaacctttgctaatataaaccgtaagagcctatgcctcttgaaatttctctgtgtttgtctttgtacatttttaatgacttaatgagaaaaaagattcatcaggactcctttcctagcaggaggtttagtgtttcacaaatgagtagggagctgctctcataatgaggtaaacggccacctgattcttggataagtccaaggaaaacctttacaccagaggaagcaacagcttgccagtgttcaatctgagactttccaaggtcagaagagaggaggattggtattgatatttaataagcatttactgtgtccaaggcattttggtacgaattttatatctc

SEQ ID NO: 766944 - DNA, 611 bp, Homo sapiens; identical to SEQ ID NO: 749766

SEQ ID NO: 766945 - DNA, 645 bp, Homo sapiens
cccaccttcattttcattagttgcttccattctactgcagacagtttaaagacagtaagtcccatcttaaaacaaacaaaccttaacctttatattcatatttccacttctacggtcatgaacatctattcttaaatcacattcctcctcaatcytcccaaagaacactgaacctggtctcgtcaaagtcatcaacaacttgcacgttgtcattggatcggtggccacctctgtatcttcctctttctgggcttcttcaacagcatgtgttgcttttggaaacactttctcgtgtggcttcccagacatctgaactcttacctgcctggctgcttctttgcagtcccctcgtctctgctcaacctctaaaggttgagccatccaggtctgtaccaagcccctccttttgctgtttcctcacttcccaaaggcaacctcatccaggcctccagctttagatacctccttgcgtgctgatgattctcaaatccacgtcagggttaacaaaaccctatgcgacttgccctgacctccttgaaagagctcaggaagtatccttctcccactcatccactttgctcccctccctggccttctgttggttcttgaaagacttcaaggtgcagcctgggcaacgtggcaaaa

SEQ ID NO: 766946 - DNA, 573 bp, Homo sapiens
ctcagcccgatatgataattgtgaatgatcatatgtgtgggacccgagatattaccaggccaaaacaaaccaattttaagcaaacataaaattaagccatattttaaaaactgaaagcaacaattttagcatatattcctaatgggtgatcgaccagtgtctcagccrtcaggtttataatggcatcagaaagcaagttataacccagagaacttaaaatttcatctataaaactgttgggaatactacaatgattccttaaatatttacctatctttttgattttagcatttcttactaaaatcatttctctaattctcttccttttggataaaagcaaatttgcaagttgttaagtacagactagtaaaaatgcttttttgcatatggagaattactgttaaagttctcacttaatagttcctatacagtacttaggcctgaggaagaatatgctctaagttttcacaatgtaagaaagtaattcacattaaagaaacaaaactctatcatcaaagttttggaggacaatattcatattactttaataaaaatcactgaaacatttatttt

SEQ ID NO: 766947 - DNA, 588 bp, Homo sapiens
attgttagtagagatggggttttgctacgttggccaggctgggcccaaactcatgtgatctgtctacctcggccttccaaagtgctgggattacaagcgtgagccaccctgctcagcccgatatgataattgtgaatgatcatatgtgtgggacccgagatattaccaggccaaaacaaaccaattttaagcaaacataaaattaagccatattttaaaaactgaaagcaacaattttagcatatattcctaatgggtgatcgaccagtgtctcagccatcaggtttataatggcatcagaaagcaagttataacccagagaacttaaaatttcatctataaaactgttgggaatactacaatgattccttaaatatttacctatctttttgattttagcatttcttactaaaatcatttctctaattctcttcctttyggataaaagcaaatttgcaagttgttaagtacagactagtaaaaatgcttttttgcatatggagaattactgttaaagttctcacttaatagttcctatacagtacttaggcctgaggaagaatatgctctaagttttcacaatgtaag

SEQ ID NO: 766948 - DNA, 607 bp, Homo sapiens
aatttcaatcttttgcatatagatatccagtttttccaacactatttattgaagagatgatcttttccccattgtgtattcttggcacccttgtcaaagattagatgaccatatatgtttgggtttatttctagtctttctattctgtcccagtgaccctagtggccgtttttaggccagttccatactgttttaattactagagctttgtaatgtagtttgaaaccaggaagtagtttgaaaccaggaagtggttcctccagctttgtccttctttctcaagattgctttggttacttggggtcttttgcrattccatacaaatattaggattgtttttctgatatctgtgaaaaatgccattaaaattttgataggcatcgcattgaatctgtatgttgctttcagtagtatggacattttaacaatattaactattccactctttgaacagaggatacctttccatttatttctgtcttcaatttttttttttttttttttggtctcactctgtcacacaggctgcagtgcagtggcacaatcatgacttactcagcctcaaactcctggaatcacgcaatccttctgccccagccttcaattt

SEQ ID NO: 766949 - DNA, 631 bp, Homo sapiens
tttgcttattcccacaattttagtaaagttagcacactgggaatcaagaaagtagagatttagattcctttactattcaattatcacatcattagactttaagcaccggctagcacaaataggaagaaaaacaatttaactcaaagtatttttgtctattttaagaagggatcaatattttgatgtcaggttcaactttagttaatatggattaatacataataataccaagtttctctttgtaatgtacacttcatctggaaattgattttatcatttatttaaaatataagtatattcttggaattatttctggtggaatagcatctggaaactggtgtaaatgggtttctccacagaactgcttcatcacttgcggcggggcctgctgtttcttcagatgcacaggcagattacttcacacrgataaatgcaaagcagcattccttccaccatgtgccataacccctcttaaacgatatcttcttacacattgatttacatatcaatggtctttaaagaactatgaaatatatagtgctcttttcagttaatactccatatatccaaaacctgtcctatcgtatgtggaaaaaggtggccgctctgttaaaagtgcaatgctgtttta

SEQ ID NO: 766950 - DNA, 634 bp, Homo sapiens
aataaatcaggaaggccaaaaactctggttttactgttttgaaagacaccaggcaaccgaaaaggaatatcaaaaaagcatctaataaaaggaaaaaaaagacaagcaattttcataaaatctagacaggagttgtcaggaagcagaagaaaagtctccttaatactgttagaatgagaggcctgaaaggaacctgggtcgtttatttaacttacygctaatctcaatgtctcagttaccttgcagtgagaaagccatgctgtttgttcatctctcaggcagggaaatatttcacaacatccccccaaattacagccaattagcaaacttttggaggacatttagctttgtacattatgcaaatcttccctttatgctttaaatatatttatcggcttagtggagttcaagaataagtggtcatagcctctatatcatgatatttatgattctggtaactatgctgttcctaaattctttcttctgagagctaagtaagctcagtttcatttatctttcttcatatatatgtcaaggaagtcatttaatataatctcttaagcatttgagtggcgtgtctctgaaccctgccaatttttttatatctccaattaaatggggaatctagatgtca

SEQ ID NO: 766951 - DNA, 600 bp, Homo sapiens
cgttctattttctgaaagtcaacttcctttttgtgggaatagcacacaacaattaaacttggggagaacgggaggctcaataaggaaaccagctaagcatgaaaggaaaaatttttgtatgcaaagactgtcagtgccatgctgaggggcttggacctcatttgttctgtagaaaagcctgggaaggaagawccgtaaactctctaagagcacagactctagagttggaatgcctgggtgtggatcctgactctgccacacttttgttaatattaccactgactttaccagaaaaatctgtaagtattaagaggctgtcaagctcacagtgccacatacaaatttccaaaattcctaaaatttgaaagctcagaatttatcattggcagcaaatactgtcagttgtgttttttaaagtaacaggcttgctttgttcactttttgagaaaatgtccaccaaataatcaaatttgaacaaccatagttggtctatcagcatttttcaagtaaaaatggttcatggagaagcagttcagctcacaaatcaatcacacagcactttttgtcaatacaaccatcatattttggttcgcagcaaaa

SEQ ID NO: 766952 - DNA, 600 bp, Homo sapiens
cgttctattttctgaaagtcaacttcctttttgtgggaatagcacacaacaattaaacttggggagaacgggaggctcaataaggaaaccagctaagcatgaaaggaaaaatttttgtatgcaaagactgtcagtgccatgctgaggggcttggacctcatttgttctgtagaaaagcctgggaaggaagaaccgtaaactctctaagagcacagactctagagttggaatgcctgggtgtggatcctgactctgccacacttttgttaatattaccactgactttaccagamaaatctgtaagtattaagaggctgtcaagctcacagtgccacatacaaatttccaaaattcctaaaatttgaaagctcagaatttatcattggcagcaaatactgtcagttgtgttttttaaagtaacaggcttgctttgttcactttttgagaaaatgtccaccaaataatcaaatttgaacaaccatagttggtctatcagcatttttcaagtaaaaatggttcatggagaagcagttcagctcacaaatcaatcacacagcactttttgtcaatacaaccatcatattttggttcgcagcaaaa

SEQ ID NO: 766953 - DNA, 514 bp, Homo sapiens
tggcccctaaagccttttaaggcagccctagatgttctccttgaggtgtggctgcaacactcaagtcaccgccaacccgttgggaacacatggtgagagccagaaagaagcccttgctctttgatgccattgagattggggatgttatgaggcatccycctgcctgactagcctgtgctgggatagcagggggcctggcaaggccactccctagggcctctgctggaactacacgtgcccgctccaagggctcagggaggtgaagggcggggctttaaataacccgcctatttttcagatagcttgttcatcactgaggttatgaataatagacccagagcgtatgaatagcacagctttggagaaagcatgagtgcagatgcgaagagatgctcgcggccacagcagaacgcctttcgttcagctcacccactgcgcgccactgtgtgccggcactgcgctctgtactgctgccatggtggcaaacagaggctctcctggcctcgtcgcagct

SEQ ID NO: 766954 - DNA, 670 bp, Homo sapiens
tgttttatttatttagttcgttagttttaaaaacctatatttaactcaaatcaaatcttttctacaaatgataactctttccaaaaagttaaaaagatgtcacagaacactatgatgttaaaccaaagactcatcacaataacagcattttacttttaagaaatattgtgcagtatttcctttttaacctttcatgctagatttcaactatgtatatcctatgtaaacacactagattaatcctagtcattmatatttatgcagtagactgtcatatatgaccagttaccatacaaactataataccatattttcaaaaatagcaaaagcaatctttacggaagcttaaaaatcatttaataaaaggcgaccaacattgccctaattttcagtaaaaattacctctttttcctacctttccccctgctttgaatggtaccttttattgcatgttaatacacaaagatatttctagcacttctacttaagttagcctcttacatggctgccttcttttctgatacactgacttttatcagaaggcaccaagattagactcctaagtagtttcaaattttctgtccctttttaggttcctctagaatagttttcctcagaaaaggataacttgaaaaacttaaggaactagaagaaaataaatgatgtaaca

SEQ ID NO: 766955 - DNA, 603 bp, Homo sapiens
tttttggactgagatgatggggttttccaaatatgaaatcatgtcatctgcaaacagaaacaacttgacttcctctcttcctatttgaatacctttatttctttctcttgcctgattgccctggccagaacttccaatactatgttaaatagaagtggtgagagagggcatctttgtcttgtaccagttttcaaagggaaagcttccagcttttgcccattctatatgatattggctgtgggtttgtcatagatagctcttattattttgagatatgttccatcaatacctagtttattgagagtttttaacacgaagggatattgaattttatcaaaggccttttctgcatctattgagataatgatgtggtttttgtctttggttctgyttatatgatggattacatttattgattggcatatattgaaccagccttgcatcccagggatgaagccgacttgattatggtggataagttttttgatgtgctgctagatttggtttatcagtactttattgaggatatttgcactgatgttcaactgggatactgcaaacttttaaacatcttttgttcattaagagtcacatgaaattaaa

SEQ ID NO: 766956 - DNA, 592 bp, Homo sapiens
tcatcacgctatgcagggagaaggattcctttcattagtgtctctagctttcaactcttgattattcaacattagtcacttgacagaatcggtaaaagaacagaggagtgaaaacacaaaatgtgttcatgaggcctggccggtgcacacagagcacacagcacgcctcttgcctggtggtcctcttcagagtgatgcttataccacatcacacatcgtgtgctataaggtgtgcagactcaaattatctcccttgagatggagtcttaaatatcaagttcaggctgaaatgtctcttttccagcaataagtacggaagtatcttaaaagcatgtttctgtttaaatttgataggatgggtgaagtgaaagtggagaagaggcaagcattagaaacggcaacaaaggcctcccagctgcaccgccaagacccttcagttgagarctttaatttaactgtgctccatctcatttggcccagggatggaggccaaacaaggtaactgctccctttcacaggctaggagatgactgcctcttacaattaaacaatcatagcacatttgactattcccttttattgacaaaacagc

SEQ ID NO: 766957 - DNA, 547 bp, Homo sapiens
actcatttcattttcagaacaactcactaagggaggtactactattacctccattttacagataagcaaactgtggcactgagagattaggtaactgagcaaatgtcacacagctataaaaatctttttaaaaggcaggactggcattcaaacccagaaagtctggctcaagagtccatgtaacatgttgctgtattcctgcaacatccctacgtgtcctgaccattgcacttgaccatgtacagggtaaacactgtacccttctgtcttactaaaacaccakcagtcacagcagagtggacctctactagcaagcctgaaaatgcttccgatgccatttggcaaaaccaagagaggcaggtgacagtgactcaaggggaggagcgggagctggatgctatacaatgaaggaagaacccgggagcctgcatctttgtgactccacacacctggctagagaagagctaacgctgcacacacaaagttgggggaaggcccaggtcctttaaggcggatcaaactccaggtggaggcctctgccctcaat

SEQ ID NO: 766958 - DNA, 632 bp, Homo sapiens
ctattcttccctctcctctctttttacctcttccctagggcccacgctctgatacaggtttttccaagccctaaacccagaaagcagtgtgatataatcattcctgacatggattgtccaccggtttgggcaataaaacttcccctgtaagtgccccttcaagaaagccagatggtcacactatccaaaacccacaggcaggcttggcttgatagacagaaggggagacaaaggggaaaatatttggcctaagacaaaaccacagggtgacttaagcttgaagaactgaaagtagcttaagtcaaggagaagacttaatatgttgggaaatctgggctgattctgttttttaayatgtatgtaaatgttaaagagctcagcacaggttagggttaaactaaagggttttggttaaaatgcaccaacaataaccaatagatttttttttttttccgagatggagtctcgctctgtcaccaggctggagtgcagtgctgcgatctcagctcactgcaacctcctcctcccaggttcaagcaattctcttgcctcagcctctcgagtaactgcgactacaggtgcatgccaccacacccagataatttttgtatttttagtagagacggggtttc

SEQ ID NO: 766959 - DNA, 601 bp, Homo sapiens
aatttcatataaatttcaaatgtcatgaaatattgttttacttttgattttttttccaactgtttaaaaacgtaaccccattcttagcttgtgggccatagaaaataggtgttggaccagctttgccccacaggctgaagtytgcccactcttgctctaaacctacatctttatttttaaaagcagacattatggggtatcagcttcaaaaggagctggaacaagcattctatgatgtatataaattatgagaaatctgaagtttctgaatgacctacatacctgtctctcttccactctgcccccaccctttctctctctccctttcttcctatttctctctcaaacacgcctctcctgaaattagaggtccaagcgagccgagatgctgctgtgctcccaggcaagcaggcctacctgctctttgatttcttggagcttccggctctgctctctgatatcatggagaagctgcagtgctttgtcatcctcctgggacacctccatccgtgcttgctccaaacttcgctttaagctctgcagaaagcaaaaattttaatagggatgccctgtggatcctgctttgtttgaaaagactcat

SEQ ID NO: 766960 - DNA, 497 bp, Homo sapiens
aggtgttggaccagctttgccccacaggctgaagtttgcccactcttgctctaaacctacatctttatttttaaaagcagacattatggggtatcagcttcaaaaggagctggaacaagcattctatgatgtatataaattatgagaaatctgaagtttctgaatgacctacatacctgtctctcttccactctgcccccaccctttctctctctccctttcttcctatttctctctcaaacacgcctctcctgaaattagaggtccaagcragccgagatgctgctgtgctcccaggcaagcaggcctacctgctctttgatttcttggagcttccggctctgctctctgatatcatggagaagctgcagtgctttgtcatcctcctgggacacctccatccgtgcttgctccaaacttcgctttaagctctgcagaaagcaaaaattttaatagggatgccctgtggatcctgctttgtttgaaaagactcatta

SEQ ID NO: 766961 - DNA, 524 bp, Homo sapiens
tcacaaggatccttataagatggaagcaaggatcggagtcacagagacctgaagatgttacaccaatggctttgaacacggaggaaggggccacaagccaaggaaagcaggcaacctctagaagctggaaaagacaaggaaacagattctgccctagagcctccagagagagkgcagccttgtctacactgatctcagcccagtaaaactcatcccggactttttttttttcttggaaacagggtcgcgttctgttgcccaggctggagtgcagtggtgcaacctcggctcactgcaacctcggctcactgcaacctccacctcctgggttcaagcaattctcctgcctcagcctcctgagtagttgggattacaggtgctcgtgaccgtgcctgactaatttttgtattgttagtagagatggggtttcaccatgttggctaggctagtctggaactcctgacctcaagtgatcctgccacctcagcctcccaaagtgctgggattacaggcttgagccacca

SEQ ID NO: 766962 - DNA, 578 bp, Homo sapiens
ggaatggattgaaatgcatcgaatatgcttgtctctctgagtccataatactaaaaaattaattggtcacctttgaaggataaatagaagcccatatcattgttttgaaaaattgtaaatagaagatatgagcatttatcctgccttttccatgtactgtatcatgggggatcaartaatagacggggaggtttttccttatagaagtatcccagctaatgaattaagaagggttgattgaattttaatatcaccacttcgtaacctcaaatgaatgaacagatcaagacattgagtagcagtgctgctgacatcacaaaagaaacacccaggcattattgcctcctgatgggagaatgcactaccttctatgaaattatcttgctaaattaatggaatctgtatctcatgtagcctctacatccaatttacaggagatcagaagacagaagaacatgttaaactacatcatgtgggtacagtcagcaaatttcagacgatgggaaactgcaggtcaaacaacccaggttcttcaacaaataaaatgcaagggaaaaaaaaaagatggaggaggatcc

SEQ ID NO: 766963 - DNA, 583 bp, Homo sapiens
ctttttccaggcgttttccatatttgctatgggacaccacgcttggttgaattcacaggagggccaatgcctctgggggcctggagtgacgtgctggttccaggagggagtcaggaataggagatctccatttctcgtgttaacacttccttgccaggcccctaccagacaatgtaagaggaggagctccaatgtgatgcaatcgacagaggggtgcatcctgctcagaaggcaggggaggctgggcgcggtggctcacgcctataatcccggcactttgggagaccaasgcaggtggatcacttgaggtcaggagttcgagaccagcctggctaacatggtgaaaccccgtctctactaaaaatataaaaacttgccaggcatggtggtgggcacttgtaatcccagctactcgaaaggctgagacaggagaatggcttgaacccgggaggcggagtttgcagtgagccaagatcgcgccactgcactccagcctgggggacagaccaagactccatctcaaaaagtgggggggaaggcaggggaaagcaaacagtatgcctgggctagtaatttattcatc

SEQ ID NO: 766964 - DNA, 629 bp, Homo sapiens
actcatctgtcctgacacctgtcacctgtcacatcactaacgtcacgggtcatttgcatgtccttggcatgcaacaaacatatcatgtcattggtatgtcacgtcattggcatggccatgtagtaagcacatctttaacatgtaaaaagcaggccatcagcatgcttttgccatggcttcaacacataagcatgccacatgttcctgacatgtaagagacatccttattatgtaaggggtatgtccttagcacgtgatgtacatgcccttagcatgtamtgtgtatgttcttgcaacgttctgcccttggcatgcagtaagcatgtccttaacatgttttaggatgtcacctgtcaaatggcactgtcacctatcacatgtaatgtcactgtcacgttagtcatgtcacctgtcaaatgtcacatgtgactcgtcactgtcacacagcactgtcctgagtcactgtcacatgtaatgtcactgtcacatgtacctgtctcctgcactgtcatatgtcactgtcacaagtcacctgttaaatgtcacgacctgtcatatggtcacgtcactgtcacatgtaatgttgctgtcatctgtcactgtctcctatcactgtcatctgtaactgt

SEQ ID NO: 766965 - DNA, 618 bp, Homo sapiens
gaggagggggtcagtcaatggatgtggcaaagtcaagtgattctagctggtatgggtgggtttggggaggggatttgcacaatccattggatgggttcatgtcacatgagggctctgctcactggtatcaaaatctaaatgcagcaaattctgggaatgcctctttcattgggagacagcccctttaatcaatttcccactcctctccccatgccctgaaccctttytaactagaacaattatggggcttccaaatgtttcaggtacatgggcgtggaccctaattatggacacacgagggattaatatgggccagggacacgtttcttggcattgagggtcttcaatgaaagcagtggcaatctaagatcgacacacttgtgcagggaagaggacggacagagacctggcccatcacacacacacacacacacacacacacacacacaggcacgcacaaccaaaatgtcatcataaaaaaggagaaagggggacttcagtggctgagggactggctcagagagcttgtgcctagttcctgcagcctttccaggggaaccccagagaaaaaaacccccacagcgacggccatgttccagtggtttcatgcacccatga

SEQ ID NO: 766966 - DNA, 516 bp, Homo sapiens
  misc_feature 488: n = A,T,C or G
ttatttgcccagggttccatgggtgtaagcaacagaagcacaattctgtttgagcaagaggctggggtgatctgatgaaaaataaaagggcatgaaaacaaaacgtttgggttttggtcttggagggagggcgacatccacyatgtgctgcctctagggtttgagttaaacccatttccttgatggaaaatggggccagctattcccacccaccttcagtgtgctcaacatgatgtgatagcttccacgttggtgaggggactgcataaggactgacacaaggtcaggattctggtgcgggccaattcacaattgccaagacacggaaccaacctaagtgtccattgaccaatgagtgaataaagaaaatgtggtatatatacaccatggaatactactcgtccataaaaatgaactaaatcatgtcttttgcagcaacttggatgaagctggaggccattattaagtaaacccagaatggaaaccanacaccatatattctcacttaccaagtgg

SEQ ID NO: 766967 - DNA, 614 bp, Homo sapiens
aatcaggacttgaacccaagtcgctgtcaaacctctttttttctttccaccgttccgcagggtggtttatacttagaaaaaaaaaaggacaagtataaaagaaaaaaaatcctaacctgtcacccagagttagttattgttaacattttgctatgctttactttattctcttgttcatacatatataatggttttttaaaaagcaatatcaaatcctacatacagtctcatatcctgcttttttttacctaaggttatatattgagcattttttatgtcagcaaaatttatttgaaatgttttaataataatacagcatttcattttattttatggatttaccataatgcatataaccaattcctcttattggacaattgtgttatttttactttttttcaatattatatataatgctttasagaatatccttataaataaatttttgtatccctcatttatttgcaatgatttcctagaatcattgcaagtagaatcagggacagagatcctaaccacattatatttaactattcattagaagatatcctgggataaacatgacttctaagacattaagaaagctttaggtatgtcgcacatggcaaaatacc

SEQ ID NO: 766968 - DNA, 589 bp, Homo sapiens
ctggatccacttgtgctctgtgtctccatcaccagaaatactaagtggagggccaagggacatgcttcgcagagcctggcatcagaaggaaggaaaccagcatgtgttgagcatttcctaggagtcagacaccctgctaggcactttcacatgagaaagtcctcygaccctgaggaagacaggggtagttcctctctctttacacattaagaaactgagagactttaagaggttaagtaatttgcccaaggtcaattatatagtaagagatagatgaggtttttctccacacaatccactgggtagagcaaggtggtactgcccacttttagttgatcacatttttgagactgccattgtaaaaactacagttactacatctttataactttctcccatttcagacttactcaatttgtaatttagacttaccaccctctctagctttgacttttttgggtgttgattccctctattactttataacagaaaatagtcactctttttctgccttggtgatatgaatttcctcaggcaattcaagaaccataggaatccaaggccttctaaaaattaaagaggtaaatta

SEQ ID NO: 766969 - DNA, 589 bp, Homo sapiens
ctggatccacttgtgctctgtgtctccatcaccagaaatactaagtggagggccaagggacatgcttcgcagagcctggcatcagaaggaaggaaaccagcatgtgttgagcatttcctaggagtcagacaccctgctaggcactttcacatgagaaagtcctctgaccctgaggaagacagkggtagttcctctctctttacacattaagaaactgagagactttaagaggttaagtaatttgcccaaggtcaattatatagtaagagatagatgaggtttttctccacacaatccactgggtagagcaaggtggtactgcccacttttagttgatcacatttttgagactgccattgtaaaaactacagttactacatctttataactttctcccatttcagacttactcaatttgtaatttagacttaccaccctctctagctttgacttttttgggtgttgattccctctattactttataacagaaaatagtcactctttttctgccttggtgatatgaatttcctcaggcaattcaagaaccataggaatccaaggccttctaaaaattaaagaggtaaatta

SEQ ID NO: 766970 - DNA, 588 bp, Homo sapiens
agtgcccgaccttcacaactcctcttacccttcgactattacaaagctcatcactttggggaaagagtaaaggattgatagaacagacatatacacttgggcttagctacaatattctgtcttttaagggtcactaaacattttaagcacctgccaccatttccctgcaaagccagcatmatgagtaatcagcagaagccagcacctccaggccccgcaatcactctgaaggagtcagcttcacgcccgctgctaattttagcttgcaatctacgaagggtatcaacgagtctttttgccaagcactcttacagacatggcttgaaagtgtctctcccagtctggagccaggatctaggtgaaagcagtatatgtgatccagagcattctgcccaatgggagccttccccattgcccctgcctgagcccctctatctctactcagctttcttaccacggtcaccaacaaggtgtctgggctgtgagagtcagtgaattctggatgcccaagttcagtcatgcagtcacaaaggggctctgagttgacttcactctggtttcatttattcttctgtggtgggtgacaag

SEQ ID NO: 766971 - DNA, 602 bp, Homo sapiens
ttagctgttttagctaattcttacagaaacatctattgcctgcaaaaatttgctctgtaattactgttcaagtgcttctctaatatatacctggtacttaaaaggaaccatcctcaacatcatctttggcagctgcattagtgcagaatattttctccgggatttgtgctggggtaggtttttccagcatatctgtacacctctgagaatgagtcaagtggtcatgggttgagactcacccaactagggcaataaagagaaaaattagtctaatgcatggtcttaacaagagggagagtgtgagcatgaataattaatctcactagtctatggcaatcagataaaatgaagtcccatttgctcaaccttattaaaagagagagagtgcgtgrgagggagggagaaatggtaaaggtcgttaagggactcgtaacgtggaaagaactgcctttgagatgggtaatgtgttttctaatctctgtggtctttaactaaacgtcatggtaaaggtactcttcagatagttcggattcgtttgaattattaaacattttagaaaatactggactctggactactaacttagatgtctttatgatgaa

SEQ ID NO: 766972 - DNA, 634 bp, Homo sapiens
cctgacacctgtcacctgtcacatcactaacgtcacgggtcatttgcatgtccttggcatgcaacaaacatatcatgtcattggtatgtcacgtcattggcatggccatgtagtaagcacatctttaacatgtaaaaagcaggccatcagcatgcttttgccatggcttcaacacataagcatgccacatgttcctgacatgtaagagacatccttattatgtaaggggtatgtccttagcacgtgatgtacatgcccttagcatgtamtgtgtatgttcttgcaacgttctgcccttggcatgcagtaagcatgtccttaacatgttttaggatgtcacctgtcaaatggcactgtcacctatcacatgtaatgtcactgtcacgttagtcatgtcacctgtcaaatgtcacatgtgactcgtcactgtcacacagcactgtcctgagtcactgtcacatgtaatgtcactgtcacatgtacctgtctcctgcactgtcatatgtcactgtcacaagtcacctgttaaatgtcacgacctgtcatatggtcacgtcactgtcacatgtaatgttgctgtcatctgtcactgtctcctatcactgtcatctgtaactgtcacatgtcactgtca

SEQ ID NO: 766973 - DNA, 576 bp, Homo sapiens
gagcagctacggggctggcaaagccctgaaagccctgcgaagctggataaccagatagagttattatgggttctgctgtgccctggttccccaaacccccctaggaaggcaatgtatgtctgccagggtagttaggccctcaggtgggagctgggggtggtgcctcctcccagcagccagccaggaagcagcaactgcrtgccaggctctttctccccagaaaagatcgccccctggtcgttgcccctaccgaccgcctccctgctgccagctaatgacagggctttattctggggcgctgaatatgccagtaattgcagccctactttcgatcctgccgcctcccttccctttcaggctctcagtgacaatgacccggtagctggccagctgcctcccagcatagagcccatttgtctcaagggtgataatggggccaagatgaggaaggtgggcctctattagagtaatgggaggaggcggctgtgggagagggtggggctcaggagaaggaggtgggcttaggaggggaggtggagttcaggatggggaggcagggctcagaagacgaagtgg

SEQ ID NO: 766974 - DNA, 576 bp, Homo sapiens
gagcagctacggggctggcaaagccctgaaagccctgcgaagctggataaccagatagagttattatgggttctgctgtgccctggttccccaaacccccctaggaaggcaatgtatgtctgccagggtagttaggccctcaggtgggagctgggggtggtgcctcctcccagcagccagccaggaagcagcaactgcgtgccaggctctttctccccagaaaagatcgccccctggtcgttgcccctaccgaccgcctccctgctgccagctaatgacagggctttattctggggcgctgaatakgccagtaattgcagccctactttcgatcctgccgcctcccttccctttcaggctctcagtgacaatgacccggtagctggccagctgcctcccagcatagagcccatttgtctcaagggtgataatggggccaagatgaggaaggtgggcctctattagagtaatgggaggaggcggctgtgggagagggtggggctcaggagaaggaggtgggcttaggaggggaggtggagttcaggatggggaggcagggctcagaagacgaagtgg

SEQ ID NO: 766975 - DNA, 623 bp, Homo sapiens
  misc_feature 570: n = A,T,C or G
gtgcaccaccatgcatcctaccctgctaagttttattttccctcttgttagcatatgatcctttgctccctaaggccactttccaagaagttgcatgtagtaccccacaatatcccatttcctgaacttattatgttaacttgggttccctctaaaagtggaagctgataataagggcttgaatgcaggtaatttattttggaaatgtattcaaaggaagtggaatggggcaactgggaagaggaaacaggagaggagggaagaatgaatccaaggctgcatgacccaggtggttaccactgtaggccttgggattccctcctgctgagactgcttccaggagcagagtgaaacacacytcaggactgttcaccaaagacacggatgaggggagtatttactccgtctgccaaaccccattggtcaagggttgctctccaggatgttgaatcccttgcactcatggttttgagctgaacaggctcctgcagagactctgtgggggttgggggggcgggtaggaggtgcagtagaggtacttgggggctccaccatgggcccactttcttnaagcaggagccagggcaaaaagaatggactgacaggaagtgagatggagcatt

SEQ ID NO: 766976 - DNA, 623 bp, Homo sapiens
  misc_feature 570: n = A,T,C or G
gtgcaccaccatgcatcctaccctgctaagttttattttccctcttgttagcatatgatcctttgctccctaaggccactttccaagaagttgcatgtagtaccccacaatatcccatttcctgaacttattatgttaacttgggttccctctaaaagtggaagctgataataagggcttgaatgcaggtaatttattttggaaatgtattcaaaggaagtggaatggggcaactgggaagaggaaacaggagaggagggaagaatgaatccaaggctgcatgacccaggtggttaccactgtaggccttgggattccctcctgctgagactgcttccaggagcagagtgaaacacacctcaggactgttcaccaaagacayggatgaggggagtatttactccgtctgccaaaccccattggtcaagggttgctctccaggatgttgaatcccttgcactcatggttttgagctgaacaggctcctgcagagactctgtgggggttgggggggcgggtaggaggtgcagtagaggtacttgggggctccaccatgggcccactttcttnaagcaggagccagggcaaaaagaatggactgacaggaagtgagatggagcatt

SEQ ID NO: 766977 - DNA, 618 bp, Homo sapiens
aagtaattggaggaatgaataagtaattaccctgctggagtaatgaatctaacaagggactggccatgttgatgacatttgaggagaatttgctttctgaatgccttcttagaaaaaggatgcatcagcccgtacgtgggctgtatctttttcacaatctagttacgattttctcaccctctagaaaaggaaagctcaccaagcacagccccaaacaggccaaaaagtgtttaaatcaatagaagctatattttgcagaatttttaatggctgcagaaaaataygccaccaggagccagagggaatggagtgggatttctctgctgtttcctcctctgggatgctgcattttaagcgccacggtcaggtgccatttcttcttgcactggttggaaaacaggactccagtggtggaggttcattttagggcaaaagaaaaaaaagtctctgtctgcccttggcctgctttgctgaccctggttcctggtgggctgtcttcactttgaaaaagcttgttgggtctttgctgtctgtgttttcccatttgaaagaaacatgctaagaaacacacatacatgtatgtactcatgtgtacatgtttatgtatatgtgctgtgt

SEQ ID NO: 766978 - DNA, 631 bp, Homo sapiens
gtaattgagactgatctcctgttttggctgcagcatgttattaaagccttcttccttggaaattgttgttgtctcagtggttggctttctgtgtggtgagtagcaggacctaaaccaaactcctggtgttttggtaacagtggcacgatgaatgggactcttaatagaccaggtcaccaggaatccagatctccataccccaggatttcccccactcaaatgtacccttaaaaattgaaataaatttgactttcaaaccctaaaactaaaaagataaaactaattttcctttacataactatgaaaatcctggccaaagaatggaagtacaaattttaatactatccttcagatggaccttttctgccaccatcaggacaaatagtcagaggtcccmtatttacaaaccttcatggtcttaagggaagaccctcacctttgtaaagcttgtaaagtagatgccactgtcttaactatgcttagacacctgatccagagcccatggagaagacttggaaactctcatgcacactcccctcagcctcctcctccagaggccaaagagggagaaacagctaccccctggctcttcctccaggctctgcccattacaagaggtaagtgaaccaac

SEQ ID NO: 766979 - DNA, 458 bp, Homo sapiens
cttcctaacagaaaagaaaaggaaagaaaaccctgtaggagaagcggcatccatcaactggcgcttaatgaaattgtatgactctttaaattcaagtactcatttttattaagaatatctaaaaaattcagaattatttatgtgcaaaaagatattcatggctttgcttttcacctaataaatagcagaaagctaaagcattttcttatcttagaaatatgcctataatagtatctatgaaaaactaatgctctgcgacagaaagagcagcacttctttgttttatgtgagaatgttcctgctcagagacaaagggtttttytgcttctttcattacaaatccttttattctatatggctgtggttggttgggcctattcattccataacttgcatccttattggggaagggcatgttactttcaatagaggtttgtgccactgctgcttaatccccc

SEQ ID NO: 766980 - DNA, 566 bp, Homo sapiens
tctgtcacctcacctgaggcatcttctgggagcacagcaaggcctaacggtagacctgagagcatatcatacaacaagagctgtacataacctcacagttatcaggccaatgtggctttcctaatttatgatgcgggggcagatgcacccacactggggctactgcacagttaggccctgccaaggctgrttacaaaccctcttccttctagggagaattgcagcattaagccagcccttctttccttttgtgtctgtcttgtgggggctttttattcatggatacttgatgaaatagcctaagggatctccgaatgcacaataaagagccagagaaagaaaagatttggtggttttcataatgagaatagctcataacaacaacctcctctataaaacatgagacataatatctggtgccctctattctgttttctttccctttattcttttccaccattcttgtttccttcaatgtgggaacccgtggaattggttagtgtgaaagactctctcactcttctcccagctacaaagtcatggtttcctccttggtacgcagagtt

SEQ ID NO: 766981 - DNA, 600 bp, Homo sapiens
aaatataagatcacgtcatctgcaaacaagggtaatttgacttcttcctttcctattttgatggcttttataactttctcttgtctggttactctagttaggacttccagtactataatgaataacagtggtgacagtgggcatccttattscagatcttagaggaaaggctttcagtttttccccattgagtatgatactagtgtgggtctgtcatatatgacttttattatgttgaggtatgttccttctatgctcagtttgtttatcacgaagagatgttgaattttatcaaatgctttttcagcatcaattgaaatgattgtatggttttggtttttatccttcattctgttgatatgatatatcacattgattgatttgcatgtgttgaaccattcttccatcccataaatcccatttggtcatgatgagtgatttttttaatgcattgttgaattcagtttgctaatattttgttgaggatttttgcatcaatattcatcagggatattggcctgaagttttcttcttttgatgtgtctttggttttggtattagggtaatactggcctcacagaatgagtttgaaaatgtttt

SEQ ID NO: 766982 - DNA, 600 bp, Homo sapiens
aaatataagatcacgtcatctgcaaacaagggtaatttgacttcttcctttcctattttgatggcttttataactttctcttgtctggttactctagttaggacttccagtactataatgaataacagtggtgacagtgggcatccttattccagatcttagaggaaaggctttcagtttttccccatygagtatgatactagtgtgggtctgtcatatatgacttttattatgttgaggtatgttccttctatgctcagtttgtttatcacgaagagatgttgaattttatcaaatgctttttcagcatcaattgaaatgattgtatggttttggtttttatccttcattctgttgatatgatatatcacattgattgatttgcatgtgttgaaccattcttccatcccataaatcccatttggtcatgatgagtgatttttttaatgcattgttgaattcagtttgctaatattttgttgaggatttttgcatcaatattcatcagggatattggcctgaagttttcttcttttgatgtgtctttggttttggtattagggtaatactggcctcacagaatgagtttgaaaatgtttt

SEQ ID NO: 766983 - DNA, 525 bp, Homo sapiens
atcatggtaggcactgaagattatagaaatgcttcatttatcaacaagggtaggtacctaaaagataattttaaaaataaaattatgagaaaaaaaaactttctttctccatgtatttctactttcagactcatgcccaatatctaatattgtgtgttgaggatataattaaattgtatttcagagtaatctccttggtctttttttttttttttttgagatggggtctcactctgtcgcccaggctggagtgcagtggtgcaatctcggctcactgcaagctccacctcccgggttcacgccattctcctgcctcggcctcccgagtagctgagactacaggcacctgtgaacaygcccggctaattttttgtgttttcagtagagacagggtttcaccatgttagccagaatggtctcgatttcctgacctcgtgatccgcctgcctcggcctcccaaagtgctgggattacaggtgtgagccaccgcgcccggctatatgttggcaactgctggaggtgtgg

SEQ ID NO: 766984 - DNA, 650 bp, Homo sapiens
ctaggtattaggacccaaggcccatagaggctcccacacgaagctgaagacaaggctgtctaggacaagtagatgagtcacatctagtctgacacgcaagtcactggggtgcaccccacttgcaggggcattcctcccacatgagtaagttgctcagctgctggtgacctggggaggtgcaaccttaatgggatgaagaggaaaaggggctgggtgtggtggctcatgcctataatcccagcactctgggaggccgaggcgggcagatcacctgaggccaggagttcgagaacagcctgggcaacatggtgaaaccccttctctactaaaaatacaaaaaaaaaaaaatttagctgggcatgtggtgcacgcttgtaatcccagctactcagaaggctaaggcaggagaattgctcgaacctgggaggyggaggttgcagtgagccaagactgtgccactgcactccagcctgagtgacagagggagtctctgtctcaaaaaaagaaaaaaaaaaaaggaaaagaaagggtgcgtgtagtgtagctgggaggagggtgaccgagcatgcaaacaccactactggggcaccccagcaggcttggggactgatgaggcctcagctcagaaagcctgctccaggcccctcctc

SEQ ID NO: 766985 - DNA, 543 bp, Homo sapiens
  misc_feature 519: n = A,T,C or G
aaaggatgcgggacttttacaccaggatccaggctgggcaggcagccgagccgcacagggacaggaagaaacgaggcctcaggggcaagccctggctccatcccaacctggagagcttcaaacagcagagatggattctctcctggttctgaagtccagaagtcctaaatcaaggtgtcatcagggctgtgctacctgcagagtccccaggagggactcctgcctggcgtttctgggcctgtrgctgcatcgctccatcctctgcctccgtcttccctggcttctgcttcagatgccaggagaatgtccctgcgtgtcctcccctcttcagtctcttctaccattggattcaggacccactccaatccagggcgatctcctctcaagatctgcaccttaatcacatctacaaagacccttgttccaaataagtcacattctgacgttccaggtagacaaatatttgggggaggcaagtattcaatgcattaggattcggccctgtggctcccaaaatcncacactgtcccactctttacaaat

SEQ ID NO: 766986 - DNA, 543 bp, Homo sapiens
  misc_feature 519: n = A,T,C or G
aaaggatgcgggacttttacaccaggatccaggctgggcaggcagccgagccgcacagggacaggaagaaacgaggcctcaggggcaagccctggctccatcccaacctggagagcttcaaacagcagagatggattctctcctggttctgaagtccagaagtcctaaatcaaggtgtcatcagggctgtgctacctgcagagtccccaggagggactcctgcctggcgtttctgggcctgtggctgcatcgcyccatcctctgcctccgtcttccctggcttctgcttcagatgccaggagaatgtccctgcgtgtcctcccctcttcagtctcttctaccattggattcaggacccactccaatccagggcgatctcctctcaagatctgcaccttaatcacatctacaaagacccttgttccaaataagtcacattctgacgttccaggtagacaaatatttgggggaggcaagtattcaatgcattaggattcggccctgtggctcccaaaatcncacactgtcccactctttacaaat

SEQ ID NO: 766987 - DNA, 543 bp, Homo sapiens
  misc_feature 519: n = A,T,C or G
aaaggatgcgggacttttacaccaggatccaggctgggcaggcagccgagccgcacagggacaggaagaaacgaggcctcaggggcaagccctggctccatcccaacctggagagcttcaaacagcagagatggattctctcctggttctgaagtccagaagtcctaaatcaaggtgtcatcagggctgtgctacctgcagagtccccaggagggactcctgcctggcgtttctgggcctgtggctgcatcgctccatcctctgcctccgtcttccctggcttctgcttcagatgccaggagaatgtccctgcgtgtcctcccctcttcagtctcttctaccattggattcaggacccactccaatccaggrcgatctcctctcaagatctgcaccttaatcacatctacaaagacccttgttccaaataagtcacattctgacgttccaggtagacaaatatttgggggaggcaagtattcaatgcattaggattcggccctgtggctcccaaaatcncacactgtcccactctttacaaat

SEQ ID NO: 766988 - DNA, 618 bp, Homo sapiens
attggtactatggatgtgaaatggcttgtatagatacataggcagagatgactcagcctgtgtgagctgtaactgaagccaaccagagtgcccaggtacttggaacgctgtacttataaaaaccttgtacttgtagracttacaaaaaatatttctcctttttaaggtactgtgggagcctgcatctatcaactcctgccttgagccaatcaggatgccaggcctttcacagtctgctcaggaaaaaggccaccaggtcaacaaacccttctgacaacgcagttcagagctacagcagcaccctgtgatcatttcccaccaccctcatattctctgaactttaggctgcagcatgattactgcaaaaccatccagtaggtgtcatcaaagatgtaacccttaacagtaagacctcaaacactccagactgtgtagtttctgagcaattctgattgtgggctcaacttggttcccatcaaaatagtaggttacaagaccaaaccatgaatgctgcatctagaaagtggattaatgacgcagttctcaaactgtgtgctgaggcaccctggggcattgctggatatttatttattccctttgcccctctgtgtgtgtgtg

SEQ ID NO: 766989 - DNA, 618 bp, Homo sapiens
attggtactatggatgtgaaatggcttgtatagatacataggcagagatgactcagcctgtgtgagctgtaactgaagccaaccagagtgcccaggtacttggaacgctgtacttataaaaaccttgtacttgtagaacttacaaaaaatatttcycctttttaaggtactgtgggagcctgcatctatcaactcctgccttgagccaatcaggatgccaggcctttcacagtctgctcaggaaaaaggccaccaggtcaacaaacccttctgacaacgcagttcagagctacagcagcaccctgtgatcatttcccaccaccctcatattctctgaactttaggctgcagcatgattactgcaaaaccatccagtaggtgtcatcaaagatgtaacccttaacagtaagacctcaaacactccagactgtgtagtttctgagcaattctgattgtgggctcaacttggttcccatcaaaatagtaggttacaagaccaaaccatgaatgctgcatctagaaagtggattaatgacgcagttctcaaactgtgtgctgaggcaccctggggcattgctggatatttatttattccctttgcccctctgtgtgtgtgtg

SEQ ID NO: 766990 - DNA, 630 bp, Homo sapiens
agaggaagccttgtgtctggtggtctgatatcccttgtgatgaaatgagcatgtaactggccttgtacgtccatgaaggactagtgagttaaaggcatataaacatggcccagtgggatagcagtaggcacaaaatataagaaaaagctgggcaaggaacaacttcttatgaataaacttcacaaaattcaattcttcaacaatcaagataaagaggctcacaagctgtcagtggtcaccccatcacaagcatttggtattatttcggtgtaaaggcacacctcagagatagtgtgggttcagttctggatcaccaaaataaagctaattttttggtttcccagtgcatataaaagttatttttacattatactgtggtctattaagtgtacaatagtatcatgtstaaaaaaaactacgtgcataccttaactgaaaaatgctaacaatcatctgagccttcagcaagtcaatctttttgctggtgggaatgtcaccttgatgttgacagctgctgactaatcagggtggtggttgctgaaggttggggtggcttcccaaagtaaaacaaagaagtctgctctatcagctgactcttcctttcatgaaagatttctttgtagcatgtga

SEQ ID NO: 766991 - DNA, 596 bp, Homo sapiens
caagctcctgttaatactgatatttttacctcctcccatgaatcacaaatgctcttacgcatctagaaaggtgaatcctttccagaaggttttcaatttgctttgcccacatccattagaggaatcactatctatggcagctacagctgtttgaaatgtatgttttaaataacaagatgtaaaagttgaaattactccttgatccatgggctgcaaaatggatgytgtattagcaggcatgaaaacattaatctccttgtacatctccatcggagctcttgggtgaccaggtgcattgccaacgagcagtagtattttgaaagctctttttttcctgagcagtaggtctccacagtgggcttaaaatatttggtaaaacatgccataaacagacgtgttgtcatataggctttgttcttccatttatagagcacaggcagatttagcataattttttaaaaataatttcaacttttgttttagattcgggggtacatgtacaggcttgttacctggaatactgaagtttggggtatgactgtcacccaggtactgagtacagtacccaatagtttttcaaccttgaccacccccgt

SEQ ID NO: 766992 - DNA, 593 bp, Homo sapiens
tttatttcacttaaccctttacaatgattattttaaaattaggatgctctttttgaagattaaaaattacagttttagctattgcacgcagggcttaattcctaggtaatgggttgataggtgcagcaaaccaccatggctatatttacctatgtaacaaaactgcacgtcctgcacatgtatcctggaacttaaaatttttaacaatcacagttttgcagtttacaaaattccaccaggaaactctaaattacttttcaataccctgggggaaaaaaatcctgtatctttctaaaccacagacatgttcttgtgggatgaaggctgaggaaactagcctccaatgtgtaatttgatwttccccattctctgctatcttatgtgttcaataaatatctgttgaattgattttcatcatgttgacagataaacttggttggcaagaataggaaagttgtttatttatttgttctgtgtgaaaatatagaactttcaaaacaccaagagcatttttaagtatctaatgatgtgacactttgttagaatctgtacaaagaaataggcaaaaatcacaaatttatagttaatgggta

SEQ ID NO: 766993 - DNA, 528 bp, Homo sapiens
agcaacaacaacaaataccaaatatttaacaattgttagagtcactgcaaaggctgtttcttacccacagccagggcagtgtgactaagacatgccagatgggaatagggcattctcttttgggtccaggcccatcctgggagtggtgggatggatgtgagggaatgaggggcctccgtcaagctggctgggtggcaggcrctgcacggctctgagggattgagcagccgaggcagtgggacatagtaaggggctgaggcccagggcagtgtaagcatcccattggtgtggaagtatttccatattttaccaatgatatgctctttgagaagcaatatcccatggaaatataatgagagcaatatctatgtaatgaaacatacttaggagacaaagaataaaagtaaaaagaaacaagggaaattaaatttggcatttgtcttactcagtaggtccaaaatgttatctcaacatgtaactaatatccaactgattaatgagcgatttcactctttttgttgttgctga

SEQ ID NO: 766994 - DNA, 632 bp, Homo sapiens
caaggtggaactcagggcaattctgaggctagtagttgatgccatcagatactcaagttctgtttcaattgatgccagcaagtattcaagttctatctttctgctctgccatcgtcggtatgctggcttttgtcatcaaacatattgtcctatggtaacaagatggctgccatagcaccaagcatcactgtctcacacaatcacaatgaaaagcaaaaggaaaaaaagtgaggagaggtagtttcttatacactcctttttatgaggaagagaagcatatctcagaagccccttgaagatttgttcttgcatactatggcctgaatgagtcacatgcttatgccctagctgtgacgtatttagtctctagagtgagaggtgaactttgccggcaggggaggagtggggtaatgtrgccaatagacaactaaatgtctgaagcatggggcaagaatcttaatatctctgtcctcagttttctttacccataaattggtgtttcagaattatgttcttaacagaatgcctgatacacaagacaaagtcaatcaaagcatgttctttcatttccagcatccatagttcaagaatttcaggaagctgttgctccaatagtcatgtgttctttggtt

SEQ ID NO: 766995 - DNA, 569 bp, Homo sapiens
acatgcttatgccctagctgtgacgtatttagtctctagagtgagaggtgaactttgccggcaggggaggagtggggtaatgtagccaatagacaactaaatgtctgaagcatggggcaagaatcttaatatctctgtcctcagttttctttacccataaattggtgtttcagaattatgttcttaacagaatgcctgatacacaagacaaagtcaatcaaagcatgttctttcatttccagcatccatagttcaagaatttcaggaagctgttgctccaatagtcatgtgttctttggttatgaaggccaaacagaacaaatgataggagcaagtgatcttgacttagatagggtcagccccttcctactagatctcatggcaacatgaakgtgaagcagtgatggggaacagagagtggggaacaataaaacatacaaggaaaaaaaagaccagtttttgaatgctttctattaatatgtgcaaaacactacaaaagcatgtgtatttccaaaatccaaatcatgatcccacttaggaagttaatgcccctatctcagttgccctta

SEQ ID NO: 766996 - DNA, 738 bp, Homo sapiens
cagcctccataattgtgagcgataaatttctgttatttataagccgtgcaatctaagacatgttgttagcccaaatggactaaaaagcccaaaccatctcaaaataaaaagatttcaatgcacaagacattgaagacatgtgataggaaatgagtgattttcatctatagtggctctcacatagggcttttctcaaaggcctgaagccagcagcataagaagactccagttccctgtgccctcctgctcttgtggccatgtccctagcatgagggggagaattgctagttaaattatctatgattaattttactccagacctcagtaggccaacaattgttaataacgtgattaccatttgccctttctagcaagtagaatatgtgaaaactgacagtaaatggattattatcatttactgtgctaaagccatgtgcttatttcaatattaaaaaaataattactttttcttactsaagactattgtaggaaaaccaaagaaagtgtgttgagattttccaatagggttatgtatatgaaaggagctttaaatagctaagtacacaatgtgtgtgtgtgtgtgtgtgtgtgtgtgtgtgtgtgtgtgtgcgtgtttcattttcttacttttactattgctatggtctggatgctaatgtcctccttcccccaaattcatatgtcaaaatccttatccccaacgtgatagtatgaggaagtgggaagtggggcctttgg

SEQ ID NO: 766997 - DNA, 738 bp, Homo sapiens
cagcctccataattgtgagcgataaatttctgttatttataagccgtgcaatctaagacatgttgttagcccaaatggactaaaaagcccaaaccatctcaaaataaaaagatttcaatgcacaagacattgaagacatgtgataggaaatgagtgattttcatctatagtggctctcacatagggcttttctcaaaggcctgaagccagcagcataagaagactccagttccctgtgccctcctgctcttgtggccatgtccctagcatgagggggagaattgctagttaaattatctatgattaattttactccagacctcagtaggccaacaattgttaataacgtgattaccatttgccctttctagcaagtagaatatgtgaaaactgacagtaaatggattattatcatttactgtgctaaagccatgtgcttatttcaatattaaaaaaataattactttttcttactcaagactattgtaggaaaaccaaagaaagtgtgttgagattttccaatagggttatgtatatgaaaggagctttaaatagctaagtacacaatgtgtgtgtstgtgtgtgtgtgtgtgtgtgtgtgtgtgtgtgcgtgtttcattttcttacttttactattgctatggtctggatgctaatgtcctccttcccccaaattcatatgtcaaaatccttatccccaacgtgatagtatgaggaagtgggaagtggggcctttgg

SEQ ID NO: 766998 - DNA, 602 bp, Homo sapiens
gaaatgaagactaatgtgctactgaaaggttataattttcagctctcagcatgagtcagactccatgtgccaatgctcccttgaaatcaggttggcagttctccagcattaagcagaaacaccatggaattcatctcatacattatcaaagtygtgcacccacccctacaaatgccacatggaactttaagctccttgctggaggagcaaccccaaaagcctggtagcctgacagtaatgttttcctgttaattttatatacatccgatttgttgttactaaatttttcctttaattttacatcaaatgactttgtagcatactttcagttacattctcatatagaatgtcagagatttgcgtactgaaagtgtcgaatctttatcctcaatatccaaagtagttttagcaaaagctttacacacacacacacacacacacacatgcacagcagaaagaaatatttatgtgaaactaagacaggaacagaaaaccaaacactgcatattgtcactcataagtggaagttgaacaatgagaacacatggacacagggaggggaacatcacacactggggtctgttggggggtgtggggcaagg

SEQ ID NO: 766999 - DNA, 647 bp, Homo sapiens
tctcttctcttccaaaggaacacaactcctcaccagcaagggaacaaaactggacagagaaggagtttgacgagttgacagaaggaggcttcagaaggtcggtaataaccaaattctctgagctaaaggagcatattctaaccctttgcaaaggagctaaaaaccttgaaaaaagttagacgaatggctaactagataaacagtgtagagaagagcttaaatgacctgatggagctgaaaagcacagtaagagaacttcgtaaagcatacacaagcttcaatagctgattcgatcaagtggaagaaaggatatcagtgactaaagatcaaattaatgaaataaagtgagaagacaagattagagaaaaaagagtgaaaagaaacaaacaaagcctccaagaaatatgagactatgtgaaaagaccaaatctacgtttgattggtgtacctgaaagtgacaggkagaatggaaccaagttagaaaacactcttccgaatattatccaggagaacttccccaacctaccagggcaggccaacattcaaattcaggaaatacagagaacaccacgaagatattccttggaagagaagccccaagacacataattgtcagattcaccaaggttgaaatgaaggaaaaaata

SEQ ID NO: 767000 - DNA, 478 bp, Homo sapiens
tatagtaagacatttctttaacatttgttctcagataaaacagtgctctgacattctcctagacctggtgaattccctctaggagcagaggttgctgaagtatataaacactgcaccacaaaatcattcccttcccagttcttcaggtaagaacggaaaaaaaaataaagttcaaattccctgtttacacaagggtagatattaatagggaccacatatatcctgatttattttgtaccttctctgttgtttacgtaactttgccctgatggccaaattccataggagtagggtatgccaagtgttagaatyacaattagatataaattagacaaagtttcagtcttattatcaataatatccaattatagacatataaaggatatatgaagcctacctggttcttcttatggtcttcaatcactttctagaataaaaagatataaaacctccccagtagtgttatatctcaaagatt

SEQ ID NO: 767001 - DNA, 608 bp, Homo sapiens
aaccacagcctccctttttgggagaaaacaggggtcatctgtaaatctctcagctgatactttcagagcttcacctgaaaaatacaaccccatataagttatactttaagtttcaactatgcctatttcaggatttatcagctaacctaattccaagtaaattccaagactaagcataatataaaaatattgtcagttgacaattttctctctcaataaacaatgcagtttcaaattaacatttgtttttcacaaatattttggaattaagaagcataatatcattttcctgcaagaaagttgtgctcaactgactaggaacatctagtaaaattgctgccaacttctgcatttgctgaatctcrtttcttgtaaaaggttttattactaaagcttcaatcataaacaatcctgcttataaaaacaaggtaaatctttattgagttactttccaaatcaatggatgttaggactgcagctctctgataaaagtttaacataggcaaatttattctaaactatcaatataatgaataaactatatcctaaatttagtcacagaaatagtacttcatagtacctaattgttagagaatattgtgtccact

SEQ ID NO: 767002 - DNA, 639 bp, Homo sapiens
gtagtaggatataaataattcccatatgcttattgttccaatgatggaacactaggtgtaaatgggttttaaggacctcttgaaagacaggtctagtggtaacaaattcccttagcatttgcttttctaaaaaggkttttatttctcctttgcttatgaagcttagtttgactgaatatgaacttcctggttggaatttcttttcttcaaggattaagcatgctgaatataggcctgtagtctcttccagattctagggtttctgctgaaaggtccactattagcctgatgggattccctttgtagatgacctgccccttctctctagatgcctatagtactatttctttggcatttgccttggagaatgataattatgtgtcttggggatagtcatcttgtatagtatgtcacaggggtctctgaatttcctgtatctgaatgtcaacctctttacagagattggggaaatttttgtggacaatatcctcaaatatgttttccaaggcattctctctttccctctctttcagggatgccaatgagtcatagatttggtctctttacataatcccatatttctcagaggttttctccttttttgtctttttcctttatttttatctgactgagttgttt

SEQ ID NO: 767003 - DNA, 642 bp, Homo sapiens
tggggtgtgtttaatagggagctaagccagagctataccacagctttcatatgacctctccttgacaattaattattgttgtaagcaaaaaaaactgcttaaatgaatgaaattatcatggttttacagtattttgaactctttattatcaataaatggaggatataattcctgataacaaaagttcaagctgaaatctccatattatacaaagtccgacctttagttaaaacattcttgtgatcatgtattgttactggattttctccatttctcctttggccatgggcatattacctgaagtgttggttttctgtgtttcttattttgaacactytttttttttttttttttttttttttgagacagagtctcgctgtcgcccaggctggagtgcagtggcgcaatctcggctcattgcaagctccgcctgccgggttcacgccattctcctgcctcagcctcccgcggggactacaggcgcccgccacctctcctggctaattttttgtatttttagtagagacggggtttcaccgtgttagccaggatagtctcgatctcctgacctcgtgatccgcccgcctcggcctcccaaagtgctgggattacaggcgtgagccaccgcgcccggctattttg

SEQ ID NO: 767004 - DNA, 651 bp, Homo sapiens
tcagtgtcaaccattatgaggtgtgcggatgattgggaagtacttaatatgtgtgcatagccattccaatttgagttacttgatatgctggacatatagacaagctgatttaagaaataacagtaattccagtttttaaagtaygagaaattctgtaagctgtgtaccatttactttgaagtataattcaaaggtgggagcaaagatttaatgcatgttaacaggttgatttgtaagtaatgagtcctagaaactaaaatgtggcctgaaatctcagctggtaaagagtctgaaatcagaggtgtgattcttatattagccatggctctgctctccttcacagctatagcgatggcaccacagcgtagccatttcataaatgtgtgcaaaggtaacagagtgacctaaagtttatgttcacagaagatgggtctgaaaattattgttgtgttgcacattctagcattaaagagtgcattaagctattgcagttgctcagggggaggaataaaaatcttaagaatttctgtccttgactgtttcttctcatccctttcttaagtttcaaaagaagtggtgttcctttttgctctttaaaactaatctttccaatcattatctggatcttagctcatcccttctcttctcttc

SEQ ID NO: 767005 - DNA, 577 bp, Homo sapiens
taaataccagccctattcacagtttctccattcagtcgagggcatgcaaataatcatagcccacagtctacagccacaatggacacacacaggtaagatgagagccattcctgatggggcttcaggctttgtggagggagagaaagagaagggaattaaagtgtattcatcctctactaaaggggtcctcaacccctgggctgtggactagtgccagtccrcgtggcctgtcaggaactgagccacacagcaggaggtgagcagtgggcagacgagcagtactgcctgatccacctcctctcagatcagcagcagcattagattctcataggagcacaaaccctattgggaactgcgcgtgcaagggatctgggttacatgctctttatgagaatcgaactaacgcctgatgatccgaggtggaacagtttcatctcgaaaccatcctcctctccccctcacctgtccatggaaaaatcatcttccctaaaactggtacctggtgccaaaaagtttggggacagctgctctactacatagcaatgtgttaagtggtttaggacattatatttcaccc

SEQ ID NO: 767006 - DNA, 577 bp, Homo sapiens
taaataccagccctattcacagtttctccattcagtcgagggcatgcaaataatcatagcccacagtctacagccacaatggacacacacaggtaagatgagagccattcctgatggggcttcaggctttgtggagggagagaaagagaagggaattaaagtgtattcatcctctactaaaggggtcctcaacccctgggctgtggactagtgccagtccacgtggcctgtcaggaactgagccacacagcaggaggtgagcagtgggcagacgagcagtactgcctgatccacctcctctcagatcagcagcagcattagattctcataggagcacaaaccctattgsgaactgcgcgtgcaagggatctgggttacatgctctttatgagaatcgaactaacgcctgatgatccgaggtggaacagtttcatctcgaaaccatcctcctctccccctcacctgtccatggaaaaatcatcttccctaaaactggtacctggtgccaaaaagtttggggacagctgctctactacatagcaatgtgttaagtggtttaggacattatatttcaccc

SEQ ID NO: 767007 - DNA, 540 bp, Homo sapiens
gtgctctgtggatccaggggcttgatcagactcgggtttgatccctttggcagactgcaggagacgtgtaatgtcttgtttctgttttggggatgttagcagcttctaatactctatacctgggtccactaattcccttggggaggggttgcaaaatggtgatattctaattctatcatgtgttagctagaattatataagaaaatgcttcttctcgcctactgttaccctgttgtaaagttcacacaggaaatgaaggataaatgttagctcctttccctttatttaccagttttcatgagactgaattctttattctctgaaggtgaccaattaggtatacacacacacgtatatgtctatatattaatatatatataatyatgaatccatagatttaacgtgttaatgaattttaatccattacaatcattatcctcattaaagcacatagtgtctcatctttgaccactgggaggttagtgagcatttcttgataataaatcattcattcatttgctcattcacttaacttctagt

SEQ ID NO: 767008 - DNA, 634 bp, Homo sapiens
aatatttactaagctatcccatgcaggtgtaatgccaactgtttcaccctgagcagagccaaaagcgctccctgactttggctgaaagtttatagctaagacatgtaaaacgacaggctggaatcctggggaggctaacgagtggtactttactccctggccatagctggcaggggactctcagctcatcattttgcaagatgaaattcgtttgttgtaggggtcttcaagcagaagcacttcttagaaaatcaatcaagtctcctactgctagcaggtcagcaagctatccctccttactgtgttaaaaaaaaaaaaaaaacaaaaaaaaaacccatgcacattccctgactgtaaatcaatgattataagtcatgaaggtgaaatataagagattttgaagtatattttcaaagttgaaaatgtatgtcaccttaggtgcatgcaacatcttgccaactgaatatggaaccagctgtcctgcaraatataatttgatgacaaagtcaatgtttttcagccatagcagagaggaaagaacatgatgtacaaaaattattcaagtcctaagcattctatccttaatagagccatcagcaagtttatatttcaattatactaactacctctgacc

SEQ ID NO: 767009 - DNA, 639 bp, Homo sapiens
ttctcagaagcaagtcatgttcatttcttcctttgcaaatgctagttaagacatttaacagatgaagtattgggaatcaggcaatgtaagaagaaaatattgatgagcaagtgtaaagtgacttcctcctgttggtgagaagcatatttcatttttttctggaagaatgtattaaatttaagccgtcccagtaataactaaatgctatctacctgtcagttgtatcagtcgattgctttagagtgtggatttctatattatcgcccgtggcttctctctaaaatcctttagcgatgctcccacgtggaattgcatctgcaaagaccatygacagagttctcagctcacagcctggatacaaatacgcatgaatgaaagacttctctctttagagactgcctctaaagaactcaggttccttacccatgttttatctaggactttgctccagagctgggagggaaagaagaaaccctcttggtggctgggtgtcccattcttttgtctctcacttgggatccatgattaatcagtgcattgtacataagagcgacctctatttctttgggcaaatggaaccaagttggagctgtaaaagcaggaccatcaatcagtttgttacaatggcaactttcttga

SEQ ID NO: 767010 - DNA, 554 bp, Homo sapiens
ctgtttctactgcgtgggagacacaagggagatggttattggatttgcatgttagttgaggagcccaagatggataggccctttcttctgttgccatctgactgctcagggctggagtgttctgtggtcttctaactctcctgcttgcttcaagtgttatatgtggtttgccaggatgatatgaacttggatatgcaagaaaaaaattaamcaataatagagctgagtcaaaagagagaaaacatccagtagttattgagagagagaatgaaatcacacatgggcgtagagaaaacaatcaccggagccaccatttaggaatgaagcagagttgtcaacccctgacatcccccgccatgtttagcctctgaggaggagtgaaaagtcacagggtgagtattcaggagaattggactctagtctggaaatatcacttcctctctaggtctcggtccctactgtttagactagacctttcatttcctttaagctgtaagaatttgttactcttaattatatcaatatataaggaattatttgggattttgaaaata

SEQ ID NO: 767011 - DNA, 554 bp, Homo sapiens
ctgtttctactgcgtgggagacacaagggagatggttattggatttgcatgttagttgaggagcccaagatggataggccctttcttctgttgccatctgactgctcagggctggagtgttctgtggtcttctaactctcctgcttgcttcaagtgttatatgtggtttgccaggatgatatgaacttggatatgcaagaaaaaaattaaacaataatagagctgagtcaaaagagagaaaacatccagtagttattgagagagagaatgaaatcacacatgggcgtagagaaaacaatcaccggagccaccatttaggaatgaagcagagttgtcaacccctgacatcccccgccatgtttagcctctgaggaggagtgaaaagtcacagggtgagtattcagragaattggactctagtctggaaatatcacttcctctctaggtctcggtccctactgtttagactagacctttcatttcctttaagctgtaagaatttgttactcttaattatatcaatatataaggaattatttgggattttgaaaata

SEQ ID NO: 767012 - DNA, 599 bp, Homo sapiens
tcaccagtatgtaggctgctagaagtcaggggaaacctattaattttgaatctctggtgtctagcatggggcagcatagagtaataattacagttgtggtggatgtgattagtactcaccaatatttccagttcccctctccttttgtgtacatgggagaattatgctttcctttcctcttgaagtgagatgtgccttgctttggtcaaatcagtgggagcagaagtgatttgtgtcacttctaggtataagcatttaagacctagtaaatggcccttctgttatggtaaaccctaaagccttttattgagaaaggagcattataaaatgttggagactctgttagtttaggtcagtgaataactacagtcaccagagcccctttcyaccagccaacccacactggacatgtagaatgagagagaattaaccttttgttagtttaagccactgagatttgggacttgttattgcagccaaaataatctaacatattttggctgatatactaatgaacatttattcagtgctgtgtgcttcaagtatttttatgtattaattcacttaatcatctctataatcctgtgaaaaagatactg

SEQ ID NO: 767013 - DNA, 619 bp, Homo sapiens
gagagatgtttttcccttgggttgggaatggcatgttctgagcttcttttgacttctagtcctcgctgccggtgcagttccaagtagagtcaacataaagccaggcacttgtgagatggagaccggggcgaaactgcaagcagatgccctttgctgactgttgaagaaagaggatctggctgaaagacccgcaactttyacttgttgagaacctttagccagcgccggcgtgcatgtgttttagttttattctttttcccttgcccccaaagccgtggagtacctgctgttgctctcatgcctcttgccaacagtggcatctgctcagtgtagccatcaagaatttgaatgtcaatatctttgccttgaaatgaatggaaaagtatttgtcactcagcggcaatcattcttcaaataaaaggttagccagacaggacccttaatcaaagagtcggtcttttctgtcagcagtgccttttaaatagcaatgatgaaggctggctgtcagggtaggacttgatgagcgagatgattgatctgcataaatcattttcttttaacattgtcagtgaagagtaaattggtgggacattttgggtattagctgtgttgaaattaa

SEQ ID NO: 767014 - DNA, 682 bp, Homo sapiens
tctagccaacttaaataatcaatcaaatatgaagatgaaataaaaacattttcagtcatgaaaagtctcaaacaatttctataacacgtaccctttcataggaagccaatggaagattagctcctaaactaaggcaaaaagagaaagccatggcatggggaaaacagaagattggcaaagtgagttcccaggatgatggtacgaggagatcctaggatggggcacagagagcaatagcaccctatgggagaacaggtaagaatgctctaggagagacttccttagtaaattgaaatktgtggtaaatttggtgaatctgaagatctagagaggcaatataggcaatcggcaaagagtttaggagggactaaacagaaaaataaaaaaaacaagtgttatgggttgaattgtgttctcctcccaaaaaatatgttgaagtcctaacccccagtacttgtgaaggtgaccttatttggaaatagggtctctgcagacttaatcaagttaagatcacaaagacaaagggggaagacagtcatgtgaagatgggaagtagatattggagttatgctgccacaagacaagaaatgcctgagtttaacagaagatagaagaaagtgcctcccctaatggctgtggaggaagcatggccctgccaacaccttgatttcagacctctggc

SEQ ID NO: 767015 - DNA, 618 bp, Homo sapiens
aagaaaatcagcagaaactgcctctaaaaaggaactgatgataaatgtattcaaaaactttaaaacaattctctttaaaagatgctcaaagaactaaaggaagatgtgaaaaaaagtcaaaaaaactatgtataaacaaaattaaaatatcaayaaaaacagaaaacctcaaaagaagcaaaaaaaaaatctagagcttaaaagtacaataactgaaaggaaaaattcactagaaagatccaagggcatatttaagcaggcagaagaatctataaacttgaaaataggacaatgaatctatttagtctgaagaaaataaatttaaaaattgaagaaaaatgaacagtgtaagagacctgtgggacaccatcaagcaaacctacatatatattgtgaaagtcccagaaggaaaagaatgagaaaagagggaagagagaatattagaagaaataatgactgaaattttccaaatttgataaaagacataaacatctaagaagctcaacaaactccaagtaagatgaactgaaagacacccacacttattataatcaaactttagaaagaaagacaaagaatcctgaaagcagcaagagaagtgacttgttgcacacaagg

SEQ ID NO: 767016 - DNA, 554 bp, Homo sapiens
cccgtaacattaagtacaacactatttcattatctggattgtccatgctagaaactgaaaggaaaaaaaatttcagtttaatttggttaatttgcaatgtaacaaacaatgaagggctgaatttactatatacttgagtttcaggactattaactggagtcacacaatctctactgaagtagtaacatactgactttaactcatacatatcacacaatggactcagtgacctaaatatgactttatgcatacattaagtttcatataatatataaattataattacctagataagcttagaataaaattagaatatgtttacgttatctttwatatcatcaccatatactcaacactattatacacaaaatatttatatcttttaaattaattaaaattaacccagaatcagaaggctattatacttactaatttcatccttgttaattgtatccaaaccatattcttcagctaaggatcgacatcttaccactcgaagaaatgcagaattgctgcctgaacagaggaaagatattctggaagtaatgactgtg

SEQ ID NO: 767017 - DNA, 607 bp, Homo sapiens
gttttgaaggatttacaagaaactaataaaggtatttagtgttaagaggaagaactaggaaagagagggtggctttcaactttcacttttcattttgtaagttttggtagcaagaatttactgaactcacaagatgtttcttttagttttacaaactgttcaatgagggataccaagaatgggagaacgtggtatatttttttgcttgcttctttgtggttttctatataaaagcaaatacgctattttaaaatatgagccaatagacaatatggatactatagatccatgttcactgacacagaaaaccataaggacatattaatttaagaaaaccaactgtgatgcaatatgcatagtctgatcccatttatgtaaaaattttgcacatgtgagtatcgrccatttagagatatctggaaagatgttatcaaaatatgatggagttacacattctgcttcgtaacctttctcaattgctttaactttctcaaatgaggattcttcaaacatagggaatgaaacaaaatttttacaaaggccttgatatcacagcaaatttgaagatgggaaggaagcagggagaaagtataagaaaatgatttaa

SEQ ID NO: 767018 - DNA, 607 bp, Homo sapiens
gttttgaaggatttacaagaaactaataaaggtatttagtgttaagaggaagaactaggaaagagagggtggctttcaactttcacttttcattttgtaagttttggtagcaagaatttactgaactcacaagatgtttcttttagttttacaaactgttcaatgagggataccaagaatgggagaacgtggtatatttttttgcttgcttctttgtggttttctatataaaagcaaatacgctattttaaaatatgagccaatagacaatatggatactatagatccatgttcactgacacagaaaaccataaggacatattaatttaagaaaaccaactgtgatgcaatatgcatagtctgatcccatttatgtaaaaattttgcacatgtgagtatcgaccatttagagatatctrgaaagatgttatcaaaatatgatggagttacacattctgcttcgtaacctttctcaattgctttaactttctcaaatgaggattcttcaaacatagggaatgaaacaaaatttttacaaaggccttgatatcacagcaaatttgaagatgggaaggaagcagggagaaagtataagaaaatgatttaa

SEQ ID NO: 767019 - DNA, 607 bp, Homo sapiens
gttttgaaggatttacaagaaactaataaaggtatttagtgttaagaggaagaactaggaaagagagggtggctttcaactttcacttttcattttgtaagttttggtagcaagaatttactgaactcacaagatgtttcttttagttttacaaactgttcaatgagggataccaagaatgggagaacgtggtatatttttttgcttgcttctttgtggttttctatataaaagcaaatacgctattttaaaatatgagccaatagacaatatggatactatagatccatgttcactgacacagaaaaccataaggacatattaatttaagaaaaccaactgtgatgcaatatgcatagtctgatcccatttatgtaaaaattttgcacatgtgagtatcgaccatttagagatatctggaaagatgttatcaaaatatgatggagttacacattctgcttcgtaaccwttctcaattgctttaactttctcaaatgaggattcttcaaacatagggaatgaaacaaaatttttacaaaggccttgatatcacagcaaatttgaagatgggaaggaagcagggagaaagtataagaaaatgatttaa

SEQ ID NO: 767020 - DNA, 570 bp, Homo sapiens
ttttaaagtttgtcaatttggatttcttcttctttggaacattttcccaattcagtgggtagttttgaaatttttccttttgtctgaagtcagtttcatttttacctaccctactctttaaaaatatttttctggccaggcgtggtagctgtaatcccagcagttagggaggccgaggtggrtggatcacctgaggttaggagttcaagactagcctgtgctacgtggtgaaacctcgtctctactaaaaatacaaaaatacaaaaattagctgggcgtggtggcgggtgcctgtaatcccagctacttgggaggctgaggcaggagaatcgcttaaacctgggaagtggaggttgcagtgagccaagattgcaccactgcactccagcctgggtgacaagagccagattccgtctcagaaaaaaaaaaaagtttttgtgggtacataggtgcattatatttatgggttgcatcagacactttgatacaggcattgcaatgtgtatacaatcacatcagggtaaatgggggtaaacctcaagcatttatcctttgtgttacaaactctcc

SEQ ID NO: 767021 - DNA, 570 bp, Homo sapiens
ttttaaagtttgtcaatttggatttcttcttctttggaacattttcccaattcagtgggtagttttgaaatttttccttttgtctgaagtcagtttcatttttacctaccctactctttaaaaatatttttctggccaggcgtggtagctgtaatcccagcagttagggaggccgaggtggatggatcacctgaggttaggagttcaagactagcctgtgctacgtggtgaaacctcgtctctactaaaaatacaaaaatacaaaaattagctgggcgtggtggcgggtgcctgtaatcccagctacttgggaggctgaggcaggagaatcgcttaaacctgggaagtggaggttgcagtgagccaagattgcaccactgcactccagcctgggtgacaagagccagattccgtctcaraaaaaaaaaaaagtttttgtgggtacataggtgcattatatttatgggttgcatcagacactttgatacaggcattgcaatgtgtatacaatcacatcagggtaaatgggggtaaacctcaagcatttatcctttgtgttacaaactctcc

SEQ ID NO: 767022 - DNA, 604 bp, Homo sapiens
tctgatgtattaaattcaaaatgtagatgaattttcctttctattctatggcagctccatacagctgtagtgaatattatattaataagttcactaacttatgcgattgtgccactgcactccagcctgggtgagagagcaagactctatctcaaaaaaaaaaggagttttaaaaaacaatttttgtattaaaaaactctcrtgagtctatttttccaaaaccatccgtttaaaaaatagaattatattttgtgacttgcttttttccacttaactgtttactactaccatccccacctgatgttcccttggaaacctggtatgaggtttgaaaaagtttgccccaggatcttaaagatggagacaagcagtggtaaacctgctctactagttagcatctggttgaagctaccttagtttcctcatttaccaaacagggataataatactacctacctcatggggttgcagtgaagattatgagttaatccaagtaaagcacttgacatggtacctggcataaatgccagctattcttattatgtgatgcttaccatgattgatatgtttaaccctacatagcacatagtcattcagaatcaaa

SEQ ID NO: 767023 - DNA, 604 bp, Homo sapiens
tctgatgtattaaattcaaaatgtagatgaattttcctttctattctatggcagctccatacagctgtagtgaatattatattaataagttcactaacttatgcgattgtgccactgcactccagcctgggtgagagagcaagactctatctcaaaaaaaaaaggagttttaaaaaacaatttttgtattaaaaaactctcatgagtctatttttccaaaaccatccgtttaaaaaatagaattatattttgtgacttgcttttttccacttaactgtttactactaccatccccacctgatgttcccttggaaacctggtatgaggtttgaaaaagtttgccccaggatcttaaagatggagacaagcrgtggtaaacctgctctactagttagcatctggttgaagctaccttagtttcctcatttaccaaacagggataataatactacctacctcatggggttgcagtgaagattatgagttaatccaagtaaagcacttgacatggtacctggcataaatgccagctattcttattatgtgatgcttaccatgattgatatgtttaaccctacatagcacatagtcattcagaatcaaa

SEQ ID NO: 767024 - DNA, 577 bp, Homo sapiens
accatagatggtgacatctgcagttgacagaaatgtaaagatgcaatattaactcacaactgcatatttttaaattcattatttttttctttttaatttgtatcacaactgcataaaatttaccatagactacactgtactacygtgataataatgtcctactaccacagacatctgctgctgctgtggtgggctcaagtgttgtgaggatccacttaaaacgtcatgtcacactaatcaatttctgcactacttcccagtaaactgtgtatcacggtaacaagtgttctctcctgggtttttttccacatatacttgtttaatcatgtgtagggtaatatcgtaaaccttgaataacaccatgaaacccatacaaagtgctactagtgatgctggatgtactctcaagaaacagagaaaagtcatgacataagaaaagctgaatcgcttgagatgtaccgtagatagaggtctgcagctgtggttgtcccctatttcagacagatgatttatcttgtaaacagacgatgtaaacctatggtattgacaaatgcagtatagtactgtaaatgtattt

SEQ ID NO: 767025 - DNA, 577 bp, Homo sapiens
accatagatggtgacatctgcagttgacagaaatgtaaagatgcaatattaactcacaactgcatatttttaaattcattatttttttctttttaatttgtatcacaactgcataaaatttaccatagactacactgtactactgtgataataatgtcctactaccacagacatctgctgctgctgtggtgggctcaagtgttgtgaggatccacttaaaacgycatgtcacactaatcaatttctgcactacttcccagtaaactgtgtatcacggtaacaagtgttctctcctgggtttttttccacatatacttgtttaatcatgtgtagggtaatatcgtaaaccttgaataacaccatgaaacccatacaaagtgctactagtgatgctggatgtactctcaagaaacagagaaaagtcatgacataagaaaagctgaatcgcttgagatgtaccgtagatagaggtctgcagctgtggttgtcccctatttcagacagatgatttatcttgtaaacagacgatgtaaacctatggtattgacaaatgcagtatagtactgtaaatgtattt

SEQ ID NO: 767026 - DNA, 577 bp, Homo sapiens
accatagatggtgacatctgcagttgacagaaatgtaaagatgcaatattaactcacaactgcatatttttaaattcattatttttttctttttaatttgtatcacaactgcataaaatttaccatagactacactgtactactgtgataataatgtcctactaccacagacatctgctgctgctgtggtgggctcaagtgttgtgaggatccacttaaaacgtcatgtsacactaatcaatttctgcactacttcccagtaaactgtgtatcacggtaacaagtgttctctcctgggtttttttccacatatacttgtttaatcatgtgtagggtaatatcgtaaaccttgaataacaccatgaaacccatacaaagtgctactagtgatgctggatgtactctcaagaaacagagaaaagtcatgacataagaaaagctgaatcgcttgagatgtaccgtagatagaggtctgcagctgtggttgtcccctatttcagacagatgatttatcttgtaaacagacgatgtaaacctatggtattgacaaatgcagtatagtactgtaaatgtattt

SEQ ID NO: 767027 - DNA, 577 bp, Homo sapiens
accatagatggtgacatctgcagttgacagaaatgtaaagatgcaatattaactcacaactgcatatttttaaattcattatttttttctttttaatttgtatcacaactgcataaaatttaccatagactacactgtactactgtgataataatgtcctactaccacagacatctgctgctgctgtggtgggctcaagtgttgtgaggatccacttaaaacgtcatgtcacactaatcaatttctgcactacttcccagtaaactgtgtatcacggtaacaagtgttctctcctgggtttttttccacatatacttgtttaatcatgtgtagggtaatatcgtaaaccttgaataacaccatgaaacccatacaaagtgctactagtgatgctggatgtrctctcaagaaacagagaaaagtcatgacataagaaaagctgaatcgcttgagatgtaccgtagatagaggtctgcagctgtggttgtcccctatttcagacagatgatttatcttgtaaacagacgatgtaaacctatggtattgacaaatgcagtatagtactgtaaatgtattt

SEQ ID NO: 767028 - DNA, 588 bp, Homo sapiens
gccctccttctcgcacgtctaaggcctggcacgggccccatctcttttcgtaaagcttcagccatacctgcctcagaggtaaatttctgacccccatgattcccaggcacattttggtgctgctggttgtacacaacacaatctgaaatgtggttctgcatctcttctttgcacctggctgaggtctcagagagcagaggctaaatatttcatggctccctcaatttytaaacacagtgctgtatattgagtggcacctctaggtgactactttgtaccctaaatgttaaactgagggatgagtgaaacaatatcaggattaataaataaatacattcttgaattccatcacttaatagaagtggccatttgaatgctggcaggtaggaagaaaagaggaggacaaagaaccccaaaagttggcatcataactactgccacaagaaaggagaatcaagcagattggtaaggtaaagaccagggacacacaggtcactgcaggactgaagaatcttccaagcttgtcagtaatgtaagtttctcattttccaataaactagtgtggcataggtcactgtttagagtctt

SEQ ID NO: 767029 - DNA, 588 bp, Homo sapiens
gccctccttctcgcacgtctaaggcctggcacgggccccatctcttttcgtaaagcttcagccatacctgcctcagaggtaaatttctgacccccatgattcccaggcacattttggtgctgctggttgtacacaacacaatctgaaatgtggttctgcatctcttctttgcacctggctgaggtctcagagagcagaggctaaatatttcatggctccctcaatttctaaacacagtgctgtatattgagtggcacctctaggtgactactttgtaccctaaatgttaaactgagggatgagtgaaacaatatcaggattaataaataaatacattcttgaattccatcacttaatagaagtggccatttgaatgctggcaggtaggaagaaaagaggaggacaaagaaccccaaaagttggcatcataactactgccacaagaaaggagaatcaagcagattggtaaggtaaagaccagggamacacaggtcactgcaggactgaagaatcttccaagcttgtcagtaatgtaagtttctcattttccaataaactagtgtggcataggtcactgtttagagtctt

SEQ ID NO: 767030 - DNA, 548 bp, Homo sapiens
taaacacagtgctgtatattgagtggcacctctaggtgactactttgtaccctaaatgttaaactgagggatgagtgaaacaatatcaggattaataaataaatacattcttgaattccatcacttaatagaagtggccatttgaatgctggcaggtaggaagaaaagaggaggacaaagaaccccaaaagttggcatcataactactgccacaagaaaggagaatcaagcagattggtaaggtaaagaccagggacacacaggtcactgcaggactgaagaatcttccaagcttgtcagtaatgtaagtttctcattttccaataaactagtgtggcataggtcactgtttagagtcttgtcttcaaaatgttttccagcatcaaggaaaacaatctacaagaaacaaaatggtgagaaaaagcagcacactcacgkctctgaagagcacagcataaggctacaaaaaggaccaagcaccttctcaacctgcaatgtgctcagtgtctgtaaatcacaagttaggtgatgaagggctggtagtttcc

SEQ ID NO: 767031 - DNA, 675 bp, Homo sapiens
ctggacacatttcagtgcttcttggatcctgccgtgtcccctgcttgacaccaggacctactgagggcctgctggcctgcaatactgggtcgggtgggctgctcgcttgtgtgacaaggagcctgggggtgcctccatccctctcacacctttcccaggaggcctgaaccagggggattcatgtcaaccctagtgtctcctcaggatgaactagtgatgctccctgttgtcctcaaggggctgggaagacagagctaggtccccccaaatgagatgttggtgagctgaagagttactgcagacaacacagtgcaaagcccttggagtcctgcacatgggggtgcgaccagcacctcagtgtctccctcactaagcagcctgtggagggctcagccccagcaggctcaggggctgctatggagtgggtgtctgtttcctggagcatgttctcagggcatccttcacttrccttcagaggtctctaaaatatattaaaaatgtcccaacatttcaggacattccaccggcttttcttgctgggcttcctggttttcttcttgggctttctggttttcctgatgggacaacaagaaagtgagcgtagccaagaagaacatgggcacgtgcccacttccctcatcattctgcccactgcacactcacacttcctcttcc

SEQ ID NO: 767032 - DNA, 561 bp, Homo sapiens
ccaggatccacatgtcctgctgctgtgtattttgtccctcctagatttattattattattatttttgagatggagttactctcttcttgccccagctggagtataattgtgcaatctcaacccaccaccacctctgcctcccaggttcaagtgattctccagcctcagcctcctgagtagctgggattataggcatgcatcaccatgcccagttaattctgtatttttaggagagatgggttttctccatgttggtcagcctggtttcgaacgcctgrcctcaggtgatccacccgtcttggccccccaaactgctggaattacaggtgtgagccaccacgcctgaccagaatattctgtactagaaacaaagcaacctttcttcaatgaggagattaattctattaaaatattctatgtattcactaaccttttgttttaaagaagactaaaccaagatttgaaaatactcaattatcctaccatttaaagatgactgctacttggcccgtgatgtttgtccttctgcccttccttttaacacagtgtgtgtgtgccacg

SEQ ID NO: 767033 - DNA, 561 bp, Homo sapiens
ccaggatccacatgtcctgctgctgtgtattttgtccctcctagatttattattattattatttttgagatggagttactctcttcttgccccagctggagtataattgtgcaatctcaacccaccaccacctctgcctcccaggttcaagtgattctccagcctcagcctcctgagtagctgggattataggcatgcatcaccatgcccagttaattctgtatttttaggagagatgggttttctccatgttggtcagcctggtttcgaacgcctgacctcaggtgatccacccgtcttggccccccaaactgctggaattacaggtgtgagccaccaygcctgaccagaatattctgtactagaaacaaagcaacctttcttcaatgaggagattaattctattaaaatattctatgtattcactaaccttttgttttaaagaagactaaaccaagatttgaaaatactcaattatcctaccatttaaagatgactgctacttggcccgtgatgtttgtccttctgcccttccttttaacacagtgtgtgtgtgccacg

SEQ ID NO: 767034 - DNA, 561 bp, Homo sapiens
ccaggatccacatgtcctgctgctgtgtattttgtccctcctagatttattattattattatttttgagatggagttactctcttcttgccccagctggagtataattgtgcaatctcaacccaccaccacctctgcctcccaggttcaagtgattctccagcctcagcctcctgagtagctgggattataggcatgcatcaccatgcccagttaattctgtatttttaggagagatgggttttctccatgttggtcagcctggtttcgaacgcctgacctcaggtgatccacccgtcttggccccccaaactgctggaattacaggtgtgagccaccacgcctgaccagaatattctgtactagaaacaaagcaacctttcttcaatgaggagattaattctatyaaaatattctatgtattcactaaccttttgttttaaagaagactaaaccaagatttgaaaatactcaattatcctaccatttaaagatgactgctacttggcccgtgatgtttgtccttctgcccttccttttaacacagtgtgtgtgtgccacg

SEQ ID NO: 767035 - DNA, 558 bp, Homo sapiens
aacttcatttgtgtttcatctacatcttatacagatagcctgaaagaaattttatacaataaataatcgtgtgcatgaaacaatgttttactgcagcccatcacatgaagtcaggtgtggaattttccacttgaggcatcatgccccgtgctcaaaaagttttggattttggagcattttggattttggattttcagattagggatgttcaacttgtatactcaatcctactgacttgtctaggaaacaatattaatttacaatttaaaaaatcttccattagtatgtgatcatccatatgtatagagcttctcctttgtctttatgtaatatatctatattaattacaattttatatagtgaatcatattttcaatgaaatagggagaaatttaaaaatgaaaactaatctgtatgacatctccattaagmtgatctatagacacctcaaactcagtatgtttacactgataaagtttggatttctatatattatttaaaaagagggatcagactttctatatattatactacgcataatgtacagtaaaacccaat

SEQ ID NO: 767036 - DNA, 598 bp, Homo sapiens
acagaaattcccctcaaactatacatacaaaaaatactcccaattttgcaaataattccagggagttcacctgaactctgcttgtgtgctccagactaaaaattatcgtattggatgaccttttaaatgggccttccagcccccagttctaggaccccctgccattcttatataacaaaatatccacagcttacactgcatagtcattactgtaaacatgttartttattatgaaaccaatatccttcttttcttctgacctttatatcaaggactcaaaacatctggtatttcacatgaaggagtcttaactatcaaaccttataccacaattataaggctgccttttcttttttataaattctgaaattcaacacttatagtttcatgttctatcaaatgctcaaatctaatttcattaacatagaaatacttgttcagacaaaagtattaaaatagacaccttgaaaaatcaggtcccattggctcccattcatttaaaataatcaacaagggtgtgtatgtgtatatagggagtgccttcctctaggaaaggaaagcagcactgagcctttatactttaataaaaacatatcaa

SEQ ID NO: 767037 - DNA, 530 bp, Homo sapiens
tttccaatcaaatattgctaatcctgttgatttctaacattcaagaagcccagaaaaaaaatctaacagtggagttctttgtgtttcttctttaatgagtatttggcaaaaaacaatgaagttggggaaaacatttttgaaggcacagaatccagtgtcccttgcttacaaagcaaccgttgggacytgaagtgattgagcatctgttttcaatcttgggtcaaaatttcttttaatccaggatgcaattaaatctctagtatgtgcagagatatctatttcacatatataattccctagatgtttaattataaagtagttgcaatcatttgcacaaatcagttcatattatcttatttgacatcagtttacatgtttgggaaggagatagatgtatggagctctgaggtggtgctgggctgggggaggacttgtttaatatctaggagtttgtcccatttccttctttttcatctcccaacaaggctggctctctatcttgctttttcttctggtactaagataggaag

SEQ ID NO: 767038 - DNA, 615 bp, Homo sapiens
atgctcgagcttggtggagggaggggcgtccaccattactgaggcttgagtaggcggttttcccctcatagtgtaaacaaagctgctgggaagtttggactgggcagaacccaccacagcttggcaaagctgctgtagccagactgcctctctagattcctcctgtctgggcagggcatctctgaaataaaggcagcagccccagtcaggggcttataggtaaaactcccatctccctgagacagagcaccggggggaaggggtggctgtgggtacagcttcagcagacttaaacattcctgcctgctggctctgaagagagcagtggatctcccagcacagcgcttgagctctrctaagggacagactgcctcctcaagagggtcgctgacccccgtgcctcctgactgggagacatctcccagcaggggtcgacagacacctcatacaggagagctctggctggcaactagtgggtgcccctctgggacaaagcttccagaggaaggaatgggcagcaatctttgctgttctgcagcatccgctggtgatacccaggcaaacagagttgggagtggacctccagcaaattccaacagacccgcagatgagtta

SEQ ID NO: 767039 - DNA, 616 bp, Homo sapiens; identical to SEQ ID NO: 764388

SEQ ID NO: 767040 - DNA, 616 bp, Homo sapiens; identical to SEQ ID NO: 764389

SEQ ID NO: 767041 - DNA, 665 bp, Homo sapiens
ttatcactaaatcctgaaagaagagtctacaaatttccatatgattttgtaggactctcaaaaccctgtaacatctctttctgcaaaaatttgttggagtaaggggtatatttgataaagacattaggcaaaaggcctatgtgtgcacacaactgttataatgaaaatscaaggaagaaaggcaaatttgtaacattagaatttctatgtggaccacatttggaaagcagtgttaatttaatccatacataatatcaaaggatgctttggtgtgtgctcatcttcaaaggaagcattcaggaaaacatgacacaataagccaagactctaataacctcacattctggaacttcagtaaaaacagaccagtacaatacctttattctatctttacagcaactttttctgtaaccttctgattaggctaaattaaacatatgttcaagtttggttctataaattaaatctttttttataaatgcaaaatctatatattatttttaaaacctgttttacacattagaaataagacagaactaaatatttatcgagataagttagggtagtttcttggccatgaagaaataagttagaagccgttctaagttttgttgtaagaagaaaaaattgtactattcaaactaaaatctcctggaacactaaaa

SEQ ID NO: 767042 - DNA, 665 bp, Homo sapiens
ttatcactaaatcctgaaagaagagtctacaaatttccatatgattttgtaggactctcaaaaccctgtaacatctctttctgcaaaaatttgttggagtaaggggtatatttgataaagacattaggcaaaaggcctatgtgtgcacacaactgttataatgaaaatccaaggaagaaaggcaaatttgtaacattagaatttctatgtggaccacatttggaaagcagtgttaatttaatccatacataatatcaaaggatgctttggtgtgtgctcatcttcaaaggaagcattcaggaaaacatgacacaataagccaagactctaataacctcacattctggaacttcagtaaaaacagaccagtacaatacytttattctatctttacagcaactttttctgtaaccttctgattaggctaaattaaacatatgttcaagtttggttctataaattaaatctttttttataaatgcaaaatctatatattatttttaaaacctgttttacacattagaaataagacagaactaaatatttatcgagataagttagggtagtttcttggccatgaagaaataagttagaagccgttctaagttttgttgtaagaagaaaaaattgtactattcaaactaaaatctcctggaacactaaaa

SEQ ID NO: 767043 - DNA, 603 bp, Homo sapiens
gaaacccaagaggaatcttggaatctggtgatttttttaaattgctgctagcgtcttggtaggcctattaagctttcttcgttaggaaggggagcattaacaatagtttccagtttctttccttttctttgccttattttcctgaacttcttttggaaggtaaatgcttaacacatcacgctgtcatgtagcaaatgtcgtaagatctacaaagcaagtctctaaagtaagtaaaacaccagccaaatctacactgtcagcagcttatcaaaaagcttttttttgggtggagggcggtggctggtgggaagcggttggtcttgttttcctctacactgtgtttggaargagagttttccatttgaaagagtaaatgaacgcttggataccaattggtcgtctctatcacatccctgctggatatgcaccctctcatttttcaatagggcagcaagggctccgatttctcagtcttggcagagatccccaaggattgagtatggcaaaaagctgacaaacctttgttacacagagctctggccatcgaaggcagggccagcaatggggcagattcttcctctcttgctctttccctgatcttcc

SEQ ID NO: 767044 - DNA, 597 bp, Homo sapiens
ttactttgatgcctttatatataaggtacggtattccctttaaaaaaaagattctggaaaagaaaaacaatctcacccagtcatcccggagaccaatagctgtgtacaaaaggcctccaaagtgcttttatgaccttgtaagtgcctatgtgtctggtatacatattagaaagctctaataattgctgctgtctatgtaaagcatagccataaacagatgcatttagcataaatttactcagatatattgaagtattacatgattaaatayattgtttgtataagttatattaaaatgtgattttcatttataaaaagcttatttaatacacttttatttatatatttatattaaatgtttgttattaggtgggaccaattgaaatttctggtgcttggttcgctatgtttgacctataaaaacagtcattccatgatggaatatgctagatataaaaggaaataccatttacagttgatacatactcattaaaatagaatttgggttagtttttctggtgattcttcgttttgatcatgaatcccatgaaagctatggatctctccttagaaaaattcacaatgatataaaatttg

SEQ ID NO: 767045 - DNA, 609 bp, Homo sapiens
aagatctcaacaagatacctgcactcccgtggtgattgcagctttattcacaatagccaagatatagaaacaccttaaatgtccttcagtggatgaatcgataaagaaaatatgacatatacacacaatggaatattattcagccttcaaaaatagaagaaaatcttgccacatgtgacaacttggatgaacctggaggactttatgccaagtgaaatatgccaggcatggaaagacaaatgctgtgctacakgattgcatttatacaaagtatctaaaatggtcaaactcacagaatcagatggtgaatggtggttgttttgggcctggtggaagggaggaatggggagttgctattcagtgggtataacgtttttgttatgcaagaggaataagttccagagatcttctgtagagcatcctgtttatagtcaacaataccatattgtgcacttaaaattttttaagagattagatctcatgttaagtgttcttatcacaataaaaaaaatacacaaaacaaagggcaaaaggaaactttacaagtgatggatgttcattaccttgattgtggtaatggtctcatgattgtaaacattccctgaagct

SEQ ID NO: 767046 - DNA, 472 bp, Homo sapiens
taatcattcagattgcaattgtcaaacagacaattggaacccttctgcataaaagctgagtaaacagggtgcagtttgggggaaatagaaaaagaatgaaaacagaggattaaagcaaataaaatagattaacccttgacaygataatttatactaggactagaagtccaacagaagagctgttgtagattacatacgtgattaatcactgctatagtttcattggtgacaaaatgattaataaagtttaagacaaaaacaaatcttttcgcatctgcacctaagtgtgcaaaatctagcaagggtttctcatccagaccttggttcccttgcaggatggacaaacttttaattcagatttttgcggccctggttaagataaaagcatcatctttacaatagatccaccctggcttacttgtgaaataaagggttaggaacaggaacccaattctgaaaaggcttactagca

SEQ ID NO: 767047 - DNA, 636 bp, Homo sapiens
tttcagataaatattgggtaagttgaattgttaaatatctgtgagaaactcatgaagaagagaaaactgaaggaggataaggtgaccatttttgtagacatagagattttcacaaagaagttggaaaaggttgattctagtggctcaatagggcagagtggcccaagtgtgccccgagcccttatctctctgagtgggaatcagtatttcctgtgctgagatcccatatcccagccacactcaccaatgagctaaaagatttttgcataatgcataatcgtggttttcttgctagagacaaaatgaaggggaatggtataatgcctagcaatgggttggacaacgggaatagttttcagatgggaagacttaaaagaaacagaaaaaagrtcgctgagccttgtgtgtgagtgcgtgcatgtgtgcaaacatgtcttgatgtttgtctggccatgtgtttaaccctcagaaaaatgatgagggtggaggcatttttagaatggcttgaatgccttctgacctagagatagaggaaggagccatggatcagtccttttttctttgacttaggtaattgaaaagggtgtatgccttctctcctggcccagagtataatctttactggggctggacttc

SEQ ID NO: 767048 - DNA, 605 bp, Homo sapiens
cctacatttgcaaaaactcttcctttttctgttttgtcctctctcatatctaaaagattttatcagcactttcttgctgtatctgtgtctgttttcagtcccttgttggtgttctacgtggtatgtccaattttattaatagcaggaggccgggtgtggtggctcatgcctgtaatcccagcactttgggaggccgaggcaggtggatcacttgaggccaagagttcaagaccagcctggccaacatggtgaaaccctgtctctactaaaaatacaaaaaattacctgggtgtgatggcacatgcctgtagtcccagctactcggaaggtgaaggttgcagtgagctgagatygcacaactgtgctccagtgtgggtgacagagcaagactctgtctcaaataataataataataataataataatagcagaagttaccatttattgaatgctgactgtgtcagccactgtgaccctacatacatttgttcattgataactgtttgttcattgcaaagtagatctttaaaagcctatgatccaaatgaggaaaccgaggtttagaaatatagctagaaagtactagtcaggactcagagcccgcg

SEQ ID NO: 767049 - DNA, 578 bp, Homo sapiens
aagctacccttggttgtatctgttcttcctagcagcagctgaatgcaatcccaatacaaaactcatattctaagaaaatgttgcctttatgactggtaaaatcatattttgattaccactggaaaaaaaacataaaaaatgttctagtgctcacagatctcatcaaagaggcctctgatccctggggatacacaaattgccattcgagaagaaccaagctaagccagagaagcaactacagacaagtaaraaagacaaggcattgactggaagaaaaagatcaactcgagaaagcaaaaatataggaaaaagacaccgggcataacagcatctcacttgtaaagggaacatggcaacaagaaatccatgggtcagtgagagagagagagagagagatagagagagagagagagtggccttcacccttcattccagacagcaccagctggagccacagtgagccacatgtctgtgggcgtcgggggctgctgagaagttgcctctctggcttttgggatgacaagcccagagctatagcacaggccagttgcttctgtaataagcatttgttagatcac

SEQ ID NO: 767050 - DNA, 598 bp, Homo sapiens
ctcatatgcggatcctgtcctcaggtgggattgtgatctcagacctggattcagcaaacacctgaagctgtgactctcttactgggacacagtctacagttgagattgggcctctcttgcatggatcgtttccttaacctgaaagatgaaggaattaattaggagactcagaagacttctcctagtctacaatttctgactctataatccttgccttagaacaacaaccaagtgaacagtcttagttttggaggtggcaatgaagagtctgcagcaatcttggcagacagctcctgaggtctgagcaaccctctgggctttctgaaacaaaaggagcaagtgaggtggggtcactgtgtatcttctgctcactggtgaccagacayggtaaaattcaacacatactatatttgagaccataagtatgaagcagctttgaactgctctcatggcacatttttttttaatatgaggcattcaagagagaaaaatcattaacaaataagataaactataggactaaatatttattatccacatagaaaccaaagcattatgtggtttttagtggcacttattttgaaaagcacatggctta

SEQ ID NO: 767051 - DNA, 578 bp, Homo sapiens
ttaaagtctgttttatcaaagactaggattgcaaccccccctttttttcttttttttgctttccatttgcttggcagatctttctccatcccgttatttcaagcctatgtgtgtctctgcatgtgagatgggtctcctgaatacrgcacactgatgggtcttgactctttatccaatttgccagtctgtgtcttttaattggggcatttaacccatttacatttaaagttaatattgttatgtgtgaatttgatcctgtcattattatgttagctggttattttgcctgttaattgatgcagtttcttcatagcatcgatggtctttacaatttggcatgtttttgcagtggctggtaccagttgttcctttccatgtttaatgtttccttcaggagctcttgtaaagcaggcctagtggtgacaaaatctctcagcatttgcttgtctgtaaaggattttatttctccttcacttatgaagcttagtttggctggatatgaaattctgggttgaaaattcttttctttaagaatgttgaatattggcccccactcttttctggcttgtagggtttct

SEQ ID NO: 767052 - DNA, 548 bp, Homo sapiens
aaatcccctgaccccttctgcttcccatgtgaggtgacgccccaccctgcttcggctctccctctgtaggctgcacccactgtccaaccagtcccaaagagatgaaccaggtaccttagtgggaaatcactcgtcttctgcgtcaatcacactgggagctgcagaccagagctgttcctattcrgccatcttggaacagacctcccatggtagcatctttaaactgaaatattggacagagagtttccattgctgtagtattttgcttaattattatctttatagcagggataatagttgacaaaaaggaagcatgaaagttttaccatcactgagtctgctaggccttttttggggtttagtaatgcagttttaaatgaaacatgctgcttttggattaacaccgctagtaaagtagaggaaaatctacaggtacttaaaaatcaaatcagctgggcatggcagctcatgcctgtaatcccagcactttgggaggctgaggcaggcagatgacctgaggtcaggagttcgagaccagcctggccaac

SEQ ID NO: 767053 - DNA, 548 bp, Homo sapiens
cccaccacttgcccaaagtcgtccaatcagtgctgcagtctatttcctttgggatgggagtctcctcagtatcatgccttcagggtttaccagaaagatgttactagaccctaccacataccccaaagttagcctttgggttggggttttccacagtatagtccattctgtgtcaacagaaagatgttacagtaccccaccacttacccagggtttccrcactaaattcccatctgggtcaccagaaagatgttacaggaaaggggtccagatccagaccccaaaagagggtccttggatctcccacaagaaagaattcagggcgagtccctaaagtgaaagcaagtttattaagaaagtaaaggaataaaataatggctactccatagacagagcagccccaagggctgctggttgcccatttttatggttatttcctttttagaccatatagggtaacttcctgacattgccatgaaatctgtaaactgtcatggtgtgtccagaattggtgggttcttggtctcactgacttcaagaatgaagcc

SEQ ID NO: 767054 - DNA, 392 bp, Homo sapiens
acatttgttccaaaggactaaaaatcaaaagcaattgcaaagtattgggaatcacttttatggctttcctaagggacagtccccatctttccaaggagtgtttttaaagaagcactaactctggtaggttatcaaactattttttattctaaataaataaaagactaactgaaggtctcaggtgcacacttatttttccccgcagatcttcaaaccatccagaactatttcttgtcagagagctytcatttttattagagcagtgcaagataacgtacaaacatttgaaaaacactcaaaatactgagagtaaaggaggcccaacccttcctcagggcccagaaaactgacaggaaccccaaaggcttatcttaaatccatcaactcaattt

SEQ ID NO: 767055 - DNA, 626 bp, Homo sapiens
tcttcttcttttttttttttttttgagacggagttttgctcctgtcacccaggctggagtgcagtggtgcaatctcagctcactgcaacctccgtctcccaggttcaagtgattatgctgccttggcctcccaagtagctgggattacaggcacctgccaccacgcccagctaattttttgtatttttagtagagayggggtttcatcatgttgggcaggctggtctcgaactcctgacctcaggtgatccacccgcctcggcctctcaaagtgctgggattacaggggtgagccactgcgcccggccctctcttcttcttataaggacaccaatcattgcatttagggcgttgccctaaacccaggattatttcctcttaaagtccttgactagttacagctgcaaaagccctatttcaaataaggccaatttctcaggcagacatgaacgaagacactatactaagacaaaacaaagggagtgaatagcactgagaaattaacactagctgtactggagatcagaggtgctcaataaacattgagcacatttacagacctgccctaggggttgccttctcccacctgctaggcacagtgagcaaggctgacccctcatctgcca

SEQ ID NO: 767056 - DNA, 498 bp, Homo sapiens
cttgtagctgcaattactattattcttttaatatttttattaatctcaaaaacttaaccctgatcaacataatctgtgaggttgcattttaagatgccaattacctattttttcctggtacacattgtatttgtttattagggctgccataataaaacactacagattgggtggcttaaaaaacaaaaatttattttctcacagttcggaaggctggaagtccaagatcaaagtgctggcagggttggcttctggcaaggcctctctccctrgcttatgttggcctgttggccaccttctcgcgtgagttcgcttggctttttttttttttctttctgtgcgtgcactcccagtgtatcttcctcctcttatgaagacaccagtcctggtgaatccaagccctacccttatgacctcatttaaccttaattgcattcttaaaggttctattccctaaacaccatcacactgagggtcagggcttcaacatatgaattt

SEQ ID NO: 767057 - DNA, 601 bp, Homo sapiens
atggatctttcctcatgcatgattttgtaccatcatgcaccagtcatttggaaaacattggtttactgagtcatgctgagcttccaaatgttagcacatttatcttaaatatcaaaagatcctgaccactaacgttaccataggtcttatcagaagagtgtttagttattaggaaatggccaaactcatagtagtggatatagattttcygaaattctaattttgacttgagagatcaaatttttatctttggtaacaaatgtcatttttttcccccttgaagcgacaagcttacttcatctgctttcaagaaaatgtctactaaatactcaagtctgaatcatttgccacttgtactttcaggtgaaatggttgtccataaaaaagtggtgagttcagccgaagaaattgctcgtgtttttcctcaagacagctatgaagcaaaagtgcttcatgcacagcttccattttgtcacaaaaagttgtgtatgcaagagttgagactgaataaaattaattcatacagctttgtcagggacattcttaagtgaaactagcatctgtattttttaaagcaacaagtacatggtgacactgaaga

SEQ ID NO: 767058 - DNA, 601 bp, Homo sapiens
atggatctttcctcatgcatgattttgtaccatcatgcaccagtcatttggaaaacattggtttactgagtcatgctgagcttccaaatgttagcacatttatcttaaatatcaaaagatcctgaccactaacgttaccataggtcttatcagaagagtgtttagttattaggaaatggccaaactcatagtagtggatatagattttctgaaattctaattttgacttgagagatcaaatttttatctttggtaacaaatgtcatttttttcccccttgaagcgacaagcttacttcayctgctttcaagaaaatgtctactaaatactcaagtctgaatcatttgccacttgtactttcaggtgaaatggttgtccataaaaaagtggtgagttcagccgaagaaattgctcgtgtttttcctcaagacagctatgaagcaaaagtgcttcatgcacagcttccattttgtcacaaaaagttgtgtatgcaagagttgagactgaataaaattaattcatacagctttgtcagggacattcttaagtgaaactagcatctgtattttttaaagcaacaagtacatggtgacactgaaga

SEQ ID NO: 767059 - DNA, 646 bp, Homo sapiens
tcatgcgtttacgctccgtgcgtttacaccttatatttattctgccccattctccccttctggctccagatggtgtggcaatacagcctcaggtgtggaaggcggaaaactcattctctcttcttccctcctcccatggtctcagctccagcatgaccgtgccaggtttgaatggcacaacaccctctggcaaacatggctttttttctgcagatttcactggcacttaggaaccgggaaatgctagcgagacaatgggagccatcacatacaggctcttgttgctccctccactgtccccctcccagatgaaaccacagtgggaccatattttgatatagtcacagatattttttttttctaaagccttcatttattcaggcagcgggctgcaagmatctcaagagaagactgacacaatggaactatgaaacaaaagagtcaaatatttaggttttcaaaagccaaaagtcctggtggcagatgaaaatgatttggaagaacacgtgatcaggccaaatccgctttttcttgtcattttatgcctgaaataggcatcaagataaatatgtcagacaaggaagagtatagaagaagtgcatcagagacaaagatgtttgtgatctgtgagaggtgcaccccatcc

SEQ ID NO: 767060 - DNA, 537 bp, Homo sapiens
tcaaaatttacacataacgattgatgtgtgtttttttaaagtaattttattttctttaattgtaattttttataattccattttgtcctctactctcccagtcactgtcttgaccagacaacttattctttttttgtaattccagtattttcagtccaatcagtgccttttcagtgaaattaaaatattattacaatcgtagtctgatttctatctcagctacttttgcatacattctcagtcttctgtattttctttatgcctctcttgtgtcctttttctaccactygggagtagtctattttcacaggacagcttatgtattattcatctgttcttgtcctgcttggacttaggcatcagtctgtcactctgttacctgcagtgatgttccgtggtgtacctgttccctgaacatcctgcgctggtatccaccgaggtgtggtgcatgttggcaattggcttttgcctctaattgcaaaagctctgaactttgcagctacctcctcctgacctcatatatctacctgttcacac

SEQ ID NO: 767061 - DNA, 680 bp, Homo sapiens
aaaatatacatatatatatataattttatgtaattaatagtttgtttggtttgttttttttttccagagacggagtctccctctgttcgtccccaggctggagtggctcactgcaagctccgcctcctgggttcacgccattctcctgccgcagcctcctgagtagctgggactataggcgcccgccaccacgcctggctaatttttgtatttttagtagagacggggtttcattgtgttagccaggatggtctcgatctcctgacctcgtgatccacctgtctcggcttcccaaagtcctgggatwacaggcgtgagccaccgcacctggcctgtttaataggttttttttttaaaaccaaagaagaataactgattggttgtgaccattcaagggttagagtcttgatgtttacaaggattctatgcaaggtgtaattttcatcatcattatttgtatgatgtttttagatgtagtagtgcatttgtaggtagtcattctaaagggaaaatggtctgaaaattgaaattctacaaaataactgaggagtactcttcagaagtgtcatgaaaaataggaaaagattgagacctgtcactgaggaaactagacatgactaaatgcagtgtgggatcctagaacagaaaaagaacattagagaggaaactggtgaaacccc

SEQ ID NO: 767062 - DNA, 504 bp, Homo sapiens
ttgaagaaaataagcagagccaggcgtggtggctcacacttgtagtcccagcactttgggagcctgtggtgggaggattgcttgaggccaggagtttgagaccagcctggataatatggtgaaactccgcctctacaaaaaaaaaaaaaaaaaagaaaattatccacgtatggtgtcacgcacctgtagtctcagctactcgggaggctaaggtgggaggatcgcttgagcccaggagattgaggctgaagtgagctatgactgcaccactgcactccagcctgggcgactggacccagagatttagagatagaagcgagaccctatctctaaaagaaaaacaccaaaaaccaaaaaagagggcgaragagggaaacaaagccagacagcagttaaagtcacaaggacagatcttaatctgtaatatactgttgcaatagggaacagagtccagtgtgaactgaactcctatttgtacagagaatgagggaatgggagtggggg

SEQ ID NO: 767063 - DNA, 610 bp, Homo sapiens
ctggcatagatcaatcagtcaagttaaatcaaccaatcatctctttcgtgtgtactggcatattaccgcttccacctcggctgcccaaataagaccccgagacatcttcaccacggccccttcctcctgcctgtctgcacggtgcctggctccccatgagccccacrctgtctgagggagggcagtgctcactcatctttatgcacctgctagccaccttggagcaagcacagtgcagaccctcaatacaggctcaggacctgtgggaggcggggaggtcttcagggagatacaaggaaagaagcatgtcgcgggggccagcagactttaactttgccaggcgggggtagctgcttctggcacttcctttgccatcacttctgtcagggacaggcttttggagacaattatatgaaaccatacttccttctgtattactttcctgccattcctcataagctatattttaattttaaacagcaatttagcagggtaattcatttacaacaacacaatccattgtgatcacaatgccatacatttatgttttaagtaatttttaatgcttgtagcagctgggtctctgaaaataactaacatttttcacctt

SEQ ID NO: 767064 - DNA, 609 bp, Homo sapiens
tgtgggaaaaggcctccaatcaggaagaatgatccgcacatttatgaacaaaaatcttccaacttttgagacattctgccactttgtgcaaactctctgtgcctgtggcttatttgtggcaggagcagggaagggctcgtggctccctcctgcacagcaggacgtggcggaaggacaggcgagaacacctcctcaccgagggacggaggccaaagaggcctactgagtgtcctgatgtcaggagcaggttcccctccccggacacaaccccaagtctcagctcccactcttcccgcgggcctcaggtggtgccatcaggtcaggctgggttgcctctgtgttgtgtgtgtgtgtgtgtgtgtacatrtgaggctgggttgactctgtgttgtgtgtgtgtgtacgtgtgaggctgggttgactctgtgttgtgtgtgtgtgtgtgtatgtgtgtctattatcaccagtatcaaggaatacggtgggaaatgttattatcaacaaaagttgaaacaacatggcaaataacagattcaaatggtagacaggttttgtttattcgtgctggggttattacatttaatttttaagctgtgaggcacacaaaca

SEQ ID NO: 767065 - DNA, 609 bp, Homo sapiens
tgtgggaaaaggcctccaatcaggaagaatgatccgcacatttatgaacaaaaatcttccaacttttgagacattctgccactttgtgcaaactctctgtgcctgtggcttatttgtggcaggagcagggaagggctcgtggctccctcctgcacagcaggacgtggcggaaggacaggcgagaacacctcctcaccgagggacggaggccaaagaggcctactgagtgtcctgatgtcaggagcaggttcccctccccggacacaaccccaagtctcagctcccactcttcccgcgggcctcaggtggtgccatcaggtcaggctgggttgcctctgtgttgtgtgtgtgtgtgtgtgtgtacatatgaggctgggttgactctgtgttgtgtgtgtgtgtacrtgtgaggctgggttgactctgtgttgtgtgtgtgtgtgtgtatgtgtgtctattatcaccagtatcaaggaatacggtgggaaatgttattatcaacaaaagttgaaacaacatggcaaataacagattcaaatggtagacaggttttgtttattcgtgctggggttattacatttaatttttaagctgtgaggcacacaaaca

SEQ ID NO: 767066 - DNA, 565 bp, Homo sapiens
cccggctattcaggaggctgaggcaggaggatcacttaaacctgggaggcagaggttgtggtgagccgagattgtgccattgcactccagcctggacaacaagagcgaaactctgtctcaaaaataaaatagaagtagatccaakaacttaaggaaaattgcacataatgaacaggaaaaaaactatatgaagaaatagtattacagagatgaaaaacaaaatactatttctttacaataagtataaataatactaatataaatataaagaaataatattacagaggtgaaaaacaaatacagatgccacttcattgtaagttgaaaatattgtaaataaaaaatgcagtaaatacacctaaccaccaaatataatagcttagcctagcctaccttaaatgtgttcagagcacttacattagcctaaaatcatctagcacaaagcctagtttataataaagtcttgaatatctcatgtaatttattgaatactgtactaaaagccaaaaaagagaagggttgcttaagcactcaaagtccggtttctactgattatataccattt

SEQ ID NO: 767067 - DNA, 565 bp, Homo sapiens
cccggctattcaggaggctgaggcaggaggatcacttaaacctgggaggcagaggttgtggtgagccgagattgtgccattgcactccagcctggacaacaagagcgaaactctgtctcaaaaataaaatagaagtagatccaagaacttaaggaaaattgcacataatgaacaggaaaaaaactatatgaagaaatagtattacagagatgaaaaacaaaatactatttctttacaataagtataaataatamtaatataaatataaagaaataatattacagaggtgaaaaacaaatacagatgccacttcattgtaagttgaaaatattgtaaataaaaaatgcagtaaatacacctaaccaccaaatataatagcttagcctagcctaccttaaatgtgttcagagcacttacattagcctaaaatcatctagcacaaagcctagtttataataaagtcttgaatatctcatgtaatttattgaatactgtactaaaagccaaaaaagagaagggttgcttaagcactcaaagtccggtttctactgattatataccattt

SEQ ID NO: 767068 - DNA, 620 bp, Homo sapiens
ttctcctgtgtatgatgtgtgctttttcttcagctgcttttaatgtttcctcttacctttgactttcctcatttagaccctaatgtgcttgggatacttttctttctgtcaatcctgctttgggttcacttgggtttcttgattcttttttatttatttatttatttttttgagatggagtctcactctgwcgcccaggctggagtgcagtggcgcaatctcagctcactgcaagctccgcctcctgggttcatgccattcttgggcctcagtctcctgagtagctgggactacgggggcccgccaccacgcccagctaattttttgtattttaaatagacatggggtttcaccgtgttagccaggatggtctcgatctcctgaccttgtgatccgcccgcctcggcctcccagagtgctgggattataggcgtgagccaccgcgcccggcctcttgattctttaatctcatgtcttctactaaagtgagaaaatgtgtcctctacttttcaaaaatgtttttctcccccatttgttcctgtacacctgtgactcacatttcactattagaccctttgatggtatctctcaggtctctgagactgcattgatgtctttca

SEQ ID NO: 767069 - DNA, 649 bp, Homo sapiens
atcctttgagtttttaatcagtcctttaacatttcccatcactttgcgacaggtaaacctgtgacaggtataagtgtctatgtatgtgtgtacaatttgatctcttcctggaatctgtctaaaagccactatttttttaaaatttttcattctaagtctatttgcatcckgctaactctcaagtacctacgatgaggtacaaaattcttccatgaagatcactttttattaaagtctcttaccttcacctaaacaccatgccattaagtcactgtttttcaaggtgtggtccatggggcagatgcattaaatctaccttgaatgcttagtaatatataataataaaatctatactaactaaggtttattcggtacataccatgtgctaggtactgttctaagcccttcacaagtactgactcgtgttatcgtcacaatcattttatgagaaaagaactataatatcccattttacagaagaggagattgaggcagagattaaataatttgcccacatcaaaggctagtaagtaggccctatccagacttgctgaattaaggggaggaacgatcttggaaatttgcaattttaaaaagtgctccagcccctaaaaggagctctcacatgattcttttgtatactaaagtt

SEQ ID NO: 767070 - DNA, 617 bp, Homo sapiens
ccatgaattccgagtttcatctcacaagcccaataagactgcttgagctctccttctctctcggtctttgggccatcactttctagtcactgcttatgaactggcagatgccacaagaaaaaaagtagtgttgaatactggattcatatctctgtacctccctcttctctaggatctttkctcctcaagtcatcactgcactgatagctctttaatttcttaaaataaaatgttttaaaaatactttttccatatttctagttcttcttgatatgatggttgcaccacaacaagctagtctgacattaccagaaagagaaacctgataaacttattaccagtggcttagagtttccttaatgaggcttaatagaatactgaaactgattaacggaatttaaaaaatgaaatagagaagtacattctgcaagtctctgtaaaacataagaatctcattatgtctgttatcctatttgctgttttatgtctttctttctcaataagaccataaactccccatgggcacaactctgatacagtttatttcagtttcttcacatcatgccaataaatattccattaaattgagttgagtgggatgtacactattctaatta

SEQ ID NO: 767071 - DNA, 698 bp, Homo sapiens
cccaggttgttccttctcaatgtctctcagctactccctaagtaagatccaggcttgggaagctcaaggtgctctcctgtggcctggattgcacacttccccagtgggaagatggactgcagaggaacactgactccccatctcctgtattggggattttctgtttttagccagactctgccaggagggctgtctcccaaatttctctttcccagtgtctgaaatrttctgttcaattcctgtattccttcttggataaaagttaatgatgtgactatctgcacactattttgctttttccaagtgggttaggcatgctggaaaagcctctaatctgctgtctttgggggaaaaacccatacaaagattgtgttttctatttctgtgaataatatcactggcattttgatagggattacattcaatctgcaggtcacttctgatagtactgtcattttcacaatattaattattcctatccatgaacatgggatgtctgtttttgtttcctcttcaatttctgtcatcagtgttttagttttccttgcagacgtttcacctctttgactaaatttattcctatgtattttattcttttttggtggctattgtaaataagatggacttcttgatttatttttcagtgagttaattgttggtgtatatacacagaactgatttctgtatgttaattttgt

SEQ ID NO: 767072 - DNA, 636 bp, Homo sapiens
tccagagcttctgtcattcctcggatgcacccctgtactctccctctgttattttcattaagttgtttatttattgttcaggctttttttgcaaggaggacaagttctaaggatttctaatgggtcattttcctaaggtaactcagatctgggttgttattattattattattaaggaatttgaggagattttacaagaatctcattgcttccattctgttcagatcagaattctaccaaagagttctgaacagaaaagttcctgatgctatttgaggcttggagaattaaaatcttgcctccacaggatgtccaggtagggtctctaatatttcagagacaagaagggcctgaattaggcaagcagcagtaggtaaagaaagaagagcgcaaagtcaagaaagatttagcaggtaaaaccgacagaacctcatgactgacatggaggcacgaagaggggggtttgaggagaggtgcccccagacttctggctcggtgaygagccgtgtgagagcgcctgccatcacactgcattatggaatagccaaaagcagagagcaggtgctggtggaagcagtccagtcttcagcaagctgacgtgaatgcatgtaggttatctaatcagagacctacaaa

SEQ ID NO: 767073 - DNA, 656 bp, Homo sapiens
ctcggtgacgagccgtgtgagagcgcctgccatcacactgcattatggaatagccaaaagcagagagcaggtgctggtggaagcagtccagtcttcagcaagctgacgtgaatgcatgtaggttatctaatcagagacctacaaatatttaggtagatcatattttccacctctgaactttgaacacctcttatagcacaaggacaaaatatctcttctctgtgttaggtattaatgtcaataccttcactgtaatttttctttggacttggyttcagtattactaccttcttctgaattatcctttgagtttttaatcagtcctttaacatttcccatcactttgcgacaggtaaacctgtgacaggtataagtgtctatgtatgtgtgtacaatttgatctcttcctggaatctgtctaaaagccactatttttttaaaatttttcattctaagtctatttgcatcctgctaactctcaagtacctacgatgaggtacaaaattcttccatgaagatcactttttattaaagtctcttaccttcacctaaacaccatgccattaagtcactgtttttcaaggtgtggtccatggggcagatgcattaaatctaccttgaatgcttagtaatatataataataaaatctatacta

SEQ ID NO: 767074 - DNA, 547 bp, Homo sapiens
cagtgtgtaagtgttcccttttctccacaatctcgccagcatctgttattttttgactttctaatgatagccattctgggtggtttgagatggtatctcatcgtggttttcatctgcattcctctaatggtcagtgatgcttagctttttttcatatgcttctcataagcatgtatgtcttcttttgaaaagtgtttgttcagctccttattaatgaggttgttagtttttttctcctacatttgtytaaattccttatagatgctggatattagtccttcgtcagatgaatagtttgcaaatattttctcccattctgtagattgtttgtttactctgtcgatagtttgtcttgcggattcatagaaggaggtaaaaatatcaacattaacagtagtttggaagaaagtagattcaactgtcatggatgaatttcaggagttcatgattccagcagagaaagtaactgcagatgttgcagaaatagcaaaagaaatataattaaaagtggagactgaagatgtgactgaattgctgcaatctcata

SEQ ID NO: 767075 - DNA, 633 bp, Homo sapiens
ctaaaaaaaaactctcaggaaaaaatccagaacttatacaataatatttatagttttcataaaacaatttgcataaatcccatgcttccattaataagccaaatatgtgccaatgcatgcagaaaacaaaaattgtcagataattgagacctcagaaattaatttatctgtattttattcttaagtgacttaataaattagtaaaattcaaatgtttaggttggagaagtcaagaaaaattttaaaaacgtctgacagtattaaaaagttaagcatgatatttaaataactattttcaatatatatgcccacataatttttaggaaaagttatatgatataaacataagttattttgtttaatatmgtcttaacaaccaatctgtctactggggacctgaaattaggaactgaaaataatcagtccttgaaaaaaaaaagaaatcctcaattagagaaggaagtgttcctaattttgactatctgttaaaacagtaatgcatattagtgttttgagatttgtatttacatcttaccagttaaataaacatgtaaaattgatgttctcttgtctattacatttacattttatgttacattacctttacatttacagattgttatgatgatcaag

SEQ ID NO: 767076 - DNA, 465 bp, Homo sapiens
tattttattggattttaaaagcacctatttaataaaataatgtgtttgttgtaaaaagttaaatagtaaaaagatatgtatatatatagtccatgtgtacaatattaactaatttatttccttttccaaatgcccacaactataataatatagtttatttcttacacatttgtaaaatgttcattcaattatacacagwgttttcctaggtttaatgaggttgtgaaaaataagtctggttaaattccagaggatgggaagttagtttgaaaatagagaaaagaactgctttcaagtgaaatggaatagctaaaggaagaccaagggttaagagtaaaaaaaaaagtaaaatatttacataaaattcaggcatttgaagccaaagaactatggaggcagtggaacttaaagaattaagaaatcagagaaaaatatgtctaagagtttatctgccttctgaagcct

SEQ ID NO: 767077 - DNA, 480 bp, Homo sapiens
acaaagaaacatttatcatttatttttttctgaggtagatttcatctacgtaacaaggccacctttgcttgctaagcttcttctctctcccctaaaaagttttactagggtttaagcccacattttttttttctgtaacttcaaaattttttttgtaactcattgggaagtggggttttcattstgaagattctcatttatatatgttaaaaatatattgcatggctttactcctattaatcaatctgcctcatgtcagtgatttttagggaaactttatggggccaagagcctatgtcccacacgctatcaaaatggaaaaataatgcaatagtagcagtgtatttccaaaaaatatataccaataaattgttctgagatatagcctgggattgggggttgggacagggaagagaataaacaaaactgcctgggtatttttggagagaaggaaaattatgttattttttcatgcttcac

SEQ ID NO: 767078 - DNA, 467 bp, Homo sapiens
gtgtgtgcatttatgtgtgtctgtgtctgtgtgtgtgtacatgtccatgtttggagatgttcttgacatgatgctttgtaatcacaattccaaacatcaacggaaggatttttctgggcatttcttgccaacaagttggagaacaatggccagagggaaagtagggctttgccgctacctmcaaaatctccagctccactgttaaattccatttgaaagatgcccaggaggagaccacatttctgaagcatggcatgtaggatcagggcttcccttggaaaatcttgcctgggaatactgtcctgccctctgaagccacctgcccctacagaggccctgccactcatgatgaatcccttggtggagagagattaagatttactgggtcaggtaccactctcctttttaaaaaaggatgttttggaaaaggggttttagaaaaaaaggatattagtgtggaattttca

SEQ ID NO: 767079 - DNA, 633 bp, Homo sapiens
aatgcacttctttgaaaaaaagatatggagtttgaatacaggtaatgtttgatgatgaggttagactggaataggatgtagggtgtttggagctagaggtgttagctaaagtaggtgctaaggtttcagtctggggttggggttgaaagyaggagctgggctcacggggtggggggttgattaggtcagaagctgagttggtgatgggctgagagaacacttagaagcaaactgatgagtcagggctcaggcctcccttaaaactacacagtttccttatcaccctcattgaagtgttcctttcctgagagttccttgtgcagggtcaggcaccatccttggatcaagcttgtggtccagtttggtggttcaggcatttcttttattttataaagaaaaatctctcttttcccttgacttccagatagccacttttccccatgtccatagggaaggtccagctttttccatttctccttgtagtttctgtttttcctgtgatcttggtgaagaaaattaatttagtgctttcagttatcttagagtctttgatccttacttaaatactgtgatgaaatatgattattttcctcctttaagagagatagaaataaagcttcagatatcccaagg

SEQ ID NO: 767080 - DNA, 633 bp, Homo sapiens
aatgcacttctttgaaaaaaagatatggagtttgaatacaggtaatgtttgatgatgaggttagactggaataggatgtagggtgtttggagctagaggtgttagctaaagtaggtgctaaggtttcagtctggggttggggttgaaagtaggagctgggctcacggggtggggggttgattaggtcagaagctgagttggtgatgggctgagagaacacttagaagcaaactgaygagtcagggctcaggcctcccttaaaactacacagtttccttatcaccctcattgaagtgttcctttcctgagagttccttgtgcagggtcaggcaccatccttggatcaagcttgtggtccagtttggtggttcaggcatttcttttattttataaagaaaaatctctcttttcccttgacttccagatagccacttttccccatgtccatagggaaggtccagctttttccatttctccttgtagtttctgtttttcctgtgatcttggtgaagaaaattaatttagtgctttcagttatcttagagtctttgatccttacttaaatactgtgatgaaatatgattattttcctcctttaagagagatagaaataaagcttcagatatcccaagg

SEQ ID NO: 767081 - DNA, 503 bp, Homo sapiens
tgcagctattgagataatcatgtggtttgtgtcgttgcttccgttttgtgatggattacatttattgatttgcgtatgttgaaccagccttgcatcccagggatgaagctgacttgattgtggtgaataagctttttgatgtcctgttggatttgatttgccattattttattgaggatttttgcatcaatattcatcagggatattggtctaaaatactctttttttgttatgtctctgccaggctttggtatcagratgatgctggcctcataaaatgagttagggaggattccctctttttctactgattggagtagtttcagaaggaatggtaccagctcctctttgcacctctggtagaattcagttgtaaatctgtccggtcctggactttttttcgttgataagctattaattattgcctcaatttcagagactgttatttgtctatttagagattcaacttcttcctggtttagtcttggaagggtgtatgtgtc

SEQ ID NO: 767082 - DNA, 503 bp, Homo sapiens
tgcagctattgagataatcatgtggtttgtgtcgttgcttccgttttgtgatggattacatttattgatttgcgtatgttgaaccagccttgcatcccagggatgaagctgacttgattgtggtgaataagctttttgatgtcctgttggatttgatttgccattattttattgaggatttttgcatcaatattcatcagggatattggtctaaaatactctttttttgttatgtctctgccaggctttggtatcaggatgatgctggcctcataaaatgagttagggaggattccctctttttctactgattggartagtttcagaaggaatggtaccagctcctctttgcacctctggtagaattcagttgtaaatctgtccggtcctggactttttttcgttgataagctattaattattgcctcaatttcagagactgttatttgtctatttagagattcaacttcttcctggtttagtcttggaagggtgtatgtgtc

SEQ ID NO: 767083 - DNA, 621 bp, Homo sapiens
cttttactcatggcagaaggcaaagtgggagcaggtgtcttacatggcaggagcaggaccgagaagtgggccgggaggagaggggaggcgctacacacctttaaacaaccaggtctcatgagaactctatcacsaggcagcaccaaggggatagtgctaaaccattcatgaaggatccacccccatgatcgaatcgcctcccaccaggccccacttccaacactgggggttgtaattcgacatgagattgggtggggacacagatccaaaccctatcactttgattttatatttttgtttcttttttcttactctgaaaatcttggtttctgttaacacaatccagttgctgcataaaatgaactatcacatttacctatttattacacatttaccttgatttattgtataatataaaaaagtttcaaaattacaattcaatattgttaataacaataaaactagagttaagtaacaagattttttgaagatttttatccttcaaacatatctatgtatgtgaagttagaatagtatattaaactcatttaaataattttttctttgttttcatattaccaatttgatatatcattagggtcatttattcatgtttatatt

SEQ ID NO: 767084 - DNA, 582 bp, Homo sapiens
tgtttgtttacgtattactaatcagacagccacattttttgcctttttccttgtctttcttaattttagttattgatggaggaaacaaaaattctagttggatatagtgagaattgttactccgtataaaaacaagcatttaattgattaaattccagtatactttttgtacattagttaagcgatatgagatgttttagaataaatgttgtatttaagcatagaaatatattaaatatgyattatggaatataagattactatagaagaatacagttgattttccattttcccaattagattatgcaaattttggaaaatggattaataggacaaatgtctataacaatttattttttaatttagatatatctatgcacattatgtatatggaactataaataatttggcaatattatttttatctatttttacatttcatataaacattttacacaaactttttacattaatttttggcactgtcttttttattacgagagctaacttttacattgtgaaatatttttctaaggcatgtaatctttattaccacctaagttcttaaagaaactgtatatc

SEQ ID NO: 767085 - DNA, 644 bp, Homo sapiens
ggaagtaagggatacacgtgcagttgagagtcaataatttgataaacatcacagtgggctatctactggaagtaatctgctgaaggaaacttacagctgaaaaaaagaggttaggcaagaaatcggaagttgtcaaagaatgggtgttctccaattattttcctaattgaccataaaatttggcacagaaatacacatttgaaggtaaattaaccattttgacagcttgacaaaagaaaaaaaaattgttgtcatgcatgaaagcttacattcgttctactcttctagcctataagtaaacaaacataatttataaaagggccagatagtaagtgtgtgatgctttgcwgatgatctggtctctgttgcaactatttaacttgatcattataaggaaaaaaacagccatagacaatgtatatgaaaataaggctctgttccaaacaaattatttataaaataataataaatatgtataataatataaaataaaatgtaaaaacattatttataaaaaccagacatgggctagatttagtccacaggccataatttctgatctctgatttagataattacaattggctaattacaaagagtatatatgatcagaatgcttccagcaatagccagaatgacaaatc

SEQ ID NO: 767086 - DNA, 502 bp, Homo sapiens
aagtgttcttcgtatcttttcatggctcgatagctaatactttttagcactgaataatcttccattgtctccatgtacccgagtttatttatccagtaacctactgaagggtatgtggttgtttccaagttttggacataatgaataaagctgctttaaacatttgtgtgcaggtttttgtgtggacataagttttcagctcctaggagtaaataccaaggaacacaattgctggattatatggaaagggyaggttaagcattgtaagaaactcccaaactgtcttccaaagtggctctaccattttgcattcccaccagtaaggaatgagagtttctgtcatccctactggtggtaatgcaaaatgaccacatccttgtcagcatttaatgttgtcaggttttgtatactgaccattctaacaagtgttgagtagtagctcattgtttttattggcaattccctaatggcatataactttgaatgtattttcatagactta

SEQ ID NO: 767087 - DNA, 590 bp, Homo sapiens
tgggtagttcaaatgtttccactggcaaaataattttgctttatatgaagtttaaatctactctaggtatatatttgtgtttagggtatatgagggagacataattggttttgtgattttattttctgttattctcaggtaatataagaagtaaaattaggttcctcttttaatggaggtttcagttaaaaacaaaaatgaaacacatactcacttcctaagtctgcaatcttttctttaaagggtcaattagtaaatgttttaggctagtcagccatatggtctctgtcacaactattcacctctgctatagtaagccaaatggccacagacaatacttgaacacaggggtgtgactttgtttaaataaaattttatttacaaaaagtggtggcagacttttgccgacagtccttaggttgccamcctttgtacctacatcaatctacaaattcttaggaaaagaatatatatatattaaagtatactgaagaataaatactggtttctttgttgcgttatccttgaatgacattatcatttttccatcttttaaagtgtttttaaaattatttatctgagaataaaat

SEQ ID NO: 767088 - DNA, 617 bp, Homo sapiens
tcttttatttcattgagcagtggtttatagttctccttgaagaggtccttcacttcccttgtaagttggattcctaggtattttattctctttgtagcaattgtgaatgggagttcactcctgatttggctctctgtttgtctattattggtgtataggtatgcttgtgatttttgcacattgattttgtatcctgagacgttgctgaagttgcttatcagcttaaggagatgttgggctgagaccatggggttttctaaatatacagtcatatcatctgcaaacagggacaatttgactttcttttttcctaattgaatacactttatttctttctcttgcctgattgccctggccagaacttccaacactatgttgaataggagtgatgagagagggcatccttgacttacgacagttttcaaaaggaatacttccagtttcygcccattcagtatgatattagctgtgggtttgtcataaatagcttgtattatattgagatacgttccatcaatatctagtttattgagagtttttagcatgaaaggctgctgaattttgtcaaaggccttttctgcatctattgagataatcgtggtttttgtcattggttc

SEQ ID NO: 767089 - DNA, 588 bp, Homo sapiens
atgcatattaataacactaatgtatcaattttccccacaggattgtgaacttttgaatgcatgactcttcacccttgcatcaccagcaattagtagggtgaccagcaaataaaaggttcttgtgttggttagatattaacaacaaatcattttgaaggaatagttatmctgtgatcaatagaatcagggatgcaatgaagaataaatgtaatttctggaacattagtgatatggtttggatttgtgtctccatccaaatctgatgtcgaattgtaatccccaatgctgtaggaagggcctggtgggaggtgattggatgatgggcacagatattccccttgctgttctcatgatagtgagtgagttctcatgagatcttgttgtttaaaagtgtgtagcatctcccctagctctctctcctgctctgaacatgtaacacatgcctgtttccccttcgccttccaccatgattgtaagtttcctggggcctgcccagtcatgcttcctggaaagcctgaggaactgtgagtcaattaaacctctcttctttataaattgctaatctcaggtggttctttgtagcaatga

SEQ ID NO: 767090 - DNA, 630 bp, Homo sapiens
gtagtaagttaaagagtggggaaaaaaaaacccatccatgttctatgttacagtaaataatttagagtcttagttttaaatgtgtaataatacaaacataaataacacagagtatgaacattctaaaaattccccttttccctttccacgaaggctcagagacagacaagcagcaygtggaggagataaaattagagagagttacaaagcatgagtgcacaggtgcttgtttgtattatttcaatttgcacatgccatctttgtgtttgtcaactcctgtgagatttaaccaggcatgatgctgaaaacaatggctgatggtgaaaccactcatttccatggagcttccattgaaagaagcctctgtctttttctttcaaagtagtcacattagggagacagtgcatattttaaggatgcagagattatttcacacatatttgagactataaaaaataccagtttatagactacacaaataccattccttgccctgtagttccctcttgctgctgatttaaagttttttttacccagtatgtatcacccatctgatttaaggtttattttcaaaagctttgcaacactccaataaaattacacatcctccaagaattgtgacaattctag

SEQ ID NO: 767091 - DNA, 630 bp, Homo sapiens
gtagtaagttaaagagtggggaaaaaaaaacccatccatgttctatgttacagtaaataatttagagtcttagttttaaatgtgtaataatacaaacataaataacacagagtatgaacattctaaaaattccccttttccctttccacgaaggctcagagacagacaagcagcatgtggaggagataaaattagagagagttacaaagcatgagtgcacaggtgcttgtttgtattatttcaatttgcacatgccatctttgtgtttgtcaactcctgtgagatttaaccaggcatgatgctgaaaacaatggctgatggtgaaaccactcatttccatggagcttccattgaaagaagcctctgtytttttctttcaaagtagtcacattagggagacagtgcatattttaaggatgcagagattatttcacacatatttgagactataaaaaataccagtttatagactacacaaataccattccttgccctgtagttccctcttgctgctgatttaaagttttttttacccagtatgtatcacccatctgatttaaggtttattttcaaaagctttgcaacactccaataaaattacacatcctccaagaattgtgacaattctag

SEQ ID NO: 767092 - DNA, 634 bp, Homo sapiens
aagaaataattagcagagttaacaacccagagagtggaagaaaatcttcataatctatacatctgagaaaatactaatatctagaatctacaaagaagcattaccatctcactcctccaagaatggccataatcaaaaaatcaaaaaaatatagatgttggagaggatgtgtttaaaagggaacccttttacactgttggtgggaatgtaaactagtacaaccactatggaaaacagtgtggagattccttaaaaaactaaaagtagatttaccrcttgatacagaaatcccactattaggtagctacccagaggaaaagaagtcattaataggaaaaagatacttgcacatgcatgtttatagcaacataatttctactgcaaatatatgaaaccagcacaaatgtccatcaatcaatgagtagataaggaaattgtgatatatatatatattgaaatactactcagccttaaaaaggactgaaataatggcatttatggcaacctggatggaattgtagaccattattataggtgaagtaactcgggaatggaaaaccaaatattgtatgttctcttatatgtgggagctaagctatgaggataccaaggcaaaagaatgatacactggact

SEQ ID NO: 767093 - DNA, 620 bp, Homo sapiens
actaatcactttaaattttagccatatcactttcatttcttattttgagacaaggtctcactccatcacccaggttcatgtgcagaggtgcaattatgactcactgcagcctccatcccctatgctcaagcaatcctccygcttcagcctcccaaagtgctgggattacaggcatgagctatgccatactattcaacagagtttactccaatgatatttcaatctgtccaatctcaaattcatagacagaaaggataaaatttttcaccacctcaataatccaaagatagtaatttaacttctcaattcaaaaatcatacatttatagataccaactttaggatcagaaagctcatcattgcatataggagttctgtgaacttaaaatgtcatgtgtataccatataaaagacacatgacaattattttttcagaaatctttaatgaaggcaataatttctaatctattttctaatgcagaggtcccaaaatgacctattttgaaatgctacctagacctatatcaactactaaagctcagcaattgaaatgcttaaatgctgcagacatcaaatacaataaatgttattcattcacttattcatacaatcaatcaacac

SEQ ID NO: 767094 - DNA, 694 bp, Homo sapiens
tgttttaattccttcacatctatttctttcatcaccagttaatgaggacttagtactcacatcagcagtaagagtagaaaatgggctcatattggtgttcgaatcctgatgtgttctcttactggttttaagatttgtgccaggttactaatcaaatcttaaaccttagttttctcacatataaagttgtaattataatacccacttcgaagggtcattgtaaaaaccacacctgaatgtacccacatatatacagacacaaccactaaagaaaatagattatgtaatatttattcaatgtattttacttgtctgttgtttatagagccctgcctcagttggatgagttatttcagatttggaagtgtctcgttctctagcttgggaatgcagctgaacaytgggggcagctgtggccctctttttgtttgttgccaactcggtctaagatcagcctgagtggactcagtcggaatctaccatctcaataccaggtggttaatttctcattggtagagccctctttttacaggcttgggaagtctggctgatcatctcgggttgtttaagcaagaaagttaagctatatccccctgattagtaggattttctcctttagattcctgtgttaatctacaaactgagcagtttatccctggtagacattggaataccaggtgtggtagtcatactg

SEQ ID NO: 767095 - DNA, 503 bp, Homo sapiens
tgatacatcccttgtgctggctgtacagaaggtgccagtgaatatttgttagataaatgaattaatgaataaatacagaggagttggtagggaaaaggcacaaaatgagcagaattggtgctaatttatgttgaatcagacaaatgttcagcttatgccccaaatttttacaaccatctcccttttaagtcactgaacaactgctaggagcctctgagccatgctaccccagaatacccyagaatactcattcctattcaaatatttggttttcagtgttacaaggacaagtattcatttggaccagagaaataggctggatttgcactcatctgtcacagtgccctgaaatcagcctcaaatgattcacagccctcttgaaaacatctccaatctcctaagagataaaaagcctcactcattttcccacccctgacccaccaaccagcttccatccctaaacctagagcgaaattatgatgttctgtctcctcctcctattt

SEQ ID NO: 767096 - DNA, 611 bp, Homo sapiens
atccaagaacatagaataactttctatttattttgttayttgctatctttcatcggttttgtagttttcctaagatagatctgggacacacatttcatgaatttacactcaatatttcatttttaggggcactgatataaagagtaatatgtttttattttcaaatttctgttgttcattgattgtatataggaaagtgatttttatgtatgaactgtattcttcaaccttgctataatcacttattagctccggtttttaaaatatattctctcagattttgacatagataataatgccatctgtgaactaagatagtattatctatttcttccaattttgtatactttttattttattttcttgtcttaatgcattagctaagacttctagtacaatattgagatgcagtggtgagatggaacataattttcttggtcctaatttggagagaattcatcagtgaacctatcaaaatctcatgctttctgttttgaaagcctttactggctgattctattcctttaatggatctaggctgattaagattgcattttccttcttgtatgagttttggcagatgtgtctttcaaggaattgatacctttcat

SEQ ID NO: 767097 - DNA, 612 bp, Homo sapiens
atatatgtatataaaatgaaatatactattcctaatatgtgagaaaaactgttatctcttaaattaagaacaagtagaatacatattttttccatatttagtattcactttctgaaattctttctttcttcacgaagatacaagtttctaatttatattatccttatctcagacacactttttctaacatttcctgcaagacagctctactggtaacatttttccttaatgtttgtttgtctaaaaagttatttaacctttctcttctcttctaaaggataatttcacaagaggtaaagaattctacattggcaagtttttgttcactcagctctttaaatatttctccactctcttgttctgtttgcatggtttattaagataagttaaatrtaattctactttttgctcctgtatagttaagttgttttattcctctgatttctttgagtatgttttctttgtctttgatttttctgaaggttgaatataatatgcctaggtgtccatttttttggcatttatgtttctcggtgcttggtgttttttaccttcagcatttagaaaaaattttattgtgagaatttccatctctgcttacattattcctgt

SEQ ID NO: 767098 - DNA, 597 bp, Homo sapiens
tgctttcctcacccctccccttttatttttttcggattaaactgatggatatagggttaggtattttgctctctagaatcagctctttttatttaccccttctactgttttttatattgtattaatgtctcttcttatttccttcctacactttcctacagtttagtctctcattctttttctaagttcctgatttgagtgcctaattcatttatttcattcttcctggcttattaatgccttttaaggatatctatcttctgaatactgtgtaatccataagttgcaagtgtgacatgttatgtttttattatgttttcaaaattctgtggtattaaaaatgtcttcacttaaaaaaaagtaatgggtgtaagatattcccctgaatagcacctaccactgccaycctgcaatccactgcttttgtcattctgtaaaacctcccatctggctgccccgaacccctcaccttcagaccattgcactggcagcctctccaagtggacaacgaggaccaccagtagctttcacttccccttctgagatcccttgttcaccttcactgcagcatttcaggaccggcgatcaatgaagtcc

SEQ ID NO: 767099 - DNA, 529 bp, Homo sapiens
gaagtgatgatccctttttggggatagtacattcaatgatcaaagtaccttactaaagtgtatggaccaggaggagatgagggagagagggagctggacagccagttcattgttgagtatatagattcgttcaagagctacaatggtgtggctggaaacagctgaccagtaataatccgaaaaggtatcaacagtggtaaggcagcattgatagccctgagaggggtttgaaggcctgatgtagccaatctgccaggagcartagtgggtaatgctccttgcaatatgacctttctcattgcaagactaatgggtcagcttttggcaggagtcacaagtctgtcattcattggtagcctctgcatcagaaacagccagacttgatgaatggtgggttccatcagaaaaccagtccttatttgagagtatctatgcaattgttccagacagttcgatcagcagccatgatttgtttccagattcacatccacaaagaagggtatctttaatctgccagtctgtagttttc

SEQ ID NO: 767100 - DNA, 529 bp, Homo sapiens
gaagtgatgatccctttttggggatagtacattcaatgatcaaagtaccttactaaagtgtatggaccaggaggagatgagggagagagggagctggacagccagttcattgttgagtatatagattcgttcaagagctacaatggtgtggctggaaacagctgaccagtaataatccgaaaaggtatcaacagtggtaaggcagcattgatagccctgagaggggtttgaaggcctgatgtagccaatctgccaggagcagtagkgggtaatgctccttgcaatatgacctttctcattgcaagactaatgggtcagcttttggcaggagtcacaagtctgtcattcattggtagcctctgcatcagaaacagccagacttgatgaatggtgggttccatcagaaaaccagtccttatttgagagtatctatgcaattgttccagacagttcgatcagcagccatgatttgtttccagattcacatccacaaagaagggtatctttaatctgccagtctgtagttttc

SEQ ID NO: 767101 - DNA, 419 bp, Homo sapiens
agctctttgccgtttcagaccttgcctatggtacagctcttgactccgtgaggacatttcttacattttaaggtgggtccacatcctctgtgccttgatttatgctaccactttctggccactagaaagttctaagtttcaatctccccaggcccagagcagtgaataccatgttgccacacattggcaaactgcaacctgtgccattcactgtgtgcgtaattaaatgagaaggggtccttagatgtacayggtctttctgttttggtccatagcgtcctcttgtatttgttttgttggcaaggttcacctatttggaattgtgacatcaaatggctgaatagtagcatcctgtgattgtagagccccaactgtcgtttcctcccatgaacatgagtatagaaatttattttcagcat

SEQ ID NO: 767102 - DNA, 649 bp, Homo sapiens
cgcaggttggacaaacttggattagagcatcccaatcatattggaatagcaatgtttcctaccttgacaaaatgtaagactgccttactactggggagccaagccaaaggacttataagctaatacttgattgggtattggaggctatatagaattacctcaccttagaaaactccaccaaaatgctgtcagataaattctgtatgtttcaggacttgctggttcctagtttaaagagaatttccattattatcatcatcattattatcagtaggcatgtatttcatttaaaaagttcattttaatctatatattctaatataattatgttcagctctaattattgctataccttgaaaatattaaatatatataatctatagtatcacattacttaaacaaccatttgtatttccatactgtagtcagtgtcttgagttccttctttaattaatattwgtgatgttttaaagcacataatcctttgtcgaatattatttgaataatagtactctaaggggataaagatatattaaattcctattggattcaaagctgtaatataccttgtgggcctctttaggataattaataagtaattatttgacttaatttactaaaatgtgaatttaatatatatatgtctatt

SEQ ID NO: 767103 - DNA, 491 bp, Homo sapiens
ctttgatgcttagaaatttcttctgccagataccccaaattatctctcttatgttcaaagttccgcagatctctagggcaggggcaaaatgcttccagtatctttgctaaagcatagcaagagtcacctttactccagttcccaaaaagttcctcatctccatctgagaccacctcagcctgaactttattatctatatcatgatcaacattttggtccaagccattcaataagtcccwagataattccaaactttcccacattttcttgtgttcttctaagccctaccaaactgttccaacctctgcccattacctggttccaaagttgcttccacattctcaggtatcttatagcaataccccactaccttggtaccaatttactgtattagttcgttctcacattgttataaggaaataccaaagactgggtaatttataaagaaaaggtttaattgacttattgttcctcatggcttggaaggcctc

SEQ ID NO: 767104 - DNA, 546 bp, Homo sapiens
taaaaatgcaagtcactgtcttctcccacaaccatcaccaccacacacacatatgacacacatagaccttagctatttgtgtcatgaaacgtagtaggtggagtgcttgggcatgagtttgactcttcttctagaagaatgacactggacatgccattcaaatcatgtttgtgcctcagtttccatacctgtataatgaggaagccatagtgttactaattccttttaagcctgattatgatcttataaactttwacaataaatgaaaggaaaactagcctttaacgggcgcttgctttaatgacgttattgtgtttaactagtttaacaaaaaagaactatgttgggcgtgatggttcatgcctgttctcccagcactttgggaggccaaggtgggaagatcacttaaacccaggagtttgagacctgcctgggcaacacggttaaacctgtctctacaaaacatataaaaattagccaggcatggctaatgtttggcatacatttgaaaacaccagaaataataatttaccagaagtttttcat

SEQ ID NO: 767105 - DNA, 563 bp, Homo sapiens
agacacagtaacaatctgatctctcttgcttttccccacagaaaagaaaaggaagaaagaaataccagagactgagtaatttacttttttaaaaaagaggtttaattagctcacggctctgcaaacaatacagaaaacatgatgctggaatctgcttggcttctggggaagggtaggtagggtggtgggatggtagtgtgctaggagaagccttagtgaaggctaataggaatggtctttgcttttcccaaatgactgatccaggggttttgccattstcaggtggcgtcatgttaagggacaaaaatcaaatattattttcttccactgtcatcttcctcttggggcattatttttcctggcctcactttaaatcacttgttcattagattgagccatttagagatgttttaaaaatttttagccattttatatcaaaacatgccaaaatatcaatacagggcatgtctggatctagcatttggtaacacatcatatatttttaacatttttattacttagtaagaggtaaagatttggttttgctcattagtcatctttta

SEQ ID NO: 767106 - DNA, 563 bp, Homo sapiens
agacacagtaacaatctgatctctcttgcttttccccacagaaaagaaaaggaagaaagaaataccagagactgagtaatttacttttttaaaaaagaggtttaattagctcacggctctgcaaacaatacagaaaacatgatgctggaatctgcttggcttctggggaagggtaggtagggtggtgggatggtagtgtgctaggagaagccttagtgaaggctaataggaatggtctttgcttttcccaaatgactgatccaggggttttgccattctcaggtggcgtcatgttaagggacaaaaatcaaatattattttcttccactgtcatcttcctcttggggcattatttttcctggcctcactttaaatcacttgttcattagattgagccatttagagaygttttaaaaatttttagccattttatatcaaaacatgccaaaatatcaatacagggcatgtctggatctagcatttggtaacacatcatatatttttaacatttttattacttagtaagaggtaaagatttggttttgctcattagtcatctttta

SEQ ID NO: 767107 - DNA, 519 bp, Homo sapiens
tgaaaaggctacatcctgtatgattctaataatataacattctggagaaggcaaaactatagagatggtaaaaagatcagtggttgccagggccttgggaggagagagggagagataataggtggagtaaaagggatttttaggacagtaaaactgttttgtataattttgtaatagtggatctgcgacattaaatacttracaaaactcctgtgtgtttagaacattagtgagccctaatgcaaactatggacttcagctaataataatgtatagtactggctcatccattgtaacaggtgtaccacactaatgcaagatgttaataataggggaaactgagggtggggagaaaggggaaatgtatatgaaaattgcaccttttgctcaattttctgtacaaataaaatggtgctaaataatgaagtctattacagaacacacacaaacacacaatttttaaaaatggcagaaccccaggccgggtacagtggcttacgcctgtaatccctgcacttt

SEQ ID NO: 767108 - DNA, 519 bp, Homo sapiens
tgaaaaggctacatcctgtatgattctaataatataacattctggagaaggcaaaactatagagatggtaaaaagatcagtggttgccagggccttgggaggagagagggagagataataggtggagtaaaagggatttttaggacagtaaaactgttttgtataattttgtaatagtggatctgcgacattaaatacttaacaaaactcctgtgtgtttagaacattagtgagccctaatgcaaactatggacttcagctaataataatgtatagtactggctcatccattgtaacaggtgtaccacactaatgcaagatgttaataataggggaaactgagggtggggagaaaggggaaatgtataygaaaattgcaccttttgctcaattttctgtacaaataaaatggtgctaaataatgaagtctattacagaacacacacaaacacacaatttttaaaaatggcagaaccccaggccgggtacagtggcttacgcctgtaatccctgcacttt

SEQ ID NO: 767109 - DNA, 532 bp, Homo sapiens
atcaaaggctccaaaatatgcacacaagacaagtttaaaagccctcatcattgtgaaaatttcttgtgatttttattttaattgggagagaaggaggtgtggacaggagatgctcatggctattttttctacagatcaaatccatagatctacattgtattgtttttctcytttcagaactttagtataaattcattacttgtcttattattgaaaaatattattcagacatagtgaggtactttgatgtagttctagtggctatatttgttgtttcttagaagacttagctgtctgcaggggaagtaaaaataatggaattaagcagtgggatcatcccccttcaaaagtcttacatttattagcatatatttatttttttaagacagaagtccacaaactatggcataataaacaataatgctattctggaacatggaaagtcctggactggtcatcagatataggctctagccttgacttcaccagcaactgggcgtggggccatagataactcatttaactttcatga

SEQ ID NO: 767110 - DNA, 608 bp, Homo sapiens
agaccatctcaagtgtacaaagatgccaccccaaggattctagccttcaatgacccagcctctcttcagtgactcctcaaagacccaccctctttctgcctccagttccacctgccctgagcacactttgacctggcattgtctcccctttcaaatacagtgtcccgaagtgaatgaaatgccccagaaaatattcaagaacgagaatcctagcacttgatctggaaatggatgctgagattaaacgtaaaccattttagccgggcacagtggctcawgcctgtaatcccagcactttgggaggctgaggcgggcggatcacttgaggtcaggagttcgagaccagcctgaccaacgagaccagcctgaccaacatggtgaaaccccgtctctactaaaaatataaaaattagctgggcgtggtggcacgtgcctgtaatcccagctactcgggaggctgaggcaggagaattgcttgaacccgggaggaggaggttgcagtgggcagagatcacgccactgcattccagcctgggcaacagagcaagactccgtctcaaaaaaaaaaaaaaaaagagaaaaacgtggaccattttcactggcagttt

SEQ ID NO: 767111 - DNA, 551 bp, Homo sapiens
ccaatggaggcgtttctcactgtctaaacttatgtagacttggtgagataagaataccagttcctccggacttttgaatgctgtattttaaactaatgcctattctctcagaggtcagtactgagctacacaggaagctacattacttggcttcctggattcagctgtgtcttgcccatctggtggacagcagcaccttccctcctccattgcctggctaactcctactcattctactcttggcctgacatctccttctaccaaagccctttccagacacggttaatgttgattcagatttctgttctgtaagttcttgtttccatgacagtggtttccacattgtgttgtaaatgtctatttctcaggctaagacagcascgccttggatggagagcctgtgtttccatcttcctagctccagtgccacctacagggcctggaacagagttctgtatgtagccaatgaatgcacgtcaaactaaaaactgcctgaatgaataaaaataatgaacgttggaaatactgaaaatacaaatccataaatacat

SEQ ID NO: 767112 - DNA, 636 bp, Homo sapiens
gcctgtgatatggttatgatctgctattgttcgtgatttcctgtaccatcatatggtaatgacagtttgttatgtaatggagatgactgcaccagacctatgtaaaaatttagtttctactaaaaatattcttgcttgaagcttatgagactattttcaaggaaataacttcctaaagaaataggcccctggtgaaacaccagggaataaaggaaataaattgagaaaaataccacaagcttatttttattgatcccattcccgtgggtttaaatgtaatttttaattagaatgtatcacagaaaatrcccttttcaatttattttaaaagatttgatcatatttttgcccttttaacttatagctagagcaacacatactgtgaaaagtttagaaaagttaaatctaaagtctgcccttgacatgactggtcaattatttcttaaataaatgataataaaaacttaaaaaacaggtaaatagagctggctttcctgtctccaattgagtactttgatatgtaattcacaaaattattaaattttataaaatacactattattttcctaaatttgatgatgttgattttaggaaaagttgatcatataaatgctaagatagattgatgagtatata

SEQ ID NO: 767113 - DNA, 628 bp, Homo sapiens
atggcttgtaaaattttcataaaaggagaaatttaattatgtcttaaaaattagattagtcattgaagaaaagagcagtcttaatgtgcagaatttggaaagtgggaaggcacagatatacgtaaaggagacaataaaataaaaatagctagagtgtcagatccaagaaggtcaaagtttggagattttgatgcaaatgttgattatagccaaattcagagggacttgaatgtttgaacaacatctcggcacatagaaaacactctataaatgttttctcactgaataaattaatgtatcctgtaggcagtaggtcgtgtggatggtttttaatgtaaaagtgyggcacgatgacagcattgctttataatgattattctggtggcattattcagcacgaataaaactgtagattgagagacttctaagcatgagattaacagtgaataatttaaaagaacgaatgggtaaaagagacatttggaagtcatatcatcaagtcaaatgtccaaggtctctggaaataaaataaatcattaaatactattcaaaagcatatattgaacacctactaggtgccatataaacaggtgtggaaacaaaaggggacatgaattcacaggcagaa

SEQ ID NO: 767114 - DNA, 663 bp, Homo sapiens
agtcaattcatggagtttaagtaaactatacactgagttgtaatactaatgaagccataagtatttcttgcttcttatatataccaattggctttccttcattcacttatgataacctgtactcctaatccactcagcaacctttcaattatttcttacttaaaacaagacgggaaagattagttaacaagaaagtgtgaagatgtacagaattactattgaaaagcctctcaaaactatgcccttctgacaagagaatatttctgaggcacgatctatattggaaagtgatgtagagatatgyataagcaaaagtagtgaaatcgcttcaacattctgatatgttcactttgtttagtgttttagttggctttaaattctaacaattaagaaagcttacaaatggtttgcagaagaatattagtgaaaggattattgagtacttcatccataagtcctttgaacaggaagcacacatcttataatgcaaactaattttttaaacaaatagatgcctgtgattggatggatctataaattcatgtttacattgctaatggcattattagcataaatcttttatagcatatattatagcagctttcaggtaattgatgcctccaaaaaatatttattgatctgacgtaaaaatatctttgagaa

SEQ ID NO: 767115 - DNA, 555 bp, Homo sapiens
taatagcctattattctcattcaaggtggggtaactgaagcaaagaaccattcatgtaactttgctaagttcacacaacttgttggaatgcaatccacatctgtgtgagtataaactccctgctttttcagcttcaccaagatccctcttttttttttttttttttttttttgagacggagtctcgctctgtctcccaggctggagtgcagtggtgcgatcttggctcactgcaacctctgcctcccttycttttattggggcactatagtatatgaaatagatcatcaagaagtaattgaggttcttccagaatttcctgaacaatgaaattaacaagcactgttggtaaataataaaaatgctggattaatttgaaaaaaaaaaaagtactagaatgtttctattcaggccgcacctgaaaatgtgctacttatactaattaaaaatcctcaggcaagagacaactgtgcccaattttcaagttttttgttttgttttgttttgttttgttgttttgttaattgttgaccacgtcctgagttcagagcgaatc

SEQ ID NO: 767116 - DNA, 533 bp, Homo sapiens
tgtttaattataaaagggccaaaaacaataaataatgatgaatgactttcatattttcataacaaacttttataagatatcctatctacttaaagtcaggatgaattgcgacttttaaaacaaactcaaagagagtttacatgactaaattttgagagcaaattatgcaacaagacttcaggacattttgccaagcrtaacaattttgtgcctcttcctcaagtaccatgaagagtcccagaaaatctgaacgtcagccattgtaataggaaaggaaaatgaaataaaaggtttgtgaaaggaaggaaataacaaatccatgcaaattaaatagagtctaagaatgccattcctatttttagtgccaaataaaaccaaaatctttgctagtccatctaaatactgaactaatatttatttgcttttccttaatatgtatataaagatacacacacacacacacacacacacacacacacacacatacacacacaatgattaacactttttaacacaaataataattacataac

SEQ ID NO: 767117 - DNA, 533 bp, Homo sapiens
tgtttaattataaaagggccaaaaacaataaataatgatgaatgactttcatattttcataacaaacttttataagatatcctatctacttaaagtcaggatgaattgcgacttttaaaacaaactcaaagagagtttacatgactaaattttgagagcaaattatgcaacaagacttcaggacattttgccaagcataacaattttgtgcctcttcctcaagtaccatgaagagtcccagaaaatctgaacgtcagccattktaataggaaaggaaaatgaaataaaaggtttgtgaaaggaaggaaataacaaatccatgcaaattaaatagagtctaagaatgccattcctatttttagtgccaaataaaaccaaaatctttgctagtccatctaaatactgaactaatatttatttgcttttccttaatatgtatataaagatacacacacacacacacacacacacacacacacacacatacacacacaatgattaacactttttaacacaaataataattacataac

SEQ ID NO: 767118 - DNA, 681 bp, Homo sapiens
cactaccggctcattagtcacttagtaacctttgtggttatcagatccactgtcaaggcatggtcatgcttgtgctgagcaacccttattttacttaataacagcctcaaagcacaagaatagtgatgctggcaatttgaatatgccaatgagaagcagtaaagtacttcttttaagygaaaatgtgaaagttcttgacttaataaggagggaaaaaattgtatgttgaggttgctaagatctatggtagaaacaaatcttctatccataaaactgtgaagaaggaaaaagaaattcatgcatagtgtacttagggttcagtactatctgcagttttaggcaaccattgggggtcttggaatttctcaccagcctagtagggtaggagcttgggatagaatttgttgatttaaataaaataagaaaatgtgtatttcttgcacacttgagtgaaggatgaagatttttgcccattttaagaaaacaactttgcctgctgtgtggaatggattctaaggaggcaagtgcaaaaatgaggtgaatttggaggctactgtagtatctatgcaagaaatactgtggactcgaatgaggaggatggcggtggaaatggtgaaaagtagaaagatgggaaatgccatcaaatatttttggtacctgtgatagacaggctaccaatgt

SEQ ID NO: 767119 - DNA, 616 bp, Homo sapiens
caattttgaagaaaactatttataggaaactgagagctaaaacaatcttataataacatcccatttttggtttcacttagtacttaagataaaaattgcttctctgaatataattttgtcactttttttcctgtgtactttcttaatacagcaagtagactcagtaaaatctgatacaatatacttatttcactagtgaaattgaaagctgaatgactggcgaatttaaaagataatgagggttcttactaccagcgccaataagaaaggttagacatttgttaaacgtgatatggtgctatctgcctgcatgttaaccatatagttcaggggacacccagtggttaaaagtaggtaattccttgctgtggtacagtgttaaaaaattatggaaaaatatatttcttggctcagcagtgatcacacattgttgattttttctttctgaatgagtacatgttrggatgtgtgtgtgttttgagaaaatgtttggtcttgactttatatataaattttctttgaataataaaaactcaccaacaattttgaaaatgttagaaatatgattaaacttttcctttaattaaaacaaattagaaatgtggaacaagtgact

SEQ ID NO: 767120 - DNA, 560 bp, Homo sapiens
ggattgtgactacgataaactctgacgctgagccctgattcccttcctttctcaaacaactttaatttttcctggacttaataattgtcaattatcatctttcttagccttctgtgtatttcacactaagttattcccacattttcccttcgtggtgtaaatcgcttttcaagtmttcaagcacattaggtagttagcatctctcggagcctttttctccctgctccagggaagatcagctgacctgtgggcctatcgcagccttcacctccaccccagagatttccctggcttttgtcttgtgcttcacccatgccttgctcttttccactccatggctcacttgccttggcaaagcaaccgtcaccaatagcttcttgaaaaagtgtgcatgagaggtaaaacttttgaggccctgaatattgaaaatatttttcttttaaacacacttgagtgatagtttggtttagagttctagggtagaaatcatccgccttcaaaacttattgctccttgtcttctagctttcagtgctattgagaagcctgaggccagaagct

SEQ ID NO: 767121 - DNA, 612 bp, Homo sapiens
ccggccacagtgcatgggctatgccatgtccatggcatagggtcaggcctagctatcgggtcaagtatgttcagttcctggttgccttaaagacaatacagagctgcgctggccccagcatcattcactgtccctgtggggagtggtactcttaataccacaaggggcaaatctacgtccccaacccatgctttcccctgacatctccatctagaggaggcacatttacctcccacctggaaacctcctcctcaaccccccaccgccagtggagtcccaccaagccctgcccccctggtatctytgccttccacgccttcctctttatcctctgtggtctcactggcttagctcaggagaaaaatcgtggagaatttctcaaaaactgtggagaaaactatgcctccttctaagtttttttttttttttttttttttttttttttttttttttgacactattaaaggtaatgctaaggtgcagggaaggttggcattgcttatatttgtaattctgctcccaataagctccaggtttcttacctggacaatataaaacagtaaataccatgctgactgcccagttcaatacactgggctttaaacaaaagga

SEQ ID NO: 767122 - DNA, 586 bp, Homo sapiens
actgagatcaaatttaggaaaatggcagtaaagattcctggactactctagtagtcactagttagagtagtgactactaactagtagagactaaacctgtgggatgttctgagtaagctcacaattaatgtgaaaataattactattcaaaccgtatactataattactacaattcagtgtaaggtgaagtcaagggctaccctaagtacttgcaaagaaatctctgtggtaaggatattgaaatgtcaatattgatattgatattaaaattagtcattyggatattctgcttgaagcaattaatgatttcttctcacatgcaaaagttcgctttctgttttaatgatatacctaaaatctaacttatttacatgaacaaatttttttggaaaaggtcaccggttgagattattgaatggtgattaaaatgttcattgctgcaaagcaaaaatttaagctggaagcataaactacatcaaaaacattggccatagctctaaaattcctcaacaaaaatttgaaacatctgaagtttcaaatgtaaaaactgacattatctgcagaaaaaaaatagacaaatcatag

SEQ ID NO: 767123 - DNA, 643 bp, Homo sapiens
cttattatggaactatctaagggatccttacatagttccaaggaaggggctgtcacatcaaaaagcccaaacatgtgattagagattggaaatttcaaacccaccccattcccctaacttcctaggaggagagaagaactggagattaagttcagtcatatggccaattatttaatcaatcatgcctacataatgaaacctcatyaaaaaccctggacaccatgctcaggggagcttcctgatactaagagggcggcacaccctgactctgtggaagcagaggctcctgtgctcatgacccttccagtcctcctcccatgtacctcttcatctggctgaccatttgtataccttataatgaaatggaaattgaaagtacagagctttcctcaattctgtgagttgttctagtgaattatcaaatctgaggggttgtgggacgtctttaatttgtaattgtcctggcagaagtgcagattgcttggggacacctgaaatttgttgttggaatctgaaacggggcagtcttatgggactaagtccttcatttgtgggtcttcactaattctgggtagtgtcagaattgaattgaattgtacgacactcagagaataagtgtcagaagacaaaaagaaaatcatga

SEQ ID NO: 767124 - DNA, 594 bp, Homo sapiens
aaaccatagtgagctatgatagtgccactgcactccagcctgggcaacagagtgaaaatctgtctccaaaaaaagttgaggaggtggataattggaactgaatactgcgatggttgattttcctaactcagttgaaaacaatttcagaggcttcaagataamgttctaattataggattgttttcagtgcaagatttcatgaactcaagtaactgttttctttaaggaacttaaaagaatctcccttcttttcaggtatgcagaagacatgtcaggatcttaactagtagagacatagggtcttgcaaaaggagggcccagggcaagtctggttgtattagcattactagtatttgtcattatgctggcagccaaactcctgctgacattatggttgtgtggtttggtacttcttcttacttctggctgtgaattagcaaatcagtgtcttatatttaaggtgcaaacaatatggctgatcacaaagagctggaactataattaaagaaaaaaagcaatgaatgtatttcatttgtttaatatcataataggtccccacttgaaaatcaaataatccaccttttgaaattgaga

SEQ ID NO: 767125 - DNA, 590 bp, Homo sapiens
tattctattgatgttaaagaaaatgatgccttggcattctactgtttgaatacatcaaagcataactacaatgtatcttgaaagcatatattgttacgggtgtttgggacatctggactttttgcttttgtaggggtgtgtttttgtaggtatcttaggctgtttcctcaactgtaaacatcttatgaccatgggtcatgattggcaaggaatgtgccttgttagtcttttttgtttttttgtttttctgttttttttttttttgagacagaggtttgctcttgttgcccaggctggagtgcaatggtgcaatctcggctcactgcaacctccacctcccaggttcaagtgattctcctgcttcagcctccccagtagctgggattacaggtacccaccaccacgcccggctaattttttgtatttttagtagagacakggtttcaccatattggccaggctggtcttgaattcctgacttcagatgatacacctgcctcggcctcccattggtattttgatagggattgcatgtagattgctttgggtagtatggacattttaacaatattgattcttccaatccatag

SEQ ID NO: 767126 - DNA, 590 bp, Homo sapiens
tattctattgatgttaaagaaaatgatgccttggcattctactgtttgaatacatcaaagcataactacaatgtatcttgaaagcatatattgttacgggtgtttgggacatctggactttttgcttttgtaggggtgtgtttttgtaggtatcttaggctgtttcctcaactgtaaacatcttatgaccatgggtcatgattggcaaggaatgtgccttgttagtcttttttgtttttttgtttttctgttttttttttttttgagacagaggtttgctcttgttgcccaggctggagtgcaatggtgcaatctcggctcactgcaacctccacctcccaggttcaagtgattctcctgcttcagcctccccagtagctgggattacaggtacccaccaccacgcccggctaattttttgtatttttagtagagacagkgtttcaccatattggccaggctggtcttgaattcctgacttcagatgatacacctgcctcggcctcccattggtattttgatagggattgcatgtagattgctttgggtagtatggacattttaacaatattgattcttccaatccatag

SEQ ID NO: 767127 - DNA, 473 bp, Homo sapiens
atataaagctggttgtttacaccactgccaacattatctattatcgaacttaaaaataaatgcaagttatcagcaaaaatgatcttattgttttaatttccattttcctgattttagtttgaaaatattcttgcaaatgttttaacaagtttatttaaagtataaaaattagtctgggcagaaatatcatcaagaaactttttttgttaaaagaataattrtctattgttgaaaatgtgtaagaacaaataaaataatttttaaggtgtctggatataagatcaatatgcaaaatcaatgatcagtggtttcaaatttagtggaatagtattagcaaagcagtaataaaactatttgtcttttattctactcatataattaataattagtaaacatagacataaaaaaatgaaatataggcacaatactgcacacagtaaaatttacatctgatgaatttaactctggaagta

SEQ ID NO: 767128 - DNA, 551 bp, Homo sapiens
tatgtcagtcattttttagaactaagagcagtaaaatcaaaacaaaaataaaagcaaaatcttgtccttgggggtagataccttgtattgtagacagaaacagaaactaaaataaaaagtaaattacataatatatcagaaggagataattgctatggagaaaatcaagtgagaaagttggatgagaatgactgaatactgtgtttcgattttaacgagcaaggaaagtcttactgggaaggtaataaagaatccaggtatgtgggtatctgatgaggagccttctaggcataaagtggagcagatgcaaagaccatgggcattattgtcactgacatattgagtgacagcaaggaagataagcatggccagtgaagagtgagttctkccaagaataaatatgagatgaagtcacagaggcaatggacatatgtgtcaccttgggctttgaggcaattgaaggtcttcagattttatttgaagtgaggtttccatgtaaattcttctttatcaatcagtttttttcttatataccacacgtcatttcaata

SEQ ID NO: 767129 - DNA, 529 bp, Homo sapiens
aaggcattcagtagtaccaggcgtatataaatgcccactccatgggcatgatagtagcagagacatagaaatgcccactccatgtcagcaattattatcattttttattatttatgtttcattcatgacacatctttaaccaataccatgcgagccgcacatattccccagtgtggcacctctactccaggcaatatggtacatctattccaggtaggctgttcctttgtwgctcccatggctatttacttactaccatctttgtccttattggtttcactatctgcattcccagtgctaggcctttctctctctgacattctgtttgtatccattctttatagacacattcaaagtaaacttcccccaagaaaactttcttgaataacccttgaagttctccattgtccctagggtttatttatagaacacatggcatcagcagatgctgaccatgcccactcatgtcccttcactcctcaccatttctacaggaagctgtgactctgcctgaaggatttctgtggtc

SEQ ID NO: 767130 - DNA, 591 bp, Homo sapiens
agtaatgtcatcctctctccccctggatattatgaaaaatatcacaggggggtgtacaccccctgtgatattgggagtaatataatcctcttccccctggatattatgaacaatatcacaaggaagtgtacacattctaggatattaggagtaatatcgaactctcctttcctggatattacaaacagtatcacaggggggtgtacaccccctgcgatattggaagtaacatcatcttttccccaatgatattacaaacaataccacaggtgggcgcacacttcctgagatattgggagtaatatcatcctytcccctccgggatgttgggagtaatattctctctccgcctggatattccgaacaatatcacaggaaggtgtacaccttctgcgatattgggagtactatcattctctctccactggatattccgaacaatatcacagggggttctatatcccctgggatatttggataatatcattctctccccttctgaatattctgaacaatatcacaaagtggtgtacacctcatgcgatattgggagtcatatcattctctacacccctggatattctgatcaat

SEQ ID NO: 767131 - DNA, 591 bp, Homo sapiens
agtaatgtcatcctctctccccctggatattatgaaaaatatcacaggggggtgtacaccccctgtgatattgggagtaatataatcctcttccccctggatattatgaacaatatcacaaggaagtgtacacattctaggatattaggagtaatatcgaactctcctttcctggatattacaaacagtatcacaggggggtgtacaccccctgcgatattggaagtaacatcatcttttccccaatgatattacaaacaataccacaggtgggcgcacacttcctgagatattgggagtaatatcatcctttcccctccgggatgttgggagtaatattctctctccgcctggatattccgawcaatatcacaggaaggtgtacaccttctgcgatattgggagtactatcattctctctccactggatattccgaacaatatcacagggggttctatatcccctgggatatttggataatatcattctctccccttctgaatattctgaacaatatcacaaagtggtgtacacctcatgcgatattgggagtcatatcattctctacacccctggatattctgatcaat

SEQ ID NO: 767132 - DNA, 645 bp, Homo sapiens
catcacccagagtccacagcctgcatttgggctcactcttggcactgtacagtctagggtttggataaacgtgtccaccattgaagtgtccacatgtgtccaccatggaagtgtcatgcagagtatttttgctgcccyaaaaaatccttcatgctctgcctatccatccttccttcccactcatgcctggaaccactgatctttttaccatctccacagttttgtccttttcagaatgtcctagagttggaatcacacagtgtgtagcttatcagattggtttctttcacttactaataagcatttaagtttcctccatgtcttttcactgctcatttctttttagggctgagtaatattccgctgtctggatgtgcactgtttatttatccattcacctactgaaagatatctcagttgcttccaagcaaatatagaattattaggtaaggaatggaattatgaatgaaagctttataccataaacattatgaataaagcttgtataatgaacaatgtttctatgagcatcatgaataaagcttctataaacatccacatgcaggttttggtgtggacatatgttttcaacccctttgggtaaataccaaggagtatggatcctggattacaggttaagcgtat

SEQ ID NO: 767133 - DNA, 658 bp, Homo sapiens
agggggagtacagcattagatatgagacattttagccgtgtttgggatcctatgtcattgactcttccttcctttatgactgacaaagactgtattcctcctgagagtcctgtgagagcaatgcaaagaaagattctgtatgaaatattgtaagtgccagcatcttacttcatctaggcaaaaaactcattgcaaaagcccatgccttattaactatttctcttagattcacaatgattaagatatgtgcaaagtaaactgtgaaatgccaatctattgcaaagtataccctcacggcattttgacaattctcagtaatgagaaaaaattggatgattactctcatttgcccttgcccagatsggtgtctcagttgcatgttttatatgatttttatacggagcaggaaaaatattctgcattaacttccaaaacatgaatgttcatgttccaaaatatgaatcaattaacattcaggacctattcaggtgaagaagacagatcttgaatgttggttgatatattgtatgctcttggtcttttcttcaacccccacaaagaatattttttattgactattgtaaatatatatatatataaatattataaatccatcttcatcttttacttaggttacttttcacattcttatcacatt

SEQ ID NO: 767134 - DNA, 553 bp, Homo sapiens
aatatttatatgcattagatgaaattaacagtagaattaatattgctaaaaaaccttataccaaataagttatgtgaataaaaggcttgagacaactttcaaatgtggaagaagacaattaagtgaaaagtgatcaccgaaatgactctggtattaaggacagaaaataaaaattcataatatagttaattactgttttggaagagtagaaaagatgaaacagatattttcaaagcaattaagaattcataagtaataacagaaaaaaaaacttttgcactataataaaaaagaaaacaaaaattaaaagcaaaagatttctagattttttagattgaaaagttcaagtcaatatctaaaaagaygcccgtaattccaggactttgggaggctgaggtgggaggatcatttaagcctaggagttaaagagcaacctggacaacatagtgagatgttttctctacagaattttttttttttttgagacggagtttcgctgttgttgcccaggctggagtgcattagcattatcttggctcaccgcaacgggttc

SEQ ID NO: 767135 - DNA, 610 bp, Homo sapiens
atttattaaatagaattcttgagagaagatctttacttgccttctttttagattgtgaactgactgctcttgttctaactcatttagtcctcataaaaacccaatgaggttggcattattttacagatcagttaactgccacacaaacaagttaagtaacttaccctagaatatgtaactagtgtatgatggattcaaactcaggcagtctgattccagattctgtgtttttaacaactttgcccctacaggggttatttgcattttacttctcacacattcatatcccctctggtgatagtaccactgccaagactttcatgtgggggacccataccctctacccactctcagtccamatggttaaggtagggttctatcctagaactggaggtaaactggtgacccaggcctaacccatcaaaatacagtctcaccctttggtcagtgattggttcagggaccaactcatgacccaagctagttcaatcacagcaactctcagaaacttttcaggggctactggcaaagcttcttgctctcttttcacccagacttgaacctatggtaatgtgagattgagactcttgtagccatcttgccagcacat

SEQ ID NO: 767136 - DNA, 623 bp, Homo sapiens
acaagtagtcagtctgcagaaaactaaagataaaaagcaagttttaaaagcagacagaggggtaaaaagacatattaaatactagggtaggggtccttctaacatctttacaaagctgaaagaaaatatagtatgaacctaagattctatacctagtaaaaatatccaccccaaataaggtgaagtaaagatgtttctgaactgacaaaatgaaaaaagtatctgttcccaggagacctgcactactagaggtttttcagcctgaagcaaaacaacactagaaggaatcggggtatcttaggaataaagatcagtagacasagcatatgtagaggaaaatagtatatatgtacatatgtataacatttatatagagacagatatttaaatttctttaactataaactattacaaataatgtataactatgtattgtagaatttatgtcatttatataaaaagaagaaatacaccattgtaaagtctttacactgtttgtgaagtagcatattacttgaagagaaaaataaaagtgtgcattactagagaaagacatgcataatgtaaggtggaatagatccaaagtcaaaacaggagatgaatattgagaaaataagcagatg

SEQ ID NO: 767137 - DNA, 578 bp, Homo sapiens
ccctataggataattaaaacgaaaactatcctgcagtcatgcccacttttaatttttaatttctatatctgtattaattttacatagtgcatttcacattgtggtgcaagttattcctaagtgatcacttgcttgtcattacataattccaagttcaatgacccctttcmtgtattattagggtaatgtaccggactcagatagagccaattattattttgagtcaccaacctactatacagacagggaagaccaagcaagtgaagccacataaaaagtaaaagctatttctgtttgaaatacctgacattacagtatgtctctctagaatttagctaactcattttcatggcatccctgatctcctactataaactccatgcaggcagagattttgtctgtttgttcactgttcactactgaatcctcatcacctggaaagatacctgacacatagtaggggctcagttattatttattgaataaatggctccagaaatagaaataaatttgtcccctagtctggtcctgttgcatctccacagcctcttgcccggcaggatctttgacagcctggt

SEQ ID NO: 767138 - DNA, 578 bp, Homo sapiens
ccctataggataattaaaacgaaaactatcctgcagtcatgcccacttttaatttttaatttctatatctgtattaattttacatagtgcatttcacattgtggtgcaagttattcctaagtgatcacttgcttgtcattacataattccaagttcaatgacccctttcctgtattattagggtaatgtaccggactcagatagagccaattattatttwgagtcaccaacctactatacagacagggaagaccaagcaagtgaagccacataaaaagtaaaagctatttctgtttgaaatacctgacattacagtatgtctctctagaatttagctaactcattttcatggcatccctgatctcctactataaactccatgcaggcagagattttgtctgtttgttcactgttcactactgaatcctcatcacctggaaagatacctgacacatagtaggggctcagttattatttattgaataaatggctccagaaatagaaataaatttgtcccctagtctggtcctgttgcatctccacagcctcttgcccggcaggatctttgacagcctggt

SEQ ID NO: 767139 - DNA, 578 bp, Homo sapiens
ccctataggataattaaaacgaaaactatcctgcagtcatgcccacttttaatttttaatttctatatctgtattaattttacatagtgcatttcacattgtggtgcaagttattcctaagtgatcacttgcttgtcattacataattccaagttcaatgacccctttcctgtattattagggtaatgtaccggactcagatagagccaattattattttgagtcaccaacctrctatacagacagggaagaccaagcaagtgaagccacataaaaagtaaaagctatttctgtttgaaatacctgacattacagtatgtctctctagaatttagctaactcattttcatggcatccctgatctcctactataaactccatgcaggcagagattttgtctgtttgttcactgttcactactgaatcctcatcacctggaaagatacctgacacatagtaggggctcagttattatttattgaataaatggctccagaaatagaaataaatttgtcccctagtctggtcctgttgcatctccacagcctcttgcccggcaggatctttgacagcctggt

SEQ ID NO: 767140 - DNA, 560 bp, Homo sapiens; identical to SEQ ID NO: 736622

SEQ ID NO: 767141 - DNA, 535 bp, Homo sapiens
cttgcagaagttcttgatttaggtctgagatgaaaaagcattctttgaaaatgatcaacacaagcttcatcaacagggagagctgtgtctctgaagtgggtaagtattctaagttcgtcaagtgatttcacagttggaatgatggtgcagggtttctgaaaacgtctttatgtgtgttttmaaggatgattttcagcatcttttttttgttcgcaagtaacagctacaatttaaataaaagctttttttttaaaaaaaaaaaaaaggtctacattttcttccttcattggacttcctgctgaggctgttgacaagatgttttgtttagtgcttgttctattctatttttccatatgaagcaagaggaatacagaagccaaagtcaaacctggctgctttccctagaggtcctaagcacacatgcacagcatgaactcgatggaaacacttaagcatgcagaaggatttctaaacgattaacaacccttgaggcataacgatggtgtcattcaacaaaagaaattattaagatatt

SEQ ID NO: 767142 - DNA, 579 bp, Homo sapiens
ttgtgtgcatctcccccattgtactttttccccccaaacctttatctttctttttcaacatttgataactttgataacattctttttttttttctttctttctttttttttttttaagacagaatctcaatttgttgccctggctggagggcagtggcgcgatctcagctcactgcaacctactcctcctgctttcaagtgattctccttcctcagcctcccgggtagctgggattacaggctcacgccgctacgcctggctaattttttgtatttcagtagagacagggtttcaccgtgttgcgcaggctggtctagaactcctgagctcaggcagtccacccacctcggcctcccaaagtgctaggattacaggtgtgagccactgcgcccggccttgataayattcttaaagattaaacatggtatgttctcagcactatggctggccacttaagtataaagtgtgatcagagttaatccatcactggagtgtatatatcagatgctatttccagtcatataaccttatattttcccttagatttgtcaccttcaaaaagcaaatgcttgtttttg

SEQ ID NO: 767143 - DNA, 503 bp, Homo sapiens
atcacctgaggtcaggagctccagaccagcctggccaacatgatgaaaccccgtctctattaaaaatacaaaaattagccggacgtgctagcgcatgcctgtaatcccagctactcgggaggctgaggcatgagaatcgcttgaacccaggaggcagaggttgcagcgagcccagatggtgtcaatgcactccagcctggggcaacagagtgagacttcgtctttaaaaaaaaaaaaagaatatggggaaagagagtcttgcttctgactcctctcactggaagtctgaggggacccaggtacctgaatgacatccatcgtgtccctgctacatgaagcctgaggctggggccaacaaasggcaagcagaagtcaagaaagggagaaaaacagactcatgatggcttcatttgcatcctggattcagccctacccatgaacgttttatttacaggatccccaaattcagactttcagatcttttaccaaaaatggcctaactg

SEQ ID NO: 767144 - DNA, 531 bp, Homo sapiens
aactaacgaagaataaataaataatataaaaataaaataaatactgcagtccttatgttattgctttgtttcaatatctggtatgattgcctgagggacctgaggtttttaattaattgtagggtttttttttttaatctttagaagtggttggttatgtaaaatattattattattatttttttttttttgagactggrttttgctctgtcacccaggctggagtgcagtggctcgatcacagctcactgcagcctcaacctcctgggcttcaagcaatcctcctgcctcagcctcccaagtagctgggatcacagatgtgtgccaccacgcctggccaatgttaaaaaatcctttaacttttttgtagagatgcactcctggactcaagcgatcctcctactggtcccgaccaccagcctctttctgataaacatttacactgtttattatctgatgccatttctatcttcttccttgtcgtccagacatcaaagaattaggtttcttcagggttttctttttcaagtc

SEQ ID NO: 767145 - DNA, 611 bp, Homo sapiens
aatccaagaaggtgaagcaaatacaaacaagaagagaaaaaccaccttgttgtttgaaacaccacatcttttttcaaataggtgtatacataaatgggcaggcaaaactaacaacaattgttggacaagtgtgaattctatggctggctctgagacaaattcaactctaatacagccaaacccattcataaactacctaagagaaaacagaatctgcagcatttccagatcaaaaagstagtgctatgggcagactcaaagaactcttgaacttatggaaggaaagacgtctgtgcaggcttgctactatcatgaaaaggatgagtccccatcacaatctgaggagtcaacccttgttaagctcttgctgtgagccaagctttgcatggattatctcactgaatcctcacaagaacgctaagaagtagataccatgattacctctaatttacagacaaggaaactaacgcacagagaaggcaagcagcatggctaagatcaaacggcttgattaagtggaggggatggaattcaaatttgattccagaacacgagttcttaatcgctaaagaaaatttttaaaataaccaaatcaacataaataagtcacc

SEQ ID NO: 767146 - DNA, 606 bp, Homo sapiens
aaaaaactgtgtgtttgtcagactaacctgtatttccaaactgagatgaccctgcatcctttcagaaaacaggtggtaaggaaacacctactgagttctcaatactggagtctgagtttttcagtgtgtggtcaaacatctgtgagtcttggacaaacagcctcggttctctgcctgtgaagagaggaattctccagcagccctccctaggtgacccatggcatacccttccttggggcctgaagggctctgtctctaaccatgaacwccacggcttatggatctgtcagggtagcagagagcaactgatgccaccaatttcagccttcaagatggccagtcaacccagcccttctctaggtttccacctgtgtgtaatttaaagaataaggaatctgattgatttccagcaggagcacatgacagtaaactcaagcagtgacagccctgactgcggcttgcctgactgcatgaagctctctttctcaaggggatcacttgtagtcaggtaagataatttttaactaagtcagttaaagcagagagtcattagaaagcacacattaaatatggttttctttcatcctcccgctcaatacaggcaca

SEQ ID NO: 767147 - DNA, 526 bp, Homo sapiens
taccctgtaatatataatgaaataattatacaactcaacataatgtagaattggtgagcttgttttcctgtaactagatggtcccatctggaggtgatgagagatagtgacagatcatcaggcattagtctcataaggagtgggcaaactagatccctcgcatgcgcagttcataatagggttcatgctcctattagactctaatgccactgctgatctgacaggaggcggagctcagacagtaatgggaggacttggctgacytgcccactgctcatctcctgccgtgcagcccagtttctaacaggccacagaccagtattggtttgtggccctggggtgggaaccactgttctaaaaacagcactatgaggttgtttatagtgttatgtgtggaatagttataatttgaaggcaattgtaagggtctgttactgaagagtgaagatgtatggtgtgtatggcatgaagcaatgtacaattcatggtgtgaatggagtgaagaggtaaattgtggtagatacgt

SEQ ID NO: 767148 - DNA, 632 bp, Homo sapiens
tgggggctctgactctgcatttcccttccacactgccctagtagaggctctcaatgagggctcagctgctggagcaaacttctgcctagacatccaggcatttccatacatcctatgaaatctaggtagaggttcccaaacctcaattcttttttttttttagttattatactttaatttctggggtacatgtgcaggtttgttacacaggtgtacatgtgccaggtaggtttgctgcacccatcaacttgtcatttacattaggtatttctcctaatgctatccatcccccagccccccagcccccaacrggccccagtgtgtgatgttcccctccctgtgtccatgtgttctcattgttcaactcccacttatgagtgacaacatgaggtgtttggttttctcttctttggttgctttgctgagaatgatgcaaagtatataaactcattctttttatggctgcatagtattccatggtgtatatgtgccacattttctttatccagtctatcactgttggacatttgggttggttccaagtctttgctactgtgaacagtgctgcaatgaaaataagtgtgcatgtgtctttatagtacaatgatttataatcctttgggtatataccc

SEQ ID NO: 767149 - DNA, 632 bp, Homo sapiens
tgggggctctgactctgcatttcccttccacactgccctagtagaggctctcaatgagggctcagctgctggagcaaacttctgcctagacatccaggcatttccatacatcctatgaaatctaggtagaggttcccaaacctcaattcttttttttttttagttattatactttaatttctggggtacatgtgcaggtttgttacacaggtgtacatgtgccaggtaggtttgctgcacccatcaacttgtcatttacattaggtatttctcctaatgctatccatcccccagccccccagcccccaacaggccccagtgtgtgatgttcccctycctgtgtccatgtgttctcattgttcaactcccacttatgagtgacaacatgaggtgtttggttttctcttctttggttgctttgctgagaatgatgcaaagtatataaactcattctttttatggctgcatagtattccatggtgtatatgtgccacattttctttatccagtctatcactgttggacatttgggttggttccaagtctttgctactgtgaacagtgctgcaatgaaaataagtgtgcatgtgtctttatagtacaatgatttataatcctttgggtatataccc

SEQ ID NO: 767150 - DNA, 582 bp, Homo sapiens
ggagtataggaatgcttgtgatttttgcacattgattttttattctgagactttgctgaaattgcttatcaccttaaggagattttgggctgagattatggggctttctaaatatacaatcatgacatctccaaacagagacaatttgacttcctcttttcctaattgaataccctttatttctttctcctgcctgattgccctggccagaacttccaatacgatgttgaataggactggtgagagaggtttacttgactcacatttccgtgtagctgaggaggcctcaggaaacttacaatcatggtggaaggggaagtaaacacayccttcttcacatggcagcaggagagagaagtgctgaggaaagggggaaaagccccttataaaaccatcgtatctcatgaaaactcattcaatatcataaaacagcctggggctgttttatgcccccatgattcaattacctcccactgagtttctcccgtgacatgtggggattatgggaaatacaatttaagatgagatttgggtggagacacagacaaatcatatcaattgtcttttctgtcaccaaataaa

SEQ ID NO: 767151 - DNA, 608 bp, Homo sapiens
accgccatcctcaaacacatgtgctctgtttccaggccgggccgggatcagatgggaagtggaacctcgtcatgagcagaaactgtttccctacgaagagcacttggagatggcaatgctgaatctcaccctgtaggactcacacacgactccaacgggattgtgagaatcaagtcactctcatgggaagaatttttatatgggaaagcggataaaactttcattggactggaatgtttggagaatgttaatttccaaatcaggaaccacaaactgccctctaataagacatcggctatctaagcgtgtgggtgccccctttctgccagcagttctggttcttaagaaaatcaccataaatcagacatgaaaattctggctccaaaaayagcattttctttgtgcaaataaaaacgtgtgtatcaagtatgatgttcccccaacgtggacacactcagttcctcacaaagccaagcccactgcagctgccacatccctgggcttacggtgcagcaggtgcttttttcaagacaggaatcaaaatgttaggaacacggcagaaaggggacacctggagaccaaacgcaggatgaggagttctgcagagg

SEQ ID NO: 767152 - DNA, 634 bp, Homo sapiens
cagctctcatcccatcggagctgctgcgactcccgcaggttcttccggaactggtttagcttgcccgcaggatcaggaaagtttgagaaaagcatctgcaaaaaaataaagagcagagcttacctcattgcctgtccccaccccatccagggtcaccacctggctgaccccaggttcccgacccaacaacaacccctccaagtccctaactccctcacttggactcgagacccttcacaccccagcagcactccgactccaacttgacatcacagtttctggaaacttccccgyatgtcccactttcccacacttggtgccctggagcacctcccggcctctacgtgctgcccattcccctgtgagcaccctcctctcggcctctggccaacgcagtctcacccatctgtgggtaacaagggggtgtcggtgttctttgcagccttgctaaactgtctgaatcaaggatcacaaactacagcctgcaggccaaatccagcccacagcctgtgtttgtaaataaagttttattggaacaaagccacaccccttaatctacagatgatctgtggctactttcacaccccaacagagtaccatggttctgacagagactggggaacccagtctaaac

SEQ ID NO: 767153 - DNA, 634 bp, Homo sapiens
cagctctcatcccatcggagctgctgcgactcccgcaggttcttccggaactggtttagcttgcccgcaggatcaggaaagtttgagaaaagcatctgcaaaaaaataaagagcagagcttacctcattgcctgtccccaccccatccagggtcaccacctggctgaccccaggttcccgacccaacaacaacccctccaagtccctaactccctcacttggactcgagacccttcacaccccagcagcactccgactccaacttgacatcacagtttctggaaacttccccgcatgtcccactttcccacacttggtgccctggagcacctcccggcctctacgtgctgcccattcccctgtgagcaccctcctctcggcctctggccaacgcagtctcacccatctgtgggtaacaagggggtgtcggtgttctttkcagccttgctaaactgtctgaatcaaggatcacaaactacagcctgcaggccaaatccagcccacagcctgtgtttgtaaataaagttttattggaacaaagccacaccccttaatctacagatgatctgtggctactttcacaccccaacagagtaccatggttctgacagagactggggaacccagtctaaac

SEQ ID NO: 767154 - DNA, 634 bp, Homo sapiens
cagctctcatcccatcggagctgctgcgactcccgcaggttcttccggaactggtttagcttgcccgcaggatcaggaaagtttgagaaaagcatctgcaaaaaaataaagagcagagcttacctcattgcctgtccccaccccatccagggtcaccacctggctgaccccaggttcccgacccaacaacaacccctccaagtccctaactccctcacttggactcgagacccttcacaccccagcagcactccgactccaacttgacatcacagtttctggaaacttccccgcatgtcccactttcccacacttggtgccctggagcacctcccggcctctacgtgctgcccattcccctgtgagcaccctcctctcggcctctggccaacgcagtctcacccatctgtgggtaacaagggggtgtcggtgttctttgcagccttgctaaactstctgaatcaaggatcacaaactacagcctgcaggccaaatccagcccacagcctgtgtttgtaaataaagttttattggaacaaagccacaccccttaatctacagatgatctgtggctactttcacaccccaacagagtaccatggttctgacagagactggggaacccagtctaaac

SEQ ID NO: 767155 - DNA, 630 bp, Homo sapiens
gcaggatggagaagtcttcgtcctctatgagaagagaattgaatgtcaggggcctgtttctagacacccctcttccagctcacaggccctcccgttctcattgagaccgtggcagggtgggagcatgcaggactggcaggggtgaggagaacacaggttggccaggtgcccgtcacaccaaccccargtgccccaggggtcctgcagacctgtccagctcgtgctgctgaccagcagggctggccgctcacggagacgcgtcaccagcccgctcccagcatcccgctccgtgaaggccgaccgctccgtgactgggtcctcaggttctgagctgaaggagcagaaaaaaagcctgtgagaggccatagagcaggcccgggacccaggagaggcatctcctgccgtggcgaggcctgcaggctcccagaggttggggtgcccagccacatcagcagcaccaggccacccctgccatctgaggcctgggcttgctttctctaatattgttgctgggtgctaaggttacaacagcaaacaagactgactcattccttttctccacgggacttactgtcttatcatcccctggactcaagatgagggtgcagggacgccctcccacaccacccc

SEQ ID NO: 767156 - DNA, 630 bp, Homo sapiens
gcaggatggagaagtcttcgtcctctatgagaagagaattgaatgtcaggggcctgtttctagacacccctcttccagctcacaggccctcccgttctcattgagaccgtggcagggtgggagcatgcaggactggcaggggtgaggagaacacaggttggccaggtgcccgtcacaccaaccccaagtgccccaggggtcctgcagacctgtccagctcgtgctgctgaccagcagggctggccgctcacggagacgcgtcaccagcccgctcccagcatcccgctccgtgaaggccgaccgctccgtgactgggtcctcaggttctgagctgaaggagcagaaaaaaagcctgtgagaggccatagagcaggcccgggacccaggagaggcatctcctgccgtggcgaggcctgcaggctcccagaggttggggtgcccrgccacatcagcagcaccaggccacccctgccatctgaggcctgggcttgctttctctaatattgttgctgggtgctaaggttacaacagcaaacaagactgactcattccttttctccacgggacttactgtcttatcatcccctggactcaagatgagggtgcagggacgccctcccacaccacccc

SEQ ID NO: 767157 - DNA, 634 bp, Homo sapiens
atagagagagctgggttgtaagtgtttttgttcctacagagcagatagatttggctccatctgttccatattcataacaaaggagcacacttacaggagggccaacttccccggagccgcctggtaatgatcttttcacccgaatgaaagcatctgaacccagtggcttggccctgcaaaagcagctagcaggattgcccttcagaatcttgatttccttgtaactcaggttgacataaatttccccaatatatagagtgaaaagaatttactgatttctcatcttcctacagccctgtgtggttggaaagttcaaaatgtatgtgttttacstccccctcctgcaaccacagaagatttgtaattaaatagaatttgatagtatgggggaagtttgcacttgaagtatctgtaaaggtatcacaggggagaggctgttcttcaaacttttaagttgtttctattcagacttttttaatctttttaaaactggggttaatgaatagaaatatgagttacaccaaataagggaaaacccctgttgagttttgtaattagcaaacttcaagccatttcaattgagacctcttagattaaaaagataagttgacccagagttttcttccactaagca

SEQ ID NO: 767158 - DNA, 393 bp, Homo sapiens
tcattttattttgctctctgactcattagctttatttcttataaacacccttcccttccaagcacaatctaaaaatttctgtcattaaaagcaattttgtttttcctgcctaagggtgactatttccaagaaaatatgtscattttgacaatgtgattcttgcctatttaaagctacaagtataatttcttttttattgggtgataaactttccttctgacaaaacaaagggcagtcaagatttcttcccattttaaaaactgtgattttgcatttcttcacaacatgttttaaagcacattttgcataactctgcttttaaaaagaatggtatatggcttgtatgctatccgttctaccaagatgtcagtgatattgagcattaaacgaagt

SEQ ID NO: 767159 - DNA, 393 bp, Homo sapiens
tcattttattttgctctctgactcattagctttatttcttataaacacccttcccttccaagcacaatctaaaaatttctgtcattaaaagcaattttgtttttcctgcctaagggtgactatttccaagaaaatatgtccattttgacaatgtgattcttgcctatttaaagctacaagtataatttcttttttattgggtgataractttccttctgacaaaacaaagggcagtcaagatttcttcccattttaaaaactgtgattttgcatttcttcacaacatgttttaaagcacattttgcataactctgcttttaaaaagaatggtatatggcttgtatgctatccgttctaccaagatgtcagtgatattgagcattaaacgaagt

SEQ ID NO: 767160 - DNA, 460 bp, Homo sapiens
gctgctaggagtctgcatagtagattggtagcacccacgccattttacataaaccagtatcccctctctgccttcctaattattagcttcccagatgcaggaacaggcagcattcccttctcccaggaatgacttcggggcatcaragatccctctcacacctcatttatctcagtggttctcagcagtgggtggttttgcccccaggggtcatttggcaatgtctggaaacatttttgatagtggtagcgttttggggacagtggtgctactggtgtctaatggatagaagccagggatactgccaaatatcctaaaatgcacaggataatcccccaaaaccaagactcatctggccccaaatgtcaatattgccaaagctgagaaatcctgctccactttttcctgtaacaaccctgtcttgatttttagcagctcaaacatgtagggaaaagagcca

SEQ ID NO: 767161 - DNA, 495 bp, Homo sapiens
gcaagcccgggaagatggatccagcttcaagactctgggagcagccacacctggtcatgggtctcctggactgagatgtcctcccaaacttctgaaccataaactacttttactcatcattggctccccagtgcccagcacagtgcctggcccttggagggtgataaatgaatacatgtccctactaggctgtgaactcctttaagggaggcaccacttggggatcactacagtattgccccctcctcccctccccagtgcctgccacagtgacctgctgatgaccatggatccaaatccctttctcctcgttaraagctctcagtccaaaatccgtggttccatgggtcagactgaggcccaggtggtccttatgggtgaatgatggagaccccaccaagctgagaactgggaggaatgatctccactgtttatggccaggccggttttttgcctttctgaatggcaacggcatatttcagcagaggtcctcag

SEQ ID NO: 767162 - DNA, 477 bp, Homo sapiens
tcccctccccagtgcctgccacagtgacctgctgatgaccatggatccaaatccctttctcctcgttagaagctctcagtccaaaatccgtggttccatgggtcagactgaggcccaggtggtccttatgggtgaatgatgragaccccaccaagctgagaactgggaggaatgatctccactgtttatggccaggccggttttttgcctttctgaatggcaacggcatatttcagcagaggtcctcagtagagccacatgcaggagatacatgcatttgtccactcgtcactcacttagtcatttgttcacttatatatccactctctcactcatgccttcagtcatttgattactcatctgattaattcatccattcatccaacattgtgcagaacattgaacaggtttagagatgcttcaggcacagtttttttacctgagagctcccagattggggcgagaaaggtaagagcc

SEQ ID NO: 767163 - DNA, 692 bp, Homo sapiens
ggtacatgggtgcgtcatacagtcatttaccatgtaactgccgtaaattccattcttctgtctcttcgatttgaattcttgattttaatttaaacttagttttcatttgttcatactcaacccactcaaaatgagtgttttttcaaatctatgtataggcctgaagctgcccagcaggcattccaaggcctgggtcctggtttctccggttacacaccctatgggtggcttcagctttcctggttccagcagatatatgcacgacagtactacatgcaatagtgagtccttcccgccatgctgggtgtggccagggctcccgggaattgaagggaattttatccrtgttacctgtaaagttcagaatggagggatgagtgtattttcatcagtctgcagagccctgctctgtttggtctgtgggtagagtgtaaatgacagctgctacctgatttgtgtattgacacaagagtgcttttgtctgatacatagtttagtgactttatttagaacatgttactttcttttcaatttgtgctatcttcaaagttttgtgaggattttaatttgctactgtgccataatcttacagtgggcttgatgtttaatttcaggtgaaattcaccttgtggcttttcttagaaaaggcatttatagatatagttagtaaggaagttcttcactaaattgaa

SEQ ID NO: 767164 - DNA, 692 bp, Homo sapiens
ggtacatgggtgcgtcatacagtcatttaccatgtaactgccgtaaattccattcttctgtctcttcgatttgaattcttgattttaatttaaacttagttttcatttgttcatactcaacccactcaaaatgagtgttttttcaaatctatgtataggcctgaagctgcccagcaggcattccaaggcctgggtcctggtttctccggttacacaccctatgggtggcttcagctttcctggttccagcagatatatgcacgacagtactacatgcaatagtgagtccttcccgccatgctgggtgtggccagggctcccgggaattgaagggaattttatccgtgttacctgtaaagttcagaatggagggatgagtgtattttcatcagtctgcagagccctgctctgtttggtctgtgggtagagtgtaaatgacagctgctacctgatttgtgtattgacacaagrgtgcttttgtctgatacatagtttagtgactttatttagaacatgttactttcttttcaatttgtgctatcttcaaagttttgtgaggattttaatttgctactgtgccataatcttacagtgggcttgatgtttaatttcaggtgaaattcaccttgtggcttttcttagaaaaggcatttatagatatagttagtaaggaagttcttcactaaattgaa

SEQ ID NO: 767165 - DNA, 618 bp, Homo sapiens
tatatatttgttaagtgggcgacccttccctatcaggccacccgcttcatgccaggcttgcctctccagccctgtgccggcctgtggccacagcaatgtgatgtgttcctgttcattcattgtccagctcagcgtctttrtcctgcctcctgccctgtgcaggaggccctgggagcaagactccaccgctgcctatggggaggccccttgtcttaactgtgcaatgctgcgtgaataaaaagatgccctgggaatgctgtccagccatgtcttccaactatttcaggaagtgacttttctactatctggagaattccaaaaatgcactgggatggccacagctgcccagctctgggctccaggagggtctgtgggctccagcagtgtctcacaggtccagctggtgccgcatgaagtgggggcaccagcaccttccgtgggactcacttgaatgtctgttttccccaagtacatccccctggggaatgggcagggcccacagcaccgcgctccttcacaggtgggagaactggggcgggaggaggatgctggagcgctgaggtcagagccagtctctggcgtccgagtcgtggctttgccacttcctcagccagatga

SEQ ID NO: 767166 - DNA, 607 bp, Homo sapiens
gctgagggctgagaattctttgggcctcagtttcctcacatgagtgtgagacgttccctgctgtacaattccttgattctcccctgtggatttacccagttcaggggctgcaaggaggtagcacccaggctgtcagatgtgttgtgaggwtctcaatgttgtttttttaattggagattttgtgtaaaactacctatttagaggttcttttgaaaaatcaatatatctggcaacactggactcactgtttccatctccatatgtgtaaaactggctgcagttgaacagtagctgcctcttttctacaggtcatgttttctccagtttgccacagtccccactcctccctgttgtctctgacctggctcacattactcatttgtgaaacctgctaaaccctgtgggcattcgattcatagctcttgcagtaaatgctttccccttagtcactacttctagctacactggtgttctctcagtttctcaaagccaaactttttccagccgccgggcccttgcatatactgttccctctgccaggaacgctccttcctccacaagttgcagctgaagggtcacctcctttgtctgaattgggtttcccttt

SEQ ID NO: 767167 - DNA, 505 bp, Homo sapiens
agccttctgggctttgcagtgggatgacctgagaaatgctaacatccttttgggttgtaactccagaaaggagacttcagatctccttctaaattctagaagtctttagtctccttctgaagtctaaagtgtaggcactgcagcagtcttggaggaggctgaygaaacccaaagatgtctgttccttcagccaccccagtgccatcggaagaaggcacaggcagtcgtaccaccaaacaactcacctttacgcttctggttatgtctagagctgcaaataccctcacttggcctcacccactggcattcgatggcagtgctcttgcaccctagcttgggggctcaaacactggggatgttcaacgtgtagtgacctgaaggccttccgtgagccaggtataggtcctttctccatctcccttgtcctagcttctctcccacctccaaccccactcttaacagccctccctgccagccccctctgcacctgctctttccatctctt

SEQ ID NO: 767168 - DNA, 524 bp, Homo sapiens
gagatggggttgttaccatgttggccaggctggtcttgaactcctgacctcaggtcatctcagcctcccaaagtgctgggattactggcatgagccaccacacccagcctgagatatatattttaagaaagggtctcattctgtcacccactgaactgcagtggcatgatcatggctcgctgcagcctygacctcctgggctgaggtggacctcctgcctcaaccttccaagtagctgggaccacaggtgcacaccacaatggcctggctaattttttaaactcatttgtggagatgggggtcttgttatgttgcccaggctggtcttagactcctgggctcaagctatcctctggcctcagcctcccgaaatgttgggattacaggcgtgagccacctcacccagccaatgatcttattattttcagagaactatatattcatactggagaaatcaacacacaaccagtgtacaatggtctgggtttgtagtgaaatccctgctaggtgggtaaggactctct

SEQ ID NO: 767169 - DNA, 524 bp, Homo sapiens
gagatggggttgttaccatgttggccaggctggtcttgaactcctgacctcaggtcatctcagcctcccaaagtgctgggattactggcatgagccaccacacccagcctgagatatatattttaagaaagggtctcattctgtcacccactgaactgcagtggcatgatcatggctcgctgcagccttgacctcctgggctgaggtggacctcctgcctcaamcttccaagtagctgggaccacaggtgcacaccacaatggcctggctaattttttaaactcatttgtggagatgggggtcttgttatgttgcccaggctggtcttagactcctgggctcaagctatcctctggcctcagcctcccgaaatgttgggattacaggcgtgagccacctcacccagccaatgatcttattattttcagagaactatatattcatactggagaaatcaacacacaaccagtgtacaatggtctgggtttgtagtgaaatccctgctaggtgggtaaggactctct

SEQ ID NO: 767170 - DNA, 523 bp, Homo sapiens
ggaaatctggcaaacccactctgtgtcgagcaccctgcaagggctgcagggcctgagctgctgaattcacacccatatctttgggggaaaagcatgggcaaaaagtgcctagggacaaggaacaatcagtgaagtttctcccaagagggtctatgatcccaatgcctcctatacaaactggttttggtggaacattggtctggggggttgcccctctggaaatcttatgaatcaggcatcctccaawcggttgttttcttactccagcaacagtgctgggaggggcctgagcagtcttccaggtgtgaacccctcattctttcaaggaaatcgaggccggggcagggaagtgaactcgtgagtgagcgatgccaatgggtaagtctggaggatttagatgctctgagtcccaggctggtgttcttgcactaggagagagaaaagaagagacaggagacaaatgagaggtgagagggtaaaggaggaatgagagaaaaggagaggagagaaaaggagaagaaga

SEQ ID NO: 767171 - DNA, 526 bp, Homo sapiens
ctctgtacttgccattggcatgacacaggaacctggtgtctcagccagttcatgctgcaataacaaaatatcacagactgggtggcttaaaaaataggcatttatttctcacagttctggagactgggaagttcaaaatcaagmggtcagtatggtaggtttctggcaaaggtaggtttcttcctggcttgtagatggccaccttcttgctgtgtcctcacatgtggagagagagagagagagagagacatctctttctcttcctcatcttataaggctacggccctacgcttatgacctgatttaaccttaattatctcctgaagaccccatctctagaaacaatcacactggagagtagggtttcaacatgtgaatttggagggggcacaattcagtccctagcacctgggaaacacagctgctcaccacccccataccactgggacatagaaaatgcaagaaatgcatctgtcatcgcaaacaggacaaggactggcatgctcttcacaacactgcaaggaag

SEQ ID NO: 767172 - DNA, 590 bp, Homo sapiens
tgtaacaaatcatcataaattcaatggcttaaagcaacagaaaagtattccctcacagttctagagggcagaagtccaaaatcagtatcactgggccaaaatcaaggtgttagcagggccattctccctccagaggctccaaaggagaatccattcattgccccttcggccactggcagctgccaacaatccttggtttgtggccacatcactcccctctctgcctccatggtcacattgccttcccctctcctgcatgtgtcagatcttctgcttcctacttagaaggatcgcaatgtggtgacatgtagggcccactggataattcaggatcatttctccacctggagatycttcattacacctgcaatgacactttttcagtatgtcataacatttacaggttccagagatttgaatctggtatcttcaggggctattattcagcccactccagtaatttgttttgttttttgaaaaaacagtgaagccttccttcaaaaattaatgacaataataataacaaaactgctgtcgagatcatgttcatgttactacaactgggaaaagttaatattctgatgaatctc

SEQ ID NO: 767173 - DNA, 646 bp, Homo sapiens
cactttaaatgaatacatgtataaaatacacaataaggaaaattaaaaggcagataataaattgggaaaatatgtttattaataatgttaattattaatatgtttgttataaacaaaaggttaatattcttaacatacaaattgttcttataaataattaatagatggctgccacaatagaaaaaaatgtaaatgacatgaacaaagtcagaagatgaaatgcaaatggacagtaagtgtaagaaaagatattcaacttaataataaagaaaagaaaaatgttttggcttgtcaaagctggaaaggattggyaacaatgacattgtgtgtgttagaaatggacattctcgggggcattcccctgttcgaacccattgcaaggaatctaaaaaccttgaaaaaagattagacaaatggctaactagaataaacagtgtagagaagatcttaaatgacctgatggagctgaaaaccatggcatgagaacttcatgatgcatgcacaagcttcaatagctgattcgatcaagtggaagaaagggtatcagtgattgaagatcaaagtaacgaaataaagcaagaaaacaaggttagagaaaaaagagtaaaaagaaatgattaaagcctccaagaaatatgggactacg

SEQ ID NO: 767174 - DNA, 633 bp, Homo sapiens
gacccagatttgatcattgcacaatttatacatgtattgaaacataatgttctccataaatatgtataattattatgtgtaaattatttttaaaaagacatctgccttgacagaggacactgacggccatgtaatttcagcaccagtcaagtaagaaagtgcccatccccaaggacatttgcaacaataacacttttggttgttacagtgggaaataaggtgggggtggggcctgctactagcatctaggagtaaaacccaggttgctaaacatcctataaygtgtaggacaacccccgacaataaagtccaaaatgcaaaaagtgctgaggttggtaaaatctcaaatcccttcctcccctgccttgaataagcccaaggcagcaaagagagtgagggaagagataggtagaggacaagaaaagacttcacctcacttctgtagtgccatcctgcagaatttcagtgccatcccatgaagagagaggggggcagctttgaactgaatgagagacacaaatgcaggcatacctcagtgatactgtaggttcagttccagagcgccacaataaagcaagtcacatgaattttttggttttccagtgcatataaaagttatgtttacactatact

SEQ ID NO: 767175 - DNA, 636 bp, Homo sapiens
attgctaaagatactgttgggtgggtgttttgttacttgcagccaaatggatcctaaataataaagtacttcactttcatcaccaaatttcagcaggaaggctgtgctaggatgacttagctaacagatcagagtgagagaatttgagtgaatttctcctgaacaaatatgagacagttttctagggactctcagaagcatggccaagttcttgtacagatagttgagactcaaagtcatcacaatctggatctaatataaatatgattttaattggactcacaggctggtgagttgcagagggcagacattgacagtcagatctcctacaatgactagctgattatacctaatcaagttgtcttagtgccactcaaagtgccaatctgcaatgaaataagaagattgyaccagaatgtaaaccaacacactgcttccttcattgagaagtcttgccaaaaaaaaaaaaaaaaaaaaaaaagtaagctgaactaaacagcatgcttagtgatacagttgaattacactcaggcacaagttccttatctcctctctctttgctaactggtaacaaacagttgcggacctatagttgttctacaaaccacacaggctaattaatgggttataaaggtc

SEQ ID NO: 767176 - DNA, 611 bp, Homo sapiens
ggaagacacactctttggaaatagaaaccccaagctatttgtaaatgacaaatatttgcgcaggaagacaaaattcttaggtgagaagcattatatttttcaggtttaactaccaggagagctcctatcacattttacaggaagagctagttcttcttcatctactcttcattggctgaaactttcatttggagcaagagttttatatttactgataaatcgccagacaagaagaaaaatggctgagtgataatggaagatctatttcattcttcactgttgccattgagatcaagatttaagtaaagccttaagagatttcatttctcaaaagaagctttctttaaacaatagagaagggaaagggaggagaaaaagatgaaaagcaaaccttgtaaagtgcaaatgttcgaacacaatatgtggccagctccacagtawcaagcagcgttacttgaacgagtccgtgggtttctgtgcctctgctaggccaatactggtcacacttcacctacaagaaacaagtgacacattcagggcaaatgctcatcaatttctctattaactttgctttgagttgctgttgaaggaaaacagcttttctgcacttc

SEQ ID NO: 767177 - DNA, 649 bp, Homo sapiens
tttaatttagagggatctcaaggaaaacgaaggtatgtcaggatggagaacagcacaccatcttgggtctttgattgaaaagtcatagcaagggtgagattacctggagtaggaatctgctaaggaggacattctatcaaaggatcagtttacctgaaaaatctccttactgattaaaattcttcttattccctactttctatgtccttctctaagcatcacatctctagawgagtgccatttttcaaattcagtgtgcataagtgtcatctgcagaactcaatataaacctcaaagattctgactcagttgatgtagagttgggtccaggaacttgaatttttaacaagcacactaagtgaatctgctccttctttgcagttccttgccctctatttggaagctcatggtgtttacattataaattcctcttttctggcatctgactttccctgtgatggagaacagggagtctgaataggaaagcacagcctgccatgagtacattttcaggctcgttaagtctcatattcatttgccgcaaggaatgagaaaagaagagagagcaactaaagactgcatgtttcaaacatgggtgatcatcatttctcctggggtaacaggctccccttggagaaagaaattacaa

SEQ ID NO: 767178 - DNA, 616 bp, Homo sapiens
tagtggttctgtggttccagttgccagtattttctcttctgtgtttaagatacaggatgattgactgccctcaagaatacctgctggttagcgcttagtttaagataaaatgctgttcacggttgtaatttagatgaaagctctctatagctcatraacttcaattaaatgcttctaaccttttgcataacacttaacatgttaggtcagctctagatttagggtgtatttgtgaacacagcactataaaaagacaggttttcgtgtgattcaagtgcttttgcttttataatataaaaccagcataggaacgaaatgtgcatagttttcaaccatcagaataaagatacaaggaggtatagtttttatccctcaacatactttaaagatgtggaaaataacaggttaagaaaaataatgacaaagtgagcaaaagtacagcgaagtggtagttattgaatgacctaattcttagtggaaacaatgctacaatagagcagaggcagactgacaagttccccaggcgagaccatgccaaatagattctcaacttacattcatttattttatttcaataatttaccttgcttttgctaatggaaaaaagatttctctc

SEQ ID NO: 767179 - DNA, 616 bp, Homo sapiens
tagtggttctgtggttccagttgccagtattttctcttctgtgtttaagatacaggatgattgactgccctcaagaatacctgctggttagcgcttagtttaagataaaatgctgttcacggttgtaatttagatgaaagctctctatagctcatgaacttcaattaaatgcttctaaccttttgcataacacttaacatgttaggtcagctctagatttagggtgtatttgtgaacacagcactataaaaagacaggttttcgtgtgattcaagtgcttttgcttttataatataaaaccagcataggaacgaaatgtgcatagttttcaaccatcagaataaagatacaaggaggtataktttttatccctcaacatactttaaagatgtggaaaataacaggttaagaaaaataatgacaaagtgagcaaaagtacagcgaagtggtagttattgaatgacctaattcttagtggaaacaatgctacaatagagcagaggcagactgacaagttccccaggcgagaccatgccaaatagattctcaacttacattcatttattttatttcaataatttaccttgcttttgctaatggaaaaaagatttctctc

SEQ ID NO: 767180 - DNA, 518 bp, Homo sapiens
tgaccgtcacactgagagtgggattacggggagaagggacgtggagtggatacacgacagatggtcccgtgtccgccctcagacctaaactctgctgcctgtaggaagcctgagcacatggctgggagggcgtcacctgcagtggggatgactccagagttcacctggggtggcccagggtcaggaccctcgggacaggtgcagaagacgggcatggggcctgtctaaacacagcatggcctttgatccatccaggaaagacgtgyggcctgatgcctgtcaacatcctgggccatgtgcaccccgcatggtggcagctcttactggctgtggaatggcccagcatagagtgaagatcagactctagagcttctgccttcaggttttaatcccttctccttgctggtcacacagccctgagtgaggcatttagcctctgagcctccggtgggaattataacattataatgttatctacccacagggcttccatgaggatccctgacaccaacgaacct

SEQ ID NO: 767181 - DNA, 624 bp, Homo sapiens
tacaaacttataacttgaattgttttactctcagaagtagcctggtgcccacaaagcatcctccatcctccctagaggccaagccctgggcctgtctggatgcctcccgcccccactcagctcaggtgccccctcccctcagtcccaggacactcctcagcctggttcaaaagcaaattcagggttcctggtgggcaaggaggggcagcgcccttcccaccagctcagctctgtggcttcgggcggtgctgcagggccccccagaggcctctccgccctcacactgacagtgcaaacacagcctctgtgccgccagggggcccaaagccccccgactggtcagctcccctgcaattctgggatcctttagaaaaacagtgattgttgttttgcgggacccytgtgtttatgcttttattgtggacctttttaaacatatacaagagcagcgagagacatgtcacagccccacacccccggcacctggctgcaatgggtgctggcccctgggcagcctggcttcatctgtctctgcccccatgcttattcttgctgtgcttttacaagcggattctagataccaggtcatttcgcctgtaaggacttcagcaagagccacagcca

SEQ ID NO: 767182 - DNA, 615 bp, Homo sapiens
gctcatcagaggccctggaaccggaggaataatgtccagaggcaggcgggggccgggccccattctgtgcccccagatcctggcagggctggcctggcatgagagagggccctgagaaagcaggtgacggtggaggccctgaccgtgggggcagacccaggtcaactgcaaaggggtctgagctgcaaccagcatcctgggaaagtctctactcacagagggaaactgaggcccctgcagggacacactgtccctctccacaggggccttcaaacacaacttggcccaggtagcatcctctccccaagctggtgcccccagactgtctcctcaccatcctccctcccactgcaytcccatgacttcatggtccagccatggtgctacccacagcactcagcatccttagcataactggggcccagttcttgatccacctgttcacctgggtgaatctgctgcctgcactagatgggacactcctgaaggagagggtagagtaggacagggtcaccactgtgcttctggtgcctggaagactgcagtcaccatccagcatctgccacccactcattcccccttccatccattccattacgcgccaacccaatccaa

SEQ ID NO: 767183 - DNA, 615 bp, Homo sapiens
gctcatcagaggccctggaaccggaggaataatgtccagaggcaggcgggggccgggccccattctgtgcccccagatcctggcagggctggcctggcatgagagagggccctgagaaagcaggtgacggtggaggccctgaccgtgggggcagacccaggtcaactgcaaaggggtctgagctgcaaccagcatcctgggaaagtctctactcacagagggaaactgaggcccctgcagggacacactgtccctctccacaggggccttcaaacacaacttggcccaggtagcatcctctccccaagctggtgcccccagactgtctcctcaccatcctccctcccactgcactcccatgacttcatggtccagccatggtgctacccacagcactcagcatccttagcataactggggyccagttcttgatccacctgttcacctgggtgaatctgctgcctgcactagatgggacactcctgaaggagagggtagagtaggacagggtcaccactgtgcttctggtgcctggaagactgcagtcaccatccagcatctgccacccactcattcccccttccatccattccattacgcgccaacccaatccaa

SEQ ID NO: 767184 - DNA, 601 bp, Homo sapiens
atttgttgatgttcagcttggggatcccttacgcagatagctgccccacatggctccctggaccaaagaaagatcattagtatctcagagattggcagcaactccaatgcgagagagtaaaactctgaagaccctgcgtcgtcagtaggcaggggaaaatgcgtcagattaaacaagaatctgtactgctgtttagtagccagtggcatagaagccggggacttctagtgtatttcaggctctgtagaggcaggtgatgtagcccagtcaagtgggttttcatgccagttctgctgagtgatggtcaccaggtaagcacagctgatggagacttgaaaacagctctcgaatgctaagtgtggaaatatttgagatagaaatggaggagccgtggtcagagtcgatackgttaatgaacgatcagaaaaaaacccacaaaactgtcatagtctagaattaagaggaagaacattctggctaaaggccagggctccttctgaatctcagatccttggggatctgtgttggctgccccagggctgtggctggggccggctccccagggctcaccgagaatgaacaggaagaacagccagaccaa

SEQ ID NO: 767185 - DNA, 591 bp, Homo sapiens
gagttttagaccagcctagacaacatggcaagaccccgtctctaccaaaaatacaaaaaattagccgggcatggtggtgcatgcccatagtcccaactacctgggacgctgaggtgggaggatcacctgaaccccggagccgtgagcacaccactgtactccagcctgggtgacagagtgagaccctgtctggaaaaaaaaaaaaaaagtagctgggtatggtggcacgtgcctatcgtyctacctgctcaggaggctgaggcatgaggatggcttgagcccaggaattcgaggctactcagcaattatggtaccactgcactccagcctgggtgacaaagtgagaccctcaaataaaataaattggccataaatgtaagttttttcctgtattgttcattctgttcccttgatctatatgtcttgtcctttttccgtatcttatagatgtgattactagaagtttcatagcaagtttgaaatcaggtagtatacattctccagttttattctttttcaaatgtgttttggttattctaattcctttgcctttccgtgcaaattttgagatccagttttcaaatttttttt

SEQ ID NO: 767186 - DNA, 591 bp, Homo sapiens
gagttttagaccagcctagacaacatggcaagaccccgtctctaccaaaaatacaaaaaattagccgggcatggtggtgcatgcccatagtcccaactacctgggacgctgaggtgggaggatcacctgaaccccggagccgtgagcacaccactgtactccagcctgggtgacagagtgagaccctgtctggaaaaaaaaaaaaaaagtagctgggtatggtggcacgtgcctatcgtcctacctgctcaggaggctgaggcatgaggatggcttgagcccaggaattcgaggctactcagcaattatggtaccactgcactccagcctgggtgacaaagtgagaccctcaaataaaataaattggccataaatgtaagttttttcctgtattgttcattctgttcccttgatctatatgtcttgtcctttttccrtatcttatagatgtgattactagaagtttcatagcaagtttgaaatcaggtagtatacattctccagttttattctttttcaaatgtgttttggttattctaattcctttgcctttccgtgcaaattttgagatccagttttcaaatttttttt

SEQ ID NO: 767187 - DNA, 596 bp, Homo sapiens
tttttatttttttgagatggagttttgctcttgttgcccaggctggcatgcagtggcatgatctcagctcactgctgcaacctccgcctcctgggttaaagcagttctcatacctcagtcccaggagtagctgggattataggcatgcaccaccacacccagctaatttttgtattttcagtagagatggggtttcatcatgtgggccagtctggtcttgaactcctgacctcaggtgatctgcctgccttggcctcccaaagtgctgggattgtaggcttaagcctttaggaggtttttaatgggttttggccacatccatcagaggaatcatgatctaaggcagttatagccttataaaatgtatttggtttttttggggcatgttttttgggkttttttttttttttcgttttttgtttttgagatgcagtctcactctgttgcctaggctggaatgccgtggcatgatcttggctcactataacctacacctcccgggttcaagtgattcttgtgcctcagcctccaaagtagctgggattacaggcatctgctaccacatccggctaatttttgtattttagtagagacag

SEQ ID NO: 767188 - DNA, 543 bp, Homo sapiens
tcatatatccaaagtagtataaaatattcataaagtggtatatgaggtttattttttctgcagccttgtaaatatcggtttataattttttgctaatagtattaagtgccacctcattggttaaaaagtttaacctcgttgcgttttctcatttactagttgcttaactatttcttttttcttgtgtctcttttcatagtatttgatyatttgtccttccgagatttagaagtttattttagaggtttatataagttcttagtatattctaggtacaatttttaaaaattgtagtgaaaaacacataacatgaaatttaccatttaaaccatttttaggtgtgtaattcagtggcattaattataatcacaatgttgggtaactataaccaccagtgtccatttccagaactttttcatcatcccaaacggattctctgtatccattaaacaataacatttccccccaacctgaccggcccccgcccacagcccatggtgacccctattctcctgtttctgcattttcttattctagatacct

SEQ ID NO: 767189 - DNA, 613 bp, Homo sapiens
taacctttacaagaaaagtggctttgaaatgacctattcactttctgttttctctttctgcttccctcagcccctctgtttataaaaccaagttccgggccaagtgtggtggctcacgcccgtaatcccagcactttgggaggccgaggtggccggattacctgaggtcacatgttcaagatcatcctgggcaatgtggtgaaaccccatctctactaaaaatacaaaaattagctgggcgcggtggtgcatgcctctgatgccagctactygggagtctgaggcaggagaatcgcttgaacccgggaagtggaggttgcagtgagctgagatggcgccactgcactccagcctaagagacagagcgagactccatctcaaaaaaaaaaaaattaattaattaaaaaaataaaataaaaccaagctcctctgctcagcttgtcagagcactcatctgtcttatgaaataagtgttgcctgattctggaatcacaaataaaagccaattaagatctttaaactaaacttgttgtaattttgtctgttgaaagaggtttgccatggaattaacagaagtcaccttaaattcaggtctttttcacaccttggacaa

SEQ ID NO: 767190 - DNA, 544 bp, Homo sapiens
agtgatccttctgccttggcctcccaaagtgctgggattacaggtgtgagccatcacgctcggccagcccttgtttttatgaacatcgtgtatccttaaggaccttcaaatacttctgcatccatttgtatgcatctttagttttgttctgaaaacctcaagatatagcacgctatgtgtatagtttgcaacttgaatttttttcactcaacactgtgtttctgagaccaatcctcgctgatacatagagagctagttaattcctcctgccttctgcatagcatctcactatgttattaattgccttttgttttctcaagctatttctgtgttgatgggcatttgtgttgtgtctactgccttgctattgaaaatagcacttcagtgygtgcaccgcgtaggcctctgtgtactaccgtgaagtgtttcctgaggccagtagttctcaacttggctgcagacagaatcacctgaacgtttttttttttttttttttacaatcacaccaactctctgcctttccccaaattcttaattgaatggt

SEQ ID NO: 767191 - DNA, 544 bp, Homo sapiens
agaattaaaaccaggtgttcaaacagaaagttgtatatgaatgttcataagaacagtagtcatagtagctgaaaagtagaaacagccaaagtctatcaatagataaatgggtaaacacaatgtggtatatccatacaatggaatattacttagccataaaaaggaatgamgtacttataatattaaaaaacattatgttaagtcaaagaagccagacacaaaaagtcacatattctacaattcaatttatagtaaacccatagagacagaaaacagattagtgctgtttcaaggctggagggaggggagaatgggaaatcactgcttaatagatatagggcttccatctagggtagtgaaaaaaattctagaactaggtagtggtgatggttgcacaacattgtgaaggcaattaatgccactaaactgtacattttgacatgattaaaatggtaagttttatgttacatgtatttttccacagtaaaaatttcattctagattttgcttcctgggaccaatgtatcatccatagtattacacc

SEQ ID NO: 767192 - DNA, 544 bp, Homo sapiens
agaattaaaaccaggtgttcaaacagaaagttgtatatgaatgttcataagaacagtagtcatagtagctgaaaagtagaaacagccaaagtctatcaatagataaatgggtaaacacaatgtggtatatccatacaatggaatattacttagccataaaaaggaatgacgtacttataatattaaaaaacattatgttaagtcaaagaagccagacacaaaaagtcacatattctacaattcaatttatagtaaacccatagagacagaaaacagattagtgctgtttcaaggctggagggaggggagaatgggaaatcactgcttaatagatatagggcttccatctagggtagtgaaaaaaattstagaactaggtagtggtgatggttgcacaacattgtgaaggcaattaatgccactaaactgtacattttgacatgattaaaatggtaagttttatgttacatgtatttttccacagtaaaaatttcattctagattttgcttcctgggaccaatgtatcatccatagtattacacc

SEQ ID NO: 767193 - DNA, 584 bp, Homo sapiens
cactctaagagttctgcataacaatctgtttgagtgcagaaagacaatagaacaagccaaaatagtgttgcagacactcttaggactctgctcatcaagctctccccaacccccaggccaggtacagcttagtggacaatacccatacacacttattacttcttacctcatttgcttgcatccctctgaatgctttctctggccacaggagcatgttttgtctgtaagtcaagcaaattaccagtgttagtgagttaatgcttccaagacaaacccagaccaatgaggaatcagagttgatgmatgaatagcccagctttcaggaaactgttctgaagtgcttttatgcagtctatcagatggcagccagcaggattaaacccagttatccatcatattatactgctcattaatttaatgctcttttattgactttcctctcttccttgtcttatttttcacttcctcaccctgcttcctaggattacaaaatgaataaatacttgcatccaaatccttgtaagatatcttataaacattacacacacgaataataattataagtaatatacattatatttact

SEQ ID NO: 767194 - DNA, 613 bp, Homo sapiens
aagatatacactattgttttttgtaaatttcttaatatttggttttttaaatccccactaaattataacctccttgcagtcaagaactctgacttagtcatctcagcacttcccacaatgctttgcgtgtagtaggccatcaataaatcttagttgaattaaattatttacttaagttatagtttctctgtcatggttacattargaacttgacagtaatcctacaaaaatatgtaaccatgtcttagtaattataattagaacaattaaatttatattttccaagatttagaatttaggaatatggctgtggagatctcttaagtttaaattttgtagaatcagcttacactttggttctgatcatagaatgcaaggagggtagctttattcttttttaaaatgtgtgcacctggaagcatgaagcagaaatttaccacgttccgtagaagagcttttgtttaatactagaaattataatgccataagcaaataatttcttggctatagagtagattaggcatggaccaccaaagcactttggtactaaagatggagatggggtggtgtatgtactatcagtggtattaatttgcaagtagggaaaagatac

SEQ ID NO: 767195 - DNA, 522 bp, Homo sapiens
ataaccacagatacaagaaggtggctaggcgcattgaaccttgcctataatcccagcactttgaaaggccaagacaggcggttgcttgagcccaagattttgagaacagccagagcaacatgatgagatcttgtctctataaaaaatattttaaaaattagccaggtgtggctgggcatggtggctcacgcctgtaataccagcactttgagaggccaaggcaggcagatcacctgaggtcaggagcttgagaccgrcctgtccaacatggaagaaaccccatctctactaaaaatacaaaattagccgggcgtggtggtgcatgcctgtaatcccagctactcgggagactgaagcaggagaatcgcttgaacccgggaggcagaagttgcagtgagccaagatcgtgccattgcactccagcctaggcaacaagagcaaaacctctatcaaaaaaaaaaaaaaaaattagccaggtgtggtggcataagtttatgtccccggctacttgagaggctgagg

SEQ ID NO: 767196 - DNA, 522 bp, Homo sapiens
ataaccacagatacaagaaggtggctaggcgcattgaaccttgcctataatcccagcactttgaaaggccaagacaggcggttgcttgagcccaagattttgagaacagccagagcaacatgatgagatcttgtctctataaaaaatattttaaaaattagccaggtgtggctgggcatggtggctcacgcctgtaataccagcactttgagaggccaaggcaggcagatcacctgaggtcaggagcttgagaccgacctgtccaacatggaagaaaccccatctctactaaaaatacaaaattagccgggcgtggtggtgcatgcctgtaatcccagctactcgggagactgaagcaggagaatcgcttgaacccrggaggcagaagttgcagtgagccaagatcgtgccattgcactccagcctaggcaacaagagcaaaacctctatcaaaaaaaaaaaaaaaaattagccaggtgtggtggcataagtttatgtccccggctacttgagaggctgagg

SEQ ID NO: 767197 - DNA, 624 bp, Homo sapiens
aaaaaatacaaacattagccgggcattgtggtgcacacctgtaattcccagctactcaggaagctgagttgggagatcacctgagcctgagaggtcaaggctgcagtgagctctgattatgccactgcactctagcctgggtgacagagtgagaccctgtctcaaaaaataaagaaagaaaataaattgaaagctatattttggtatgtgacagattataagatagactttgatttttactatgtgcagaatatgatttttattcacttaataattatttcttgaacacaatatgtgtcaaagttgaaacaagctagtcagtmtaaaaattcagcattaactcagttactaatgaaaaactataaggaaatgatttaacgcatgaaattatttacttctttgataaatggtcatcaccttggtactaaaaatgtatttaggttttcttggtttgtttttagaaattatcccatcaagccctctgcttcttggtagaggctattataggaagttggtatttctaatattcctcccaaagaggcaccttaagaaataacaatacctatgatttgaaaagttctataaatatttctaagaaaaagttccaagaagatgcacaatatt

SEQ ID NO: 767198 - DNA, 545 bp, Homo sapiens
aaatctgaagaggataggtctgacattaaagtctcacctctgatcaggctagaaatactggactgacttactgtttttgttttttttttttcctgataacccaaaaatccagtacttaaagttgcctctggtccatgggttccctctgcctgtgtttctctttttctggttcttcacatgtcaggttccaccttaaacttcagatgccacctcgacagaggggccttcccaaccttcttgttagacactgaattttgtctcccccaacccacccccagctcttatgttgaggtcctaacccccaatgggactgcatttggaggtagggtcttcagggagataattaaagttaaatgaggtcatggggtggagggrggtggccaatccaataggagtggtgtttcttataagaaaatgaagaggctgggtgtggtggctcatgcctgtaatcctagcaccgtgggaggccaaggtgtgaggattgcttgagcccaggagtttgagaccagcctgggctgaacatgataagacctcatctctaccaa

SEQ ID NO: 767199 - DNA, 477 bp, Homo sapiens
ggcaaatgaattccgagcagcaaacacaagtgatgtctgcaacaatacccatccttcaagtccagtgttggaattcaccctttccagttaagcatttctgaacatccagtcttgaagcactctacactgaactcccaaatataatcattgtctctgtcactccttgggcaacaacttctgcacagcctgtgatattgtgccccaagttgtcataaactactggttatatytgtgctcttagctttccatgtgggtcctgggtattgtacccaacctcacatactcattgccaatctttccagtctagatactggtgcagcaatcagccctatgtagggataaacaggcagcactttgcctcagttcctaactctcacttcctgcccaggggctctctgctgccaacactggggatcccactaagccattctgatgcctgggccaatcctgaagtatgagagatccttgaccaaggtg

SEQ ID NO: 767200 - DNA, 627 bp, Homo sapiens
aacttttatgctctgcttcctttttaaacatatgttctaattccaagccatatctttgtgaatacataaaactcagtgctttttaacagtacccaagtcacctcttgaacactttgctgcttagaaatttcttccactagatatyctaaatcatctctctcaagttcaaagctccccaaatctctaggataggggcaaaatgccaccagactctttgctaaaacgtagcaagagtcacctttgctccagttcccaacaagttcctcatctccatctgagaccacctcagcctagactttattgtccatttcattatcagcatttgggtcaaagccattcaataagtctctaggaagttccaaactttcccacatcttcctgtcttctgagccctccaagtcattaggaagttccaaactttcccacattttcctctcttcttctgagccgtccaaactgtttcaacctctgcctgttacgcagttccaaagtcacttccacaattttgggtatctttacagcagtaccccactacccagtaccaatttactgtattagtctgttctcatgctgctaataaaaacatacccgagactgggtaatttataaaggaaaggagtttaattg

SEQ ID NO: 767201 - DNA, 627 bp, Homo sapiens
aacttttatgctctgcttcctttttaaacatatgttctaattccaagccatatctttgtgaatacataaaactcagtgctttttaacagtacccaagtcacctcttgaacactttgctgcttagaaatttcttccactagatattctaaatcatctctctcaagttcaaagctccccaaatctctaggataggggcaaaatgccaccagactctttgctaaaacgtagcaagagtcacctttgctccagttcccaacaagttcctcatctccatctgagaccacctcagcctagactttattgtccatttcattatcagcatttgggtcaaagccattcaataagtctctaggaagttccaaactttcccacatcttcctgtcttctgagcmctccaagtcattaggaagttccaaactttcccacattttcctctcttcttctgagccgtccaaactgtttcaacctctgcctgttacgcagttccaaagtcacttccacaattttgggtatctttacagcagtaccccactacccagtaccaatttactgtattagtctgttctcatgctgctaataaaaacatacccgagactgggtaatttataaaggaaaggagtttaattg

SEQ ID NO: 767202 - DNA, 566 bp, Homo sapiens
acatacctgccttaagacatgcctgaatttcagacctaattctggtttttctctcccatcatcattcctttcttcagaatctctcttccacccccaaaagaaggggaaacacacacacacacacacacacacacacacacacacatttctttactcatcagaatttgtaatggtaccccaggcttgggatgttaaaaacctttgcataccgaacaaagggacagttagaaatatcagttctcagttgagaaagtgaatggctctactgactgcattacaaatctttaaatcttttttgttgttatgatatttagataactatgtttttcactttcaatagaattaaaggaggaccgaatgtcagctgatagatcatcaaaatacattttttatattagagcaataatccaaaaggaattcaaaaaaatragacactaataaaacaaaacttctttcattcccttttagttatttaggtaaaaaagtttctcagcatctaaatcttgttgcaggaagtcagggaccccgaacagagggaccggctgaagccatggcagaagaacata

SEQ ID NO: 767203 - DNA, 602 bp, Homo sapiens
cagaggaaatgtaaactttaagaacaatggaatttgatggctgtaggtgaatttgatggatgctctaaaaattatgagaagctgaaagcatttaataggcaattgaaaatcaaatgtgaaagccagagggcctgtgtatcttacaaagaggctctcatcttttgaagagggagatcagataaagctgtggacccgcccaggacttaattgtcagagcaactcagctccagaaaggtttaaactactaacctargcaggtgggctatacaaaggtaagagccccctggttgagatagaatggaaccctgacatatagactggtgacatatcaggggattccctccatctccaaatcttgagcacccagattcccctgaattaacccctctacatgcctggagacaatgcaaaggcccctctcctcaaagtcagtgtgttccccacccccactcctcgacccacccaggatcttcccctatgtctcctcctggccttgaggcctagacagacctagagtcaagtctcagcagaatccagctgggaagctctgggcctaataacggaggaaagggaatatacctcaaaggcgttgcaagactgag

SEQ ID NO: 767204 - DNA, 659 bp, Homo sapiens
attgaaaaatacaatcatgccttcccaacttcccaatagtcccccaaactcttaactaattccagcattaaatcaaaagtatcaagtccaaagtctcatctggagatgagttcctcccacctattaccctgtaaaataaaaaacaagttatttacttttaagatacaatggcatatagacattgggaagacattctcattccaaaaggaaggaattggcccaaaaaattgggtacagaccccacacaactctgaaatccatcagggtagttattaaattttaaagttccaaaataatcttttctgactcccacattcaagacacactgatgcaagggatgggctcccaacaccttgggcagttccacccctgtggctttgcagggttcagcctctctggctgctctcacaggttggagttcagtgcctgtggcttttccatgtgaagggcgcaagctgccagtggatctaccaccattctggggttccggaggrcagtgacctccttccacagcttcatagacagtgcacactctgtgtggggcctccaaacccacatttcccttccactgccctagtagaggctctctgtgagggctcaactcctttagcagacttctgcctgtataccagcctttttcatacatcctgtgaaatcta

SEQ ID NO: 767205 - DNA, 634 bp, Homo sapiens
ttttaatggaaatattgcaataagaaattttacaattaattctttaactcttattttactggctgatgataaaacatctttcctaaaatgtgactatgctaatggaatggaggaggcaaattaaaaataagtaaagtagtctgggtgtggtggctcatgcctgtaataccagcaytttggcaggccaaggtgggaggatcgcttgagcccaagaatctgaggctgcagtgaactatgattgcaccttggtgacagagtgaggccctatctcttaaaaaaaaatagaaaaatgtctgacagctgctctgccccctcctaggtcatgatcttcacctgcatgttcacaactgggttgttggcaggtctgtctttcaattttcatgaaagagaaaagagccagactcctggaaaggaagcttgtctatgaaaaggagatgatctggaagttgtgacctttcctttctttcacttcccatcttctcaaactaagtcacatggccacaggcagctgcaaggaagggcttggaattgtaccccctaactgggcagccatgtgcatggaagagggaaggacagacttggtgggttcaattcgcaatctgccacatttgatatgatcattttaagcagcatc

SEQ ID NO: 767206 - DNA, 538 bp, Homo sapiens
aggacttttcatcttcagttttcaagccatgaaactgaggtacatgaagtttaagtagcagtcacaggtgctacgaagtgcaagtgattgaatttgctctcttcatcttataatactgcctctaaatagcattcagtaattggttatctgatacaacttatggaaagctctctgaattaataatttcagcttgttacccagcaatctagtgttgttgattactagttatatgccagtgctgagtgctttcacatgcattaacttatggaatactagttttcccattttaccaatgtggaaagttaaatcagagatattaagtagtttagcttacatcaccctgctggtaagtacaaaccaaaaataaaatctgaagctccctcctcccccaaccctttgaatagacttcctcttytgggccagggcactccaaagctaacctaaaaggttggttcagtccattactggaagggatagtgttggacatatttaattatgccctccctccttttggaattcaggaaaatctgaccagcat

SEQ ID NO: 767207 - DNA, 611 bp, Homo sapiens
tatggaatactagttttcccattttaccaatgtggaaagttaaatcagagatattaagtagtttagcttacatcaccctgctggtaagtacaaaccaaaaataaaatctgaagctccctcctcccccaaccctttgaatagacttcctcttctgggccagggcactccaaagctaacctaaaaggttggttcagtccattactggaagrgatagtgttggacatatttaattatgccctccctccttttggaattcaggaaaatctgaccagcatttaacatcaacatagaccttaagtctgataggaaacatttacaatctattctctctgaagcctgccacctggaagcttcatctgcatcacaaaaacttggtcttcacaacctcttaaaacctggacagtcctttctatagataataactgtttcaaccaattgccatcagaaaatttttaaatctacttataacctgaaagcccacttgcttcaaactgtcccatttttctggaccaaaccaatgtatatcttaaatgtatttgattgatatctcgtgtctccctataatgtaaaaaaaaaaaaaaaaaaaaattgagctgcatcccaaccacctt

SEQ ID NO: 767208 - DNA, 475 bp, Homo sapiens
cagactccagctaggtatgaagaaattatctggttgggatgccataatgcttgacttctctctcggtgacctgaatgacctgagcatggtcagtggatacacaatagtaaggggtgcctccagtgctggtccccaccgctgcttcaacatcagtgagaagaagaaaaccagggtgttgtctcaaattatttttacccacaactacagttctctagcagcctcagaggtcctyggtaagaaagagaaaaccaagctgcacccactgtagtttttattgtaaccagagcttctgaatctatgtcgcagccctgccatgttttcctgaatcagagcttcttgtggctttattatgctggtgagtaagccaaagtggtgtgacacagtgttagggcatagcatttggagtgagacactcctagacttattcactcagcaaatattgtaggcacatgcttcactcttatgtaccttgtct

SEQ ID NO: 767209 - DNA, 611 bp, Homo sapiens
tatggaatactagttttcccattttaccaatgtggaaagttaaatcagagatattaagtagtttagcttacatcaccctgctggtaagtacaaaccaaaaataaaatctgaagctccctcctcccccaaccctttgaatagacttcctcttctgggccagggcactccaaagctaacctaaaaggttggttcagtccattactggaagggatagtgttggacatatttaattatgccctccctccttttggaattcaggaaaatctgaccagcatttaacatcaacatagaccttaagtctgataggaaacatttacaatctattctctctgaagcctgccacctggaagcttcatctgcatcacaaaaacttggtcttcacaacctcttaaaacctggacagtcctttctatagataataactgtttcaaccaattgccatcagraaatttttaaatctacttataacctgaaagcccacttgcttcaaactgtcccatttttctggaccaaaccaatgtatatcttaaatgtatttgattgatatctcgtgtctccctataatgtaaaaaaaaaaaaaaaaaaaaattgagctgcatcccaaccacctt

SEQ ID NO: 767210 - DNA, 583 bp, Homo sapiens
ccagagtggagttgcatttcagacagcagttaggtagattctcaagtcaacattaaggagaaaatcaagtctaaccaaaattaccttgggagaaaagaattctccagggagatcagaggctggtgtctgaaacacagcctctcgtaaayacaacgcagccagttttcctgcagcattgggacagatggccgtctctgtggctgagcaccagaggaagcaatcggcttggcttgcatttcgaggtcatgttgtatgaaaaagatgtattgtcactctaaacactggtgtgcgagatgctcgcacctcggagaggctcagaattggatgcaaacgttggcagatccgctctctggggcatatgcttattgcggggaagggctggcagaatcacacactttatttacattgtttttcgtttaaagttttctttgagcacctacagttgaattcgcttaagctaaatgtggatgtaatgggaccaattgagaaaaggcgattgggaggccactggaagtgtgacacccttgccagaggaggtgagacttaggacgggaagatgccgcagacgcccctttctccaagg

SEQ ID NO: 767211 - DNA, 534 bp, Homo sapiens
gtcctcgagtctttggcaatggactgggagttataccatcagctaggcacaatgaattacaccactggctttcctgggtccccagtttgtagacagcagattgtgggacttctcagcctccataattgtgtgagccaaattccatartaaatctcctcataaatctatatatcctatatgttctatttctctggagaccccctaatataaacagtatatttccattttcttcttccatgctttgtccaatgttgtcatatattttacctcttataaaccccacattactattgtttttgctctggacaattatcaattaatgtaattaaaaataagaaaaaatataacatatttattctcttttaccatttcagggtctcttcatttctttgtttagatcccaactgccatctgatgccccttctgcccaagaacttcctttcatttcttacagtgcagatctgtggcaataaattccctcagcttttgtttgtctgaaacattctttatttggcctttaatttaaaaatatat

SEQ ID NO: 767212 - DNA, 571 bp, Homo sapiens
gtcagttttccccagttggctcttaaaatgtgtagattcaggtcttttattttcaggaagtttttttagagtattattttaaatattctgttttagtgttttgaatatcttcttccagagtttgatgtatatgtatcttggaggtatatgtatttctaattatataaatatttgaccctctttgcctaatttgttttattcacttcaactttgaccctttatacttctttttaaatttcactttcttatggttgtttttctacttttcctcaatgccctttgtaaaattttcatttgaatctattattctcccttggacrtcttaattccttctctactatgactttttctttcttttgtttctttcctgggttcaagccactcctgtttcattactttctttttttttccttttctatttttactcttctttggggtcttgaactgtaagaggtcctggaacataaatttgagaattgttgcatcatacagtagtggtttacgtggggaatttcagaagtactgaggcctttgacctagcctcagaaattgcagtggtctgaagtggtac

SEQ ID NO: 767213 - DNA, 554 bp, Homo sapiens
gttaacctccactggaaagtttcccaccaaagagacactgaacacaaagcaggcaaaatccgccagcctgcatcatcgataagtccacccagaattatcagcctgatggaccccacacatcatcgcatctgacgaggggacccactttacagtgaaggacgtcgagcgtgggcccatcgacaggatccaatggtcacatcacatatcaaaccacccaacgcgggtccatcccaatgaacgctgggccagccttttcaaggcacactgaagcacaagcttgccagacactctgaaaggatggtsatactccacaacacagtacacttatacatcagaggcctctagatggcagtggaatcccaaggaggaggacatgtgggcttaggcgcctagggctggaggcaagaaaagccctacttaatgatcaccaccaacagcccaggggaactttgtgcttcccattctgcaccagtggacactgcagggctgggggtctgaaatggggcacacacttagcaggaacaaggcaaagatcccactgaactgcaagttct

SEQ ID NO: 767214 - DNA, 554 bp, Homo sapiens
gttaacctccactggaaagtttcccaccaaagagacactgaacacaaagcaggcaaaatccgccagcctgcatcatcgataagtccacccagaattatcagcctgatggaccccacacatcatcgcatctgacgaggggacccactttacagtgaaggacgtcgagcgtgggcccatcgacaggatccaatggtcacatcacatatcaaaccacccaacgcgggtccatcccaatgaacgctgggccagccttttcaaggcacactgaagcacaagcttgccagacactctgaaaggatggtcatactccacaacacagtacacttatacatcagaggcctctagatggcagtggratcccaaggaggaggacatgtgggcttaggcgcctagggctggaggcaagaaaagccctacttaatgatcaccaccaacagcccaggggaactttgtgcttcccattctgcaccagtggacactgcagggctgggggtctgaaatggggcacacacttagcaggaacaaggcaaagatcccactgaactgcaagttct

SEQ ID NO: 767215 - DNA, 554 bp, Homo sapiens
gttaacctccactggaaagtttcccaccaaagagacactgaacacaaagcaggcaaaatccgccagcctgcatcatcgataagtccacccagaattatcagcctgatggaccccacacatcatcgcatctgacgaggggacccactttacagtgaaggacgtcgagcgtgggcccatcgacaggatccaatggtcacatcacatatcaaaccacccaacgcgggtccatcccaatgaacgctgggccagccttttcaaggcacactgaagcacaagcttgccagacactctgaaaggatggtcatactccacaacacagtacacttatacatcagaggcctctagatggcagtggaatcccaaggakgaggacatgtgggcttaggcgcctagggctggaggcaagaaaagccctacttaatgatcaccaccaacagcccaggggaactttgtgcttcccattctgcaccagtggacactgcagggctgggggtctgaaatggggcacacacttagcaggaacaaggcaaagatcccactgaactgcaagttct

SEQ ID NO: 767216 - DNA, 597 bp, Homo sapiens
tttagtggtgatttgtgagattttcgtgcacccatcacccaagcagtttacactacacccatttgtagtcttctatcccttgccctgctcccactcttcccgcaaagtccccagagtccattgtaccattcctatgcctttgtgttttcgtagtttagctcccacatatcagtgagaacagaaaaccttttatctgaggaatgcaaatcctcttgttaggtcggggcaaaagttattgtggttttaccttttaatgtaatggcaaaaaccagaattacatttgcaccaacctaatagttgtcaaactcagagagacattaaaatgagaacacaattaygtctttcctctttgaactatgtagttatctcttgaaactgtttactattgccaccagtggctataaattaaattaatagtgctgcactgtgcactataacccatactctaaaccttaacgatgtatatatacccaattaataatcaattttttttgtaaataaataatttctgacagacaaccttgtatcagcccacttgggggtgtctctcaggtcctgcaggagcagtctgcttccttcagatggtctgtgggtcct

SEQ ID NO: 767217 - DNA, 625 bp, Homo sapiens
atatgctaatgagatatgtgacatataaacaagcatgtacagccactgtgtatgtgcaccaagaggaccacccagaacatgcttactaataacaccactttctaactctttgtaaataattatgtaagactccgataaatggagtctctctatttccagtctttgctgtctcattcttataagcagcccatcctgaattgcttttctctcaggggtgttttgcaccgcacttttaaaatagtgtttctactttgcgataaatctatctatgctgcatcctcatttttttgcgtctcgtttaaatttttgaaactaagaaccgaggtctcacaacagscttcaggactattgtgctttgttttgttttcttaacattattttatgtgatatttcatatttacattttcaacatagccaaaactgctaaattaaaaacttaaatgatcatgcttttaaagtgatttgtcttaaaagcatgtatgtatatttttcaagtttcagctttatgtattcaaattttttaaaaattctgacacacatatatctatcaaatttaatattttaaataatttgaattcacttccaaaatgatttatattcattgttatatttcattttgaccaaa

SEQ ID NO: 767218 - DNA, 653 bp, Homo sapiens
atacctgacaagcaccctctggtcttgattggatctgtgggccatgggcctaccaacagttacaaggaaaatagataggggcttgtatattcaagacaattaagccatatttctttttactcccactgcaacaaggaaaaaccttagggtatcctgtctatgatgaaattaaaagaagaaacaaaagaaatataaacataaaaaaagacatacaaataggagattgggggccaggcatggtgggtcatgcctgtaatcccagcactttgggaggctgaggcaggtggatcacgaggtcagcagattgagactatgctggctaacatggtgaaaccccgtctctactaaaaatacaaaaaggttaaccaggcatggtgatgggcacctgtggtcccagctactcgggaggctgaggcaagagaatggcgtgarcccaggaggtggagctttcagtgagccaagtggcactgcactccaacctaggtgacagagtgagactctgtctcaaaaaaaaaaaaaaaggagatttgaaggatacagattggtcactgaaagaaggattcaataatgtgggccagctacctaggcacaaaatgggtcatgggggtactgcacctcaatttacatgcttaactgcatcataaggttgcagg

SEQ ID NO: 767219 - DNA, 653 bp, Homo sapiens
atacctgacaagcaccctctggtcttgattggatctgtgggccatgggcctaccaacagttacaaggaaaatagataggggcttgtatattcaagacaattaagccatatttctttttactcccactgcaacaaggaaaaaccttagggtatcctgtctatgatgaaattaaaagaagaaacaaaagaaatataaacataaaaaaagacatacaaataggagattgggggccaggcatggtgggtcatgcctgtaatcccagcactttgggaggctgaggcaggtggatcacgaggtcagcagattgagactatgctggctaacatggtgaaaccccgtctctactaaaaatacaaaaaggttaaccaggcatggtgatgggcacctgtggtcccagctactcgggaggctgaggcaagagaatggcgtgagcccaggaggtggagctttcagtgagccaagtggcactgcactccaacctaggtgacagagygagactctgtctcaaaaaaaaaaaaaaaggagatttgaaggatacagattggtcactgaaagaaggattcaataatgtgggccagctacctaggcacaaaatgggtcatgggggtactgcacctcaatttacatgcttaactgcatcataaggttgcagg

SEQ ID NO: 767220 - DNA, 569 bp, Homo sapiens
acctaggtgatgtgactctcctctcctgcctggttcctcttgcacatattgtgacatgtggctggtcctgataccttggtgatgtgactctcctgcatgggacttgcccacagaggtattacaacatatattttcattcatcatctaggtgatataattctcctcttctgcctggccctgccaaaaagtggcaaatcactgaacccagcacctaggtgatgtgactctcttgtttggcctgggcctctcatgttttgggtattgtaaaatatcactaggcccaccacctatgggattgcatgctcctaccttggctttgcccacagggaccttgtgacatatatctgcacccatgacctagaagatgtgacatttattttttgcctgcaccctgccctgcacaggaatgattgtgacrtatccttggaaccagacaccaggtgatgtggctcttctgcctctgtcttgcccacagggagcattgtaacatagtgctgagctcagcacccaggtgatgtgactctgttgcctgtgctgtgctttcaggacagaattgtaacatatccctg

SEQ ID NO: 767221 - DNA, 568 bp, Homo sapiens
ggtttggtttgtttggacctagtgcataagctcagtccagaattatggcctccaatagttttctttaaaaaattccccgtttggttaagttcttacataggtcacagtgtaaccaaaactcggggctttagtgccactctcagtttccattatttttgttttttgtccttagcatgtcattcataggttgtgctgtcttcatagtcacatatgtctttgagtttctgtcattccagttaaagagagaccatttgacattctacagatgactacattcaaacgtttayatcttttgagagaatacagtgcagtaggaagattaccattttgactatcaggaggataataccaagagtttgaagcatgctttttagccagggtccccatgaacaaccaattaaagttaaatagatcaaatagttagctagataaatgatctactcatttcatctaatcagcctgttcatgaatcatctacaactgcatctctgtaataccggctgtagttctccatgggcaactattagcaactgcacagatatctatttatccagtaagtaatcaaaag

SEQ ID NO: 767222 - DNA, 551 bp, Homo sapiens
agagaccatttgacattctacagatgactacattcaaacgtttatatcttttgagagaatacagtgcagtaggaagattaccattttgactatcaggaggataataccaagagtttgaagcatgctttttagccagggtccccatgaacaaccaattaaagttaaatagatcaaatagttagctagataaatgatctactcatttcatctaatcagyctgttcatgaatcatctacaactgcatctctgtaataccggctgtagttctccatgggcaactattagcaactgcacagatatctatttatccagtaagtaatcaaaagaaattatatttagcataactttgtgagaaaacttaaagtctattgtgtaagcatagtttttatggtataatctgctatagagccctattgagagggataaatttgtaaccattgcctcatttactctaaacagtgatacccattcagaagagtaatggcctcctggcaatgctctttaacctattctgaataagttctttttaacttatgaaataggttaagagc

SEQ ID NO: 767223 - DNA, 599 bp, Homo sapiens
tcttcaggttagatggatgatgctatcaaaattattaagtcactaggtctgaatttctctgtatgtaaatccaatgtaataagcgctattaacatacttgccaatctatctcactgacatattttagtattttggctaaaaactaaaataatactagtcctgattaaacaatttacttcaatcagtttacctcttacctattatcatttggcaataggcactatttctcaatgagctcaaaatatactacatgacagacagtttgtcctacttcttaaaaacagttgctrtatcagcagatgaatgagaaatctctttaatgtaacttccctttaagaagtttagtaaggatttttgttttagtttttatgtttatataaagtatcccttcagtatttttgcaaccctctctaagaaaagagcagctcatggtagaaaagaatgttttgggctatgatggcagaaatggatggatgaccatgcctttctggaagagattattccttgcaaccattggacctattactgcaaatagctgagaaaaaggaacaaatcagtacatttaatctatgcaaaatgggtgttagggaaagcaagtt

SEQ ID NO: 767224 - DNA, 523 bp, Homo sapiens
ttcttccattattactctggttctaatacttctaaaacacataattaaacatttacttttctgtcaacatctagaattttcaatatctataccatagtccaaatgcaaattttaatgagcttttggttttctcttcttttcttcacccatcacaattataaaaatggacttacctgaagttaatttgagaaagttatttacacatatttaatggctatataataaaaatttaacttctttgtttaccttgcctctcttttyatccttttggattaattcttgctggggttcctctggtactttgctttcactcttgaaagttatattatctgtacatagaatttcattttaatgtcacttacatcattgatacactcattttaatgtattcctttatgcattaagagttgtgagcaataatttaggcctcagtcagtttcttattcttttgtagttaatctacatcatctgccacacatattattcacgggtcttttagggttaattttttttctttgatgct

SEQ ID NO: 767225 - DNA, 621 bp, Homo sapiens
gtgtgagacgatatttcattgtagttttcatttgcattcctctaatgatcagtgatattgagctttttttcatatgcttgttaacagcatgtatgtcttcctttgagaagtgtctgttcatgtccttgcccactttttaaaggagttgttttttttcttgtgtgtttgtttaagttccttatagatgctgggtattagaccagtttcagatgcatagtttgcaattattttctctgtaggttgtctgcttactcttttgatagtttcttttgctgtgcagaacytctttagttcaattaggtctacttgtccatttttttgttgttgttgcaattgcttttggagattttgtcatgaaatctttgccctttcctatgtccaggatggtattgcctaggttgtcttccagggtttttatagttttaaattttacatttaagtctttaattcatcttgaattaatttttgtatatgatgtttttccatttgtttgtgtcatctctgatttatttgaacagtgttttgtaattctcatcttagagatctttcacattcctgtttagctgtatttctaggtattgtattcttttggtggcaattgtgaatggcattgcattcctc

SEQ ID NO: 767226 - DNA, 612 bp, Homo sapiens
ttgggttgttttcttattctattttagcggctccaattatatgtctgcatgatattcattgcctgccttctactctttaattattttcattctaatacttttaatttatttatttatcttatttttgaaaatcttgtatatttaccacttttaatgacctttattaaatttttattcaaacatattcttatttggttattttatattttattctttaatactcaaatgattttcaattttctttttaatgtcctccctgagtttgagaaattacactgatttatttctatttttattcatttctgtccttcgttttaaaatatttgattcaagttctttccccctgattcttacacaatttttaaaattattaatcrtatctgaagggttacgttgcagctttctcccccttgtagttggtttcagtgaatggatttttatctactgaaaaggatgccttttcttttattttttctacccaaaataggatgcctctctgagactgctgcttggtctttcatatttcaattatgttccttagttttagtgttgggtattagcaaggcctaaatttgcattatatgcttcagcacttagtgataaactttctct

SEQ ID NO: 767227 - DNA, 620 bp, Homo sapiens
tttcacttaaaggtgagcctagaatctatcaattacattaagcaagaacttactgtataattcctatattaagataaagaaatgaaggcatagaaagacttcaattagcttgcttggtattgcccatctcctaagtggtgaaaacctgagtgttactttgacatcaaagctcaagttcttaagcactgtgtttgttaatatacaatatgtgaactctaaaagaatacattctaatttgaaaccagaattccatacttatcacactcaacatattcattcaatgaacacttatttatactgctgtatatgacacagtctattaatcaactatggatccaggaaaaagtaaactaatatctctgcctttggaaccttataaaagcaatggcaccaccaacaaaatccaatcatagaaggatattatatttacatgaaactacatttggtacaaatcacaaatcctcacytaagtagaaattgaaaagaaataggatattaaatgaaagattaaagtaatggcaatatttatttcagatacatgtagagttattgattaatttagtaattaattaaagttaaccctcaaaaagaaaaaatcctgtaccaggctctttttaggt

SEQ ID NO: 767228 - DNA, 595 bp, Homo sapiens
cctcaccagaatcccacctcaaatgccacaggcaatctatcagattgctgatgtaaaaatgagtattccttctttcatggctctatgatgccttatatattcctcaatcgtggtatgttatctaaagttatttgatagacatcccttgctatcgagataccgcattattattttttgacttatttgcctattcctcggactcttcctgatttcttaataacggaatcttccataactttgattcatctgtgttccaatcctcttcccattaataaactgatattatgtgcccaatctaaaatacttggagttattttagatctctctckctctagatcatacatatttagacaatcaatgaatcttttgtttctctctcttaaatattttttactctaatatttactcagatggttcagtttgtcctcatccattgttatcagaatttgatagtctgtctccagtcttgccctctcttacccaccatttacaccatctttctgatttgtaaaaatagtcatgtcacttgttttctctgcttgtttgtttgttttctgctttttcatccccaaggctatttctttggttctgaatt

SEQ ID NO: 767229 - DNA, 519 bp, Homo sapiens
tggcttccagtcccacctctgccacttagtggctgtgtgtctttgcattacttaatgtcttcaaatctccatttctttacctgtaaaatgagtataatcatagctgtctcatagagatggtgtaataattgaataacataagtttagcacagtgccttgcacatagtgagcactcacaaatgtcaactgttgttattattacaactattaaatggtactagcagatacctttgtgcaacatatgcaatatgtctttatgaggcattcctaatttcacatttatctacagatatacataatcagaaccaaatgattacyaaatacattggtttatgtcatctagttcccaaaaagtaaatctcattggccacacacattctacctccacaactttgtattcctgatgtgtcctaatctataaaactgactcacactgcatgaattcaaataacattgtgttaaaaagaaaagaagacagagagagagacagtgacaatgtgagaaggaagctgttagtac

SEQ ID NO: 767230 - DNA, 575 bp, Homo sapiens
ctaggtattttatttttttaattttttggagctatcgtaaatgggattgtcttcttgatttctttctcagctggttcatcactgatgtgtagaaatgctactgacttttgtgtgttggtttgttgaacagttccaatagttttctgatggaatctttagattttttaatatataagatcatgttgtctacaaagagaaacaatttgacttcccctttttccaatttgggtggtatttattgattttttgagacagagtctcgctctgttgcccaaactggagtgcagtggtgtgrtcttggctcaccgcaacctcagcctccagcttcaagcgattcgcctgtctcaacctcccaagtagctgggactacaggcacatgccaccacatccagctaactttttgtatttttattagagatggagtttgaccatgtcagccaggcttgtctagaactcctggccccaagtgatttgcctgccctggcttcccaaaatgctgggattacaagtgtgagccactgtgcctggcctggatgccttttatttctttctcttacctgattgccctggctagg

SEQ ID NO: 767231 - DNA, 575 bp, Homo sapiens
ctaggtattttatttttttaattttttggagctatcgtaaatgggattgtcttcttgatttctttctcagctggttcatcactgatgtgtagaaatgctactgacttttgtgtgttggtttgttgaacagttccaatagttttctgatggaatctttagattttttaatatataagatcatgttgtctacaaagagaaacaatttgacttcccctttttccaatttgggtggtatttattgattttttgagacagagtctcgctctgttgcccaaactggagtgcagtggtgtgatcttggctcaccgcaacctcagcctccagcttcaagcgattcgcctgtctcaacctcccaagtagctgggactacaggcacatgccaccacatccagctaactttttgtatttttattaragatggagtttgaccatgtcagccaggcttgtctagaactcctggccccaagtgatttgcctgccctggcttcccaaaatgctgggattacaagtgtgagccactgtgcctggcctggatgccttttatttctttctcttacctgattgccctggctagg

SEQ ID NO: 767232 - DNA, 621 bp, Homo sapiens
aactacatacactacctacgctgtttctctcctttccttcatagtcaagcctttagaaaaaataacctatgttcatgatgtctacttctccaccttccattcattctccaattcctaaaatatggcttctgtctgggttacttctctgaagctgttttctctaagggcttcattgacacacttattatcaaaccaactatacctttttattccaattattctcatctttttgtagtgttcgcttctrttcaccactacatctttctgaaaattattttatcattttctatcctgcaaattcctcctgattctctttctattctttttatgagcactccttagttttcccattgatgtttccccaggtacccactcaaatcatttatttctttcttcatgcaattttcttaggcaatattttcaacttccacaatgttaactccacatatcctcaattactcatccatatctacctatcacctacaacagttcttggagctgaggaggcatttaattagtatgttctgaataatcaatggatggatggatggatggatgggtggatctacatgagaagtcacaatctagaaatgttaacgatgaatgtgaagtactggcatt

SEQ ID NO: 767233 - DNA, 592 bp, Homo sapiens
tagagaataaataaaaagaaagagattaaagtaaaacactgatctttgacaacggagtaaaggcaaaccaatgaggaaaagagtcttttcaacaaatgatgcaggaaaactgacatcaagggcaaaaataatattgtaaaagagagtgcacacacagaccttacacccgtcacaaaagttaactaaaaatattaggcacctaatgtaaactacagaaaacatttagaaaatatcataggagaaaatgtasatggccttgtgtttgggaattactttttagatacaacatcacaggaaggatgcatcaaagaaattactaataagttgaactttgctaaaatttaaaacttctgctctgagaaaggcactgaaaagagaatgagaagacaagccaccgactgggggaaaatattttcaaaagatatatttgagaaaggactgccatcaaaactgcataaagaatccttcaaactcaataataagaaaatgaaaagcccaattacaaaatggcaaaatatctgaacagacacctcacaaaagatgatatataggtgaaagacgaacacataaaatgttgtttaaatcatatgtc

SEQ ID NO: 767234 - DNA, 592 bp, Homo sapiens
tagagaataaataaaaagaaagagattaaagtaaaacactgatctttgacaacggagtaaaggcaaaccaatgaggaaaagagtcttttcaacaaatgatgcaggaaaactgacatcaagggcaaaaataatattgtaaaagagagtgcacacacagaccttacacccgtcacaaaagttaactaaaaatattaggcacctaatgtaaactacagaaaacatttagaaaatatcataggagaaaatgtagatggccttgtgtttgggwattactttttagatacaacatcacaggaaggatgcatcaaagaaattactaataagttgaactttgctaaaatttaaaacttctgctctgagaaaggcactgaaaagagaatgagaagacaagccaccgactgggggaaaatattttcaaaagatatatttgagaaaggactgccatcaaaactgcataaagaatccttcaaactcaataataagaaaatgaaaagcccaattacaaaatggcaaaatatctgaacagacacctcacaaaagatgatatataggtgaaagacgaacacataaaatgttgtttaaatcatatgtc

SEQ ID NO: 767235 - DNA, 610 bp, Homo sapiens
gctattttggatctacaggtatagaatacattaggaaagaaaatcagaataaacaaagaaacttctctcaatcatctctatcaaaaactacttacattgactatttgatcagggtgactaagtctgtttacgggtttgacagagcagttaaaacaatttttttaatgttactgaactatttctatctaagatgaaatactagatctccaaaaaaattaacactaagaaaatgtgacttttatatagaaataggttatgyatgttgagtttactgtttcagtttttctttaccttgattcctcttctttgaattatggtttttttctattgtcatcctctacttagtttacatttgcacttataccttatctttcatcagcgaaggaataaagatacgaaaaacatgaatgattctatgtacaactgaatgaacaaaatgagcatttggtgatcacacgagttctttgagacatgaagttcaagacaaacagagttggaatttcactaagcaattcttgcaaactggatattgctaaagtcaatttaacttgtgatagttaatagacagtcttggaatcatatattaaggttgctagtggaaactagaagg

SEQ ID NO: 767236 - DNA, 431 bp, Homo sapiens
ctttccttctctttaattaatctaattgcctttcttttcctccatttgagataacacctggcagtcttttcaccagtgatgtggtggccacttacatatgctcttttgagctaaataccaccaaatggctatacttgaaakaactgttcatatctgaagatgttttcatgagaaacaagtaaagtgcctgttgggttctcatgtggaatttgagactgaaggccaatctcactgtccattaggattttgattctacgaaatagtttatggtggttttaaagatctttcttttttctcctgaacccctgctagctaggtgacgtgatggttgacattgcaagtaacatcatgttggctgatgaacgtgtcctgtggctggcgcagagggaagctaaagcctgcagtaggattgtgcagtgtcttcagcgcat

SEQ ID NO: 767237 - DNA, 601 bp, Homo sapiens
  misc_feature 91: n = A,T,C or G
agccagacccgaaaagggacagtttcccctctggccaggacctcaccccatcaacccagctgcccacgatgtctgctgggccaacatcccnagcctacagctgccagcctgccctgggctcagccaagggaagaggragctgtgaacaagtcagccctgggccccttcagggagccaatgacctcctcccttcctccctcatgcattcatcccttcatttgttcattcagccatccattcatcactctttccataaacaggcttggcacctcccacgcgcctagatatgaatgcagtatcaatatgtccctttcaggggcccacagcaggcaggtaagcacacccacaaattcataactccagaggggacaggaggcccaacagaagaatcacaagagaagccacaagggcctcagctctgcctggggcaacagggagaagccccctagactggtgtctggaggcccaccctggactgacacagaggctttcctgatgggcaaagaaggaggcctccctctggtttgtgaaggagatggtggcatggagagctggaggtgggatcctgggttttgtcctccaggcgatagacacaggaggg

SEQ ID NO: 767238 - DNA, 601 bp, Homo sapiens
  misc_feature 91: n = A,T,C or G
agccagacccgaaaagggacagtttcccctctggccaggacctcaccccatcaacccagctgcccacgatgtctgctgggccaacatcccnagcctacagctgccagcctgccctgggctcagccaagggaagagggagctgtgaacaagtcagccctgggccccttcagggagccaatgacctcctcccttcctccctcatgcattcatcccttcatttgttcattcagccatccattcatcactctttccataaacaggcttggcacctcccacrcgcctagatatgaatgcagtatcaatatgtccctttcaggggcccacagcaggcaggtaagcacacccacaaattcataactccagaggggacaggaggcccaacagaagaatcacaagagaagccacaagggcctcagctctgcctggggcaacagggagaagccccctagactggtgtctggaggcccaccctggactgacacagaggctttcctgatgggcaaagaaggaggcctccctctggtttgtgaaggagatggtggcatggagagctggaggtgggatcctgggttttgtcctccaggcgatagacacaggaggg

SEQ ID NO: 767239 - DNA, 626 bp, Homo sapiens
aataaaaaaaaactaccaccaaccaaaaaagtcctagaccagatggattcacagtcaaattctaccagatatacaaagaaaaactggtaccaattctactgaagctattacaaaaaaaggagggaatcctttcaaactcaatctctggcagaaacacaatgaagaaagaaaacttgaggccaatgtccatgatgaacacagacaaaaaattctcaacaaaatattgataaactgaatccagcagcatataaaacagttaattcaccacgataaagtaggctttattcctgggatgcaaggttggatcaacatatgcaaatcaataaatatgattcgccacataagcagattkaaacacaaaaactatctgatcatctcaaaaaatgcagaaaaacttcaataaaattcaacatcacttcatgataaaaaccctcaacaaactagacatcaaaataatatgactcaaaataataagagtcgtctatagcaaacccagagccaacattatactgaatgggcaaaagctggaaacattcccctggagaactgaaaaaaaggcaagcactctgaccatttcatattcaacgtagtagtggaagtcagagccagagcaatcaagcaggaga

SEQ ID NO: 767240 - DNA, 508 bp, Homo sapiens
tggaaggggagtgacatgattttaagtgggttccaattgcctttgtgtgaatattaagaatgcccttataatgattgtaaagatgcttaatgatgtggtctcctacttagatctctagcttcacccctggttagactcctacacaaaccttatgccagtcatactgaatattgtctgaatccttaaaaattaccttatgctttgcacctctggaaatcctcatgttctgtttcctctttctgtgaagatctggacaaactgactcacraccttatttatttttatgacatattttagcctttggtccagattgctggtctgtaaggacctcactgattggaccagattctaaagagttacttatttcattttctgaaagttcatagaatcatatgctttcttctttttattttagagtctctctctttctctctctctccatatatatatatatatacacacacacacatagtcttccaaaactcctcggaagaaagggaagcattct

SEQ ID NO: 767241 - DNA, 560 bp, Homo sapiens
ttcatgtactttgtttatttttaaatagggttatttgctttcttgttattgagtaatttgagtctcttatatattttagatattaactcctcatgagatgggttatatgtaatttttttttcccaatctatgggttgtctcttcattctactgatttttttcctttgctgtgctgatgctgtttagtttgatgtaatcccatttgtctatttttgtttttgttgcctgtgcctttgtggtcatatcgaataaatcactgcctaaaccaatgccatgggtatttgggctcttttttggttccatataaattttaaaatattttttctagttctgtgaagaatatcattggcggtttgataggaatagcattgaawctgtaaatcactttgggcagtatagccattttaatgacattgatttttcctattaatgagcatgggatgtttttccatttgtttgtgtcttctctgatttctttgagcagtgttttgtaattctcattgtagagatctttcaccttcctggttagctgtattcctgggtagtgtgtgtgtgtgtgt

SEQ ID NO: 767242 - DNA, 545 bp, Homo sapiens
  misc_feature 1, 2, 3, 4, 5, 6, 7, 8, 9, 10, 11, 12, 13, 14, 15, 16, 17,18, 19, 20, 21, 22, 23, 24: n = A,T,C or G
nnnnnnnnnnnnnnnnnnnnnnnngttgttgtgtagtgagatccaaaggcatgttttacaacagaagaagccttaagacactgtggcttcaggtgggtgtgggacagtgcctgctagcataaaatacatgggaagccctgctgcctgagagacatgagacagaggacagaaacatgtttactttgttgaatgtgtttaattgttttagatgtatggggggtatcttggacaggttacaacctgttttttttttttttttttttgagacaggttrtcattctgtcaccctggctggagtgcagtggcacaatctcagctcactgcaacctctgcaccctgggttcaagtgattctcctgcctcagcctcccaagtagctgggattaaaggtgcatgctaccacgcccagctactttttgtattttttgtagagatggggtttcgctgtgttggccaggctacaacctttttgatattactcatggctgttggatgtacaagctcactttatgtcctgttctggttccacttggctgccccgagtct

SEQ ID NO: 767243 - DNA, 509 bp, Homo sapiens
ctatttttcttgtacttctttgtctcaaagaaaacttattaacaaccaaggagaaggtgaagttcaactccgttgcaggatctccctggaatactcttttagccaccttttgtttttgcagtaaaaggaggaatgagcattgaatgaagacaaggatgaagactgaccatctaaaacatctgttagtgatagtttgggttttattttggggaaattcagtgyttttgcaaaaaccaaatggttttgtgggtctggcgctggactgagtgttgggaatgtggattctggtctctgttttgtcattaacagagtggccagttttgggatcatcccttacatctactctctgcttcatatttactgcctgaaatagaggatttcttctgtttgctttcaagggatattataatttaatttttattttatttattgttggagacaaggtcttcttctgttccctaaactggagtgcactggtgcaattatagctcactgcagcctcgacctcc

SEQ ID NO: 767244 - DNA, 644 bp, Homo sapiens
ttgcctgtcaccacagggtctcggagaggagagccatgtggctcagcatggccaggggcaggctagactgtcctgctgcagaggacccactggggcccagtgggacagccctccccctccccctgggactccatggcctgtgctgtcctcctgcccaagaagcttccctctgaggcatctcgggtccgggtccgtcctgctcacccagggccaggagcccccaggaggcccacggyaagaaggagcgcaagacataaacaatttccccctcctctgccgaaggctctggtgtcagcgtgctttgcctgcagtggcctttccccggggcagcgagggcctgagtgggcgcctcccccaacgcctcctgggtgtcagccccagactgccccacggctccacccctgttcagagccactcagcccctgggaaaggtggctgggtcatgagttggggatatgagggggatcagtgcctgctagttggtgccagaaaaccacctttgctggacttggcattgagggttggcaagggggcctcggagacactctcctccctcctacctgtacccccagggtacccgtggtcactcagttcctgactgcctgctttgggttgggatcccaggacccaccctctcctggctt

SEQ ID NO: 767245 - DNA, 659 bp, Homo sapiens
agactttccttccccaaactcggatcccctgaaacagagaggtgaggcttaggggtgaagggcgagcaacttctgcaataagatttccatgatgcctgaccatgtctgtaagagaaaggctatgtctttctttatttttgtttatttattttttgagacagagtcttgctctgtcacccrggctggagtgcagtgggttgatcatagcccactgcagcctcaacgttccagcctcaagcaatcctctctcctaggcctcccaagtagctgggactacaggcatgtgtcttgggaggcaattttttttttttttttaagagacgagggtctcaccatgttgcccaggctggtctcgaactcctggcctcaggcaatcctcctgccttgatatcccaaagttctgggattacaggcatgagccagcatgcctagtctcttttcaaaaaaaaaatttttttttttgagtcacagtttcactctttttgcccaggctggagtacaatggtgccgtcttgactcactgaaacctccgccttccaggttcaagcaattctcctgcttcagcctcctgagtagctgggattatggcgcctgccaccacatccggcttattttgcacttatttttatttttagtagagatgtggttttacgacgttg

SEQ ID NO: 767246 - DNA, 610 bp, Homo sapiens
catagcccactgcagcctcaacgttccagcctcaagcaatcctctctcctaggcctcccaagtagctgggackacaggcatgtgtcttgggaggcaattttttttttttttttaagagacgagggtctcaccatgttgcccaggctggtctcgaactcctggcctcaggcaatcctcctgccttgatatcccaaagttctgggattacaggcatgagccagcatgcctagtctcttttcaaaaaaaaaatttttttttttgagtcacagtttcactctttttgcccaggctggagtacaatggtgccgtcttgactcactgaaacctccgccttccaggttcaagcaattctcctgcttcagcctcctgagtagctgggattatggcgcctgccaccacatccggcttattttgcacttatttttatttttagtagagatgtggttttacgacgttggccaggcagatcttgaactcctgacctcaggtgatctgctcgcctcggcctcccaaagtgctgggattacaggcgtgagtcaccgtgcctagcctcaaaattttttaatgtaacttttcaaataaactcacacatgtgatcagtgatcaccac

SEQ ID NO: 767247 - DNA, 659 bp, Homo sapiens
agactttccttccccaaactcggatcccctgaaacagagaggtgaggcttaggggtgaagggcgagcaacttctgcaataagatttccatgatgcctgaccatgtctgtaagagaaaggctatgtctttctttatttttgtttatttattttttgagacagagtcttgctctgtcacccgggctggagtgcagtgggttgatcatagcccactgcagcctcaacgttccagcctcaagcaatcctctctcctaggcctcccaagtagctgggactacaggcatgtgtcttgggaggcaattttttttttttttttaagagacgagggtctcaccatgttgcccaggctggtctcraactcctggcctcaggcaatcctcctgccttgatatcccaaagttctgggattacaggcatgagccagcatgcctagtctcttttcaaaaaaaaaatttttttttttgagtcacagtttcactctttttgcccaggctggagtacaatggtgccgtcttgactcactgaaacctccgccttccaggttcaagcaattctcctgcttcagcctcctgagtagctgggattatggcgcctgccaccacatccggcttattttgcacttatttttatttttagtagagatgtggttttacgacgttg

SEQ ID NO: 767248 - DNA, 674 bp, Homo sapiens
gccacaagggagaaatgatggccccatagactttccttccccaaactcggatcccctgaaacagagaggtgaggcttaggggtgaagggcgagcaacttctgcaataagatttccatgatgcctgaccatgtctgtaagagaaaggctatgtctttctttatttttgtttatttattttttgagacagagtcttgctctgtcacccgggctggagtgcagtgggttgatcatagcccactgcagcctcaacgttccagcctcaagcaatcctctctcctaggcctcccaagtagctgggactacaggcatgtgtcttgggaggcaattttttttttttttttaagagacgagggtctcaccatgttgcccaggctggtctcgaactcctggcctcaggcaatcctcctgccttgatatcccaaagttctgggattacaggcatgagccagcatgcctagtctcttttcaaaaaaaaaatttttttttttgagtcacrgtttcactctttttgcccaggctggagtacaatggtgccgtcttgactcactgaaacctccgccttccaggttcaagcaattctcctgcttcagcctcctgagtagctgggattatggcgcctgccaccacatccggcttattttgcacttatttttatttttagtagagatgtggt

SEQ ID NO: 767249 - DNA, 512 bp, Homo sapiens
tgtctctactaaaattacaaaaagagtatttaagtggtgcagattaaatataaccaagattgtggagatatttaaaacacgaaattaaaaatataatagatgcactgttgcaaattactatttgaattatagatcattttcctattgcctagaaacaatacatagctaaaattccctaactacttttacgacacatatttagaaggttttaaaaatgtctgtagtcccagctattcggcagggcaaggcaggagaatcacttgagcccaggagttttagaccagcctgggmaacatagtgagggcccatctctaaaaaaaacaaaaaaaaagaaaacttcggaaatgtttcttgaactaacttaaaagccgccttccacttctcactttgaattagtttgaattaatttacaaactgcaatatattttaaaggagcttattgtagaaaataagttgataaaaaaataaggatatatctttagggatttgtctttagggacttgttaccaagc

SEQ ID NO: 767250 - DNA, 512 bp, Homo sapiens
tgtctctactaaaattacaaaaagagtatttaagtggtgcagattaaatataaccaagattgtggagatatttaaaacacgaaattaaaaatataatagatgcactgttgcaaattactatttgaattatagatcattttcctattgcctagaaacaatacatagctaaaattccctaactacttttacgacacatatttagaaggttttaaaaatgtctgtagtcccagctattcggcagggcaaggcaggagaatcacttgagcccaggagttttagaccagcctgggcaacayagtgagggcccatctctaaaaaaaacaaaaaaaaagaaaacttcggaaatgtttcttgaactaacttaaaagccgccttccacttctcactttgaattagtttgaattaatttacaaactgcaatatattttaaaggagcttattgtagaaaataagttgataaaaaaataaggatatatctttagggatttgtctttagggacttgttaccaagc

SEQ ID NO: 767251 - DNA, 596 bp, Homo sapiens
tcttaaatagaaacagtagccaaagactgatttactgtgaaactgacaaagctcaaacttcagagactcctttgcacaggcttctgcatagtacattgacttggtcataatttttatgacaactctatcagtaagatatcttaactgtaatcaattasgacatccatctctttccattccaaattcccctctgtcataactctctgtgtgttgattgaattcagggtggccatggcaatttttgggggtctgactaaaggaaaatagagttgagaatgggatatgttatgtggttgcattgttagccaccttggtgtaggaatgttttccaagaatattcccactacccactgcctgattcactcaggggcatgggccaaaactgaaggaacagagattgtattaatcctagtacctgagtatgtgggcaggaaagaagaaatatggttttgtaattagtctatggaaaatttttctgattatgagacataaaattgaacattgagaatttaattctcctccataccttgtcaaaataggcatttctttcctgtcaggaatatactagatgaggcaacatattccattataaacat

SEQ ID NO: 767252 - DNA, 657 bp, Homo sapiens
gtatttagatgcgctcagactcacgttagatacatcagacccttcgtggctctcccctgtcctgggccccttccttgccacgtccctttgcccagttccctttaccaccagagtgaaataacctgctccgtttggtgccatggattccctaccccaccaaccccgtgtgttcctcctctcccgactcctttcggctccatctctaaagcccaactctgggtgaggtttctcacaaccccattgctaaatcctgttagcattctttgggttttattctttgggttttgcgctctccattgcatttaaaccttccagaagttctggcctgggcctctgtggccccctgctcctcggccccatgctcctccagttttcctccttctgtcttcgtccttccaagcctgcagtctgctcgcctcccgtccctgctggatgccctttctagagggtttgtttgagctgcctttgcccttcccccrggtggagccatggcttctctgtgtgctgactgtaacctccagccagaactcaactgggggcgttttactgcccagcagcccctctgcttcaatacttcatgtccagacttggcacagctaagactcagcccgacagacaggctccccatcttctgctctgcgcctcagtacaggcccg

SEQ ID NO: 767253 - DNA, 572 bp, Homo sapiens
tgggtcactacagtcgactgtgctacagtgtgcgctcatgagtggtgtcagaagttagaccaagcagaagctagaaatcaacgagactgccaatgaccaacaattgtttgacctaaaatacagactgagcaaagaggtcttcttccacaagttgacaaaagtataaaygtcattatgaaggttttgtagggtgcccaaggctaagttcgactaattgccttttcacataattgtcacaggtctaaggaacctctaaccatttgtcttcaagactggattagattgaagcagaaaataatcaacatatatgcatctgtctttcgtggaacactcccttatacgatcaataaacacaagataatccaggacaaaacaaagacagttgaaataagactgcctacacacacacacacacacacacacacacacacacagcaagcagcaggagaataagcaaaggtatttactaaatcttttatccccaaaccataaggtctaatgatcttatagaaatacctagatctaattactttgattataaatcctagggtaacaaattcagcaatgaaagc

SEQ ID NO: 767254 - DNA, 572 bp, Homo sapiens
tgggtcactacagtcgactgtgctacagtgtgcgctcatgagtggtgtcagaagttagaccaagcagaagctagaaatcaacgagactgccaatgaccaacaattgtttgacctaaaatacagactgagcaaagaggtcttcttccacaagttgacaaaagtataaacgtcattatgaaggttttgtagggtgcccaaggctaagttcgactaattgccttttcacataattgtcacaggtctaaggaacctctaaccatttgtcttcaagactggattagattgaagcagaaaataatcaacatatatgcatctgtctttcgtggaacactcccttatrcgatcaataaacacaagataatccaggacaaaacaaagacagttgaaataagactgcctacacacacacacacacacacacacacacacacacagcaagcagcaggagaataagcaaaggtatttactaaatcttttatccccaaaccataaggtctaatgatcttatagaaatacctagatctaattactttgattataaatcctagggtaacaaattcagcaatgaaagc

SEQ ID NO: 767255 - DNA, 570 bp, Homo sapiens
gcaacttccggcatcttgttttggaggtttagttacaagggtgtatgcactacgtgaatttgtgataatttatcaagctgtgcacttaggattttttcactttcctgcactttaagggaaagtttgcttaatgaaacaagtggatgcrgaactataagagcagaaatgtaagacataaattcagtgttctaaccaacagctttttggagaaatacttctatttaatatgaagaaacaatatcccatttattttatttttaaataaattctccctaatacacttttgagtctcttagagaaaatgatacttctgagtgtggtggatcatagtttaatagagtatttgagagtcaaattgaaaacaatgacaacaaccacaacaacaaaaaaaacctttggattaatagttgggaagtggcagggaaaagccaaatctaaggttccaattaagagaattaatctggaagctggaagtctgggattagcgctcctgtgaaaatagatatgaggccatggtatagaatcttcttactgtctgagggattttgcccaaagcatcagcaattgcca

SEQ ID NO: 767256 - DNA, 638 bp, Homo sapiens
atccaaggccgctaacccaaggccagtagattagggaatgatgaaactgagattaacaaaaaggcttatatgactccagactaagctctcttaacatgaactggggggcaattttataagtctctccctctagccaacaaataactcttcctccttgttaaaaaaaaatagtaacagaagatcatataattagatatatacacattttgtgaatttgaaagaaaataggaatagcattgaatctatacattgctttgggcagtatggccattttcatgatattgattcttcctatccatgagcatggattctttttctgtctgtttgtgtcctctctgatttccttgagcagtggtttccagttctctttgaagaggtccttcacctcccttgttagctgtattcctaggtatttggttctctttgttgcaattgtgaatgggagttcattcatgatttggctctctgcttgtctgttgttgctgtatagkaatgcttgtgatttctgcacattgattttgaatcctgagactttgctgaagttgcttatcagcttaagaagctttcaattttaggtatcattactattgttgttgttaagaaataagaaaaacaatgggaattttcagaaaagaaaa

SEQ ID NO: 767257 - DNA, 544 bp, Homo sapiens
ctgtcatccacaaagtcatatgcactcaagccccctgtatctccctgacactgtatcctaccagtttaggtcttgctcactctggtttagccacactggctccctgatgctctgccaacactcaaattttgctcccaaagcgggtctttacactggctgttccacttcttcaactatctgcatctctctcttacctccttcaagtctttgcctaaatttcacctcctgtgacctcgatattaaaaaatttaatcagccaccaaccagtcagtcttccaattttccttatcttattccaaacttacttagcacttgtggcttcatttacaacatcaytgacttatttataacgtttattgtgttttgttttctcccccactagccacgagagtacagaactgtgttttctctctgatgtatcccaagcacccaaaacagtgcctggtacaaagtaggcttcagtaaatcaatatatgaataaaaatgacagactttgtattttaaaatagtcttcatttgtaataaagactctggaatttttaag

SEQ ID NO: 767258 - DNA, 571 bp, Homo sapiens
attaaagacttaagtaagagatatgaaactactagaagaaaacatagggaaaatacttcatgacataggtctgggcaaggattttttggagaaaaactcaaaagcacaggcaacaaaagcaaaaacagagaaatggaagtrtatcaatctaaaaagcctctgtacaagaaaggaaacaatcaatagactaaggagacaacccacagatggagaaaatatttgtaaactatgtacccgataagagttaatatccagaatatgtaaggaactcaaacaactcatcagcaaaaaataacaataataatctgatttttaagatggccaaaaaacctaaataaatacttctcaaaagacatatacatggccaacaggggtatatgaaaaaaatgctcaacatcactaattttcagggaaatgcaaatcaaaaccatatgagatattacctcaccccaattagaatgactattatcacaatgacaataaatgctagcatggatgtggagaaatgagaactgctacacattgtgggcaggaatgtaaattagtatagccattatggaaaatggtatga

SEQ ID NO: 767259 - DNA, 609 bp, Homo sapiens
tcttctcaaaatgggttcagattgacccagtgggtctatttataaatgtaaccaatgaaaggtcaattctataggtcataatttgagaagcactcaatttggcatcagcctgagctcagatttcttcatgggaagccttccaaaccattcctaacttctccagtatggatttataaaccttccttgtgctctttgaacatccatagggctcttcaaactctgtcacaggacatagaaaattaaagcaaaaattaaaataaagtagaatgacttctctgctggacttcaagactctgagatccaggagctatgtacacactatctttaatggtggttctttactggggacattctccacccagggaacatatggcaatgtctggagacattattgatcatcacaactaggctgggggttgttgttgggatatcgtgtgcagagatcaaggatgctgctcaascttctgcacttcacaggacagaacccccccaagaaaaatttatttggcccaaagtgtcaattatgccaagattgagaaactttaatacttaaggtttttcatttcacaaatattaagtactatgtatgtgtcacatcttgtgctaagg

SEQ ID NO: 767260 - DNA, 545 bp, Homo sapiens
taaacatttgtacttgtgttaatgcaatttcatactcactataacgatgtgacagataataatgtcaaatttgtagttaaggcaactgatgcacaaagaggtcaaatgacttacccagggtcatatagataagtgggaaagaaaakaattaattattaagaaagtgttagtaccattagtccagaaagaatttttttatccttaggctaattgttaataataacgaccagcacttattgagcatcctttaagtcacctcatttaatccacataatgaaatttggaggtaggcagtatgaagagtaagcaactttctcaatgtcacaacaattttatcaagtggcagagccagtatttgaactcaagattatctatcctcagactctgtgcttctaactcactacacatcccactatgatatgacatgaaaagatagaaaatcagagaatgggaggagagaaggtttagggaccaatgtagttaaaagtcaatagtaatagttccctgccctctgaatatctctgcccctctgcctggaatagagc

SEQ ID NO: 767261 - DNA, 652 bp, Homo sapiens
aggaagagcaccccagcaggatggcagcgagtatgaatgccctgtggcaaggtggaatgattggtatactccaggaacccaaatactcaataagcatcaagcatcacaataaatcattgctgccatactactctgttccactcatcacctaaaacaggtagtcagttgatattcatgtttcattggcatttgcgggaaaatgagggtttcagttggaataagtgagccaatggaaaagatgtaatggtcttccaaaactagtgaataaacagggagtatctgaaaggccagaatgttatattttttgccacactgtgaagtttgatgataaaaaggaaggttttagaatgatttgtcgcactaaatrcatttctgttgccatattggctgggtgctagaaggggttcccagctacctgtactcagtcctgggtctgggtccagctcatttctgaaaagggacatccagtgttattagtttctcctttctaatgctcaattttattgttcttataccatcggtttctcagcagggattacaacaagcaagggcggtctctggctacctgccaagatggtaggggggtcgagagacttggttttagtcccaggactcaacaaatattgtgttcttgtgcaaattatttcccgtt

SEQ ID NO: 767262 - DNA, 639 bp, Homo sapiens
ccccctttccctgctgtcagctagaggtcactcagctctctgacacccccttctcacccctagagccccatgtgccttgtgtcatggcctcttccatctccaaagtccacaatggagaatttctcatatgctaaacccctctagctatgaacctctctgacttcttctcctctctttgacctctggacccaatcaaatttaaagggatcacgtaattaggtcagacctacctggaaaatcttcctatcttaaagttaaccaatctgcagtcatggttacatctgcaaaaactccttcccagaaayagactgaatacttggagaaagtgtcggtacactgggagccagcaattttgggggctgtcttagaagctgacctcgccaggtgcggtgactcatgcctgtaatcccagcactttgacaggcaggtgaatcatgaggtcaggagttcgagaccagcctggccaacatggtgaaaccccgtctctactaaaaatagaaaaaattagctgggtatggtagtggcgcctgtaatcccagctacttgggaggccgaggcaggagaattgcttgaacccaggaggcggaggttgcagtaaaccgcatcacgccactgcactccagcccgggcaacagtgtg

SEQ ID NO: 767263 - DNA, 612 bp, Homo sapiens
ttatcaagtggtatacattaaatacatccggttttaattatgtcaatcatacctcagttacataatttgaaaaatcaaaagactaataaaaaatgttaaataaaacttgcataaatgagtcatagatatgaaagaaaaactataaaattttagagaagaagatcttggagaaaaactttacaatcttagattaggcaaaaaaaaaaagccttagayatggcaacaaaaaatagatatctaaaagaaaaatattgataactggactttatcacaattaaaacttttgctcagtgaaagacactagcaagagaataaacagacaatctacagactgggagaaaatatttgccattgcatatcttatatccagaatatacaaaaacaatctcaaaactcactatgaagaacataaacaagtcagttaaaaaaatggacaagtctttagccgacacttgaccaaaaatatgtaaatggtaagcacatgaaaaatgcagatggaaaataagtacatgaaaatatatttaacataatccatttgaaaaatgcaaattaaaactataatgagatactactacacaattgttaaaataaatttataaaagcttacaatat

SEQ ID NO: 767264 - DNA, 612 bp, Homo sapiens
ttatcaagtggtatacattaaatacatccggttttaattatgtcaatcatacctcagttacataatttgaaaaatcaaaagactaataaaaaatgttaaataaaacttgcataaatgagtcatagatatgaaagaaaaactataaaattttagagaagaagatcttggagaaaaactttacaatcttagattaggcaaaaaaaaaaagccttagatatggcaacaaaaaatagatatctaaaagaaaaatattgataactggactttatcacaattaaaacttttgctcagtgaaagacactagcaagagaataaacagacaatctacagactgggagaaaatatttgccattgcatatcttatatccagaatatacaaaaacawtctcaaaactcactatgaagaacataaacaagtcagttaaaaaaatggacaagtctttagccgacacttgaccaaaaatatgtaaatggtaagcacatgaaaaatgcagatggaaaataagtacatgaaaatatatttaacataatccatttgaaaaatgcaaattaaaactataatgagatactactacacaattgttaaaataaatttataaaagcttacaatat

SEQ ID NO: 767265 - DNA, 482 bp, Homo sapiens
caatattttaaaaagctctcttttgaaatatgtgttgtgtgcattatttcaagagatgtatggctaatttctcatatgctatgaaaaactgatttttaactgaccttttctgtgaattaaatgtgtgtgtgtatgtgtgcctttcactgttcgtaaatttatagkgggaatacaaccataagctcagaagtttgaatgttcttacatggcaataacatggagcatattttcattcctttaattttgttttgcaaaatggaagtagcctgaaaaataaaggagaaatttaatcttgatttacataaataaatctagctatttattttctcctatcaaaattaatggagactaaaaacttagacaaaataaaacagatcactccgtaagaattcttaggtctttctcctttttttttgagatgggggtctcactctgttgcccagtctggagtgtagtggtgcaatcttggctcactgcaacct

SEQ ID NO: 767266 - DNA, 678 bp, Homo sapiens
caatcattaaaaagtcaggaaacaacaggtgctggagaggatgtggagaaataggaacacttttacactgttggtgggacttcaaccattatggaagacagtgtgccgattccttaaggatctagagctagaaataccatttgacctagccatcccattactgggtatatatccaaaggattataaatcatgcttctataaagacacatgcacacgtatgtttattgtggcactattcacaatagcaaagacttggaaggaacccaaatgtccatcaatgataggctggattaagaaactgtggcacatatacaccatggaawactatgcagccataaaaaaggatgagttcatgtcttttgtagggacatggatgaagctggaaaccatcattctcagcaaactattgcaaggatgaaaaaccaaacaccatatattctcactcataggtgggaattgaacaatgagaacacatggacacaggaaggggaacatcacacaccggggcctgtcatgtggaggcgggagggatagcattaggagatatacctaatgtaaatgatgagttaatgggtgcagcacaccaacatggctcatgtatacatatgtaacaaacctgcccgttgtgcacatgtatcctagaacttaaagtacaattttagaaaaagaaaaaacagt

SEQ ID NO: 767267 - DNA, 522 bp, Homo sapiens
tagggtgttaaaattccccaatattattgtgtctatgtctaagtcttttcataggtctagaactacttgttttatgaatctgggtgctccaatgttgggtgtgtatatatttaggatagttaagtcttgttgaattgaatcttttatcattatgtcatacccttctttgtccttttttactgttgttgttttaaagkgtttatctaatatctaaagtattatctaatataagaatagtaacacttgcccttttttgttctgtttacataacaaatctttctctgacatttactttgagctttggggtttccttatgtgtgagatagatctcttgaagacagcagacacttgggtcctgtatttttattcaacttgccaccctgtgccttttaagtggggcatttagaccatttacattcaaagttaacattgatatgtgaagttttcatcctatcatgaagttagctcgttgctttgtagtttccattgtgtggttggtttataggttctgtgggctatgta

SEQ ID NO: 767268 - DNA, 458 bp, Homo sapiens
tgaaggaaacaagagcttcttcttatgctactaaggagaactctgcctttcacccctagcttatctttttattcaaggccttaattgagcttggtgaagccacccgattctattgcctctctagttagtattttcctcattatttctccaatgtcagatatcagcattttcttccaccagtatamcatccaacttcatcaactgtgattgttttaacaactaaacaaccatctcacgctgggattgtatgtcctctgcctaccaccagcagtaccttctgccacagattggactctctaggaagcagactctagataaagactatcatatagaaggtttatcaggaggttcccttggctccaacacctggggaagaaaggggactgaggggagagaggggaaagaaggagactgggcagaggaagaaattgagatatgatgcagactaaataaagctt

SEQ ID NO: 767269 - DNA, 604 bp, Homo sapiens
cagataaggcatgttatttattttaaggccctttaagaacatagccaattagagcctgttgaatgagatgcacatcactgaggtttcctagaaagggcttggtcatggggttttgaagccctgttacaaagcatggcagattgcctatttttaaaaggacatttattcttggaaamctgtgattctcttgttagcctcaaactcccttgcttgtaggtgtttcaaagaaatctgagcccttgccaggctatttctataaagtcgcctattttttccccccagaggttgcctgggagaaggaattaagtaaaaacaggcttaacaaaactgttccatgcttaattcaactgacttcaaataaatagtttatcaaagttctattaatgaattacttgattaattcatttatttggcaaatatttatttagggccgactataagctaagtatcacagttaatgcagtagattttgtctcttcttatatggcaatatccaaatatacaaacacatgtgaacatgaacacacaaatgaacagcagatacaggtaagagcctggctgggtcattgcctgaattgagagggctagagatactctctttagg

SEQ ID NO: 767270 - DNA, 604 bp, Homo sapiens
cagataaggcatgttatttattttaaggccctttaagaacatagccaattagagcctgttgaatgagatgcacatcactgaggtttcctagaaagggcttggtcatggggttttgaagccctgttacaaagcatggcagattgcctatttttaaaaggacatttattcttggaaaactgtgattctcttgttagcctcaaactcccttgcttgtaggtgtttcaaagaaatctgagcccttgccaggctatttctataaagtcgcctattttttccccccagaggttgcctgggagaaggaattaagtaaaaayaggcttaacaaaactgttccatgcttaattcaactgacttcaaataaatagtttatcaaagttctattaatgaattacttgattaattcatttatttggcaaatatttatttagggccgactataagctaagtatcacagttaatgcagtagattttgtctcttcttatatggcaatatccaaatatacaaacacatgtgaacatgaacacacaaatgaacagcagatacaggtaagagcctggctgggtcattgcctgaattgagagggctagagatactctctttagg

SEQ ID NO: 767271 - DNA, 647 bp, Homo sapiens
taatgtcttttataacaactttcactgaattgttttctacataaaacataggatgtaagttattgtagaatttaaaaattttaactcttaaaatttatgcagtgtctattttcaatgcaatgtcagtgaggacctttagcactcactttcctggtagatagcaccttcttccaatcatgccagaaaactaggcttgtctcctggaattccccatatggcctccttcctgggtagtgaaactcacatatgtccatttccctctacttgaagccattaatctagtggaagcttctatyctctcctggatcactgccctaatactctcctaaatccaagcatgacattcctctgcttaagattttaggcctaactctccattaaacctggaataaaacaccggctctcagcatgttcaccttctattttcgtctcttacctccgttcctacacactctctcacccaccctcttcagccataccaacaggctcccaggtctcccagggctccaagctcatgcctactgctttttctgcctggaatattcttttccccactgttgaagttactcctagttcagatctcagcttaaatgtcactcttgcaaagatgttcccacacctcctggcactgggcatttttgtccctg

SEQ ID NO: 767272 - DNA, 591 bp, Homo sapiens
cagccttcccaacagttccccagagtcttaactcatttcagcattaactcaaaagtccagttcaaaatatcatctgagacaaagcaagtcctttttgcctatgagcctgtaaaatcaaaagcaagttagttacttcctagatataatggtggtacaggcactgggtaaatacaactgttccaaatgggagaaactggctaaaacaaaggggctacagactccatgcaagtctgaaatccagtaagccagtcaaatctttaggctccaaaatgatctcctttgactccaggtttcacatccaggtcacactgatgcaagaggtgggctccatgtccttgagcatctccactcctgtggctttgcaggttatagccctcccacccccaacaccaccatcgctggctgctttcccgggcttatgttgactgtctgyggcttttcctggcatgaggttcaggcgttggtggatctaccattctggggtctggaagatggtggccctcttctctcagctccactaggtggtgccattgtagggactttgtgtgggggcttccaacccacattacccttccacactgccctagcaga

SEQ ID NO: 767273 - DNA, 576 bp, Homo sapiens
tatttggtttcatgtttctgcattaattcacctgggataatggcctccagctgcatccatttttcaatgaaggacatgattttgttctttcccataatactataatactatgtctatgtattctgtggtgtatatgtaccacattttatttatccaatccacaattkatggtaatctgtgctgattccatgtctttactattgtgaatagcactgaaattaatatacaacttcaagtatctttttagtagaatgatttgtttcatttttcatttcttaaggatctcttgttaggctggtctagtggtaactaattcccttagcaattgcttaactggagaagatttaacttctttgcttatgaaccttagttttgtgggatatatgtttattggctgaaattttgtgtctttaagaatgttaaaaataggcctccgatctctcctggcttgtaaggtttctgctgagatgtctaccattagcttgatggggtttcttttgtatctgatctgactgtttttctttagctgcctttaagatttttttcttcagcattgaccttggacagtctgatgac

SEQ ID NO: 767274 - DNA, 616 bp, Homo sapiens
gtataaactgaaagtctttcctctaagatcaaaacaagacaagaattcccactttaccacagttattcaacatggtagtagagatattatctagagcaaccagacaagataaagaaaaaaacagcattcaattggaaaggaaaaagtcaaattgtccttgttwgcagataatatatttcaaaaaacctaaagactccaccaaaatactgttaaaactgataagcaaattcagtaaagtttcagaatacaaaatcagcatacaaaaatcagtagcatttctatatgccagcagtgcacaatctgaagaagaaagcaagaaagtaatcccatttgcgatggctacaaaaaataaaatcactaggagtaaacataaccagaaaagtgaaagatttctagaataagaatgtaaaacattaatgcaaaaaaagaacacaaaacaattgaaagatattttatgtacatggactggaagatgtcaatatttttaaaatatccgcactacccaaagcaatctaaagattccgtgcaatccctatcaaaacaccaataatactcttcaaagaaatggcaaaaataatcctaatatttatatgaaactacacaagacccataatag

SEQ ID NO: 767275 - DNA, 616 bp, Homo sapiens
gtataaactgaaagtctttcctctaagatcaaaacaagacaagaattcccactttaccacagttattcaacatggtagtagagatattatctagagcaaccagacaagataaagaaaaaaacagcattcaattggaaaggaaaaagtcaaattgtccttgtttgcagataatatatttcaaaaaacctaaagactccaccaaaatactgttaaaactgataagcaaattcagtaaagtttcagaatacaaaatcagcatacaaaaatcagtagcatttctatatgcyagcagtgcacaatctgaagaagaaagcaagaaagtaatcccatttgcgatggctacaaaaaataaaatcactaggagtaaacataaccagaaaagtgaaagatttctagaataagaatgtaaaacattaatgcaaaaaaagaacacaaaacaattgaaagatattttatgtacatggactggaagatgtcaatatttttaaaatatccgcactacccaaagcaatctaaagattccgtgcaatccctatcaaaacaccaataatactcttcaaagaaatggcaaaaataatcctaatatttatatgaaactacacaagacccataatag

SEQ ID NO: 767276 - DNA, 646 bp, Homo sapiens
cctgttatgtgcactaatggggtgtacttttatttgtgaaggagtttgcagccagccttatacatggataaacttatacttttatagataaaagataaaggcccaatgtaggtaagaaactttaatggtatatatgttgcctcataatcaatcaaatcaaaaacattggtccactcctcttaacccatacgatgggttaaaaagarcattgccagaaggtcttcactcttctaaaagggcatcatttgttaggtcctttttccatggtttaaagtaaaagaagcaatgattagaaatgtatccctcatgataggttctatagcaaattctaccgtaaaggctacagttacacaatagactctaaattctcttatgaaagttatgataaaattggctaaacagagaagtatctgtgcagctgctggcacttgtggcctatggggaagtatatcaaatgaagattatagaaattcagtggcaggggattaacaaagagactgcttaattaagtgaataaactctttatctagctcattctttgatctgtttgattttaggaggtttggtttttgaggaccttgggtaaggagcaactcctaactcttgatattatcctcccaatggtaataatagtagtctccctggt

SEQ ID NO: 767277 - DNA, 620 bp, Homo sapiens
acttcagtacaactctgttatggacacagaaattaaatttcctttttttcttttcttttctttttctttttcttttttctttttttttttttttggtttttggtttttggtttttgaggcagagtctcactctgtcacccaggctggagtacagtggcaccatcttggctcactgcaacctccgcctcccgggttcaagaaattctcctgtctcagcctcccaagtagctgggaccacaggctcatgctaccacatccagctaatttttgtatttttagtagaratggggtttttgccatgttggccaggctggtctcatactcctgaactcaggcgatctacctgcctcagcctcccaaagtgctaggattacaggtgtgagccaccacgcctggcctggccttttatctttctatcagaatatagattcaacaaagtccctataactaaacagaaacacagtcatctgtccatctgtgcagtttaggaaggcagcaaaaaactgtatttttataagccaattcagtgtcctacaaagacaatctcatcatagcaatattaaagtttttaaaaaatctatttttttaagatcagatttttttggaggaaacaaaaaact

SEQ ID NO: 767278 - DNA, 620 bp, Homo sapiens
acttcagtacaactctgttatggacacagaaattaaatttcctttttttcttttcttttctttttctttttcttttttctttttttttttttttggtttttggtttttggtttttgaggcagagtctcactctgtcacccaggctggagtacagtggcaccatcttggctcactgcaacctccgcctcccgggttcaagaaattctcctgtctcagcctcccaagtagctgggaccacaggctcatgctaccacatccagctaatttttgtatttttagtagaaatggggtttttgccatgttggccaggctggtctcatactcctgaactcaggygatctacctgcctcagcctcccaaagtgctaggattacaggtgtgagccaccacgcctggcctggccttttatctttctatcagaatatagattcaacaaagtccctataactaaacagaaacacagtcatctgtccatctgtgcagtttaggaaggcagcaaaaaactgtatttttataagccaattcagtgtcctacaaagacaatctcatcatagcaatattaaagtttttaaaaaatctatttttttaagatcagatttttttggaggaaacaaaaaact

SEQ ID NO: 767279 - DNA, 630 bp, Homo sapiens
attttcccatttatcttggtccaatgcagtcctattctttatggcctatagactcaccccgaactacccccttggagggtaaaaaaaaaaaaaaaaaagaatgaaagaattccctctaggctggcccctaaaactcagaattaaataacaggaggggctgggagcctcctgaagactaaaacaacttgaggctaaatctacctttccaagagtgaaaaatttatttagatgtttgagaattcatatatgccacaataggrtaaaaaataaaaagtagaaatctcacacttttccttatacttccttcccctactgtccaaccagattccagaccttatctcactgtcattaccatttccactaaatggaggctcctaggtattaatcactctggcaactgcatggtgacaaaacgcaccacaacttttccactaaaaagctgtagtctctttctctctggctatattggcgattctccagttacttcaatactctaaaggctgcagcagcatgcaaaagaatttcacttaaaaaaaaaaaaaagaaaggtaagaaaagtctccaggagatggtgagttttattttgtcttgtctggatagaagtttgatttgctctcgaacgttccaggg

SEQ ID NO: 767280 - DNA, 630 bp, Homo sapiens
attttcccatttatcttggtccaatgcagtcctattctttatggcctatagactcaccccgaactacccccttggagggtaaaaaaaaaaaaaaaaaagaatgaaagaattccctctaggctggcccctaaaactcagaattaaataacaggaggggctgggagcctcctgaagactaaaacaacttgaggctaaatctacctttccaagagtgaaaaatttatttagatgtttgagaattcatatatgccacaatagggtaaaaaataaaargtagaaatctcacacttttccttatacttccttcccctactgtccaaccagattccagaccttatctcactgtcattaccatttccactaaatggaggctcctaggtattaatcactctggcaactgcatggtgacaaaacgcaccacaacttttccactaaaaagctgtagtctctttctctctggctatattggcgattctccagttacttcaatactctaaaggctgcagcagcatgcaaaagaatttcacttaaaaaaaaaaaaaagaaaggtaagaaaagtctccaggagatggtgagttttattttgtcttgtctggatagaagtttgatttgctctcgaacgttccaggg

SEQ ID NO: 767281 - DNA, 581 bp, Homo sapiens
gacttaattatgagccaaaataggcggaggttttataacttttttgcctttgtcagcatctaagtttatgttttcttaagagtagaccctgagacaaagatgtgaatgtaagtagtttatttgggaggtgatcctaggaaatactagggccttggggtggggagggcaggctgggaaagtaagacaaatgaacaaagcacgtgtaactaggcagatggaacttaactctactgggaaacagtgtagatcttgtgcctcagggttataccactggaggggtagtaaccacaggagctggagtatttatccaacttctttttcttttgagacagggtctcactgtgttgctcaggctgcagtgtagtgatgcagtcttggctcactgcaacttctgcctcctatgctcaagccatcctcccacctcagcctcctgagtagcyagggctacaggctcacagcactacacccacaccatcgtgtccagctaatttccgtatttttttctgtagagatggggtttcaccatattgcctaggctggtctcaaactcctgatttcaagcaatctgcccacctgggccg

SEQ ID NO: 767282 - DNA, 614 bp, Homo sapiens
tactttttaaaagatgttagatattattcattgggaactgagtataggattcttagatgattattattttctcaaagaatttcaaaaatattgtgccacttccttctggcttccatggtttctgatgagaaatacactgtgatttgaattgttttacccctctctggctgctttcaagattttctttgtccttagttttcagaagtttggccacggtgtgtcttggaatttgtttctttgctctttttttgttggtttgtttgaggttcattcatattcttgagtctataggctatttttttccaccatatttagaaaatcttttgccatttcatttttgatrctttttaaacctcatctttttttttttttctcctttccttctgggactctgatgacaagatcttttgtgatagtcccacatatacctgaaactgttcacttttttttacactctgctttctctctgatctttgaattgggtaatttatattgttttattctagttcacggattctttcctcggtcttcttcattccgttgttgagcccatcattgagttatttatgtcaattattttgatttttagttctgaaatttccatttgattcttc

SEQ ID NO: 767283 - DNA, 614 bp, Homo sapiens
tactttttaaaagatgttagatattattcattgggaactgagtataggattcttagatgattattattttctcaaagaatttcaaaaatattgtgccacttccttctggcttccatggtttctgatgagaaatacactgtgatttgaattgttttacccctctctggctgctttcaagattttctttgtccttagttttcagaagtttggccacggtgtgtcttggaatttgtttctttgctctttttttgttggtttgtttgaggttcattcatattcttgagtctataggctatttttttccaccatatttagaaaatcttttgccatttcatttttgatactttttaarcctcatctttttttttttttctcctttccttctgggactctgatgacaagatcttttgtgatagtcccacatatacctgaaactgttcacttttttttacactctgctttctctctgatctttgaattgggtaatttatattgttttattctagttcacggattctttcctcggtcttcttcattccgttgttgagcccatcattgagttatttatgtcaattattttgatttttagttctgaaatttccatttgattcttc

SEQ ID NO: 767284 - DNA, 502 bp, Homo sapiens
actacctctaggaacttcaagttccttgatttcgctgastgcaaagctcagtatgggagatccaacttctcatttagtgacagcctcttatcagttattattcttttgttatggtttgacggtgagttggggaaaacaacaattggatactcaatagcacatttacaaaatgctagaattaaagattctaaaagtccgtggggaaaattccaggagaatttgtctaactatatgtttttctaaaacacacatactggtttacactaattagcccacagaatacctatttctattgttttcatcttgcgagttggaaagtttaggaaaaaactttttttgctttcaccctcttctgttcccttagccccacaattaagcttaaattacatttttctatactcatcatattaaaatttatatccaaatatatatagtagtctctaataattttgtttaattaatagactttgtttttggagcagttttaggtttacagagaagt

SEQ ID NO: 767285 - DNA, 502 bp, Homo sapiens
actacctctaggaacttcaagttccttgatttcgctgagtgcaaagctcagtatgggagatccaacttctcatttagtgacagcctcttatcagttattattcttttgttatggtttgacggtgagwtggggaaaacaacaattggatactcaatagcacatttacaaaatgctagaattaaagattctaaaagtccgtggggaaaattccaggagaatttgtctaactatatgtttttctaaaacacacatactggtttacactaattagcccacagaatacctatttctattgttttcatcttgcgagttggaaagtttaggaaaaaactttttttgctttcaccctcttctgttcccttagccccacaattaagcttaaattacatttttctatactcatcatattaaaatttatatccaaatatatatagtagtctctaataattttgtttaattaatagactttgtttttggagcagttttaggtttacagagaagt

SEQ ID NO: 767286 - DNA, 594 bp, Homo sapiens
  misc_feature 555, 556, 557, 558, 559, 560, 561, 562, 563, 564, 565, 566,567, 568, 569, 570, 571, 572, 573, 574, 575, 576, 577, 578,579, 580, 581, 582, 583, 584, 585, 586, 587, 588, 589, 590,591, 592, 593, 594: n = A,T,C or G
ccactagctattcttctcttcctgatgctgtctctccctgcccttctttcttaaagcccatactttatcagcccaactctctatcgttacaaggcctttcatcatctgactaatcttatgcatttcccccaccataaatctaaagctgcacttgtactaatacgagcagtttactgaatgagccatactgtttcctgactcagagccttcacatatgttctctccactatttaggatgtctttccttctcttgtcttgctggcaaagtctactgattttttaagatacaacgtaagcactgtctgctttttttttttttttttttttagctcttttttagttaccattttttcttttttttctttctttactggctgctttttaagtcttctggtcttccctcttcccaaccctaggkgttatatactcactgtatcatgttcattcattctcttgggtttactaatgggttgtaattaagtctctctttcctcctggactcaaaggcaggtttatatttgccttattactttttgacttcctgttgcttgtttnnnnnnnnnnnnnnnnnnnnnnnnnnnnnnnnnnnnnnnn

SEQ ID NO: 767287 - DNA, 581 bp, Homo sapiens
caactggttttgcaaaccttactggatcttctgttgggcaggccagtgtgctgcaaggcaagggcttgtcgttgctattaaaataatttcacagaggaaaatcggctttttggtaaagttccatttaaagttgtttttttttwaattacattgatggagatagtgggtcttataattttagggcctccaaaggtcttaatcaggctctgatggtgagctcattagggcaatggggagttattgaagcattagcaagagggtggcgaaaacgccctcctttctctttgtctcaccacgttcctgaggacctctgttcagtaagcgcaaacgggcaggcgtggctgcggaggtggagtccatccatttcctggttttctgctcagcctgcgggaagggcagggaaagagttggggacttggttgctccctgggcttggcacaccagttcagccttggcttcgggtccagggtcccccacccaagctcccgtctctggggaagcccaggcagggcgaggactagcgcggtgatcgggaggctggatcctggagagacaggagcctgctttcctgccccgagcgg

SEQ ID NO: 767288 - DNA, 495 bp, Homo sapiens
caaaggccctgaggctggaaataacttggtatgtctgaggagctggactgtgaaggccagtgtggttggagcttagtaagcaagggctagaggcctacaggctgaggatggagagtgtgccaggcgctgggttgacagccccttacaggcgatggcatggagcttggatggcattctggatacattgggaagctatcaaatggtttttaacattcgtgcttgaccccatttgcatttcaagctgatcattctggctactgggtggagaatgcatggagctagggagtgggggaccagttcgtaggcaactgtkgtggtccagactggggctgaactcaggtggccaaggctcagaggacagtggaaacttttgagtcacttctcagttatagtctccatgacaggtgctatcatcaggctggatggtatcaccctccaggggccacaaaggcacccccccttaccagcccactcccagcctgtgggtgatggata

SEQ ID NO: 767289 - DNA, 589 bp, Homo sapiens
taaatacacaattctggggggtagggtgtccagcatacaagcccactagataactctgacatctgctacatcttcagagctactgatttaaaaaacacaaccaagccaggtgcggtggctcacgcctgtaatcccaacactttgggaggccgaggagggcagatcacctgaggttgtgagttcgagaccagcctgaccaacgtggagaaacctcgtctcccaggcatggtggtgcatgcctgtaatcccagctacttgggaggctgacgcagaagaatcgcttgaacctgggaggcggaggttgtagtgagccaagatcatgccattgcactccagcctgggtgacaagagtgaaactccgtctcaaaaaacaaaaacaaaaacaamaacaaaacacaaccaaagcagaacttgcgtcttggtgctcacagtctgggagaaggagactattcagagcatccctctactacagagacagccgccagagcctgtgaatggggcccagcctggaagccgacctggaatggaggacctgaggaggctgcccaagaattgaggcttgagtgacatctgaagggcaagtgggtct

SEQ ID NO: 767290 - DNA, 589 bp, Homo sapiens
taaatacacaattctggggggtagggtgtccagcatacaagcccactagataactctgacatctgctacatcttcagagctactgatttaaaaaacacaaccaagccaggtgcggtggctcacgcctgtaatcccaacactttgggaggccgaggagggcagatcacctgaggttgtgagttcgagaccagcctgaccaacgtggagaaacctcgtctcccaggcatggtggtgcatgcctgtaatcccagctacttgggaggctgacgcagaagaatcgcttgaacctgggaggcggaggttgtagtgagccaagatcatgccattgcactccagcctgggtgacaagagtgaaactccgtctcaaaaaacaaaaacaaaaacaacaacaaaacacaaccaaagcagaacttgcgtcttggtgctcacagtctgggrgaaggagactattcagagcatccctctactacagagacagccgccagagcctgtgaatggggcccagcctggaagccgacctggaatggaggacctgaggaggctgcccaagaattgaggcttgagtgacatctgaagggcaagtgggtct

SEQ ID NO: 767291 - DNA, 569 bp, Homo sapiens
acagagacagccgccagagcctgtgaatggggcccagcctggaagccgacctggaatggaggacctgaggaggctgcccaagaattgaggcttgagtgacatctgaagggcaagtgggtctcagccacgtgggaggcggtaggaagtgtgtccccgggaggtggtaggaagagtgtcyccaggaaggagtggcccatgggaggggactgaaggggcagggaccgaatgccatggggctggaggcaggagcactgagacaggcacctctgtgcttgggtgtggtgactgtccatccacccctgtgtgtgcacatctcagtcacagacatcccctgcttcatgcacacccagagcctctcctgaccctcagaactgccgggctgactaggctgtgggagtgggctcttccgtgggacaggcagggcacctggccctgagcaacaactttctcactttccccccctgtgaccctgggccagtcacttccaccttcagagcctcagtgtccacatctggaaaatggggcaagaatgcctttgtggaagggctgccaggagaaggaaatgagat

SEQ ID NO: 767292 - DNA, 669 bp, Homo sapiens
aacagactaggaaaggtaaaggttttgtgaagatcacacagctagttaggtacgagcccatgcttgaacactggtccttagattgcaaatctatgtccttttgccaaaaccagatgaccagcctaaaagtcagtgactgcacattatttattctctttttatttatttatttacttttagagacggggtctcactatgttagccaggatggtcacaaactacttatttatcttaagagttctagttacttacacttgcatatagcataagttattcagggataatccaagggatacaggggatttttgtcraagtcgcagaacccacaaggatatttttaatactatgtaacaaatactgggagtggagtatataagttgctttgcatattattggaaaacaacctccaatccaattacatgctcaaaataatgtccatttattctccaatgagtgctgtcagggttcatcccctgtgccatggaggcagagtcctgagctaccctgctgagggtctgaacagccttcattgtcaccagttttctattttgtctttgtgtgagtgcttccaggaatggcccaggcctggactccttgctgggacctggcagtgcaggtgatgccttatatttgttgggctggctttttatttcctccttgtggaaaatg

SEQ ID NO: 767293 - DNA, 607 bp, Homo sapiens
gaaaattacatttttgcaaaatagtcacaacatgatgcactgatattttgtaaataaactgtaactttaaatttagttttagaaaaaccagtgtggacaacagaaaacttcgacttatataaaactataaaagaatgttatactatgttaaactataaaagaaaaccaattgtaatacagtatggagaagactacatacctaattgtatcagtctcttttcactttcattttcaaggttatcacccttcagtgaagataaacactactaaaagcttgtcagctctttttgagacaggataaaggatttgtttctttgcctgtctcaaggagatagatgtggacttcagtgtccttctataaagcagtcgaagagcctaaacaagatgaagtggcagcatgttgatggagtatattcgaaggtgasaagcagccttgcagacagttctgcaaacaagacttcagagagctcttacgataggaaaaaaaaaaagtgcccttccaaggttagaagttaggaatgcattgtgcctttaagaaggccagcccacagatgaggacgtggagttttcttttgcctgaagggcattttctttttaaaaatgatag

SEQ ID NO: 767294 - DNA, 370 bp, Homo sapiens
tttcaattttttgtagagaagaggtctccctatattgcctaggcttgtctcaaactcctgggctcatgcagttctcctgcatcagccttccaaagggctggaattacaggcatggaattacaccatgcctggccttcattcactttaaagrtttattttgccagggctaaggactggctgtgacacagcctttggaggtcctgagaacatgtgcccaaggtggtcaggatataccttgttttttatacattttcaggagacgtaagacatcaatcaatgtatgtaaaatgtacattgggttttgtggaaaggcaagacaacttgagttgggggcttccaggtcacaggtggatccaaagattttctgatt

SEQ ID NO: 767295 - DNA, 586 bp, Homo sapiens
tcatatagagaatggcaatcagacaagtctcttcatcaaaatcagaaatagagaacaatttatgacacctactagttaagtataaggtggttttctgtctagttatgtgaaagttgattgttttggcgttacaaaattctattaaaaatgttgaacagaaaaaaagaccctaaaattgatgatattagatcattaatgacattacttttttttggattatttattttttattgatacaaatatttgtacatatttatagaatacatgtgatgattttttttcccctgagacaggatctcactctgtcacccaggctggagtgcagtggcatgatcttggctcactatagccttgaccttcttgggctcaagagatcctcctgcctcaacctcctgagtagcttggactataggcacacaccatcatgcctgctagttcttgtwtctttttgtagagacaaggtcttgctctgttgcccaagttggtctcaaactcctgggcttggtgatcctcccaccttgacctcccaaagtgctgggattacaggtgtgaaccaccatgcttggccataatttgttacatgcat

SEQ ID NO: 767296 - DNA, 619 bp, Homo sapiens
agtttgtcacatagattgattcttcctttcatgaaagacttctctgtagcatgcgatgctgtttgacagcattttagtctcagtagaatttctttcaaaactggattcaatcctctcaaaccctgctgctgctttatcaattaagtttatgggttattctaaatcctttgtcatcatctmaacaatgttcacaacatcttcaccaggaatagattttatctcaagagaccacttgctttgctcatccataagaagcagctcttgatttgctcaagttttatcatgagattgcaacaattcagtcccgtcttcaggctccacttataattctagttctcttgctatttccaccacatctacagttacttccttcactgaatcttgaaaccttcgaagtcattcatggggatgggaatcaacttcttccaaactcctgttaatgttgatattctcccgttaatcaccaatgctcttaatcgcatctagaatggtgaatccttcccagaaggttttcaatatactttgcccagatccattagaagagtcaccatctatggcagctatagtcttacaaaatgtatttcttcaagagtaagacttgaaagtcgaaattacttct

SEQ ID NO: 767297 - DNA, 498 bp, Homo sapiens
ttgcttccagtcttgcatcctttcaagcccttctccatgctgagtcatcctttaagtacgcctgaacccattatgggcatcccattctcttttatttatttatttatttttgagagtcttgctctgtcacccaggctggagtgcagtggcgtgatctcggttccctgcaacctccacttcctgggttcaagtgattctcctgcctcagcctcccaagtagctgggattacaggcgyccgccaccatgcctggctaattattgtatttttagtagagacggggtttcaccatgttagtcaggctggtctcgaactcctgacctcaagtgatccgcccacctcagcttcccaaagtgctgggattataggcatgagccaccgcgcctggctgttcaaactccttagcctgttctacaaggttcttggaaacccagctccagcccacatctctagcttcctctcctataaccacttccgttttaccatgtatttcttgtat

SEQ ID NO: 767298 - DNA, 592 bp, Homo sapiens
ggggaggccttttgggccagcctagaacaggtcaaatttttccctggccttctagcgtcacaggtttcttagttgcaccagtcggttatgaatttgcaattgtttgtgcttaatgtctggtattttacactgccatagaaactcaatgatggccttttgtgtatctgtttctgtcttttttttaattgcctgaaaagcagatcaacaaatattgctggtatcgttggctattttaccttcgttcttgaacttgggcaattgggtggttcaccattcatgatgaggcactaagatkgctgtgtgtgttctgagctttaagtatataccttgatgtgttttgggaacttatctttccttcctagtctcccacctctttgtagcatataatcatgaaattataagactgacatcttttgaaattgtctagtccagttattcccaaccttttctaaatatgagaatttcttttttctcaattaagaaaagtatgagatagtgatgcacacctgtagtcccagctgcttgggaggttgaggcaggaggatgcttaagtttaggagtttaagaccagcctgggcaatatagtgagatc

SEQ ID NO: 767299 - DNA, 592 bp, Homo sapiens
ggggaggccttttgggccagcctagaacaggtcaaatttttccctggccttctagcgtcacaggtttcttagttgcaccagtcggttatgaatttgcaattgtttgtgcttaatgtctggtattttacactgccatagaaactcaatgatggccttttgtgtatctgtttctgtcttttttttaattgcctgaaaagcagatcaacaaatattgctggtatcgttggctattttaccttcgttcttgaacttgggcaattgggtggttcaccattcatgatgaggcactaagatggctrtgtgtgttctgagctttaagtatataccttgatgtgttttgggaacttatctttccttcctagtctcccacctctttgtagcatataatcatgaaattataagactgacatcttttgaaattgtctagtccagttattcccaaccttttctaaatatgagaatttcttttttctcaattaagaaaagtatgagatagtgatgcacacctgtagtcccagctgcttgggaggttgaggcaggaggatgcttaagtttaggagtttaagaccagcctgggcaatatagtgagatc

SEQ ID NO: 767300 - DNA, 592 bp, Homo sapiens
ggggaggccttttgggccagcctagaacaggtcaaatttttccctggccttctagcgtcacaggtttcttagttgcaccagtcggttatgaatttgcaattgtttgtgcttaatgtctggtattttacactgccatagaaactcaatgatggccttttgtgtatctgtttctgtcttttttttaattgcctgaaaagcagatcaacaaatattgctggtatcgttggctattttaccttcgttcttgaacttgggcaattgggtggttcaccattcatgatgaggcactaagatggctgtgtgtgttctgagctttaagtatataccttgatgtgttttgggaacttatctttccttcctagtctcccacstctttgtagcatataatcatgaaattataagactgacatcttttgaaattgtctagtccagttattcccaaccttttctaaatatgagaatttcttttttctcaattaagaaaagtatgagatagtgatgcacacctgtagtcccagctgcttgggaggttgaggcaggaggatgcttaagtttaggagtttaagaccagcctgggcaatatagtgagatc

SEQ ID NO: 767301 - DNA, 469 bp, Homo sapiens
tgactgtaaagcacccctagacctaacagccaggggaggggggagatttctgaaaccctgaggatcatttggtagaacggatgctttgagagactggttgaggaaagcagccatcccaactgaccttgcagaggagttaggagaataartgctccaagcttatgttcctgtcttcctcaaatctttctctgtttttctgctgtgctccccactggctggacgctactagaaaccagcaagcaatagagtctccatgcagtccatagaggtcagctttccagggcaaggagctgggaggaagcgaatatgaaggggcacacaggatatccagcacagacagtccatataaagttatttttaagggcgttttgacaggaagcactggataagcaactatacatacaggataataaagtaagtggtggggatagggctggaattgggaaactgggaattagtgacatcgttt

SEQ ID NO: 767302 - DNA, 623 bp, Homo sapiens
gtaaatagagcctatattgcaatacctgtatacctgtaaatagaagtatattgtctttgacactgtcttcttcctgggaggatatcctctccaagtagattgtgagcagttaactgacaggcctggggacataccttgtgtcctttataacctgcaatagactgcacattcagggctggttgattcatagctccatctgtctatctgtccattttttaattgagttcctagaaagtatgataagcattcagtattaaatactagaaatgctgagggggaaatgtgaatcctgatctgcagaagttcacaacttgtcaaaggaataacattatttgtaaaatactttgtcgtttgcatggtccgttcacatttgttttgakgtattggtcttcagacatctttaggattcagatatgaattataatatgatgttatattttatgtcctttaaattccaggagtgtgacttggaaaaaattgagagaatgagaacagtggaaatggtgctggtgacatggggttgggagccccatccatgagacagtgtcctgaggggcaggagatagctggtgggagacataagtctgttctctcttttctcttttttggcctcaggtcccatg

SEQ ID NO: 767303 - DNA, 623 bp, Homo sapiens
gtaaatagagcctatattgcaatacctgtatacctgtaaatagaagtatattgtctttgacactgtcttcttcctgggaggatatcctctccaagtagattgtgagcagttaactgacaggcctggggacataccttgtgtcctttataacctgcaatagactgcacattcagggctggttgattcatagctccatctgtctatctgtccattttttaattgagttcctagaaagtatgataagcattcagtattaaatactagaaatgctgagggggaaatgtgaatcctgatctgcagaagttcacaacttgtcaaaggaataacattatttgtaaaatactttgtcgtttgcatggtccgttcacatttgttttgatgtattggtcttcagacatctttaggattcagatatgaattataatatgatkttatattttatgtcctttaaattccaggagtgtgacttggaaaaaattgagagaatgagaacagtggaaatggtgctggtgacatggggttgggagccccatccatgagacagtgtcctgaggggcaggagatagctggtgggagacataagtctgttctctcttttctcttttttggcctcaggtcccatg

SEQ ID NO: 767304 - DNA, 607 bp, Homo sapiens
agagcacagagacatctgtagaaatatggtcaattgatttctggcaagcttccaaagacaattaatggaagagaggatttgtctattcaacaaaggatgatgaaacaattggtcatccatatgcaaagccaagaactttgaccaaaacttcaaactttatataaaaataattcaaaatgaatcatagagctaaatgtaaaacatgaaactataaagccgtttttggtagtttttttttttattattattattttatttttctttttgtttttgagacagggtcgcccaggctggagtgcagtggcaagtacacggctcactacagcctggggctcctgggctcaagggatccttctgcctcaacctcctgagtagctgggactacaggtgggtttcatcacgcccggctaattttttatttttatgttttgtagagccagggtttcaccatgttscccaggttgctctcaaattgctgggctcaagtaatctgctgcctcggcctcccaagtgttgggattacaggcatgagccacgaggctcagccctataaaacctttcaaagaattgataggaccaaaatgtttttgacctgaagttaggcaga

SEQ ID NO: 767305 - DNA, 614 bp, Homo sapiens
agacatagataagcaagctgggagcttgtagcggtgaatgccagtagctgtgccaaaggaaaagggctaccttggaaccaactatgttcaacatggaggctccatcttcccttttctttgccaccacgtgtacagtaaagaaacaggcaacatggcagcggccaggtagagaacccatctgcataataaaagactaaggcggggaggccagattttcacaccctatgcaaatggcacacctggccctaaccgstttttcctgccctatgcaaatggcacacgtggcccaaccaatctttcatgccctatatagatcagacactgcctcctcaaactcatcgataaaactccttgcattccacagtggaactggcaacccacttctcccagacccctctctgccacagagagcttttctttctttctcctattaaactccgctctgaacctcactctgtgtgtctgcatcttagttttccacagctctgagacaacgaatcttgggtattaaccccagaaaatgatgccactttataatcactttgcatcataaataaattagaaccagaacaatgcagaaatagatatataaagtgccacgagtgtgaaactgc

SEQ ID NO: 767306 - DNA, 613 bp, Homo sapiens
gccccatcttatggctagatgggtcagaaagcacccaattaatgataggcagttcaggtcacatggtgacttgatgacccatagtcaaatgttcagtttccaccaaagcttagtaacaggtcaagagctatttatccaaaggagagtagttatctgcagaagacagcagggccttgctccaaaatcctagaggcctctgccgtgattcacctatgggggcctttcaaaggctccaaacagcatccatatctgccactgacacctcaagcaccattggatctgcttggtcatatggcccagtggcagagcasgttgcacagcagcctggacctgttgcagagccttctcctgctttagatcccactcaaaactggcagcctttcaggccactcaataaatgggccagagtaacacacccagatgagggatgtgttgcctccaaaatccaagtaggcccccagacattgtgcctttttctttgttgtaggaggtgtcaaatgcaaaaacgtatccttcaccttagaaggaatatcttgacaccactgagcccctagaaatattactgaggtagaagctccctgaattgtagtcggatttatttcccattctgggg

SEQ ID NO: 767307 - DNA, 613 bp, Homo sapiens
gccccatcttatggctagatgggtcagaaagcacccaattaatgataggcagttcaggtcacatggtgacttgatgacccatagtcaaatgttcagtttccaccaaagcttagtaacaggtcaagagctatttatccaaaggagagtagttatctgcagaagacagcagggccttgctccaaaatcctagaggcctctgccgtgattcacctatgggggcctttcaaaggctccaaacagcatccatatctgccactgacacctcaagcaccattggatctgcttggtcatatggcccagtggcagagcaggttgcacagcagcctggacctgttgcagagccttctcctgctttagatcccactcaaaactggcagcctttcaggccactcaataaatgggccagagtaacacacccagatgaggratgtgttgcctccaaaatccaagtaggcccccagacattgtgcctttttctttgttgtaggaggtgtcaaatgcaaaaacgtatccttcaccttagaaggaatatcttgacaccactgagcccctagaaatattactgaggtagaagctccctgaattgtagtcggatttatttcccattctgggg

SEQ ID NO: 767308 - DNA, 609 bp, Homo sapiens
cttgttgagtggctttgaccaaaatgctaatagtgatatgaacaataaaatccagggtgaggtggtctcagaatgagatgagaaactttttgggaactggagtaaaggtcactcttgctatgcaaagagactggtggcattttgcccctgccctagagatgtgtggaactttgaacttgagagtgatgatttagggtatctgcagaagaaatttctaagtgacaaagtgttcaagaggaagcagagcataaatttgcaacctgacaatgcagtaraaaaataaaacccattttctggggagaaattcaagctgcctgcagaaatttgcataagtaatgaggaaccaaatgttaatcaccaagacaatggggaaaatgtctccagagcatgtcagaggacttcatggccacccctgctatcacaggtctgaaggcctaggaggtaaaaatggtttcattggctgggtcaagggcctccttgctgtgtgaggccttgggacttgatgccctgcatcccagctgctctagccatggctaaaaggggccaagttacagctggggccatgacttcagagggtgcaagctccaagccttggcagcttccctgtgg

SEQ ID NO: 767309 - DNA, 515 bp, Homo sapiens
atgtttccaccgttttgaacaatttggggtcatccctgaatgcatgaaatcaagcaagtgtgctgtgagagttcttacccactgggagctagcagacagttgcacagactcatgcagaggcaagtgttctatcaccccacatctcagcaatttggggtgamgacgaatctgggccactttttaattattattttaaaattttgctttccatcttttcaccttttagcataactcctcctcttctgtggagtaaatgtggcccctggggcctctaggctacttcatgttagggacaatattaaaatatgcatataactgatcatattttccagaagaaatacagttatttggcaaaatttgtttaattggggcacaggaggaggccattgcttgggactgagctcctgcactaggccccaacagaccaaaccaaaatgaagtcactcatgctaaatgccacatgatcaaactgaagctttaaggaagtagatggatccccaaacagaatagttttc

SEQ ID NO: 767310 - DNA, 486 bp, Homo sapiens
aatatgaagctttaaaagaattccttctgcttcctttcctgatttttgaaacttcttttacttctgctactgcccaattactctgggatctggagcccttgagtacagacctttctaatggcaagtatacccaacaccatttgaaatatttcytacatactagcagtatataagaatgtgaaaaatggtgatgtgtatcacttgaaatcttgtttttatcacgtctatattttgctcaaaataaccccaatggaccagtgtttttagatataaaccagtttatagataccaggccaacatctacattccctcattcaaaaaacaagaaaaatctgtggtcagcaaatttttcaggatcactcctcatccctctacaatatcaatgttgtattctattggccttataccttttgaagttgtgctttgttcaggttattccttaagggataatccaaataacagactcttgagtgcttccatcatcat

SEQ ID NO: 767311 - DNA, 486 bp, Homo sapiens
aatatgaagctttaaaagaattccttctgcttcctttcctgatttttgaaacttcttttacttctgctactgcccaattactctgggatctggagcccttgagtacagacctttctaatggcaagtatacccaacaccatttgaaatatttcctacatactagcagtatataagaatgtgaaaaatggtgatgtgtatcacttgaaatcttgtttttatcacgtctatattttgctcaaaataaccccaatggaccagtgtttttagatataaaccagtttatagataccaggccaacatctacattccytcattcaaaaaacaagaaaaatctgtggtcagcaaatttttcaggatcactcctcatccctctacaatatcaatgttgtattctattggccttataccttttgaagttgtgctttgttcaggttattccttaagggataatccaaataacagactcttgagtgcttccatcatcat

SEQ ID NO: 767312 - DNA, 496 bp, Homo sapiens
ttatgcttttataaatggcattgttttctacattttaatttgcaattatcttgtgttagtattaacatatgaattataattaatctataattgatcttatattctctaactaaatagttagatgttatagtagctttttcctagattctataggaatttctatgtagatactcatattgtctgggaataaagtgagttttacttcttcctttccaatttgaaaacmttttctctatttttcttgtcatattgtgcagatgagtagccttcaatctaatattgaataaaagttgtgagaacaaacatacctgtctttttttttcaaatcttaaagtgaaagtattcactctttcactgttaagtataatgccagctatatgtttattcacaggtatactccatcagactaagtttatttctttctggtttgtttagagatgataacagtgatgaatgtgatattttgccaaatttctgtcatcattgattgagatgt

SEQ ID NO: 767313 - DNA, 490 bp, Homo sapiens
ttgtatggcttttcggcacatcttcagtgattttacactgtgtcacttaaactattgctccaatattaccatatttagacaatggagttttttgggtttttttgtttttttgtttgtttgctttttgagatgcagtctcgstctgtcacccaggctggagtacagtggtgcgatcttggctcactgcaacctccaactcctgggttcaagtgattctcctgcctcagcctcctgagtagctgggattacaggtgcacgccaccatgcctggctaccattttttaaattttattttagtagagacagggtttcatcaagtttgtcaggctagtcttcaactcctgacctggtgatccgcctgcctcggcctcccaaagtgctgggattacaggcgtgagccattgtgcccagggttggaggtttttctttaaaaaaaggtaatggctagagaagagaatggtaccattagtataggggactaggcaatagg

SEQ ID NO: 767314 - DNA, 613 bp, Homo sapiens
aagaaagatcaaattttatgttattccatatggtgatccatgatcctaacatcatttattaaaagctcgacttttttcccactgatatttcagatgtcatttttatataagccaaatttctatttggaattgtagactctttctgggttttgtaattgttctgtccacctgttcatttatgcaggcatcaaaacataccattttctttatagttcatttataatattttaatatctggtaataaatatttcccagtattgctgcagaagaatatttttatcaattattaagatrtaatttatgtgcaataaacttcattcatgtaaattgtacaattcaaagtactttgataagtgtattcactgtgaaaccactgctaccatcacaatgccaataatttccaaaaccagcgtacatttcctgttgcccctttgaagttcattctgctcctagtaaatgaatgatctgctttatgtcaatgtagattagtttgcattttgtagactttaaagtaaatggaaacatgccgtatttattcttttatatatcacttctttgactcagcataattattttcagagtcatattatgtgtcagtagtttattccttttg

SEQ ID NO: 767315 - DNA, 653 bp, Homo sapiens
ccaggcagatttccaggtattcagagcaccccctcactcacctgaatcagcagcctgagccaccctacccttcctgtgcatagacttagatacagtggggccctctctattcctaatgtggccagacctccaggcatttagagcaccrattcacatgaaacagcagcctgagacaccctagtcttcctgcgcatagatctgggtacaggaggctctctctgcttcacacccaggcagatctccaggcattcacctggttcagcagcctgaaccttcccacccttcctgggcatagattgtggtgcagcacggctctctctactcacgtccaggcaggtctccagacataaaggatacctgctcaccgagatcagcagactgacatgttctgtgcttcctgtgcacagatcctggtgcaggaggccctctgcttcatgcccaggcagatttctaggcattctgagaacctattctcctagattaggagtttaggctgccctcatccccctgcagagaacttggggctgaggaggtttcccaactccacacctaggcccatttctgggtgcttggaggccacccactggattcttgcttggcactggtacctgtgcctgccattggaggacctgttggcagacctgcctgttcca

SEQ ID NO: 767316 - DNA, 542 bp, Homo sapiens
ctctcaattgccaggaaaataattcagaaggtcacctaacacataaggactcacataaacttaaggaaaaggggtggaaagagatattccatgcaaacagacaccaaaagcgagcaggagtagctattcttacataaggtaaaacagactttgaagcaacaaaagttttaaaaaacaaagagggacattatgtaatgataaaaggactagtccaacaggaaaatatsacaatccaaaatatatatgcagaagttcccaaatttataaagcaattactactagacctaagaaatgagacagacagcaacacaatattagtggaggacttcaatactccactgacagcactagacaggtcatcaagttagaaagtcaacaaagaaacaatgaacttaaactatatcctataataaatggacttaacagatatttgcagaacattttctatccaacaactgcagaatatacattctatccatcatcacatggaacattttccaagatagaccatatatgataggccacaaaacaaagctcaataa

SEQ ID NO: 767317 - DNA, 542 bp, Homo sapiens
ctctcaattgccaggaaaataattcagaaggtcacctaacacataaggactcacataaacttaaggaaaaggggtggaaagagatattccatgcaaacagacaccaaaagcgagcaggagtagctattcttacataaggtaaaacagactttgaagcaacaaaagttttaaaaaacaaagagggacattatgtaatgataaaaggactagtccaacaggaaaatatcacaatccaaaatatatatgcagaagttcccaaatttataaagcaattactactagacctaagaaatgagacagacagcaacacaatattagtggaggacttcaatactccactgrcagcactagacaggtcatcaagttagaaagtcaacaaagaaacaatgaacttaaactatatcctataataaatggacttaacagatatttgcagaacattttctatccaacaactgcagaatatacattctatccatcatcacatggaacattttccaagatagaccatatatgataggccacaaaacaaagctcaataa

SEQ ID NO: 767318 - DNA, 512 bp, Homo sapiens
acattagctcatcagcaatggatccaaatcaagaagaaatctctcaattgccaggaaaataattcagaaggtcacctaacacataaggactcacataaacttaaggaaaaggggtggaaagagatattccatgcaaacagacaccaaaagcgagcaggagtagctattcttacataaggtaaaacagactttgaagcaacaaaagttttaaaaaacaaagagggacattatgtaatgataaaaggactagtccaacaggaaaatatcacaatccaaaatatatatgcagaagttcccaaatttataaagcaattactactagacctaagaaatgagacagacagcaacacaatattagtggaggacttcaatactccactgacagcactagacaggtcatcaagtyagaaagtcaacaaagaaacaatgaacttaaactatatcctataataaatggacttaacagatatttgcagaacattttctatccaacaactgcagaatatacattc

SEQ ID NO: 767319 - DNA, 571 bp, Homo sapiens
catttccatgacacaaaagtgcaagaagcagcaagtgctgatggagaagctgtagcaagttatccagaagatccagctaaattgataaaggtgactacactaaacaacagattctcaatgtagatgaaacagccttctattggaagaagattccatytaggactctcataaccagagaggagaagtcaacgtctggcttcaaagcttcaaagaacaggctcactgttttgttaggttgtaatgcagctggtaactttaagttgaagccaatgctcatttgccattctgaaaacactaaagcttttaagaacgatgttaaatgtactctgcctgtgctctataataaaataataaagcctggatgacagtacatttgtttacagcacagtttactgaccattttaagcccactgttgagacctactgcttaaaaaaagattcctttcaaattattattgctcatcgacaatgcacctaattacccaagagctctgactggaggtgtacaaggagactaatgttttcatggttggtaacacaacatccattctgcagccaatggatcaagcag

SEQ ID NO: 767320 - DNA, 571 bp, Homo sapiens
catttccatgacacaaaagtgcaagaagcagcaagtgctgatggagaagctgtagcaagttatccagaagatccagctaaattgataaaggtgactacactaaacaacagattctcaatgtagatgaaacagccttctattggaagaagattccatttaggactctcataaccagagaggagaagtcaacgtctggcttcaaagcttcaaagaacaggctcactgttttgttaggttgtaatgcagctggtaactttaagttgaagccaatgctcatttgccattctgaaaacactaaagcttttaagaacgatgttaaatgtactctgcctgtgctctataataaaataataaagcctggatgacagtacatttgtttacagcacagtttactgaccattttaagcccactgttgagacctactgcttaaaaamagattcctttcaaattattattgctcatcgacaatgcacctaattacccaagagctctgactggaggtgtacaaggagactaatgttttcatggttggtaacacaacatccattctgcagccaatggatcaagcag

SEQ ID NO: 767321 - DNA, 589 bp, Homo sapiens
gaatgaacaaaacctccaagaaatataggattatgtaaaaagaccgaacctacaattgactggagtacctgaaacagacagagaaaattgaaccaagctgcaaaacacacttcaggatgttatctaggagaatgttgccaacctagcaagataggccaacattaaaattcaggaaatacagtgaacaccactaagatactccatgagacratcaaccccaagacacataatcattagattctccaaggtcgaaaggaaggaaaaaaatgttaagggcagccagagagaaagaccaggtcacccacaaagggaagcccatcagactaacagcagacctctcagcagaaacggtacaagccagaagagagtgagggccaatattcaacagtcttagaaaaattattttcaactcagaatttcatatccagccaaactaagcttcataagcaaagaagaaataaaatcctttccagacaagcaaatactgagggatttcatcaccaccatgcctgccttacaagagcccctgagggaagcactaaatatgaaaaggaacaactggtaccagccattgcaaagacacatcaaa

SEQ ID NO: 767322 - DNA, 601 bp, Homo sapiens
agaatatataaggaaaccagacaactcaataggaaaaaagcatataatttcactaaaaaaaatgggtgaaagatctgaatagacatttctcaaaggaagacatacaaatggccaagaagtatatggaaaaatgctcaacatcactaattaccagagaaatgtaaatagaaaccacgatgaaatatcacatcacagtaattagaatggttattatcaaaaagacaaaaataacaaatgctggtgaggacatgaagaaaggggaactcttatacactgttgatgggaatgtaaaatagcacaaccactakggaaattggcatggaattccatcaaaaaattaaaaatagagctaccatattattcaggaatcttactacagggtatatattcagattaaatgaagtcagtgtgtcaaaaaaataactgcacacttgtgcttattatagcagtattcacaaaagccaagacattgaatcaactgaaatgtcaatcaatggatgaatggatttagaaaatatttggcatatttacacaattaattctgttcaactataaaaaagaatacaatcctgtcatttctagcaacatggatgaggctgga

SEQ ID NO: 767323 - DNA, 603 bp, Homo sapiens
acattgtccagtgtctgttgcagctaggtgtgaccacatggctaagtcataaccatgggatataagaagtgctcttgaagtgaataggtgtgcccttcttcctccccttcctcttcctgctgattgaatgctaatgaaatagctggagctggagcatttgtcytgggccatgaagtatccttggaactagaggacctgcacaatggaacaacaaaatagaagaatcctgggttcctcatagaggtgatccctaccagccttggactgcctagctctaagctttagaagtgggagtaaaacaaactctttctctttaagccattattattattttagatgtttttgttatttgctattgtgtcaaaccctaacaaataaattcctttgcttgtcttcatcaggattaatcttattggtgctttaggtataaatataattcacttcctttggaaggccttcttgatgctctcatcaagattaatttcctttcttatatgccttcacagtatcctgcttttctaatagcaattatcacaatgataattttatagttactgtgtgactttggttcagtatctcctatccttagtccataaaagctgc

SEQ ID NO: 767324 - DNA, 610 bp, Homo sapiens
ttaccatcagattgtattgagaaaaaaaaaagctgtaaagaattttgctaggtattgcaaatattttcaattcaataagattataatatctttattgaaatgacagtacacatgataacccatgtgaacacaaacacacacacacacacagagccatagccatagttgagtctttttttttttttttttttttttttttgagatggagtctcactctgtcacccgggctggaatcagtggcgtgatcttggctcactgcaacctccgcctcctgggttcaagtgattctcctgcatcarctttcctagtagctgggactacaggcgtgtgccaccacgcccggctaatttgtatttttagtagagatggggtttcaccatattgctcaggctggtctcgaactcctgacctcgtgattcgcccgccttggccccccaagtgctgggattacaggtgtgagccaccgtgcccagcccacttgagtctttagttgcataagtcaatgcaaacataatttcttcctttcatattgaaatgtttgattattttggatacttggagtatttttattttatttattgagatgcctattcacatatcaatagcactt

SEQ ID NO: 767325 - DNA, 604 bp, Homo sapiens
acatcctatttcatgtttattttactacttcttatttttacaacgggaaaatgttttaaatcatttgtcattgaaagaatttgacaattctcaatgagtcttgaaattctactgcataggttttttattttgtgtcataccacatttattgaaggatttatttttaaatatgaagtttttttactagctaaaataaatagagaaaaattattttgtatttttacaaagtgttttgggtgcaacgtgtagcttaagagatagcaaaatgcatcatataatgagttgagcactttccaacttcaagaatgtattggttataaaattcttgtcgccaaagtatctagtattcatatttacctatgaattttttcatagagtattcttaatatttttaaattggtccattctcatrtattagcaaatttacccccaaatgacatacacactgccatatttttatttgaaactaaatgactaccatattatttgattgctccttttaaattatacaatattgccatcctatgaaaaattattttagaataaagtactaattttaactgacttctctgtagctttagtagtgttggtctttctctcattt

SEQ ID NO: 767326 - DNA, 563 bp, Homo sapiens
cagtttctgctttacttgattttttttccatctcagagccaaaaccaagctcagcaaacatagttcgcatgtgcccacaattctgattaaaccaaaagccttggcaatagaggactgaacagaagcacttagtcactagttccccagattttatcattgcactatcatttgattcttcaactctagcattaataagtacaaccaactgatagctgtgcctagctaattcctctcattcaaggttgtctgtgacccccaggcaagggtaatccttgttttgtgccctcaaggtgccaagtacctcttcttccccagtagtcagcctgctcatattgactgattttatgtctgtctccactgcctggctgcaagctacaaggggacagggaccatatctatcttgctcatcacagkagccccagctcctcctattacgctggcacatagcagactctcagctcatatttgttgaaatgaaaattaaattgaaatggggctaatcaaagaacacgtcacggaggaagcaaatccagagaagatttttgcaaggaggaatacaccat

SEQ ID NO: 767327 - DNA, 559 bp, Homo sapiens
gcttatcaaacctccagatctactcaccagtttacagaaaacggggatagaggaaaacattaaaacacataatgagaaagcacacctgaatcctggctagaaaatattctgccagaaaaatgacctggtttcctcagcaagagggtaaaaaaaaggggggracagtgagatttttcacaataacaatgataagaaatgggtggaccagtcaggcacagtggtatatgcctgtagtcccagctacttggaaagctgaggcaagagatcacttgagcataggagtttgagaccagcctgggcaacatagtaaagaccttctctcttaaaaaagaaggaaacaaaggaatgagtggaccatgttgggatactgattcaaacaaattaactgtacaaggacgtctttgagacaaattaacaagaattcttcagtatcaccaaatgtgcagtctgaagtaaaatttgaatatgaggacatgcaactttggactgaatattagataacattgaggaattattgttaatcttgtcagatgggataagggatggtgacttatgaaaa

SEQ ID NO: 767328 - DNA, 604 bp, Homo sapiens
ttgtcacctcacctctttctctggatctcccctttccactctgtccttcagttcttgcccagagctgtgtatacggacgcggagatggggacatttgtgctgaggctggtcaagctgtgggtggaaggtggattacagacagagcaagggaggaatttgttcctgcagagtcctggaaatcttatttggagctgttcttctattcttagtttcgaaggcactttgttctctggtgcattgttttaacagccatcaggaaatcagtccccgctcggggtcactggtgtctgcctgtggctgcccaggtgggaagtgtactggtttgttgcagggttgatcctttgtcatcaggatcattgtagccctttctccttttgttgcccagcctgtctgcctggggcagggaagggtaaggaggctctttttctttgtagcmatgataactgtacttcttttgttcttttaagttcaggggtacatgtgcaggtttgttttataggtaaccttctgtcatgggggtttgttgtatcgattatttcatcactaaggattaagcccagtacccattagttatttttcccaatcctccctgtcctcccaccct

SEQ ID NO: 767329 - DNA, 618 bp, Homo sapiens
ggctcagtctgcctctttggagaatgcaagccttaaaccttggtggcttccacgtggtgttaagcctgcaggtgcacagaatgcgagagtggtggattctgggtggcttctgcctagtttcaggggatactaggcctaggtatccaggtagaaacctgctgcaggggcagagccctcacagagaacrtctactaaggcagtgcagaggggaaatgtggggttggaggcccctacacagagttgccactggggcactgcctggtggagctgggggaagagggacactgtccttcagatctgagaatgatagatccaccagcagcttgcatcctgtgcctgggaaagcttcagaaactcaactccagcctttgagagcagcctcaggggctgcaccctgtgaagctacaggggcagagctgcccaaggccttgggagcccatcctttgcaccagtgcaccctggatgtgggacatggagtcaaaggagattattttggagctttaagatttagtgactcccctgctgggtttaagcttgtgaggggcctgcagttccccccacccttttttttttttttttttttttttttttttggtcaattgtttccttttggaatgg

SEQ ID NO: 767330 - DNA, 618 bp, Homo sapiens
ggctcagtctgcctctttggagaatgcaagccttaaaccttggtggcttccacgtggtgttaagcctgcaggtgcacagaatgcgagagtggtggattctgggtggcttctgcctagtttcaggggatactaggcctaggtatccaggtagaaacctgctgcaggggcagagccctcacagagaacgtctactaaggcagtgcagaggggaaatgtggggttggaggcccctacacagagttgccactggggcactgcctggtggagctgrgggaagagggacactgtccttcagatctgagaatgatagatccaccagcagcttgcatcctgtgcctgggaaagcttcagaaactcaactccagcctttgagagcagcctcaggggctgcaccctgtgaagctacaggggcagagctgcccaaggccttgggagcccatcctttgcaccagtgcaccctggatgtgggacatggagtcaaaggagattattttggagctttaagatttagtgactcccctgctgggtttaagcttgtgaggggcctgcagttccccccacccttttttttttttttttttttttttttttttggtcaattgtttccttttggaatgg

SEQ ID NO: 767331 - DNA, 599 bp, Homo sapiens
ttgattcagaaaggtatcctctccataattatagagtcatattgtgtgagtttgggtgaatcagtgaactatcaagttgcaccacgtgtcctcctcagtttctctgatttatcatcctttctttgagatttacagaattagattgattgcaaactttaaaaaatgaccttcagctccttgcaggcccatgtgagcacacaactatcttgctttcmgacctgcatctccaatttcatctcgtagaagaaatcttcccatgagtatctctaaggcagggcccacctccagtgcttccttctgatcctgcacagcaagttcacctcctggatgtctgctctgtgttggctgatggggaaactaagttgaataagacatccttaagaagctggcagtctggtgaaggctggggttgggagacagttataaagaccaagttgtttcagtaagtcataatcagtgacacaggaggtggatgtataaggtactttagagaccagaaggggagtacctggcccataataatggctttcattctttatgagccagacaccatggtagaagctttacatgcattatctttaatcctcaacaagaaaggt

SEQ ID NO: 767332 - DNA, 487 bp, Homo sapiens
aggaacgggggactggtgggccatgccgcgcagtgcctggatggccatggttgccgagttttgagtgcaggagtaatataatctgatttttactttaagaggtattctctgactttcgttagaatggactggaaaatgggacgggggaatagaaaccggaagrggaggtaagtggctgttgaagttccaggtgggagaaggtggctggactgaggaaggcagcagcagagctgaagaaatgcatgtctagaacttccctgtttatactcgggcctcttgagaacagggaatgtgctttacccatttgcctgccttcttcagtcaagcttcatgagtggtaacacccagcagctgtaattctctcagttcccactcgcatattcatctgcagcagcctggttctgccctgcagttctattggaactgctctgtcagagaccacctgggatcctcacagagtaaaataacctcatttaaaaattctgtc

SEQ ID NO: 767333 - DNA, 487 bp, Homo sapiens
aggaacgggggactggtgggccatgccgcgcagtgcctggatggccatggttgccgagttttgagtgcaggagtaatataatctgatttttactttaagaggtattctctgactttcgttagaatggactggaaaatgggacgggggaatagaaaccggaaggggaggtaagtggctgttgaagttccaggtgggagaaggtggctggactgaggaaggcagcagcagagctgaagaaatgcatgtctagaacttccctgtttatactcgggcctcttgaraacagggaatgtgctttacccatttgcctgccttcttcagtcaagcttcatgagtggtaacacccagcagctgtaattctctcagttcccactcgcatattcatctgcagcagcctggttctgccctgcagttctattggaactgctctgtcagagaccacctgggatcctcacagagtaaaataacctcatttaaaaattctgtc

SEQ ID NO: 767334 - DNA, 675 bp, Homo sapiens
ctgggatcctcacagagtaaaataacctcatttaaaaattctgtctcgccacttctattcaacatggtatgggggtcctagccggtttaataagtcatgcaaaaaacaaggcatacaccttggaacagaagaaataaaaccatttttttgtgaacartgtgatcatatatgtagaaaatcctaaggaattttcaaaaagctactagaactgataaatgaattcgacagtgtctcagaatataaggttaatatgtagaaatcaattgtattcctatatgccggcaaagaacaacccaaaaaataaaacttcagaaattccattgacagtagcataaaaatatttaggaataaatttaataaaagatattttagacttatacactgaaaactacaacatattgctgagagaaattaaagaatacctgaataaacagagagatatgccatgttattgcttggaggtctcaatgtttttaattaaagatggtaattatttttaaattaatctatatatttaatgaaatcacaataaaaatcccagtagacatttttgtaggaattgacaagctgatcctaaaattcatttgaaaagacaaataacctagattaaacagaacaattaaaaaaattttttttaattgtggtaaaatacacacgaaatttaccaacttaata

SEQ ID NO: 767335 - DNA, 675 bp, Homo sapiens
ctgggatcctcacagagtaaaataacctcatttaaaaattctgtctcgccacttctattcaacatggtatgggggtcctagccggtttaataagtcatgcaaaaaacaaggcatacaccttggaacagaagaaataaaaccatttttttgtgaacaatgtgatcatatatgtagaaaatcctaaggaattttcaaaaagctactagaactgataaatgaattcgacagtgtctcagaatataaggttaatatgtagaaatcaattgtattyctatatgccggcaaagaacaacccaaaaaataaaacttcagaaattccattgacagtagcataaaaatatttaggaataaatttaataaaagatattttagacttatacactgaaaactacaacatattgctgagagaaattaaagaatacctgaataaacagagagatatgccatgttattgcttggaggtctcaatgtttttaattaaagatggtaattatttttaaattaatctatatatttaatgaaatcacaataaaaatcccagtagacatttttgtaggaattgacaagctgatcctaaaattcatttgaaaagacaaataacctagattaaacagaacaattaaaaaaattttttttaattgtggtaaaatacacacgaaatttaccaacttaata

SEQ ID NO: 767336 - DNA, 608 bp, Homo sapiens
caaaatttcgatgtgaaaactactgtttgcacttcaaatagtgaaactggttaaaaagaaaagttaaatgaccagtctcagcaacatgaaatacccaccaatgccccattctgttttctgtcttcaaccaggactgcagatgctctgactattgtatgcatattgcagccacaggtggcagcccaaatctgtacattttgctgcattctgtattatttgctyagtaattgaaggagaattgcattcttcttctttcctttgttgtctttacagacaaagtatctaattgttagggaaagcaatgaaatgccaataaatatattggcataaccttgcaggtcattataaaggattttttgttgttatttctgagaaagaagctgcatagttcaggagccagttagaccaacccgtgtttgcttggcacctgggtcctagtgaaacaattcaactgacttgtaaacaggcatgatgccatccagccatatgggtgcacatagatgctgccaagtgaccatgtagaaaaatcggaagcgtttgttgagggcagcagtcccagtatgagacatccaaacagctgtctaccctgagattcatacgcctgtggt

SEQ ID NO: 767337 - DNA, 563 bp, Homo sapiens
gagatggaagggacttcctacttcaaaattctgctctagtatttaaaaagcttaattacataggtttttagaattcaccagaagaggaatgaggaccattgataaggtggctagattacatgttttccctctggaagatcgtaattaaagaacagctttggttttcttttttgttttttaaaataactttgtggctttagcctgttaagcacatatcacaaccatgagttatttgacaggccatcctagaatggacgatgtcctgtctgcagatatctcaggtcagccagtttgagaagtgaacacctttctggatggatggcaggcagaagacagggatyactggaaataccaaataccctctaagtatagggctgaaaggaatgcctccccttcaccctctgaatgttccttgaaaatcaagtgacaaaaggaagattaataggataaaaagcatagaaatttatttgatcataattttagatgactatgggaacctttagaatgaagaccccaaaatacagagaaaccgtctgtttgtgtgcttaggttcaacaaagaag

SEQ ID NO: 767338 - DNA, 618 bp, Homo sapiens
tagctagaacttttttagctaatttttactaattttgttgttcaatgaattattttcatgttagcaggatctacatgtatcatttttccatatttatcctaaacattttaaaaatgctgttttcccagaccaaaagaaatataacaattagatttttgaagtcagttgaaatccaaaggccaatttctatgcccaaagttctcagcaaacattatcaaaatcttaggtcaagagatcgatcaggttgataagtgcatttgccttgcatattgttttttatctttacccagatgcttaacatatattccaaagccccactggtatttaaaatatgcactcaggtaaatggtgatgggagtggaggaggaaaacaaacatttatcaatattagaatcatcaaacttgccaacagccaaaaaccattagyaaattctacaagctagaaaattataacaattaggctttaacagtttttagtacactggttgtagcaaaagtatgtaataggagcactgcagtaagagaattgcaaatagcgaggatctcttgaaagataattgaagtagtgttggtttttctactagagaaacttcttcagagagtttaatgaatttgtga

SEQ ID NO: 767339 - DNA, 589 bp, Homo sapiens
gaatgattctgaagtggccaaaattaaactaatgacaagtgctttcaatgaacccttctaatctctccaaaattatttcttaccttttatggacctaactgtgctacatggaatctttctcaaaccaacacaagatgcagagcaacatagacagaacccaagacaagaagctacagagatcagtgtagccaatcaacacctgtcagatgacagcctaaaagtacaggtatcactgcatttcctaatcaaaaacgcattcacccaataagcctgtgaggaaccagcccttcccatttatacccagatcgccccactctgccatccccacttccctcccgcatccctttccctctccctctccctctctgtaatttacaaggacactagtccatagcacgacaaatggcctacacagtttkgtttaaaaaaataaaaaataaaataaaaaaataaaatttttccataaagtcatgtccaggactttaagctttctatttctgttcttacagaacaaaaaagaaataacgttaggtaaattttgttttaaaattcctgctgggttgagactttagatttcaggctggaaaga

SEQ ID NO: 767340 - DNA, 570 bp, Homo sapiens
gacctgctgagagaagagataacagtgaactctggaggaagctaaggtgggtggaaaaagaagcagggtaatgatcccatttaaccatgatgctattcattagtaattggaagaaacaaatgccatgagcacaaattttctatytgttaaatgttaaaaataaagcatggcacacattagattgggtaaaatcctgaacactgacaactccaaatgctggcagacaggatatagaccaacagggacccttattcattgctggtgtgaaacaaatatggtacagtcacttcggaagagagttttatagtttctaacaaaactaaatatattcttcccataagatccagctgtcacactccaaagtatttatttaaatgagttgaaaacacagccacaaaaaaacctgcacacaaatatttatagcagctttatttatattttccaaaaggtggaaacgaccaaaagttgaagccatttttcaataggttaatgaataaataaactgtggtaagtccttaccatggaatattattcagtagcaaaaagaaatgagctattaagtcacaaaaa

SEQ ID NO: 767341 - DNA, 510 bp, Homo sapiens
aacttatgaatttgttctctcataggttatgttttattttgtagagcatgcaatgtatagtatgtcatgtgtgacactgttgttaaggagaaaaccttccagggtaaatgaagataaatgtgtatttctcacatgagaaaagtggaaagaaaggtgagagtaatagatgaatttaggaggcmctgtgccaggcagaaactatgacaagtcaaagacaatatgaagaaaggatggaaaaagcatgaaaagatcacctgaagatcacactctgaaaaaaaaaaaagagcaataactatttatcacacatcatgctatgtccccaggatactgagaaatagtctcctttttggaaaaaaaaaaaaaagagttatacttctctaagaagataaacttgtaaaaagagaactaccacaaaattgtataattgctcttcataagagagatataatcagtgtctttaagattagttcaaaagaaaaaaataaggaatacctgagtagctgtgttcat

SEQ ID NO: 767342 - DNA, 643 bp, Homo sapiens
cataattattttgtagggagtctacaaaatattttgatcataaagaagaaagaaagttggtctcttctggtctaaatagattatttgtgttgtccctaagtaaagcaatgataaagaaattacagagacaaatgattatcaagcagggcaagacttcagagtgctggtattgacaggactgaagcagctataagcatctgaaattaaaggattatacaaaaaagaggctsgtattatctgggtacgttgaacacagtctgttctttttatgggaaagttaggtctgtatctgtcagtataaatataaccatcccgaaagcttcagaaaatcattagcttggaataaactacatctcagttatccattgtgcaaccgctacttcaagttgttggcagaggttgataactccaaagatttcagctggctcaggctgacaaaagggaatacgattgtttcaatgtggtttttgttgccaagtaaagaaggtatcttgctaagagagtaaaagtgttttcagagactttataaagaatattcctcaaaaacaaagaaccatgtttgagtctttaaatgggcagttacgtgagaaattcaattttaaaccatttagatattgagaaaaagcatcttcacctaatgatt

SEQ ID NO: 767343 - DNA, 666 bp, Homo sapiens
actatgcatgcacagcgtctaacttgtgcttgtaatttgtgattacgtcttcaggatacatagttttaaactaggccgagtgcggtggctcacgcttgtaatcccagcactttagggggccgaggcgggtggatcacctgaggtcaggagtttgagaacagcctggccaatgaggtgaaacctcatctctactaaaaatacaaaaattagctgggcgtggtggtgggcacctgtaattccagctacttgggaggctgaggcaggagaatcgcttgaacctaggaggtagaggttgcagtcagcggagatcgcgccattrcactccaacctgggcagcaagagcaaaacttcatctcaaaacagaataaagtaaaataaatgaaaaaaataaaattaaactaacagctaactcacagtcttctgctaaaaaagtgtcatacattcagattgtttactctatcaggttagttactcatgctgctatactgtttccaaactcttaggattctagcacattgttttagtttaattttcactgttcctttaaatgtttatttaattcattttctaaaatcacagatatgagcagagccttggagaccatctagtagaatccttccgtggaatagatattaaaataaaaactcatattggttaagttacttt

SEQ ID NO: 767344 - DNA, 631 bp, Homo sapiens
atgtgggtctccacatgctgctctgtccatctgagtggcagctgcaagttagtcctgcctcctatccacctttttccccctttactctcagcaggttcattttctaacttcctttcatagagagtcagtggctacttagtaggggttctggcctggtgggctagtgctagggtgtgtcttggtcaggttgggtgtttacataattttggaatgaatagaaagatatagaagatgaatacagggaccactaagagtamaaccggagaaaagaataggttgttaagacaaaagggaaagcatacaacctaaaatgggactcaaaaccaggagagcctgaagagccaaaataagaattgaagcacaagtgcattagtaaaacagagaatccacggattactgatgtgatgcaaaatattttctttcttttttactttcttcattgcttaacatttagtccataaaagtaagcattgggagggaacccatcttctatggcctccctttctctttcattttcttaactgtgcagttctccaggattctagttcagtcttgctagccaaggccagggaattgtcattcttggcatcatcctgggaggaggaaggtaaaattctacaagactcctgca

SEQ ID NO: 767345 - DNA, 631 bp, Homo sapiens
atgtgggtctccacatgctgctctgtccatctgagtggcagctgcaagttagtcctgcctcctatccacctttttccccctttactctcagcaggttcattttctaacttcctttcatagagagtcagtggctacttagtaggggttctggcctggtgggctagtgctagggtgtgtcttggtcaggttgggtgtttacataattttggaatgaatagaaagatatagaagatgaatacagggaccactaagagtacaaccggagaaaagaayaggttgttaagacaaaagggaaagcatacaacctaaaatgggactcaaaaccaggagagcctgaagagccaaaataagaattgaagcacaagtgcattagtaaaacagagaatccacggattactgatgtgatgcaaaatattttctttcttttttactttcttcattgcttaacatttagtccataaaagtaagcattgggagggaacccatcttctatggcctccctttctctttcattttcttaactgtgcagttctccaggattctagttcagtcttgctagccaaggccagggaattgtcattcttggcatcatcctgggaggaggaaggtaaaattctacaagactcctgca

SEQ ID NO: 767346 - DNA, 664 bp, Homo sapiens
atcatataattaaaatgtcctgtgcaattaatcatatcttagaattatatcaatagctctatcaattaaggtaaccttccttttcacttccagtaagttcgaccaatgataaatgaagccacataaccaaagagacagtcagataatgtagccagggctcacagatgagttttaagaataatccaataattagacagtgttttgcagtggaagagttaaaacagcaggcayttttagccagaagaagaaaacactgagggttttataaatagtatttgtgaaaactatgtaagactttatacagaagaaaggttatcagcatgggaccaggtgctggagggttgttgggaggtgagtctcagacctatatgcatttaaaaagcttcacagatgttccacatgcacagctaaggttgggaacaattgctcttgtcacttgttctgtcatcctgaatgactaaataatgtaggtgtttgtagactccttatattccagggtctcttgtcatgaaatgcttagttcagctcataggcagtggcaatgaagctgtcctaaaagaaagctcatactgtgttctggaagtggtattagatcttttacacaggacattttgtttcgttcttgaaacaaacttttgagaaacatattatcattctgatttta

SEQ ID NO: 767347 - DNA, 603 bp, Homo sapiens
gttttcagtggttgaaaatatataacaagcaaataacccatttttggttattttttaccatctttagatattagattttgaaagagaatttatacatctgatgtgtaatacaatgattacaaataaaaaggtacaatgtattataacttcttaactcaaaataataaagggcacatttttggaaggtagtagccatctattttcagcaaggaagaaaattatatcaatacgtacacctataaataagaaaatctgggtaataaccactgggagacaaacttaagggctttttatttcattcatgtgcgtgtctcaacttcaaatttaaaaaaagttcatagaagctttatatttgtatttcatsataattttcctttaataaataattaagggcaagataaatactgaatcaaacataacatttatttttcctaataatgatcatttttagtctcaagatatgtctctacttcatgtcattttgctagtaagtactttacttagtagagcatcagtgactttactatttccctgctcaaaagcatttcataagcgttccttaatgctacctaagaaagcaatctgtatttagtctattttttc

SEQ ID NO: 767348 - DNA, 625 bp, Homo sapiens
tgtgcatgcacacatttagcattagtgttttaaattttgcatttcaatttttgggatgacatctgtaactggtaacaaaaatatcatctgtttttaaatatttaagacagaagttaaacatcattatttccacaaatgattcaagttgtgaatactcttgctggtgtggccttggtgtttatcagttaatccaaaatatatattaatacaaaagtaagataatttaagatactcaaattagatgttcgattgttttgattgctattcacatctgttgcagagctttatcaatttctgagcttacatgcaagaattttaccttctaatatggaagataaggtcaagcattcacatgcacacacacgtacatagaaacaaacacagggtcacaaacacaattctaaagtacttgagattagccataccaatggctgraggtaaggagttgtaagtcctagcggaggtaaattgcctagaaaccttaaagtaataataaaattgactaatagtctgctttttttcttatcttgatgtgcaggcaagcctaaaaaaggccaattatgtactattcttccctgaaatataatctttttgtgttctaaattttatacctcatggttgtaaa

SEQ ID NO: 767349 - DNA, 656 bp, Homo sapiens
gacttttattaatctatgtttttgtattaataaatatacatgtttaacataagaatgttttattagttacctattaagaaactgtggtttttatggatgttaattagaataactgacagttaatcaaaataactcaaaatgtgggcttagggacactaacctttaatgaatagagtatttttgtaattrggagctaataccagatacactttgtgtctactcctgtgctagctcccatttatcatttaaatagtagattcaaaaatcaataaagacagcacaatggctgcaatggttgtaaagatgaaggaatagaatctgagttatttcaatccactcattctttataactatttagagattttatttggtttcaaattttaaaaattaaaacataatgtagaccgcaagatgtaatatctttcttaaggggaaaattttgaattatacatacaatattttacagaatctgaataatacattttaattgaaatttatcattttaaaatcattaattgtttaaaactaaaaaaatcaagaaactactattactgaactattatataattattatttaaaatgcttttattcaataacaaagggtttttaaaaaattaccctctcctggtgccaaatatcttgttacatcactggaa

SEQ ID NO: 767350 - DNA, 641 bp, Homo sapiens
tctatgtttttgtattaataaatatacatgtttaacataagaatgttttattagttacctattaagaaactgtggtttttatggatgttaattagaataactgacagttaatcaaaataactcaaaatgtgggcttagggacactaacctttaatgaatagagtatttttgtaattaggagctaataccagatacactttgygtctactcctgtgctagctcccatttatcatttaaatagtagattcaaaaatcaataaagacagcacaatggctgcaatggttgtaaagatgaaggaatagaatctgagttatttcaatccactcattctttataactatttagagattttatttggtttcaaattttaaaaattaaaacataatgtagaccgcaagatgtaatatctttcttaaggggaaaattttgaattatacatacaatattttacagaatctgaataatacattttaattgaaatttatcattttaaaatcattaattgtttaaaactaaaaaaatcaagaaactactattactgaactattatataattattatttaaaatgcttttattcaataacaaagggtttttaaaaaattaccctctcctggtgccaaatatcttgttacatcactg

SEQ ID NO: 767351 - DNA, 622 bp, Homo sapiens
aaacatcctagtatatacctacacaaacctagatggtatggctgaatacacactcagactatatggtatcctctattgttcctaaactataaatctgtacatattactctactgaatactgcagataactgtaaaacgtggtaagtatttgtgtatctaaacacatagaaaagatacaagaaaaatatgatacaaaaggtaaaacatgatgcatctttatagggcacttaccatgaatggagcttgcagaactagaagtttgtatggatgagtcactgttgagtggtgaatgaatgtgaagccctagacattactgcacattattttagattttgtaaacactgtgcactcaagttgcactaaattcattaacamtttttctatattcaataataaattaactgtagcttaccgtacctttttactttataaactttcatgtattttttaattttttgactattttgacataatgcagtaaatgcagagatgatgtaaaacagaaacatattgtacagccatacaaaaatattttctccatgtgtattcttattctataggccttcttccattttaaatttaaaaattttttttttactttttaactttttttggtaaaaac

SEQ ID NO: 767352 - DNA, 622 bp, Homo sapiens
aaacatcctagtatatacctacacaaacctagatggtatggctgaatacacactcagactatatggtatcctctattgttcctaaactataaatctgtacatattactctactgaatactgcagataactgtaaaacgtggtaagtatttgtgtatctaaacacatagaaaagatacaagaaaaatatgatacaaaaggtaaaacatgatgcatctttatagggcacttaccatgaatggagcttgcagaactagaagtttgtatggatgagtcactgttgagtggtgaatgaatgtgaagccctagacattactgcacattattttagattttgtaaacactgtgcactcaagttgcactaaattcattaacactttttctatattcaataataaattaactrtagcttaccgtacctttttactttataaactttcatgtattttttaattttttgactattttgacataatgcagtaaatgcagagatgatgtaaaacagaaacatattgtacagccatacaaaaatattttctccatgtgtattcttattctataggccttcttccattttaaatttaaaaattttttttttactttttaactttttttggtaaaaac

SEQ ID NO: 767353 - DNA, 682 bp, Homo sapiens
caaactagaaaatctagagaaaattggtaaattcctggaaacacaccacctgcaaagactgagtcaggaagaaataaaaaccctgaactgaccaatattgagttttgaaattgaatccaaaaaaaaaaaaaaaaaaaaacacctaccaaaaaaagagtctgggaccagaaggattcacagctgaattttaccagatatataaagaagatctggtaccaagcctactgaaactattccaaaaaacagaggtggaagaagccctctctaactcattatacaaagcaagcatcactctgataccaaaatctggcaaagrtttcaccacataaacagtactaaaaacaaaatccatataatcatctcgatagatgaagaaaaggctcttgataaaatccagcattccttccagataaaaagccttagcaaagtaggcagcaaaggaacatacctcaaaataacaaagccatctatttcaaacccacagtcaacattatacaaaatgggcgtcaactggaatctttccccttaagaactggagcaagacaatgatgcctactcttaccactcctattcaacattatactggaagtcctagtcggagagcataggcaagagaaataaataaaaggcacttaaataggaaaagaagttaaattatgtcattttactgattttctaggta

SEQ ID NO: 767354 - DNA, 682 bp, Homo sapiens
caaactagaaaatctagagaaaattggtaaattcctggaaacacaccacctgcaaagactgagtcaggaagaaataaaaaccctgaactgaccaatattgagttttgaaattgaatccaaaaaaaaaaaaaaaaaaaaacacctaccaaaaaaagagtctgggaccagaaggattcacagctgaattttaccagatatataaagaagatctggtaccaagcctactgaaactattccaaaaaacagaggtggaagaagccctctctaactcattatacaaagcaagcatcactctgataccaaaatctggcaaagatttcaccacataaacagtactaaaaacaaaatccatataatcatctcgatagatgaagaaaagsctcttgataaaatccagcattccttccagataaaaagccttagcaaagtaggcagcaaaggaacatacctcaaaataacaaagccatctatttcaaacccacagtcaacattatacaaaatgggcgtcaactggaatctttccccttaagaactggagcaagacaatgatgcctactcttaccactcctattcaacattatactggaagtcctagtcggagagcataggcaagagaaataaataaaaggcacttaaataggaaaagaagttaaattatgtcattttactgattttctaggta

SEQ ID NO: 767355 - DNA, 632 bp, Homo sapiens
cacgactgtcttagtccattttcacactgctataaagaattgcctgagactaagtaatttataaaagaaagagatttaattggcttactgttccccatggctgggaggcctcaggaaacttacaatcatggtggaaggggaaacaggtgcttcttacatggtggcaggagagagaggaagcaaaggggaaacagccccttataaaataatcatatctcatgagaactcactcactatcatgagaagagcactggggaaactgctcccatgatccaatcacctacaaccagatccttcccccaacacctggggataacaattcaagatgagatttgggcagggacaaagtcaaascatatcattctgcccctggtcccactcaaatctcacttcctcacatttcaaaaccaatcgtgccttttgaacagtctcccaaaatcttcactcattccagcattatctcaaaagttcaagttcaaagtgtcatctgagacaaactttcttctgcctatgagcctgtaaaatcaaaaacaagttagttacatccaagataggcaaggggtacagacattgggtaactgcttttactccactgagagaaactggcaaaaacaaagaggcaacagacccca

SEQ ID NO: 767356 - DNA, 658 bp, Homo sapiens
atattaattattccattataaagatacatgaacatgtatgttcattgtagcactattcacaatagcaaagacatggaattaacctacatgcccgtcagtgataaactggataaagaaaatgtgatgcaaatacaccatggaatactatgcagccataacaagaaatgagatcatkttctttgcagggacacggatgaagctggaagctattatcttcagtaaactaacgcaggaacagaaaaccaaacactgcatgttctcacttataagtgggaggtgaacaatgagaacacatggacacagagagggaacaacgcacactggggcctgtcaggggaaggcaggggtgggagagcattacaaaaaatagttaatgcatgctgggcttaatacctaggtgatgggttgtaggtgcagcaaaccaccatgtcacatgtttatgtaacaaacttgtgcatcctgaacatgtaccccagaacttataaaataaaacaaaataaaaaatagaaatacagcaaaactgccaacacaggcttttttttttttaactttttaagccgtgtgatctgcatttctataagtacgtttatttcatcataagtattaattgtgttgtaattaaaatctcaattataattttattgagaaatatctgaca

SEQ ID NO: 767357 - DNA, 612 bp, Homo sapiens
taggtgatgggttgtaggtgcagcaaaccaccatgtcacatgtttatgtaacaaacttgtgcatcctgaacatgtaccccagaacttataaaataaaacaaaataaaaaatagaaatacagcaaaactgccaacacaggcttttttttttttaactttttaagccgtgtgatctgcatttctataagtacgtttatttcatcataagtattaattgtgttgtaattaaaatctcaattataattttattgagaaatatctgacagaaacttgacaaaattgtgcatgtgaataaaatgtaaaaattttatrgacaacagatgttgaatagatgaatttaaaataatatatgaattcttattttaatatgattacatatcatcagtcgttcctgagtaaaagaattttcatactatcattttactattttaaacaaagatgactttttgttcatttgttgctaatatttaaaaattattttagcaccatgtctgtaactttatctcccttgaacaaatatctctatatatttttccttaaaaaagcttttttgagaaagctacaaagttattttagtgtggggaagggagtacatagagttcatcttattcta

SEQ ID NO: 767358 - DNA, 587 bp, Homo sapiens
aacccccataaaagacttctgtgcactcacaggctcaacatcaagtggaagctgccaaggcttggggcttgtaccctctgaagccacagcctaaagtctacattggcccctttcagccatggctggagcagctgggacrcagggtgccaagtccctaggctgctcacagcatgatgaccttgggcctggcccacaaaaccactttttttctcctaggtcaccaggcctgtgatggaaggggctgccatgaagacctctggcatgccttagagacattttccctattgtcttggggattaacattcatctcctcattacttatgcaaatttctgcagctgacttaaatttctcctcagaaaatgggattttcttttctatcacattttcaagccgcaaactttttgaacttttatgctctacttcctttataaaactgagtgactttaacagcacccacatcacatcttgaatgctttgctgcttagaaatttcttccatgagataccctatatcatctttctcaagttcaaagtcccacaaatctctaggcctggagcaaaatgccaccagtctctttgctaaaaca

SEQ ID NO: 767359 - DNA, 624 bp, Homo sapiens
aatacagttgcagcatacaaaatcaacatacaaaaatttgtagcatttctatatgccaacagggaacaatccaaaaaagaaattttaaaaaatcccatttacaatagccacacataaaattaaacatctaggaattgacttaaccaaagaagtaaaatatctctacaataaaaattattaaccactgatgaaagaatttgaaggggacacacacacacgcacacacacacaaatggaaagatatttcatgttcatgaattagaagagtcaataatgttaaaatgtccatactacccaaagcaatctacagatgcaatgcaatccctatcaaaataccaatgactttcttgacagaaatagaaaaaaaaaacttaaaatttatatggaaccataaaaaatccaaaagagccaaaactatcmtgagcaaaaagaacaaaactagaggaatcactttctctgacttctgattatacgacagaggtatagtaatcaaaacagcatgatactaacataaaataaacacattgaacaatggaattgaaaaaagaacccagaaacaaatccacacacctgcagtgaactcattttaaacaaagttgccaagaacatgcacttggaaaatga

SEQ ID NO: 767360 - DNA, 656 bp, Homo sapiens
gtggcacagtctcggctcactgtcacctggaacttctgggttcaagtgattcttccacctcagcctccagagtaactggaactaaaggcacacattaccttgcccagctaatttttatattttctttagagattgggtctcactttgtgcccaggctgttcccaaacttctgggctcaagygattctcccgcctctgtctctcaaattgctgagattaaattaaagatgagagccactatatccagcctttatttaattttttgagaaaaaagttaaaatacaatgcctgttgtggataacttatttttacatcattgaatttatgacccatattttaagatttaatattatgtgaaattgattttgatgccgttttgcatgcttgctttttttcatgcgtggtaaatgtagaaggtgcattttttcctaatgatgaactatttaacagtctataagatgtaatttgtttccgattggatcttagacatcgtaaatgttgtccatatgtacaatgcattgtatttacttagatagacactattggccttttgctctgaagggaattacagttctggcacagccgtttcattctttcaaggccagttttaaagcctttttaaggacatgtatgttgtagtctttacactagggctaa

SEQ ID NO: 767361 - DNA, 540 bp, Homo sapiens
ccatgttctggaatcctatgtaagagacaatcatccagaccattgtaacattgttctggaatcctatgtgagaaaaacaccttcaaaacacagcagtagtattctggagatctatgtgcgagacaaacatacagaccctcgaaacagtgttctggaatcctaggtaagggaaaaacatttagacccacatagcagtcttctggaatcgtacgtgaggaacaaacattccgaacccaacaacagtgttctggaatcttaagtgagggacaaacattcagaccacagcaggagtgttctggaatcccatgtgtgggagaataattgagacccttgtagcagtgttctcgaatcctatctgagggaaaaaaattcagaccccagtagcagtgttatggaatcctcwgtgagggagaaacactcagaacccagcagcagtgttctggaatcctatgtgttggacaatcattcagaccacagctggggtgttctggatccctaggtgtgggacaaacattcagaccctcgtagtaatgttctgga

SEQ ID NO: 767362 - DNA, 577 bp, Homo sapiens
cagaacacagcagtagtgttctgcggacctacgtgcgggacaaacatacagaccctcatagcagtgttctggaatcttatgtgagggaaaaacatttagacacacgtagcagtgttttggaatcgtacgtgagggtcaaacacmcagaacccgacagcagtgttctggaagcttaagtgagggacaaacattcagaccacaacaggagtgttctggaatcctatgtgagggagaataattaagatcctcatagcagagttctggaatcctatgtgagggagaaaaattcagatcccagtagcaatgttttggaatcctacgtaaaggagaaacactcagaacccagcagctgcgttctggaatcctatgtgagggacaatcattcacaccacatctgggatgttctgggtccctatgtgtgagacaaacattcagaccctcatagcaatgttatggaatactatgtgaggaagaacattcagaacacagcagcagtgttctggagtcctatgtgagggacagtcattcagaccccagttggggtgttttggatccctaggtgtgggacaaatattca

SEQ ID NO: 767363 - DNA, 670 bp, Homo sapiens
atactgtatgctgtacctggataaatttctcctggaaattagaaatttatagacacaaaagaagaagacaggcctcatggttacaccatctcacctgattccttattgtcatttgatttattcaattagctctatgtaaggcgagattaatggctcaaagccattatgcaaactagaattgtcctattactatttasttcataatttccctttttaaactgtgtatccattacttaagttttttttcaaaagttcaactcctaacagaataatgccggtacagcactttgagatgatagcaaaagactacaaaacagacaaaattgaacttaataatgaactccaggtagacttagcctgaaaactactcccttcaaatctcccttcttgctccaaatgtgcctaaaaggattttgacactgactcttaagtgccaattaaccccacctcaatgtgggacgagaccaaaaaccaaaataggtccatcctagcaccaagggccatcaaaacagaactaaaagatgattgatcagtgatgcttttggaaaaagatctggagcacaaaagggaggggaaacgtgaaatttgtctcaatcaaaatagagtcactagtgataacaaaattctgacagctcaagctggggaaggccatgaagagagcattctcatg

SEQ ID NO: 767364 - DNA, 658 bp, Homo sapiens
  misc_feature 627, 628, 629, 630, 631, 632, 633, 634, 635, 636, 637, 638,639, 640, 641, 642, 643, 644, 645, 646, 647, 648, 649, 650,651, 652, 653, 654, 655, 656, 657, 658: n = A,T,C or G
ttccttgtgggaaaaatatgagtggggggctacaagataaaaagctttttatcttgtagccatcttatttaggaaccaaaaggaggaggcaggttttcatgagtgagttcccagcttgatttttccctttagcttaatgagtttggagtcccaatctttattttcctttcacacttagaagaccaaatacaatgtggatgtaaatagttgtgttgtttaggaagtaatgacaagaaaaagtctgaatatgttcactacagatgcaagcgtctgattttatttcaaatattttgcatccaagtttgtttacatacacagatattaaaagtacagatacaaaaagstgagtgtacttacaaattaatagctctacacaggcagcataaaattctctttgtacatgccaaaaacattctgtgtctacccagggtgaatacagccacttcacaaacatggtgtaaataaggaggttcattaagtacaagaaagttacatgaccatattggcattttaacagccattcatgagaaagagaataggaaagggcttaagagtcatatgtatgaggaaaagaggaagacagatgacctcctacatcagaagatggagcagtgagaatacagaagnnnnnnnnnnnnnnnnnnnnnnnnnnnnnnnn

SEQ ID NO: 767365 - DNA, 658 bp, Homo sapiens
  misc_feature 627, 628, 629, 630, 631, 632, 633, 634, 635, 636, 637, 638,639, 640, 641, 642, 643, 644, 645, 646, 647, 648, 649, 650,651, 652, 653, 654, 655, 656, 657, 658: n = A,T,C or G
ttccttgtgggaaaaatatgagtggggggctacaagataaaaagctttttatcttgtagccatcttatttaggaaccaaaaggaggaggcaggttttcatgagtgagttcccagcttgatttttccctttagcttaatgagtttggagtcccaatctttattttcctttcacacttagaagaccaaatacaatgtggatgtaaatagttgtgttgtttaggaagtaatgacaagaaaaagtctgaatatgttcactacagatgcaagcgtctgattttatttcaaatattttgcatccaagtttgtttacatacacagatattaaaagtacagatacaaaaaggtgagtgtacttacaaattaatagctctacacaggcagcataaaattctctttgtacatgccaaaaacattctgtgtctacccagggtgaatacagccacttcacaaacatggtgtaaataaggaggttcaytaagtacaagaaagttacatgaccatattggcattttaacagccattcatgagaaagagaataggaaagggcttaagagtcatatgtatgaggaaaagaggaagacagatgacctcctacatcagaagatggagcagtgagaatacagaagnnnnnnnnnnnnnnnnnnnnnnnnnnnnnnnn

SEQ ID NO: 767366 - DNA, 519 bp, Homo sapiens
cctcacacgcaggcctgtccatctacttgctactgtcacactcttgccagcagaagaggcccctgtaatggccgatatcaccacccagtctatcctcaccccacagctgtgcagcgggaacctcctgctggcccacgtggttgccacagcccatgctggcacgacgctccagcaggtcggcgtccctgcgggccacactaccggtgacatggctagcatgaccctccttcctggcagtgacactgttgatgtgaaccccagtttcaaatctgtcatttrtaaatgggaccattttcccttttcgctctcccttccattcacagggcttttcattctctctgtttctgcctccgtttcagatatttactcacctttttctctctcactatgtctgccgtggtctccatgagactgcgccacataacattcccccattaaaggtcatgaattcagtggcttttagtatacctgtggttgtgcacattcaattttaattcgcaatccattgtaaaacgtctt

SEQ ID NO: 767367 - DNA, 544 bp, Homo sapiens
gtcaatagtctgaagttcaagcaagagggctagagatataaattggggagttgacatcatcatgggagcttgttaaaagcaaatgcctcagggctgccaaacttacctcttggctgtcaggtccctaatcctgatgattgtgttaaatgtttttgagaggctcggaagagccatggagagatctcagtgttccccaaattgctgcagctgcagcattatgaagctcaagtttaccacaatgcccttctcatcggggtcccactggaactccatgagtgtatgtgtgatcaattgcaattgctcaacggctggaatggttgacctctgggattacctttttcctgggcttccaggctgyccaagacccttgtaaatagacacattctttttagacaggttaaagccatactccagacctgggatccaacttgcttcttttcagtgactttgcatatctctaaactgaaacaagtgacaaagatttcatagtgtgatgtgagaatcctccaatttcatttcttttcatactctaggcacagcatgt

SEQ ID NO: 767368 - DNA, 634 bp, Homo sapiens
ttagctaatggaggggaaagaaaccttgaccaattaattgttaatgacttcagttttctaatgaacttcgccttcctcatctctaaaatgaagccaataatacctgcctgaagcactttggatgaccacgaaaatctaataggatggctatgtgaaagttctacagaaaggaataaagaatgtgtagtaatttcccttatctagattggatcatggatctaaattacagaaggaaggaaaactacaagtacacattactcaaaggttagagattaggcaaatcttgaagacagataattgacagaattgggcacagctcagaagggacttccaccagcattagcaacaggctattcttggggaaaaagcgacacctactgcatctaactatactgcaatggacccagaaaaccaaaagtcttcaaacttgtgttcaatgttagtcgggcacgagatccctacttcactattgcaaaaayaaaaaattagaaatagtcatattgtatttctccggaaaaatcacaatctcctttcatttaaaaataactgttgtttttcatattcaagtgtaatgcatattagttatagatatttaaagaacataaatatcctctaataacatcattatcaaacg

SEQ ID NO: 767369 - DNA, 529 bp, Homo sapiens; identical to SEQ ID NO: 752252

SEQ ID NO: 767370 - DNA, 503 bp, Homo sapiens
ccaaaccccctctcctccgagccttctctaatcagaaggagtcattggtttcccttttcaaaggagcctgtctacttggcctcatcccagggtcgagagtagctcaatgattaaattcagtgacagaatgtagcagctcttcctgctggaacctttccagactacttccaccacagccattaatttcttgaaattaatttttccttttatytaagcagtacacacatatctttaaaagttaatgacagaagtctcctatgaaaaaacagcagtctcctgccccatccactcctttattcttattaagtttttttctttgccgtttatctctatttttattctatttgatatgtgcgtatcattggtttgaggcatcaattttaaactttatcttttggctttctcatgaactacaagagatataactttctttctgttctgatttcagatttatattttttatatattatttcattatattattttatattataaaatgttat

SEQ ID NO: 767371 - DNA, 503 bp, Homo sapiens
ccaaaccccctctcctccgagccttctctaatcagaaggagtcattggtttcccttttcaaaggagcctgtctacttggcctcatcccagggtcgagagtagctcaatgattaaattcagtgacagaatgtagcagctcttcctgctggaacctttccagactacttccaccacagccattaatttcttgaaattaatttttccttttatctaagcagtacacacatatctttaaaagttaatgacagaagtctcctatgaaaaaacagcagtctcctgccccatccactcctttattcttattaagtttttttytttgccgtttatctctatttttattctatttgatatgtgcgtatcattggtttgaggcatcaattttaaactttatcttttggctttctcatgaactacaagagatataactttctttctgttctgatttcagatttatattttttatatattatttcattatattattttatattataaaatgttat

SEQ ID NO: 767372 - DNA, 609 bp, Homo sapiens
cagttctcggaagttgatctgtaatgggcactatttgggtactttgtacactgcaggggttctgagcacaagctttggaatccgagagacctgggttttagtcacaactcagctacaaactaactgtatgacctgagcaagttatttctccttcgagcctcagtttcactggccgacaatgtggctaacamcaccagtctttctgagattgagtttgatgtaaaaaatgtttagctcaatgcccacatcatatctagtagatgattatattttagggcattattattattattaagggcaactatgattagggaatttatgcttgcaaagtggtgttgtgccttccagggatactttgattctttcactctgaaagaaagagcagagaggacctacctgtggacaaccagacacaaattagggcccaaagcaaagaagggtccaggatggagttcggaacacagacagggagaggtcatttgaggtctaggagaaggacaccctaaagctatcccttgaaaaccatgagtctatgagcagaggatcccaggggctgccacttggtactgcagaaccacaggagctgggagctaagtggcctcctacagg

SEQ ID NO: 767373 - DNA, 601 bp, Homo sapiens
ttccacttaaggccccagcttctggaggtagatggagaaaacgagaagaattaggttgcatcaaaaatgaaacgtgggctttattttaacctcagaagacaaatcttactgtctgcacaccctgggctgcatgactgttagagctcttgaacgagggtctctgtctcccctggagcctccctcttagtgttcacacttagctccatgtgtaattaagcagatgctctttgacgctcaatttaaattatcaaatgtcaggacatgacactttatttgtgtatgttttccttgcttagcaattcaggcagtacctggggaagggaaatgtgtctgttcaactttagaaaagagcttcaccgtgtagctctatgacgtctgaaattctagtattagagggtcacttcttyggcatgttacttcttttcatgcaaattccccaggagaactctacagactcacttacttacctgatcagaggttgagctaataatatcttttcttgagatcaaaaagtgggagtggttataagaacgtgggttgcctaagaggtaggatggttctggtcctggtgctggagacaatagcagattccttttcaaca

SEQ ID NO: 767374 - DNA, 504 bp, Homo sapiens
cacttacttacctgatcagaggttgagctaataatatcttttcttgagatcaaaaagtgggagtggttataagaacgtgggttgcctaagaggtaggatggttctggtcctggtgctggagacaatagcagattccttttcaacagtcctgggagatcctgcttaaaaagtggggagtagggccgggcacggtggctcacacctgtaatcccagcactttgggaggccaaggcggacagatcacgaggtcaggagttcaagaccagcctggccaatacggtgaaagcccatctctactaaaaatacaaaaattagccaggcatagtggtgtgtgcctgtagtcccagctacttaggaggctgaggcagaagaatcgcttgaacccrggaggcagaggtggcagtgagccgagatcatactgttgcactccagcctgggtgacagggtgagactccatctcaaaaaaaaaaaaagtggggcgtagaggggatgaagggagaggaa

SEQ ID NO: 767375 - DNA, 616 bp, Homo sapiens
gctctgcttcccagtaacactgagtgcagaccagggagggtggcacagctagaagtgccaatttccctgtgtgactcttcttaccgacggggagcacttgatgggctaaacttggctgctgccccaacacctggcatgggctggacgcacacagagcagcctcgctgaatgagggacacgtgggtgaacacatggacttgcatgctttgcccagaggcatggttgttgtggggtcgtgactagctggcttcccagccatggtgtgtgagaggagggccttatgtcaaggccatgaccccagtgcccaccatgtccaccatcttctaaccagaagcagatctgagttctggcccgcatgcatgggtgtcaggrggagcctcatacccttgtttgtgtggccaggaaatgctctgcccaagctacctcctttgggctgggccagcacaattgcaagtaaagcatgctgggagctcccccagggcaagtcagaatcctggaggggacagggcagttgagggcaggggaaactgcaaagctggactcctgttggagcagccaggttgcccagagcaatgactgtggagccctgggggagctcgggatgtctccagggtct

SEQ ID NO: 767376 - DNA, 632 bp, Homo sapiens
aaacatgtgcttgatacagcaatggaggatccagcattgcacggctaagaagcagagctctcggcagcggaggggccttctctcccagggtcttttggccagtcctcaatccaggtgagggaactgtagagccctaagggagcctacttattctgaagacaagtgggaagtttagtggcaaaagttctggttggctccttccatgaagtgcatgccagaggagtagcccaggcatctgaaggaagggcatacacacactcatccaagcacccatatgtttggaggacaagatgccgggctgtctggctcaatccactgctgaattatttaacacatatttgtgtctggggctgatatggtttggctgtgtccccacccagatctcatcttgtagctcccataattcctacatgttgtgggagggaaccaatgggagataattgaatcatgagagcagtttcccccatactgttctcttggtagtaaatamgtctcacgagatctgatggttttataaggggtttccccttttgcttggctctcattctctcttgcctgtcaccatgtaagacgtgccttttaccttctgccatgattgtgaggcctccccagccatgtggaactgtgtgtcc

SEQ ID NO: 767377 - DNA, 498 bp, Homo sapiens
gaaaaactgtttattatctagctcttgtctatctcgtatgtttatggttcaaggatgtgctatttattaactgcctccctcaagttataaatcttacactcacacaaaggcataggggtacattagcttcaaactatctcctatatccattgatctaaacagacatggggaaaatcaaattaactcaaacctcttatctaaatcaaagtctgccaagtctgaagggggaaaaaaattgttttggggggatgtgaaaaaaaaaatagcaagaaagatgctgtctttctagaagcaacccaaacccaaatccctggacaaytctctggctatcttttccttaggtagtgggagttaaggagacagtcctgacaggagcctgcataacacaaatcaagaaattatcctcacagccaaggctggtgacaccattccttaacctggcggaggggagcttttcaaggcttatgaaccaggatcatattattccatgtctctgaa

SEQ ID NO: 767378 - DNA, 597 bp, Homo sapiens
tgattatactgtaagacttatatagtagatggcccttcatttagggaagtagtatatacaccagaatatgccttttctttttaagatttaaacaacggaaaaagccactgaagtatgtatagtatctgtgcgccgagatacacaggaaagcatggaacatgtggatggaaggaaccgggatcatctcatccagctgagtaataagtacgtttggtgcagtgccacacaggaggccaccracagagcccagagtagtaactaggttgcttcactcttagcctctcaagtgatgacaccaaggtgagaacttctttcactaaaaggcttaatcttttaaataactgaaccagaaagtcgtttctaacaagaatacagataaacattacaaagaacaaagaaaagatatgttcaaaatctgtcaggttccaacaagggttactttttccctgaagagagaagatgaaccattgcctagaagtaatgtgtagctgactgtcccgtggttctatgtctgagtaacacagtctcatctctcatgtgtatgtgtgcatatatacatgtatatgactatagtggtatcagcaatcatgtatattt

SEQ ID NO: 767379 - DNA, 634 bp, Homo sapiens
ttaattataatcataatttggtaaagccctagtgaatttttagtttcaagacttaatggtttttttttcttttttaaaattacatttgaaatgagggctttcatatactataccttttatatcacgaatgatggttaattttaaatagcacttacagtataaacttacatttttcaatagatgtctaaacaccatttcctatttacattgcttagtttatctccagtatagttaaakattaagccattgtaacttgacaggtaaaatataaacatgattaggaataaaaatgtcctccacaagggaaactgaaacttattgcttgataagtgtcctttggtttataaaaagtagaaatgaagtatatatcctggaggcatgtgaaatcattgaccgctttgcacaaaggctaaatagaatattagtagaatattcagtaataataggacttgaactgctgtttttctctgtatgttaaaataatttttcaaagaaatacaaggttaggctatgaacaatttatgattttattaaaatcatagaaaggactacttatcttcatatttgagaagtttatatcattgtgcttttacttagttttcagcatatttgcttcccctcattttaaagtaaa

SEQ ID NO: 767380 - DNA, 624 bp, Homo sapiens
gcccagatgaaccaatgacaaatttggaattaaaaatatctgcctctctaaaacaagctcttgataaactgtcatcagggaatgaagaagaaagaagaagacaatgatgaaattaagactgggacctcatgtaagaatagagggtgttcaaagacatattggggtctagaaagtctagaagaagtctgtgtatatcattctggagtacctattttccatgagggaatgaaatacctaagctgttgtagaagaaaaacttctgattttaatacattcttagcccaagagggctgtacaacagggaaacacatgtggactaaaaaggatgctggggaaaaagttgttccatgtagacataactggcatcagactggaggtgaagttaccatttcaacatatgctaaagattcacagaacttagttgagtagaagcaaatagcacattgttaaatgtgcayattgtatttgaaggagagaaggaatttgatcaaaatgtgaaaatatggggtgtgattgatgtaaagtgaagttatgtaactacgactgcaacaaagattgagatcactatgagaaaagctgagccgatgcagtgggcaagccttgaactccctgcagcgaaaaagc

SEQ ID NO: 767381 - DNA, 572 bp, Homo sapiens
tgaagagctcttgggcagagactatgatacaggatattctagatacaggatcgtgtcatctgcaaacagatagtttgaattcctttcttcctctttggatgtcctttatttctttctcttgcctgattgctctggccaggacttccaatactcattgaattgtgccagtcttcaaggggaatgtttccaacttgtgtccatttastatgttgttggctgtgggtttgtcatagatgactcttactattttgaggtatgttccttcaatacctagtttattgagaatttttaacctgaaaagacgttgaattttattgaaagacttttatacacctattgagataatcatgtggtttttgtctttagttctgtttatgtgatgaaacacatttattgattgtgtatggtgaaccaaccttgcgtcccagggataaagctgacttgatcatggtggattagctttttgatgtgctgcaggattcgatttgccaatattttggtaaggatttttgcattaatgttcaccaagtatattggcctaaagttttctttttctgttctgtctctgtcaa

SEQ ID NO: 767382 - DNA, 572 bp, Homo sapiens
tgaagagctcttgggcagagactatgatacaggatattctagatacaggatcgtgtcatctgcaaacagatagtttgaattcctttcttcctctttggatgtcctttatttctttctcttgcctgattgctctggccaggacttccaatactcattgaattgtgccagtcttcaaggggaatgtttccaacttgtgtccatttagtatgttgttggctgtgggtttgtcatagatgactcttaytattttgaggtatgttccttcaatacctagtttattgagaatttttaacctgaaaagacgttgaattttattgaaagacttttatacacctattgagataatcatgtggtttttgtctttagttctgtttatgtgatgaaacacatttattgattgtgtatggtgaaccaaccttgcgtcccagggataaagctgacttgatcatggtggattagctttttgatgtgctgcaggattcgatttgccaatattttggtaaggatttttgcattaatgttcaccaagtatattggcctaaagttttctttttctgttctgtctctgtcaa

SEQ ID NO: 767383 - DNA, 586 bp, Homo sapiens
ggctcctgcttctaccctgggcctcttttttttttttttttttttttgagacggactttcgctctgttgcccaggctggagtgcaatggcgcaatctcggctcatcgcaagctctgcctccagggttcacccattctcccacctcagcctccggagtagctgggactacaggccccctccaccacgcccggstaattttgtttttgtatttttagtagagacggggtttcaccctgttagccaggagggtctcgatctcctgacctcgtgatccgcccacctcggcctctcaaagtgttggtattacagggcccagggcctcttattttcaatactttgggcaatccttctaaaacctgtcatatcattaaaagccataaaaacctattacagtttaccaggttctacagatctgccccacacactcctctgactctttgacattcatcctatacccccgtcttgaccattctattttttttgagacagggtctcactgtcacccaggctggagtgcagtggctcaatcaaggctcactgcagcctcgactcacttcccaggctcaggcaattctcccacccaagt

SEQ ID NO: 767384 - DNA, 597 bp, Homo sapiens
gaatttctggccagggcaatcagtcaagagaaagaaataaaggatattcaaatgggaaaagaggaagtcatttttctctgtttgcagatgacatgattgtatatttagaaaaccccattgtctcagcccaaaacctccttaagctgataagcaacttcagcaaagtctcaggatacaaaatcaatgtgtaaaaatcacaagcattcctacagagcaataacagacaaacagagagccaaatcatgagtgaactcccattcacaattgcttcaaagagaataaaatacttaggaatccaacttataagggacatgaaggacctcttcaargagaactacaaatcactgctcaaggaaataagagaggacacaaaaaaatagaaaaacattccatgctcatggataggaagaatcaatatcgtgaaaatggccataatgctgtaagtaattgatagattgaatactatccccatcaagctaccattgactttcttcacggaattggaaaaaaactactttaaacttcctatggaaacaaaaaagagcccacatagccaagacagtcctgggcaagaaaaacaaatctggaggcatcacg

SEQ ID NO: 767385 - DNA, 606 bp, Homo sapiens
ccatctgaagattcctccagcttacttcctttacccttgctagacattttcctctattaatattctgctggtggagtatagattttcttaacctctaccattggccaacccaagaactggcacaaaaagcacgttastggtgtggccacagtagcagagatggagattagatacaggctgggagaatggactcccacttgtgaagttaattgtacttctcaacacctagccacttagcaacaaagacaaatgctgagtagctaatatggcattattaattgagtagacaaaaaaaaaaagcttgttaataagttgaattcattgggaattttccacctgaaaggtttaacattttattctcaggagatagatatctattctggctcagggtttacaatttcagtccacaaatgttcacccaacaccattttccatctgattctcaaatttctaattcacaggtatggaacctcatacagtatagcatctaaccagggacccacctgactgtgaataaagtgcaggatggtaatgatttgcatagtgtctggaataacagacattcaacaattatttgctaaattaatgaattatgtcttttttatt

SEQ ID NO: 767386 - DNA, 602 bp, Homo sapiens
caaagagttgtaatacacattaaaggtcttggctatttgatttactttgtttaatccagcatttacgaaacagtttttagcatgtgacacaatgactattggcatacccactagaattctgtgaaacagaacataagggagcatagcgtcaactggatggcacacagagttagcagtaggaccttgagttctatatgtagactgacagttgactttctagcaacatatctagcrttggtaattcagtaaataatttcaatggtgttgcattcgttaatctcctgctatgtagtatcttttattttttaataacgtttatttttttcaaaaaagttgatactgaatacattgcctatcaatttatttatttttttaagagtcagagtctcactctgtcacccaggctggtgtgcagtggtgttatcatgattcactgcagcctccaaatccttggttcaagcgattctcctgcctcaccttcctcagcagctaggaccacaggtgtgaaccaccatatccagattatcatcttataatgtagaaaaaaattgttaatacttgagaggtagaatgggttagtgggaaaaaagatgtatttagtt

SEQ ID NO: 767387 - DNA, 647 bp, Homo sapiens
gtgaaaatatgaatagttaaaacatcttgaaatatcttattctgctatcttttcatctctctttcaagtcttaatgtctttcagaaaatccaggcatgcttctagaaagttagaatcttgagtgctttttaaaatagaatattatttgaatctcagtttctatttcttagtaaaatcctatgtcaacaagtatatatttattgcctactatatcccaggcagtttatgaagggctatgagatgtacagaattaagagagattcatagctccaactctgtcttttattgtatcattttgttccagtacactttcatataaattgatgatattagattgaataattgctaaaatattgctctaaaatcttatgatgttgacctaccaaattgttagtaaagaataccatggtgattaaagatagtcacagattctttgctatttactcaccaagagaaagtgtttatttcctctctcctgcagtcagggccagccctgtgatgctyggcctattggaggtgggaaaagtgatgctgtgccagttccaggtctaaggcttagggacacctggctgtttctgtgtttgtgcttcttgggaacccgagtcttaattgttgaaattgtttaatcacatggagatgtaagaaat

SEQ ID NO: 767388 - DNA, 617 bp, Homo sapiens
tgagccaaggtctggaatcagggaccccagaaacacacttggcactctacctcactgtggctgagctgctacccagactgcaagaaaaagtcttctatactcttccctctcttttcctcagtcagtccctcagtcccactgatggaaatatggtgggtcatacctgaaaccagcacagcactgggtctcattaaagaccacagggagttctgtcagactaacactaatatttattcaaggctcaagaagcctttagtcagaaggcggtgaatccagccatgactggatctttcctttcaaaggcagtgggttctgttctggaccagagggggtcaagaaatgttgcccaggaactagggcctgaaatgggggttgtgggtagcctcagaactctgcctggtgctctattctactctggctgaggaggtattcaagttgcaagacaaagtcctctttwctcttctctcttgtcccctcaagtggaagtaaaaagtctctcctggagctgagaactgtgctgcctgggttttttgggagctgggacgcaagtactcctttggccactccagctgtctcactagatcacaggcaccctatgtccatgtcccctggcccca

SEQ ID NO: 767389 - DNA, 704 bp, Homo sapiens
aagggtgtttgcatattttgaatacaaaactttattagatatgtgttttgcagatatttttcccagtctgtggcttgtcttattctcttaagatgcatttttaagtgtatctttaaaggtattctgtcacccagatcagtgcatatggtgtatgagagactgagaaatgtccactcctaggtctttccttcactattattgaaaactaattattggatatacagaaaaagttctgggagcaactctaataaattacttacttgactttatatcatgcaacattcaaaataygtatgtgtacattacttttttgttgcagggttaatttttcatattttacagcgttagtttcacacattttacaaagtcacatggctaagtgaacctcctaggatcagcacccaggttttctgactcctagtctgagacactttccaaatccatcccattgactgttatcatcaagactttgtatttgactttttttattcttactcacatatttgtgttcagaggaaggcttaggtttccaatcttatgagcaacatacaaatcttaaattattggcataaattctatattgttttggttgcaaatgacagaacccaactcaaattggcttaaacacaaaagagggaattagtgaactaaggttactgaaagtccaaggactggatggatccaataagctaatcaatacttat

SEQ ID NO: 767390 - DNA, 704 bp, Homo sapiens
aagggtgtttgcatattttgaatacaaaactttattagatatgtgttttgcagatatttttcccagtctgtggcttgtcttattctcttaagatgcatttttaagtgtatctttaaaggtattctgtcacccagatcagtgcatatggtgtatgagagactgagaaatgtccactcctaggtctttccttcactattattgaaaactaattattggatatacagaaaaagttctgggagcaactctaataaattacttacttgactttatatcatgcaacattcaaaatacgtatgtgtacattacttttttgttgcagggttaatttttcatattttacagcgttagtttcacacattttacaaagtcacatggctaagtgaacctcctaggatcagcacccaggttttctgactcctagtctgagacactttccaaatccatcccattgactgttatcatcaagactttgtatttgactttttttattcttactcacatatttgtgttcrgaggaaggcttaggtttccaatcttatgagcaacatacaaatcttaaattattggcataaattctatattgttttggttgcaaatgacagaacccaactcaaattggcttaaacacaaaagagggaattagtgaactaaggttactgaaagtccaaggactggatggatccaataagctaatcaatacttat

SEQ ID NO: 767391 - DNA, 704 bp, Homo sapiens
aagggtgtttgcatattttgaatacaaaactttattagatatgtgttttgcagatatttttcccagtctgtggcttgtcttattctcttaagatgcatttttaagtgtatctttaaaggtattctgtcacccagatcagtgcatatggtgtatgagagactgagaaatgtccactcctaggtctttccttcactattattgaaaactaattattggatatacagaaaaagttctgggagcaactctaataaattacttacttgactttatatcatgcaacattcaaaatacgtatgtgtacattacttttttgttgcagggttaatttttcatattttacagcgttagtttcacacattttacaaagtcacatggctaagtgaacctcctaggatcagcacccaggttttctgactcctagtctgagacactttccaaatccatcccattgactgttatcatcaagactttgtatttgactttttttattcttactcacatatttgtgttcagaggaaggcttaggtttccaatcttatgagcaacatacaaatcttaaattatyggcataaattctatattgttttggttgcaaatgacagaacccaactcaaattggcttaaacacaaaagagggaattagtgaactaaggttactgaaagtccaaggactggatggatccaataagctaatcaatacttat

SEQ ID NO: 767392 - DNA, 581 bp, Homo sapiens
  misc_feature 408, 474: n = A,T,C or G
tgctatttatataaattttaaaaacatgcaaaacttgacttatactactcatggataaatacttatgtctgcagattcataagtcaagtataaaatgtgcaaaaataattataaacaccaaatttagagcaatggcttctggggggaaagaatactcaaggatcatagattttaaaaagccaaaaaacttcagtacctgtttcattttctttctttaaaaagtgatatgagsctgggcgcggtggctcatgcctgtaattccagcactttggaaggccgaggtgggcggatcacctgaggtcaggagttcgagaccagcctagccaacatggtgaaaccccatctctactaaaaatacaaaaattagccaggcgtggtggcatgtgcctgtaatcccagctactcagnaggctaaggcggagaatcgcttgaactcaagaggcagaagttgcagtgaaccacggcactccagcntgggtgacggagcgagagtctatctcaaagaaaaaaaaaagtgaaatggcaaaaaaaagagaaagatttaagaagccgcagtgagttcagtgttccctacttttgct

SEQ ID NO: 767393 - DNA, 632 bp, Homo sapiens
caattatatatgcttttgtctaggtgtattctcttgatggttattccaaaataattgtattacagctgctcacagttgaaagttgctagaagttaaattgctccctttcagtttccaattttgggggagatcactaaattaagctgaatacttaactgattttttttataagcaattgccaattacttcaggaatcaccatcactgatataaaatgttttgatattgttgtttttaactaagtttctctttcatggaatggaaaaaatcccagggcactatgtggtcattctagagaaggaaagctaacataaggaatttttgattctgtatgaaaagtaattgaggaggagagaaatggagggtgaattccatccygggaaagtggcctgaaggcagagttcatatcagaggcttcatcaaggagatgacccaaaggaaattcacagtcttaaccctctccttaaggacagaggaaagaaaagtaagtaggaggagagcatgagtgctgttttaaaaaaatacgtatgcctttgattttctcttttaaactttgggacacgaaaaattgccaacaggaataagaattctgattcaaatatgaccatagaagttatgatttattttgaagtc

SEQ ID NO: 767394 - DNA, 645 bp, Homo sapiens
taatcgctttgagcaacactgaaaacaatagaaaaatgtaaaagcctagaagtactaatttttaatgaaacagaagctggttaaaatgaaacacaatatacaatcctccataattgcatgagccaattccttataataaatctctatctatacaaaaaaaagaaaaaatgcaataaatgcaaggaaaacacactgagactcctcaaaagggtgctcagagcaggaaaagtgaaccaagaagtttacctggaaaagaacaggttraggaaaggatgaagaaggttaattcagtctgtgagagggattgaagtttggggaagaaataatctaaaaaattattccaagtcatttggaatctgagaccccaggccttaagcaactaatgtggccatggaaatcagttatgatttgaactcacgagttatttctgaaatgtacgaagaagacctattttcctcaaggatgagggaatccatatcaggaatgaaataagacacaaaaatgtgttaggtcatgaagttctatcaccacaagaagcctgcatgtgacattgtgaggtttgggcacttgccctggaaatcctcacactatggaaaagtagatttgttcactgtaaatatctggctggtggatgacatgctcatg

SEQ ID NO: 767395 - DNA, 621 bp, Homo sapiens
taagttcagcctaaaagtttctccatatatagtgaatcttaacctaactggatgtccaagcagacttgtaaaccacagcagatcagttttagtcaatcacaggcagccaactgtttaaatcctgttcaaaaaggcaaaagcaaagctgtaaccaatccccctgtttctgtacctcacttctcttttctgtatggcactttcctttttctgcccataaatgttatctgacmatgtggtagccccaggagttcctctaaacctattcttgttagggcagtgttgatcaagtggggaggggtgctgcctgattcaagattgttctttgctcaataaaactctgttagactgggctcagtcgctcatgcctgtaatcctagcactgtgggaggcccaagtgggtggatcacctgaggtcaggagtttgagaccagcctggccaacatggtgaaacccagtctccactaaaaatacaaaaactagccgggcgtggtggcgcatgcttgtagtcccagctatccagaggctgagcaagactccacccccgttcccccccaaaaaactctgttaaatttaatttgtccaaagtttttcttttaacaatagtaaatttagttgttcatg

SEQ ID NO: 767396 - DNA, 628 bp, Homo sapiens
ttcaagattgttctttgctcaataaaactctgttagactgggctcagtcgctcatgcctgtaatcctagcactgtgggaggcccaagtgggtggatcacctgaggtcaggagtttgagaccagcctggccaacatggtgaaacccagtctccactaaaaatacaaaaactagccgggcgtggtggcgcatgcttgtagtcccagctatccagaggctgagcaagactccacccccgttcccccccaaaaaactctgttaaatttaatttgtccaaagtttttcttttaacaatagtaaatttagttgttcatgaaaaatggctctgacacacccaaataaaggaaaccgaatytagacattagggatgctttaactaattggcaagctagctaatttggcttaatgagttctttgcctagtactttgtttcacacttttttttttttttttttttgagacagagtttccccctgtcgcctaggctggagtgcagtggtgcaatctcagtggctcactaaaacatccacctcccgggttcaagtgattcttctgcctcagcctctcaagtagctgggattacaggcgtgggccatcacacacagctaatttttgtatttttagtagaga

SEQ ID NO: 767397 - DNA, 606 bp, Homo sapiens; identical to SEQ ID NO: 742225

SEQ ID NO: 767398 - DNA, 600 bp, Homo sapiens
actctcatatttgctgcagtactgttcacaatcgccaagatttgaaagcaacctaagtgtctatcaacagacgaatggataaagaaaatgtggtacatatacacaatggagtagcattcagcatgaacaggaataagatcttgtcatttgaaacgacataaatggatctggaggtcattatgctaagtgaaataggccaggcacagaaagactaacttcacatattctcacttatttgtgagatctaaaattcaaaacaattgaactcatggagatagagagtagaaggatgtttgccagaggctgaaaagggcagtgggagggtgagggctgggaggtggakatggttaatgggttaaaaaaaatatacaaagaatgaataagacagaatgaatataacaaacagggtaccatagtcaataataatttgattgtacatttaaaaataactaaaagagtataattgtttgtaacacaaaggatatatgcttgaggtgatagatacttcattttccatgtgattattatgcattacctgcctatataaaaacatctcatgtacctcataaatatgtacacctactatgtagtcacaagtta

SEQ ID NO: 767399 - DNA, 670 bp, Homo sapiens
accagggcggggacagctggctcactggccttgccctcattgtctctcatcttttagcaggctagaatgaccttgtcatagagtaaaagtacacaaggcctcttgaagcctaggcccaaaactagcacaattttgcttttgtcatcacattcaatttttcaggcaattsacagaaccatcccagtttcaagtgtaagggaagtaatcttcatctcctgatgggagttgctacaaagccacatggcatagagccctggtacagagaagagaataatggcaacacttttccaaatgatttatcacattaggcaagtaaaaagtgtgtggtatgaaataataataatcatagctgatgttattgcagccttactttgttctaggtcctatgttaagtgttttataagcattagtttattgcattctgtaaaaatctctctgagataggtattattattactattctctccatgtttcaagtgggaaaaccaggcttaaagaggttaagaaatagaggtatactaagtaaatatggcaaactaatgaataccacattcttctcctggggttattggagaagtcaggtaagtcttatggacaacaataagaataatcccaaaaggctatgtgaacattcagtttaaaattgttagaccttggaactaggtagagc

SEQ ID NO: 767400 - DNA, 564 bp, Homo sapiens
tggaagtaaaacactcctcagcaaatgcaaaacaactgaaatcataacaaacagtctctgagaccacagagcaatgaaattagaacttaggattcagaaaatcactcaaaactgcacaactacatggaaactgaacaacttgctcctgaatgactactgggtaaataacaaaattaaggcagaaataaataagttctttgaaaccaatgagaagaaagacacaatgtaccagaagctctgggacacagctaaagcmgcgtttagaaggaaacttatagcactaaatgtccacaagagaaagcaggaaagatctaaatttgacacattaacttcacaattaaaacaactagagaagcaagagcaaacaaattcaaaagctagcagaagacaagaaataactaagaacagaggagaactgaaggagatagagacataaaacatccttaaaaaaaaaaatctatgaatccaggagctgtttttttgaaaagatcaacaaaatagactgctagctagactaataaagaagaaaagagagaagaatcaaatagatgcaataaaaatgat

SEQ ID NO: 767401 - DNA, 564 bp, Homo sapiens
tggaagtaaaacactcctcagcaaatgcaaaacaactgaaatcataacaaacagtctctgagaccacagagcaatgaaattagaacttaggattcagaaaatcactcaaaactgcacaactacatggaaactgaacaacttgctcctgaatgactactgggtaaataacaaaattaaggcagaaataaataagttctttgaaaccaatgagaagaaagacacaatgtaccagaagctctgggacacagctaaagcascgtttagaaggaaacttatagcactaaatgtccacaagagaaagcaggaaagatctaaatttgacacattaacttcacaattaaaacaactagagaagcaagagcaaacaaattcaaaagctagcagaagacaagaaataactaagaacagaggagaactgaaggagatagagacataaaacatccttaaaaaaaaaaatctatgaatccaggagctgtttttttgaaaagatcaacaaaatagactgctagctagactaataaagaagaaaagagagaagaatcaaatagatgcaataaaaatgat

SEQ ID NO: 767402 - DNA, 517 bp, Homo sapiens
cttaaatacttcctctaaatgtaaagaaaaaaaaaaaaagaaaagaaaagaaaaaaagaatgctggctaatagaaaaattgtccgaggtctgtgggagtttcaagttaagatacccataacaaatgtgtctgtcactgggtttaagacactgttattcagtttttgaaatagtatccatgaaataaaaacaaaaaaacagaacaaaacaaaaaaccttcagcccaaaatatacaacaagtcttccagattggaggaggaattaaagaattcctgtaatggaagcaatgtcatagaaatccttactgatacttatcatcttccygcattaccctaacattgtaaaagaaaacattcctcacaagctgtttcttgatcagccttgttgcagtaagttccatctatgtaataagttccatctctgtcaatctgggcagcagcttttgctgtgagcttgggcttcaagtctcagagcagggctcacaacttacattactgtatcattcccctacttacact

SEQ ID NO: 767403 - DNA, 614 bp, Homo sapiens
gctggtgtcaaactcctgggcccaagtgatctgcctgccccggcttcccaaagtgctgggattacaggcatgagccactacagccagccccttatagttcttataataattaaattttaaataatttatatttttaccaagattttattatgacatcttaactttagttgagtacagctgacataaagctgtcactatgtttaagccactcttaattgctttcttttttgtactcacatattaacagtttctggtaagttctatttaacttccaagtggaaactcatgtcatttgctcataattatttttctcctcttgtttaataggtaaatcccttatttttgagccttattgtattttcatataattcagaagaattttaaaataatgttatagataagggttaagccagaatccttgccttattcttgtttttaatgggmatatatctaacaatacatccttagaatatgaggaactgatttttaaatgaagttgacaaagttaacagagacttcccaaatgtctcaagacttacttgtatacacatgcacacacacatggtttaacttaggagttttaaatgttttataaagaaatatgagatgtgtag

SEQ ID NO: 767404 - DNA, 672 bp, Homo sapiens
agggaaagcttttctttaaagtggaatgccaactaataaatttagaaggaaataggccgggtgtggtggctcacacctgtaatcccagcacttcaagaggccaacgtgggcggatcacctgaggtcaagagtttgagaccaacttggccaacatggtgaaatcccatgtctactaaaaaaaaaaaacacacaaaamttagctgggcttagcgggcacctgtaatcccagctactcaggaggctgaggcaggagaatcgcttgaacctgggaggtggaggttgcagtgagctaatatcgtgccactgcactccagcctggatgacagagcaagattcggtttcaaaaatgaataaatataaataaataaatttagaaggaaacaaatagaaaaaaacattttgcaagtccacagcaataactgactcaggtacaaatccatgaatgttaaaccattgaatgaaaacttgatgaggagcagaataatattcacatattcacaaaggatcttcctacatatttgttatagtttgccaaggggtaaaatagtgccttcacaatggagtgctctgggagtatcatctttgacaagtgatcaaagtgaacattttcaataataggacaaaccgacatcgtgtgcctcctggtacaacaagctgaaaagaacaccgcat

SEQ ID NO: 767405 - DNA, 556 bp, Homo sapiens
tacgacatacattccgtacacattgcaggatgccctttgctcttctcctttggctcaaacctcatttcttcaaagagatgtttccttgccatgaaattaagttattcccccattccaatagccctctctacaaatcccctattgcatcattttcatcacagttgccaccatttagtgtgaatcatttatttcttgattggttgcttccctgacagagctgggaaataatgaagacttatttgtttatttatttttgagatggagtcttgctctgttgcccaggctggagtacagtggcaagatctcagcttactccatgcaacctccgcctcctgggttcaagcaagtatccygcctcagcctcccgagtagctgggattacaggtgcccgcaaccacgcccggctaatttttgtaattttaatagagacgcggttttgccatgttgaccaggctggtctcgaactcctgacctcaagtgatccacctgccccagcctcccaaagtgctgggattacaggcatgagccactgcacccagccagagatttattctta

SEQ ID NO: 767406 - DNA, 569 bp, Homo sapiens
tcattgtcataccaggaaacgagcttgacaaagtggccatcgagggcagtgccagccccagcattgaaggtggaagagtaggtgtgggtgtcgctgttgaagtcagaggagaccacctggtgctcgtgtagcccaggatgcccttgagggggcgttggatgcctgctttactaccttcttgatgtcattgtatttggcaggtttttccagatggcatgtcrggtccatgaccaacacattggcagtgaggacacagaatcccatgccagtaagcttcctgttcagctcagggatgaccttgcccacagctttggcagtgccagtagaggcagggatgatgttctggagagctccacggccgttatgccagtttcccggaggggccatccacaatcttctgggtggcagtgatagcatggactgtggtcatgggtccttccacgataccaaagttgtggatgacgttggccaggggcgctaagcagttggtgatgcaggaggcattgctgacgatcttgaggctgttgtcatacttctcgtggttcacatccatcacgaacatgggggca

SEQ ID NO: 767407 - DNA, 653 bp, Homo sapiens
agaagcttctgaggatgcttctgtctagatgtcatgtgaagatatacccgtttcgatcgaaggacacagagtggtccaaatatccacttgtagatcctgcaaaaagagtgtttcaaacgtgaactttgaaaggaaagttcaactcggggatttgaatgcaaacatcacaaagaagattctgagactgcttctgtttagtcagctgaaattatcccgtttccaacgaattcctcacagaggtccaaatatgcacttgcagattctgcagaaagtgtgtttctaaactgctacatcgcaaggaatgctcagctctgtgagttcaactcaatcatcccaaagaattttctgagaaagcttctgtcttctttttataggaagttatttcctttactacggtactcctcaaagagtgcaatkatccccttgcagtttctacaaaaagagtgtttcaaacctgaactatcaaagaaaggttccacactgtgagttgaatgcagacatcacgaagaaggttctgagaatgcttctgtttagttctgtgcagtttatcccgtttccaacgaaatcctcagagaggaccaaatatccacttgcagtttctacaaaaagagtgtttcaaagctgaactatcaaataaaggttcagcactgtga

SEQ ID NO: 767408 - DNA, 624 bp, Homo sapiens
acttgcagtttctgcagaaagaccgtttcaaacctgaactatcaaagaaaggttcaacactgtgagttgaatgcaaacatcacgaagaaggttctgagaatgcttctgtttagttctgtgcggtttatcccgtttccaacgaaatcctcagagaggcctmaatatccacttgcacattctacaaatagtgtgtttcgaaactgctccatccaaaggaatgttcagctctgtgagttaaactcagtcgtcaccaagagttttctgtgaatgctactgtctagcttttatatgaagctatttcctttactaccataggcctcaaagcggtccatatctccacttgcagattctacacaaagagagtttccaaactgctctgtcaaagggaatgttcaactctgtgacttgaatgcaatcatcacaaagtagtttctgagaatgcttctatctagcttttacgggaagataattccttttccaccacaggcctcaaagccctccaaatgtccacttgcagattctggaaaaagagtgtttcaaagcttctctctcgaaaggaaagttcaactctgtgagttgaatgcaagcatcacaaagaagtttctgagaatgcttctgtttagc

SEQ ID NO: 767409 - DNA, 631 bp, Homo sapiens
cagctctgtgagttaaactcagtcgtcaccaagagttttctgtgaatgctactgtctagcttttatatgaagctatttcctttactaccataggcctcaaagcggtccatatctccacttgcagattctacacaaagagagtttccaaactgctctgtcaaagggaatgttcaactctgtgacttgaatgcaatcatcacaaagtagtttctgagaatgcttctatctagctttwacgggaagataattccttttccaccacaggcctcaaagccctccaaatgtccacttgcagattctggaaaaagagtgtttcaaagcttctctctcgaaaggaaagttcaactctgtgagttgaatgcaagcatcacaaagaagtttctgagaatgcttctgtttagctttcctgtgaagattctcccgtttccaacgaaatcttcaaaataggtccaaatatccacttgcagattccacagaaagagtgattggaaactgctctttgaaaaggaaccttcaactctgtgagttgaatgcaatcatcacaaagaagtttctgacaatgcttctctccagtttttatgtgaccataattcgttttccaccacaggcctgaaagcgctccaaatgtcca

SEQ ID NO: 767410 - DNA, 605 bp, Homo sapiens
tactgtctagcttttatatgaagctatttcctttactaccataggcctcaaagcggtccatatctccacttgcagattctacacaaagagagtttccaaactgctctgtcaaagggaatgttcaactctgtgacttgaatgcaatcatcacaaagtagtttctgagaatgcttctatctagcttttacgggaagataattccttttccaccacaggcctcaaagccctccaaatgtccacttgcagattctggaaaaagagtgtttcaaagcttctctctcgaaaggaaagttcaactctgtgagttgaatgcaagcatcacaaagaagtttctgakaatgcttctgtttagctttcctgtgaagattctcccgtttccaacgaaatcttcaaaataggtccaaatatccacttgcagattccacagaaagagtgattggaaactgctctttgaaaaggaaccttcaactctgtgagttgaatgcaatcatcacaaagaagtttctgacaatgcttctctccagtttttatgtgaccataattcgttttccaccacaggcctgaaagcgctccaaatgtccacttgtagacactacgaaaagcat

SEQ ID NO: 767411 - DNA, 624 bp, Homo sapiens
tttcgaaactgctccatccaaaggaatgttcagctctgtgagttaaactcagtcgtcaccaagagttttctgtgaatgctactgtctagcttttatatgaagctatttcctttactaccataggcctcaaagcggtccatatctccacttgcagattctacacaaagagagtttccaaactgctctgtcaaagggaatgttcaactctgtgacttgaatgcaatcatcacaaagtagtttctgagaatgcttctatctagcttttacgggaagataattccttttccaccacaggcctcaaagccctccaaatgtccacttgcagattctggaaaaagagtgtttcaaagcttctctctcgaaaggaaagttcaactctgtgagttgaatgcaagcatcacaaagaagtttctgagaatgcttctgtttagctttcctgtgaagattctcccgtttccaacgaaatcttcaaaataggtcsaaatatccacttgcagattccacagaaagagtgattggaaactgctctttgaaaaggaaccttcaactctgtgagttgaatgcaatcatcacaaagaagtttctgacaatgcttctctccagtttttatgtgaccataattcg

SEQ ID NO: 767412 - DNA, 647 bp, Homo sapiens
aagagttttctgtgaatgctactgtctagcttttatatgaagctatttcctttactaccataggcctcaaagcggtccatatctccacttgcagattctacacaaagagagtttccaaactgctctgtcaaagggaatgttcaactctgtgacttgaatgcaatcatcacaaagtagtttctgagaatgcttctatctagcttttacgggaagataattccttttccaccacaggcctcaaagccctccaaatgtccacttgcagattctggaaaaagagtgtttcaaagcttctctctcgaaaggaaagttcaactctgtgagttgaatgcaagcatcacaaagaagtttctgagaatgcttctgtttagctttcctgtgaagattctcccgtttccaacgaaatcttcaaaataggtccraatatccacttgcagattccacagaaagagtgattggaaactgctctttgaaaaggaaccttcaactctgtgagttgaatgcaatcatcacaaagaagtttctgacaatgcttctctccagtttttatgtgaccataattcgttttccaccacaggcctgaaagcgctccaaatgtccacttgtagacactacgaaaagcatgtttcagaactactctatgaaaa

SEQ ID NO: 767413 - DNA, 621 bp, Homo sapiens
cctcaaagcggtccatatctccacttgcagattctacacaaagagagtttccaaactgctctgtcaaagggaatgttcaactctgtgacttgaatgcaatcatcacaaagtagtttctgagaatgcttctatctagcttttacgggaagataattccttttccaccacaggcctcaaagccctccaaatgtccacttgcagattctggaaaaagagtgtttcaaagcttctctctcgaaaggaaagttcaactctgtgagttgaatgcaagcatcacaaagaagtttctgagaatgcttctgtttagctttcctgtgaagattctcccgtttccaacgaaatcttcaaaataggtccaaatatccacttgcagattccacagaaagagygattggaaactgctctttgaaaaggaaccttcaactctgtgagttgaatgcaatcatcacaaagaagtttctgacaatgcttctctccagtttttatgtgaccataattcgttttccaccacaggcctgaaagcgctccaaatgtccacttgtagacactacgaaaagcatgtttcagaactactctatgaaaagcaatgtgaaactctgggagttgaacacaaacatcaca

SEQ ID NO: 767414 - DNA, 583 bp, Homo sapiens
gtttcaaagcttctctctcgaaaggaaagttcaactctgtgagttgaatgcaagcatcacaaagaagtttctgagaatgcttctgtttagctttcctgtgaagattctcccgtttccaacgaaatcttcaaaataggtccaaatatccacttgcagattccacagaaagagtgwttggaaactgctctttgaaaaggaaccttcaactctgtgagttgaatgcaatcatcacaaagaagtttctgacaatgcttctctccagtttttatgtgaccataattcgttttccaccacaggcctgaaagcgctccaaatgtccacttgtagacactacgaaaagcatgtttcagaactactctatgaaaagcaatgtgaaactctgggagttgaacacaaacatcacagagaagtttctgagaatgcttctgtttagtttttatgtgaagatattcccgtttccaaagacatcttcggagaggtccacgtatccacttgcagattccacaaaaagagagtttcaacactgctctatccataggagggttcaactctgtgagttgaatgcaatcatcacagagaagtt

SEQ ID NO: 767415 - DNA, 583 bp, Homo sapiens
gtttcaaagcttctctctcgaaaggaaagttcaactctgtgagttgaatgcaagcatcacaaagaagtttctgagaatgcttctgtttagctttcctgtgaagattctcccgtttccaacgaaatcttcaaaataggtccaaatatccacttgcagattccacagaaagagtgattggaaactgctctttgaaaaggaaccttcawctctgtgagttgaatgcaatcatcacaaagaagtttctgacaatgcttctctccagtttttatgtgaccataattcgttttccaccacaggcctgaaagcgctccaaatgtccacttgtagacactacgaaaagcatgtttcagaactactctatgaaaagcaatgtgaaactctgggagttgaacacaaacatcacagagaagtttctgagaatgcttctgtttagtttttatgtgaagatattcccgtttccaaagacatcttcggagaggtccacgtatccacttgcagattccacaaaaagagagtttcaacactgctctatccataggagggttcaactctgtgagttgaatgcaatcatcacagagaagtt

SEQ ID NO: 767416 - DNA, 458 bp, Homo sapiens
aaagagtgtttcaaagcttctctctcgaaaggaaagttcaactctgtgagttgaatgcaagcatcacaaagaagtttctgagaatgcttctgtttagctttcctgtgaagattctcccgtttccaacgaaatcttcaaaataggtccaaatatccacttgcagattccacagaaagagtgattggaaactgctctttgaaaaggaaccttcaactctgtgasttgaatgcaatcatcacaaagaagtttctgacaatgcttctctccagtttttatgtgaccataattcgttttccaccacaggcctgaaagcgctccaaatgtccacttgtagacactacgaaaagcatgtttcagaactactctatgaaaagcaatgtgaaactctgggagttgaacacaaacatcacagagaagtttctgagaatgcttctgtttagtttttatgtgaagatatt

SEQ ID NO: 767417 - DNA, 543 bp, Homo sapiens
acacaaacatcacagagaagtttctgagaatgcttctgtttagtttttatgtgaagatattcccgtttccaaagacatcttcggagaggtccacgtatccacttgcagrttccacaaaaagagagtttcaacactgctctatccataggagggttcaactctgtgagttgaatgcaatcatcacagagaagtttctgagaaggcttctgtctagattttatgcgaagatatacccgtttcgaacgaaggccacagagtggtccaaatatccacttgcagatcctacaaaaagagtgtttcaaacctgaactatcaaaggaaggttcaactctgggatttgaatgcaaacatcaccaagaagtttctgagaatgcttccgtttagttaggtgcagttatcccgtttccaacgaaatcctcagagaggtccaaatatccacttgtagattctacaaaaagtgtgtctcaaacctgctccatccaaaggaatgttcagctctgtgagttaaactcaatcatcacaaagtattttctgagaatgctt

SEQ ID NO: 767418 - DNA, 552 bp, Homo sapiens
agagtttcaacactgctctatccataggagggttcaactctgtgagttgaatgcaatcatcacagagaagtttctgagaaggcttctgtctagattttatgcgaagatatacccrtttcgaacgaaggccacagagtggtccaaatatccacttgcagatcctacaaaaagagtgtttcaaacctgaactatcaaaggaaggttcaactctgggatttgaatgcaaacatcaccaagaagtttctgagaatgcttccgtttagttaggtgcagttatcccgtttccaacgaaatcctcagagaggtccaaatatccacttgtagattctacaaaaagtgtgtctcaaacctgctccatccaaaggaatgttcagctctgtgagttaaactcaatcatcacaaagtattttctgagaatgcttctgtctagtttttctatgaagctattccctttactaccataggcctcaaagcgctccaaatctccacttgcacattccacaacaagagtgtttccaaactgctctatcaataggaatgttcaactctgtg

SEQ ID NO: 767419 - DNA, 608 bp, Homo sapiens
gtcttctaggatgaactaatgagctagttccaggtcacacccttaaaaaatgggagctctggatcttctggaagtgaggctgggtttgtcttatggcatgtgaagattgtggatgattctggcaaaggatggacatgagatttggkgcaaatcacttactgtgtcttgtagttttaccatctataaattaaagagaggagattataaaaggaggtctgggtaaccctcaattctgtgactctaagtccctcttcctgttgggatctatgtcattggctggaaagggccctggtcagaggtttgggtagcctgggtttggtgcctgctctgcagctcctagtgatgtgagtgtaggggttgaacagtgatcctcccccaccagagacgtgtccacatactaatcctggaatctgtgaatgtgatcttatttggaataagaatgtttgcagatgtaatgaagttaagagttttgagatggggaaatcatcctggattatctgagtgaaccctaaatccaatggcccatatccttgtaagagagaggcagagggagatttgacatagacagaagagaaggaggcaaggtgaccatagaggcagagatggga

SEQ ID NO: 767420 - DNA, 547 bp, Homo sapiens
ttgtatatgtctgttatatccatttgatctataaagttgttcaagtcagtttctttattgattttatatctggttgttctagctgttattgcaagttatgtagggaagtctcctactattattgtattgctgtcaatttcttccttcagatatatcaatatttccattacatattttagcgctctggtgttgggtgcacatctatttataattgttatttcttcctggttsattgacccttttattattatatagtgtccccttttgtctcttgtgacagtttttgacttgaagtctattttttctcacgtaaatatggtcacccttgctttctttttggctaccatttgcatggatatattttttcatcccttcactttcaggctgtgggtgaccttaagtctaaactgagtctcttatacacagcatattgctagatctcacgtgtgtgtgtgagtgtgtctgtgtgtgttacatccactcagcaactctgtatctttccaatggggagtttaatccatttacatttaatgttattaataaagac

SEQ ID NO: 767421 - DNA, 617 bp, Homo sapiens
aaccatattttagtgtgctttgtttttctgtccccagtcatcccatattattaaagagaaattctgcatatctctcctggagtccaattaaggatttgcatcatgactagatttttcactttaattactgtatataaagtaggttttgacttatttccatatttatcaaactatgcagaagaagcaaaattcatcaaataaacagatatctgtggctataattgcagcctgcatctaggatgtaggaagaaaatatgagggtccaaatttcattatgtagaacataataaacatctgaataattaaactgtgtgtaaatcataggcttggcaatagtaagaagagragacaccttcatttcattcaaaaatattttaaatatatttctaagaatatatcccaaacattaaacaaacaacaagttgaaaacatgtcttatcaggtcaaaattttacactggataatgtgtatttgaaacattttaaaattaattatataatatatgataagctctctatgtacatggatttccaaaagtccctcttttctttttagcaagtaggtgaataaaactaaaaagaaaatagctaattattttgatgattttctttatactg

SEQ ID NO: 767422 - DNA, 509 bp, Homo sapiens
tctccatcaccactggactcaatgaaaccttcacacagagctggatgcattttttaatttcttggatttatgattgatgactttctcactattgttgattcattagggtttatgggttcacttataatatgattctgtcargctttagcctaaaatattacccttgaacttaaaaaaatgcaatggtgtaggccagcctttaaaaaaaaagtacagaacatgtactctggaagactgaattattcattccaactttttactcccctgcaattggattatacatctataccctttgccttgtagcattgcattgttcctccacaggacaatgagatagtgagaggggtttgcttccccctaaactcctctttattgaatatggactcggccaatgaaatatagtagaagtgacatgaacagaggctttatgtatgcttacatggtttggttgtccttttgtgctcctgtgattatcatgaaaaaagcatgacccagttagcttctatccc

SEQ ID NO: 767423 - DNA, 648 bp, Homo sapiens
cctagaagaaaacctaggcaataccattcaggacatagacatgggcaaaggcttcatgacaaaaacgccaaaaacaattgcaatagaagacaaaattgacaaatgagagctaattaaaccaaagagcttctgctcagcaaaagaaactatcatcagagtgaacaggcaacctatggaatgggagaaaatttttgcaatctatccatcagaaaaaggtctaataaatatccagaatttacaaggatcttatatatttacgagaaaaaaaaaacaaccccatcaaaaagtgggcacaagatatgaacagacacttctcaaaagaagacatttgcgcagccaacaaacatgaaaaaaagctcggcatcactgattatcagataaatgcaaattaaaaccacagtgagataccacctcacaccagtcagaatggcaattattaaaaagtcaggaaacaayagattctggtgaggttgtggagaaataggaatgcttttacactgttggtgggaatgtaaattagttcaaccattgtggaagacagtgtggcgattcctcaaggatctagaaccagaaataccatttgacccagcaatcccattactgggtatatacccaaaggaatattaatcattctaccataaagacaca

SEQ ID NO: 767424 - DNA, 594 bp, Homo sapiens
gagccagcaaacctttcctgtgaaatgctagatggtaaatgttttcagctttgtaggccatgcagtctctgtcacatctactcaactctgccattgcagcacgaaagcagccataggcaaagcacaaatgaacagagatggctgtgttccaataaaactttatctataaaacaagatgacaagctgggtttcactgttgaaattgacaacttctaatctatggtatcttgttcatttgttcatctacccaatgtttattgagcacttaccttgtagctggcactctcctaggctccagggatacagggagaaccatacgaagtctgcaccctcatagggcttaaatcctagcaaagtcttggctgtttctttttcccatgcctggtatcctgggtcctaactttsgtgcttttcactcctcttagaccagtgattctcagcttagacttcagatcacctgggaagcttacagaactgtggacgcctaggttccattcccaaggagtctaattaaattgatctggggtgggcccaagcattgatacttttacaagctcccccaagtggttctaatgtgcagccagggttgagacc

SEQ ID NO: 767425 - DNA, 512 bp, Homo sapiens
tccccgggaagccgcggctgccgcccctccaggcccggcctcgcgcccgtccgcccgccccgctctgacgtcaggcgtcttggagcgggatatttatggcaaggttactctgaattttccctaggtagacttctgattgcagtttcttgggatttgtaattttcacactttcagaccgaacgcaggcggggggagagcgccrccggcagggcgaggcgtacaatgagggtagctgttccccactttggcagggagcgttctcagggccccttctgttttggaaacatggaagggtcaaagaggcaaaagtggccacctgggcagcgggtttctccccggctcctcctctgggctacgggcaaatggcctggtctgaggccggctcggaggtggaggtcccggtgccaaggaatcccctgtccctccccaaagtgtccctgcactggacagtgtgtcccaaggggtgctgggcaagacaggagcgaaatcaggcacaacagaacagctaatta

SEQ ID NO: 767426 - DNA, 578 bp, Homo sapiens
caaaatgggtgggaaatggagtggaattcttttctgaccatcctcctgccaatctgtgatcagagcccaaggtccccagtctgcaaaggccattcctgctagtagccaccaccacttttgttatttctggagccagggtacttgcactgtcatgatcacatacaaaacttccattataccccattttcagtagctcaaaatcctttgaaaaataatgctcarggccaagtattccagttagcttcagggtaaaattatattttggaatatttaaaagaaataagtttccccaggtgatctatattgggggtgatgatgggtctcacacacacacacatacacacacacacacagacacacacagacacacacatacacatttttctccattgaaaaatagtttgaaactgcttacaatgttcaggatgtgtgactttggactggcatatggatgtgtgtgcaactgagcaaagactcagggacatcaggagaagcatgacacatttcatcattcagtggttttgtcttttaaaggaaaatagcttaaaaatggtaaagtgataatgttaagaatctgt

SEQ ID NO: 767427 - DNA, 622 bp, Homo sapiens
acatttaatttgcatacacattcttctgtatgccaaatatttataagcacagattttcacacactggcaggtttcataagcacccaataataggcttgtctgactattgcatgtcggtggtttgggaccccagtgtggagacctttcttactttctttaaaagaagaagtaaagaaaccctccactaacactttggctcattcggtcctgctaggtgccaggcactttcataagccctggagatataagatgaataagacgaggttcctctccacaaggaattcayggtctagtggaggaactacgccattaagctttaccacaatcaggtttaaaaaaaagcaaaaacataaaaacacatgaaactttcaaaattcccaggatgaggagtaggtgaaggacaataacatgttgtctcccttaggcgagttttctggatgaagaagaatatacctttcctttccactggtaccttccaggctaatatttccaaaatacctcctatagaatactaatcctttgaaacaattttcaaaaaaggtaggggaggggtcctcatggtcaaataattttataaaatctatagtctatatgccctacttgtaacttcgtagttcatatt

SEQ ID NO: 767428 - DNA, 633 bp, Homo sapiens
ttggacattcaatatgaactcaaaaggaatttctcaatctttactcaggtcaacaaatttggtatacacaaaatagatcaagtctacttataaaatgtggccctgatttaattagatgcttctgatataatgaataaaaaccaacaagaaggaaggtaattgtaagaatatgagggcatgtggaaatgggaatttcctccagacttccagatctcttaggacccttctccttgtttacctttgtctagtatagcctctgctgattcctaactgwcatctccttgtccatagtgatccttccagactctcattctctctacctgaatgcctttcagcttctgttcctggtaatagcctgatttgtccagattttcccagttcacaccgccaagagtgatagtctgatggccccagctcatttctatttgggcaatgcttctagcccctagattgacctcctataccataagcaggcagcctttgttttgctgcccttgactcagattccttcggccatggctgcagatgacagtgtcacaggatcacaacatagttccactggaaactgggtagaacatttttccttatcaaaagctgtgaggactgtaagtatggcaatgacataattggatg

SEQ ID NO: 767429 - DNA, 632 bp, Homo sapiens
caaaaatcaattgtgttataaaataataatttctgggcaaacatacattcatttttaccgtgttaattgaactttgtggggagaggcggtgctggatttaaaattttcatctagagtcttacccagttacaggattaaaatatcttaattttatactatgtactgagtttaatctgtttcaccatgtgaaggttaaatactgattctgcaggaacagttgcccacaccctggtcctcatgaaggaatcagaggttaagtccttggaagataaaattggctgaaaaccaaatataccacataaaaaccaactattagaggtaaactataaatctagaaaatataaactataggcactcaaaatgtccattatygacaccagcctgagcaacacagtgagaccctatctccacagaaaatttttttaaaaattagccaggtgtggtggtgcgcacctgtagtcccagctacacagaaggctgaagtgggaggattgcttgggcccaggaggccaaggctgtagtaagccatgactgcatcactgtatttcagcctgggctgacttccctgagctctctaggcagagtctgacatttttgttctctcctctacactttctcaataagttggacac

SEQ ID NO: 767430 - DNA, 632 bp, Homo sapiens
caaaaatcaattgtgttataaaataataatttctgggcaaacatacattcatttttaccgtgttaattgaactttgtggggagaggcggtgctggatttaaaattttcatctagagtcttacccagttacaggattaaaatatcttaattttatactatgtactgagtttaatctgtttcaccatgtgaaggttaaatactgattctgcaggaacagttgcccacaccctggtcctcatgaaggaatcagaggttaagtccttggaagataaaattggctgaaaaccaaatataccacataaaaaccaactattagaggtaaactataaatctagaaaatataaactataggcactcaaaatgtccattattgacaccagcctgagcaacacagtgagaccctatctccacagaaaattyttttaaaaattagccaggtgtggtggtgcgcacctgtagtcccagctacacagaaggctgaagtgggaggattgcttgggcccaggaggccaaggctgtagtaagccatgactgcatcactgtatttcagcctgggctgacttccctgagctctctaggcagagtctgacatttttgttctctcctctacactttctcaataagttggacac

SEQ ID NO: 767431 - DNA, 623 bp, Homo sapiens
tcttatacatattttttaatgttcactccaccatgttcttgggaagatctacaaacaagtgagacaataaaaaaactaaaaagaattggctcacagtttttagagaattgactccatgggaaaaaatgactcagacaagaaaaataaaggcagatctatgaaaggtgagtaaggaatagtaatgtcctctggagctccaagttcacctccaagtgttctgatattgtcttcattatagtatcccctcaaaccacactgcccggaatctaattatagggcctgaaacctaagtggtagggcatgtgaccaacagtcaacaatccccataaaggttcttaagataaaaccgctttggaagcaggagcctgataatttatcttcctcaaatactgcgcaggcggcaacttygccttgaatatctgctgttgcagccattgtgccagctaggcagagatggaataaccttgggaatgttgttccatttcccttcgcagctgaatatgcctaattccatttgccgttactcctcctttctctttccttttgtaagaggttttacccaggcagtcagaggttcccaaacttttcaaatctgagcatctctgtaacttctgcacagtgcc

SEQ ID NO: 767432 - DNA, 632 bp, Homo sapiens
ctgaacactgaactggagagtttgctgacaattccgattccaaaggaaagctttccaaatcagtcatgaattgccctccatcctggtgaacctccacacagcgtctcagcgttccatcaggacctcacctccatcctggaatgcttcatctccagccacctggcctctgatggtgccagacctcagtagtcyggttgtggttttcatcatctgctcagtgttctctccttatcacagctgttgcccttctaccaggggaaggcttcttttgagcaggggcaggcccaaacactttccatgtgtgtctgaggagtagatgtcagtagcaagctacatgtggtcaggggtcagagccaggggacctggggtgccacaagtgtggaaacacagtggcagctgaagcccaagtgtcacatggtctcagaggcggttgtgcagccagctgtatcagtggaacattgagttagcacagaaaggtacattattggccaggtgtggtggcttacgcctgtaatcccagcagtttgggaggctgaggcgggaggatggcttgaacccagaacttcaagaccagcctggggaacacagggagacctccacccccgacctctaccaaatttttttttttttaa

SEQ ID NO: 767433 - DNA, 595 bp, Homo sapiens
catagattctatgatgtgacttcaacaatgcttaggaaaatccttttattccataccagcagccaatcaatagtccccactaaactttttttacctcctcattggtgcttgaaaagcctagtaaaataatttcttccacactcagagatagactaaaagcctggaagaagacttgaatataaagcaagaggggggtgatgggcactctgggcttaaagcaggactatgccagagtcaggaagagaaagtcaaaagtttatactgggacaaattttgccaagacttttgcttggctgtcataatttagatattcattggcaactgcaatacaaaaatagtctgaaraatgtgaaaaaatatgattttaactaggagtcagatctattaatgcatatttctctctctaccccctatgtctttttcaaaattcagaagcggagggtgctgctcaaccaaacaactcattaatgctgcaaactagcaaggagaatcatgctttaggtaatgtgcatcttttaacaataattctagtaggggagtgcttgatgtccatataggttttacatttttggatcttgaattgtctcatgcatta

SEQ ID NO: 767434 - DNA, 643 bp, Homo sapiens
aaattttaaaaagaaaaaaataaaatgctcaattttatccttctctttcttgttttcgtggctaagaagtttagaatagtcattgggtgggggcctagtgttctgcatttctaacaagcttccacgtgatgctgttgctgctactgatgatctgccaagcacacttgaaatagcaagactttaaggaagtcttgttatttgaaaagagagtcttgtgactttgtgataattcttagagcraattaagaattcgctccactgaattcgctccactgcaccactgaaaaaaggacgttggcttcattcccaggatgcgaggctggttcaacatatgcaaatcaataaatgtaattcatcacctaaacagaactaaagacaaaaaccacatgattatctcaaaagatgcagaaaagaccttcaataaaattcaacatctctttatgtcaaaaactctcaataaactaggtattgaaggaacatacctcaaaataataagagccatttacgacaaacccatagccaataacatactgaatgggcaaaaggtggaagcgttccccttaactggcacaagacaagggtgccctctctcaccactcttattcaacataatattggaagttctggccagagcaatcaggca

SEQ ID NO: 767435 - DNA, 568 bp, Homo sapiens
tattaccttattactcattaaaaaatcactgcccaatttagtgtttcgcataatataagaatgtatttgttgtatataatagaaaatatgtatataattacaattgacattggttgttggtaaaatgggattgctggaatagcgcttaaacaaaacaaatagtactgacctattagaaaaattaattatgaaagaaaagtaatggattatagttgcagataatggttttggggacactgctggttgaaattcatcctgaggcttatttacaaktggcacaattagagcttttgagaattcagcagccttgatttatttgcaggggttcatatagcacttgagtcacgggcgaggtgaggcacagaggtgggtaggggacttactgctttacatttaagttctatggaatttcacatttctattttggggaagaaaggattgtctctagagagagagcatcaggttctttaacaagatttaataaatttgggtccttgtatcgatcaaacttcatactagatcagataacaaaaaattgaatatggctttgcactagaggctattttat

SEQ ID NO: 767436 - DNA, 610 bp, Homo sapiens
gtgactttagttttcttttttcgtgggttgcattaaatgctgttacaatttttggttaagtctagctggtatcagttatttaactgttccctttggcttctgaagaaaaaagaatggtagaaagaatggaacatgaatgtcgtttggtcaaaagattcaggttcctcttatggcaggactccagacgctgatacttatctttgggcagaagtctggaaaaggtggctatgaagaagttgagaacttaaactaggcatggttctttcagcaaattctcacagaggcttgggctcatgaaacaaccaagagtaagaaccttgagattgctacctcttcatcttagagatgaagaaactgaggctgcatatggaaaggctggaggctagagaggtgacatgcagtcactcatcaagtcagggcaaarccagtgttatgatgcatggctctcttaccatgatgacattatagctggcattataactgccatcacagtagggagcaggatacctgcagagttgtagagactgatggtaaagtagacaagagcaaagatcactgggctgggcaacagaaaatctaggtcaaacttgtttccctgagtctttggaca

SEQ ID NO: 767437 - DNA, 547 bp, Homo sapiens
atagttcagaatctttcaagctcactttgggtacaattcagctctccagccctgtagttctacatattcctgtatttattcagtagattcaaaacaaacaataatagcacagtgattgtgaaggcacagaaatagagcttgaaatacttcaatttgacattctgtgtgactaygtaaagttcttacttttttggaacttcaagcaagagtagttcattcacttcagtatcacctcgttgttggaaaattctgtgtaatgtaggtataactatgagaaagcttttccagacaagatgaagctgtgtccacaggaaagacaaatttcgtgaagttaatgtcaacctttgaagtactatgcaatctaaaagaaaatgtggcacaaaaagatcagctcaagttttattctttcctttatataattatttttcttttccaagtaatttttttttatttctgttgtgaagctttggatgagtgatgtggttcggctgtgtccccacccaaatctcatcttgaattgtaactcccacaatttccacgtcacaag

SEQ ID NO: 767438 - DNA, 637 bp, Homo sapiens
atggacaataaggtccaggctgaggtaattctcagatggagacgaggaacttgttgggaactgaagcaaaggtgactcttgttatgttttagcaaagagactggtggcattttacccctgccctagagatttctagaactttgaacttgagagagatgatgtagggtatttggcagaagaaatttctaagcagcaaagcattcaagaggtgacttgggggctgttaaaggcattcagttttataagggaagctgagcataaaagtttggaaaatttgcagcctgacaatgtgatagaaaagaaaatcccattttctgaggagaaattcaagctggctgcagaaatttgcataagtaacaaggagccaaatgttaatccccaagacaaaggggaaaatgtcyccagtgtatgtcagaggcaacggcagaccctcccatcaccggccggaggcctaggagtaaaagaatggtttcatgggccaggcccagggtccttatctatgtgtagcctagggacttggtgccctgtgtcccagctactccagctgtggctaaaaggggctaatatagagcacaggccatggcttcagagggtgcaagtcccaaaccttggcagcttccatgtggtgttgagcctg

SEQ ID NO: 767439 - DNA, 666 bp, Homo sapiens
gaataccaaaaattcactggagaactaaaagtatcaatatagtcatttaaagataagttcaattttcagttagtttcataatttatatttttcattattcctactttgggaagtattactggccaaattcctggaaatatcagaaacaacattgaaatcaatccaaaaatatgaacagcattgccacaataacacttttctgtaattgtaagcagtcagccacccaatcagaaatgatcctgatttgagtattgtttgtaagcactgctcctcatctgtgtgtacaatcaggtgactggaaaagtgatggcaaatgtcactcttcagattcacctccttcataattaatatgacagttttatttttaagtttggacattgkaagaataaggaaataattattttaaaatatatgaccattccttacaagttgaacacagaattgccatgccacccaacaattccactcttaggaatatactccaaagaattgaaaacaagtgttcaaaccaaaacatgtacttgaatgttcatagctgcactattcacaatgaccaaaaggtagaaacaactcaattgtccatgaatgaatgaggaggcaaatgaaatgtagtatattcatatgatggaatgttatttagccatgcaaaaaaaatgaaatactgat

SEQ ID NO: 767440 - DNA, 700 bp, Homo sapiens
cccagcttcctgaattaaaattaaaaaaaatgaccgaaggcataccactgcacaattttagaacatgagggatacataatcctaaaaaccttcagagggaagagggaaaggttatagacatgaaacaagtaataagaatgtactggggccgggcatggtggctcatgtctgtaatcccagcactttgggaggcagaggcaggcagatcacctgtggtcaggagttcgagaccagcctggccaacatggtgaaaccttgtctctactaaaaatacaaaaattaactgggtgcagtggcacatgcctgtaatcccagccactcgggaggctgaggcaggagaatcgcttgaacccatgakgcagaggttgcagtgaaccaagatcgtgctactgccctccagcctgggcaacagagtgagactttgtctcaaaaaaaaaaaaaaaaaaagaatgtattggatgtctaatccacactgaactagaagtcaacagaacagtacctgcaaaatgttaagagtaagttacatttacacctagaattctatacccaaataaactcccagctgaatgtgagggtagcatattttgaggcatgcacgttctcaaaaaatttacctccaatgcaccctcctgcaagaagctactgaaggatgtttttttaccaaaacaaaagaacaacaaatcaagacagagaaagacct

SEQ ID NO: 767441 - DNA, 700 bp, Homo sapiens
cccagcttcctgaattaaaattaaaaaaaatgaccgaaggcataccactgcacaattttagaacatgagggatacataatcctaaaaaccttcagagggaagagggaaaggttatagacatgaaacaagtaataagaatgtactggggccgggcatggtggctcatgtctgtaatcccagcactttgggaggcagaggcaggcagatcacctgtggtcaggagttcgagaccagcctggccaacatggtgaaaccttgtctctactaaaaatacaaaaattaactgggtgcagtggcacatgcctgtaatcccagccactcgggaggctgaggcaggagaatcgcttgaacccatgatgcagaggttgcagtgaaccaagatcgtgctactgccctccagcctgggcaacagagtgagactttgtctcaaaaaaaaaaaaaaaaaaagaatgtattggatgtctaatccacactgaactagaagtcaacagaacagtacctgcaaaatgttaagagtaagttacatttacacctagaattctatacccaaataaactcccarctgaatgtgagggtagcatattttgaggcatgcacgttctcaaaaaatttacctccaatgcaccctcctgcaagaagctactgaaggatgtttttttaccaaaacaaaagaacaacaaatcaagacagagaaagacct

SEQ ID NO: 767442 - DNA, 599 bp, Homo sapiens
ttttgtttgtggtcgtgacttactgataatataatccaaaatacattttttattttgtatttatttatttatttttgagacggagtctcagtcttctgcccatgctggagtatagtggtgtgatattggctcactgcaccctccgcctcctggattcaagcgatgctcctgcctcagcctcctgagtagctgagactacaaacgtacgccaccatgcctggctagtttttatacaaaatacgttttttaaaaaacaattttttttttggaggtcgggggaccgtcgcccattctgttgcccaaactggagtgcagwggtgcaatcttggctcactgcaacctctgcctcccaggttcaagcgattcttgtactcagcctcctgagtagctggaattataggtgtgtgccatcatgccaagctaatttttgtatttttagtagagatgaagtttcgccatgttggcgaggctagtctcagactcctggcctcaagtgattggctgacctcagcctcccaaagtagaaaatcttcttgaaaaataaaattccaaatctcaaaaggccctatataattttggtgttggaaatttacttgtca

SEQ ID NO: 767443 - DNA, 621 bp, Homo sapiens
gtacaccctgtgttattattcataatatctaagggtaatattactcatcatatcacagtgggggtacacattttgacattatttataatatataagggagatattactcctaatatcacattggatgtacaccctgtgttattattcataatatctaagggtaatattactcctcatatcacagtgggggtacactctttgacattattcataatatataacggagatattactcctaatatcacagttggtgtacacctgtggtacygttcgttttatatataagggagatattactcctaatatcacagagggtgtacaccctgtggtattgttcataatatctaggggagatattactcctaatatcacagggggtgtacatatattattcatattattcatatattattattatattatactattcttatatttaagggatatattattcatatattgaagggatatattactcttaatatcaatattaagtggctgtacaccctgtgatattattcataatatcacagtggctgtacaccctgagatattactcctactatcacattgtgtgtacactctgtgtgtacacccacagacacatggcttacagtggct

SEQ ID NO: 767444 - DNA, 566 bp, Homo sapiens
atctactgcaacctccacctgagttcaagcgactctcctgcctcagcctcccaagtagctgggattacaggcgcctgccatcacacccagctaattttgtatatttagtagagatggggtttcaccacgttggccaggctgctcatgaactccagacctcaggtgatccgcccacctcagcctcccaaagtgctggggttacaggcgtgagccaccacgcccggccctgccctctacttttaaggtgaaggacatgtaatcaggtttaaggaaaatctggatctagtaaaacacagctatccacagattcgtactaaacatccattgaaatmatttgcaatgaaaaactttaaaatctaaagtaatggtatactgattactatcttatactaaaactatatactatgtatcaatatactagactgtattagtaaatgactgagtcaagagaagatttaaaataatatacctaatgggataactggactacttactgggagtcacctggagctactactcaaaatgcagtttgggtaggtcggggtcaggcaccctggaagagtgct

SEQ ID NO: 767445 - DNA, 588 bp, Homo sapiens
tgcaaaaagagtgtttcaaacgtgaactttgaaaggaaagttcacctctgggatttgaatgcaaacatcacaaagaagattctgagactgcttctgtttagtcagctgaaattatcccgtttccaacgaattcctcggagaggtccaaatatgcacttgcagattctgcagaaagtgtgtttctaaactgctacatcgcaaggaatgttcagctctgtgagttccactcaatcatcccaaagaattttctgagaaagcttctgtcttctttctataggaagttatttcctttactacggtaggcctcaaagaagtgcaattatcmccttgcagtttctacaaaaagagtgtttcaaacctgaactatcaaagaaaggttccacactgtgagttgaatgcagacatcacgaagaaggttctgagaatgcttctgtttagttctgtgcggtttatcccgtttccaacgaaatcctcagagaggaccaaatatccacttgcagtttctacaagaagagtgtttcaaagctgaactatcaaagaaaggttcagcactgtgagttgaatgcaaacatcacgaagagggttctg

SEQ ID NO: 767446 - DNA, 628 bp, Homo sapiens
tcacagtgttgaacctttctttgatagttcaggtttgaaacggtctttctgtagaaactgcaagtagatatttggacctctctgaggatttcgttggaaacgggataaaccgcacagaactaaaacagaagcattctcagaaccctcttcgtgatgtttgcattcaactcacagtgctgaacctttctttgatagttcagctttgaaacactcttcttgtagaaactgcaagtggatatttggtcctctctgaggatttcgttggaaacgggataaaccgcacagaactaaacagaagcattctcagaaccttcttcgtgatgtctgcattcaactcacagtgtggaacctttctttgatagttcaggtttgaaacactctttttgtagaaactgcaaggggataatkgcacttctttgaggcctaccgtagtaaaggaaataacttcctatagaaagaagacagaagctttctcagaaaattctttgggatgattgagtggaactcacagagctgaacattccttgtgatgtagcagtttagaaacacactttctgcagaatctgcaagtgcatatttggacctctccgaggaattcgttggaaacgggataatttcagctgactaa

SEQ ID NO: 767447 - DNA, 627 bp, Homo sapiens
tgtttagtcagctgaaattatcccgtttccaacgaattcctcagagaggtccaaatatgcacttgcagattctgcagaaagtgtgtttctaaactgctacatcgcaaggaatgttcagctctgtgagttccactcaatcatcccaaagaattttctgagaaagcttctgtcttctttctataggaagttatttcctttactacggtaggcctcaaagaagtgcmattatccccttgcagtatctacaaaaagagtgtttcaaacctgaactatcaaagaaaggttccacactgtgagttgaatgcagacatcacgaagaaggttctgagaatgcttctgtttagttctgtgcggtttatcccgtttccaacgaaatcctcagagaggaccaaatatccacttgcagtttctacaagaagagtgtttcaaagctgaactatcaaagaaaggttcagcactgtgagttgaatgcaaacatcacgaagagggttctgagaatgcttctgttttagttctgtgcggtttatcccgtttccaacgaaatcctcagagaggtccaaatatctacttgcagtttctacagaaagaccgtttcaaacctgaactatcaaagaaaggttcaacact

SEQ ID NO: 767448 - DNA, 591 bp, Homo sapiens
tctcagaaccctcttcgtgatgtttgcattcaactcacagtgctgaacctttctttgatagttcagctttgaaacactcttcttgtagaaactgcaagtggatatttggtcctctctgaggatttcgttggaaacgggataaaccgcacagaactaaacagaagcattctcagaaccttcttcgtgatgtctgcattcaactcacagtgtggaacctttctttgatagttcaggtttgaaacactctttttgtagaaactgcaaggggataattgcacttctttgaggcctaccgtagtaaaggaaataacttcctatagaaagaagacagaagctttctcagaaaatcctttgggatgattgagtggaactcacagagctgaacattccttgcgatgtagcagtttagaaacacactttctgcagaatctgcaagtgcatatktggacctctctgaggaattcgttggaaacgggataatttcagctgactaaacagaagcagtctcagaatcttctttgtgatgtttgcattcaaatcccagagttgaacttccctttcaaagttcacgtttgaaacactctttttgca

SEQ ID NO: 767449 - DNA, 564 bp, Homo sapiens
ataataataataataaaataaaaaataatgtgcattcaaataattatagcagctttagtcataaaatccactatctgtgatctaccaagatatccttcaataattgaatcgataaactgtggtacatcacacccatgcaatggaatgctgcacagtgataacatggaatgacgtgtcgagactcacaaagacatggttgaatttgaaatgcaaactgatacgtaagaaaagtcagtctcaaaggctataggcccatttatatgatttctgtaaaagacaaaattacacatccaaaaagtgcaacaaactccragttcaatgaattcggtgacacccaccgtgacacacattacaatcaaattatcaaaagagaatcttgaaagcagtaagagggaagtgaatcatcatatcgaagaaatccttaagaagtaggtgaccaaatgctcatcagaaactttagagatcagcaggtagtgggatgacatatttaaagccctaaaataaaacactttcaacctagaattctacacacggcaaaattgtcctttaaaatgaaggcaaaat

SEQ ID NO: 767450 - DNA, 625 bp, Homo sapiens
ttcctcttctcatcagtagatgtgagagtgtgcatcctgccctgtcactgctgcagtgacagtacagtcagtccattctccctggtgatagccattgcagtcacatagccagccaaccccatccctgccaatgcacygcccatgccagtgtataccccatgccaacaatgggagtgaaaccaggcaatgaaaacaatggaaactcctgcaccccaaacaaccacccttaactgcagcacacagaaaaaagacacagacccgcacccaccagcaccctacccatataccaacaacactacaagtgtgacagcacacacagtaaccagcagggaccccctacagccccaagccacaatgccttcaccactgtcgtgaacatccccacagaggcaggtaccctagcacctgcaagaaccctgcccccagcccaatagtatgcaccctgccatgctgccactgctcttgacacatacaaacaagaatggaccccactgccaccacactgcaaaacactttgactgacaccacccatcagagtgtagtgaacaggggtcagggagcacctcagcctccatagcacagtggattcctaacctggaggagccaaagaacaaagtcaagcctg

SEQ ID NO: 767451 - DNA, 643 bp, Homo sapiens
aaatattgctaataaagcatatttgaaaagaaacaaaagatccattcacaaatatatatgcatagattctttattcagggagtgaaaggaaagtgacaactgcacaggtggtggaagctcatgcccaggggacagacagacacagaaaacatcaacagaattctctaatggttcccagggagagagctgctctttcttctgaagctctgggagctggcacagcccaggacttcctttgctcagtctccacctsgacagtggcagtatggcagcctcaaaaagaaaaccttttgctatcagagatcatcacaggccgatcacaggctaagaggaaagaagctccctgtgtatccctggatggctttgatgagaagatgcaggtggagctgtggaacgaggtgagccaattatccttatcctttcatgctcctgatgaatcctgaagctgttacttgctcttgggtggacactttggctggcagggtggggaaggtgtcacaggaggacatttctgctggcactgctgaggtgggcaggactgtggacactttgatggtgggcagggctcagggcacttcgggggtggacatggctctgggcactttggcgcggggcacacaggaggtggctggcagggctgctt

SEQ ID NO: 767452 - DNA, 587 bp, Homo sapiens
aaaaataaacacaatcaaaaagtttttctacaaggatcaactgaacacaaaatcaagcaatcatggaagaaatgaaggacaaacaatatacagtaaatgcggaaggaagaccttcgtcatcaatgattactttaaatggaattccttgaatggagaattaaactttctaatcaacaaacagagattggtggaatggatraaaaagaaaaaagatccaactctatgctatttaagagagactcactttacatggaagacacaacggttgcagaatcaggagaaccagaaagaccacggggtaaaaggaggaggatttattgaatgcactcagacccagaagattaacgtcagaagatgtgccaagaacaaagacagcacttaacttttatacacacttttaaaaggggatgggctagcttgaagcaggcttacagtggcgtgaaagtgaggatacagaggcagaacaaagacagttaatcaaattttaacaggttcataactcaggattacacatgactgttgctatgtaaccaagatggccgttatctaggtttgccctagtgcctagcacagcttattccatgacc

SEQ ID NO: 767453 - DNA, 455 bp, Homo sapiens
gaaaagtttaaacaatcttggaaaataacaaagttgtaggtctcacactatctggtttcaatacttactataaatgctcatcaatcaagaatgtgtggttttggtgtatgaatacacatatagataaatgaaaagcataaagaactcagaaatagacctacawttatgttcaagtgaaaatgtataaatgaccaaaaagcatgtgaaatccttaaccatattatcagtcagggaaatgcagttaaaaagccccataagatatcatttcagacccacaaaaatggctaatattaaaattaatgacaaagcaagtgtggcaaggaggtggagcccctggaactctcatacagtgctagtatgaatgtaaggtggcacaatcaatgcagaaaacaatttggcggtttcttataaagttaaacatacaaccatgctatgaccaagaagctctgccccta

SEQ ID NO: 767454 - DNA, 590 bp, Homo sapiens
acaaaccccattggggccaaggagagcccaaaaaaacctgaaaactgagttcctggccatgacaggatgggacatcagacatgccttgttatgccccttcccttttatggtttagtcacaacagacagcattaatgttaaaatagagactgtaagaatgacagaacagactctttgtggccataagataccaaattataaacaggacctaccatgccaagcaagaggtaagtcacacacccctacactgaaaggataaactatgttctcacagctttttctttttctctagcagctaaacaagccccagcctcaacgtaagcaatattaaaacaatcacaatccatccagctcacagacagacactcactcactaaactcctgttccrccagccatagttacagcttcgatcagacaagagactgatttcagtaactttctcctgataagagcccaccaatcatggactggttctggctggtttacagaggttgcacacttaagtgcctttgtctcctgataaaacctgttgacatatagggctaaactgtaacaaatttaaatggtaactctccaccccaaggtgaata

SEQ ID NO: 767455 - DNA, 493 bp, Homo sapiens
aatattgacagaattaagggaagaaatagatagttctactacaaaaatggttggagactttgtactagttttctagggctgctatgacaagctgtcttgaattgagtggcttaaaacaaaataaatttattatctctsagttctaaagatgagaagtctgaaatcaaattgttggcaggtccatgctccctctgaagttcctagggaagaattatttcttgcctcctccaattcttgatggttgaaagccatccttaacattccctgctttgtagcaccatgactccaatctgcctccatgtttacatggccttctttcctgtttatgtcttcagatttctctcatcttataagaacaaaagtttttggatttagggatttaggatttagattttaatacaataaaaactcatcttagtttaattatatcgagttatggcttcaacatatttttggcgggacacaattcaaccaacaactgtggtaatagaca

SEQ ID NO: 767456 - DNA, 662 bp, Homo sapiens
aggaagtatgagtatgaatgaatgaatgattaaatatatacataaataaaaattttaaaataacaagcacaaagaagaaaggcagccaggcatacacacacaactaatatacaaagtagcctggaaaaaagcccaaataagaagggcatgcttctcatgagttctttatattayactatataagtcttggatcaaattaagcatgatttcaaagatgagctaataaaataacagaataaaaggaacattgcagagctaaacaaataaactgagaaccaaaacaaattattacgtagttagatgagaaacagaaaggaacaaaacagacacagctaaaaaattaagttactggcatgaaggcaggacctgagataaccacggtgtaagataatcacagtgtctgcagagcaaacacaccaagagattacatccattacagaagttggaaatggaagtgaaacaaagaagccatagctagagctgaaatggtgactacaacacagagaaactagttaagtatgccaggataatacatgggggccctgcttctggtcctagaaaacaggagactctataatgttaatactatcctgctacaaacacctggaaattctggagaaaatcaaacaaatgtctttttaaatgctgattttggctcacaa

SEQ ID NO: 767457 - DNA, 662 bp, Homo sapiens
aggaagtatgagtatgaatgaatgaatgattaaatatatacataaataaaaattttaaaataacaagcacaaagaagaaaggcagccaggcatacacacacaactaatatacaaagtagcctggaaaaaagcccaaataagaagggcatgcttctcatgagttctttatattatactatataagtcttggatcaaattaagcatgatttcaaagatgagctaataaaataacagaataaaaggaacattgcagagctaaacaaataaactgagaaccaaaacaaattattacgtagttagatgagaaacagaaaggaacaaaacagacacagctaaaaaattaagttactggcatgaaggcaggacctgagataaccacggtgtaagataatcacagtgtctgcagagcaaacacaccaagagattacatccattacagaagttggaaatggaagtgaaacaaagaagccatagctagagctgaaatggtgactacaacacagagaaactagttaagtatgccrggataatacatgggggccctgcttctggtcctagaaaacaggagactctataatgttaatactatcctgctacaaacacctggaaattctggagaaaatcaaacaaatgtctttttaaatgctgattttggctcacaa

SEQ ID NO: 767458 - DNA, 616 bp, Homo sapiens
tgtggtagggtggtcagacaagaccttgataacgaggtgacatttgaacaaggactgagtaagtgtgggagtgagctatggagcaaactgggtaagagcacatgaggcagagagaaaagccactgaaaaattccagaggcaggagcatgcctggcatggtgtagtaaccacaaagggtcactgtggcttcagcagtgtggggaatggggagaatgaggaatgaggaccgtayctaccgtcttggagaccgttgtaagaactttggctgtcattgtgaatagaagggaggccaactggaagatgttcagctggttaacgatgtgtgacctgagttacatttctaaagagttatcttagatgctattttgaaaataaactgtagcaggacaagggcataagaggaagtccagttagaaactgtttttcacaattaagtttcgaccatctgtgtacctgtattattttttacacctgttcctactattgcacaaaatgagtcctgtcctgaggtcagcttctctgagacattgtgaggtcaagaagatgagttatgaggcaaatctgaaataaggaaataaggcatcccttccaggaacacagatccaactaaaatgca

SEQ ID NO: 767459 - DNA, 635 bp, Homo sapiens
agtgatgtctgtgcagtgagcacagtccctctggacctggagtgggggcccagttagataaacaacagtggagggagcggcagaaaggaaaccccaatcttggggtcagcgccaagaagagggcagcaacatttccacggtgttggatggaggcctagggctgacacctggccccagcctcagacctgctgaatgcattagctagttggaatccagcctgctggtcaccaaaccattgccccctccatagagagaggccccaggggagtgaggccacgaaggaaggaaagccccaagttcccttctccacagcctctaaatctcccatccgcatgccagggcctctcccttcagacaaggcccaasgcggggcccacggcacggttgtcatctaacagaagatctgttgaagggctggacaggagggaggtgtccctttaggaactcagggttggggctggaagaatgactctgccagggggatctcggggagcagccgaccccctcccacccatcggtctctttatgtacagggacagcgggggtctcggccccatccgggcctgtcttgcggccctcacctccctttccctgccccccgcgcggcctcagtcaccgtggtgactcgccctgcg

SEQ ID NO: 767460 - DNA, 574 bp, Homo sapiens
ccaggcgtcagccgcccctgcagcacccttgcctgagcggaactctctcagtgccatcttcaacaatgtcatgaccctatgtgccatgctgcccctgctgttattcacctacctcaactccttcctgcatcagaggtgagtgcccaccccctccccagcccccagcctgaccctcactgtgtcctgcacccccttggctgagccccagctttgcccacttgtctctgccacccttggcctctcccggcaggatcccccagtccgtacggatcctgggcagcctggtggccatcctgctggtgtttctgatcactgccatcctggtgaaggtgcagctggatgctctgcccttctttgtcatcaccatgatcaagatcgtgctcattaattgtaagctgggccaggaggrggcctatgggaggaggcatgcccaactacccccactcttttttcagacccagcgttagccagagagaagcccagcctccgcctggagggagtggatgctgtgagcagctgggattcagaggcctgagtgggcctggaccagggctgggagggggcagagagaagg

SEQ ID NO: 767461 - DNA, 614 bp, Homo sapiens
gtctcccttacttgataggaattctaccgctactaccagcagctcaagcttgaaggacccggggagcaggagaccaagttggacctcattagcaaaggtccgaagagcctgaggaagctggggtggaggatggtataccaggcgggggatagcatgagcaaagagaacaaagatgagtgccctgtgttagctagcagccctgagccagaggaggactgaaggactacagcagggagagggggacaataggaaataagggccggcaatgataaaatgggggcagatcctggatgaccttgaatgcctgaggtgtttggactaaaggcagtgggaagcaatttcagattcttgagtgaggagtaacatgacctgaggctcctgggagaggccaggcccccgggtcttgagttgtagggatttggaggcgaggtctgggttagggttagagtayggctgggactggttaaggaggcgtctactttcaagtaatcccagccgttttggggaatgtttatgttgtcttctgttgctctgtcttccccacaacttggagatttcttccatcccgcaggagaggagccaagagcaggcaaagaggaatctggagtttcagt

SEQ ID NO: 767462 - DNA, 595 bp, Homo sapiens
gaaagcaaaactagccaatgggctaaacacaggagcagaagccagcacagcttcctggagaggggccctccaggggcagcagtgggcaggaaggcctaatcccgaggagccgacatgatggatggttcaaccagctcaggggctctagcagccagccaagccctgagttcttattccagaagggctgcagagtccacagctgtgtggcagggacagggccctgcgagggctgaagtcccactttcattctttcattctccatgcacttcttccatgcccatgcccaccctgcagccccgggcacggcaggmtgagccagttcagaagcagggattgtggcttgatgtccatgcgcttggggagctgcagcgccaaggagtgcccccaactgacgacagccccaagtacaactactccctgcgacccagcggaagttatggtgagagcctggaccaaggcctgccgccacaagcttgcctgaccatgactaagaagaatgtccaagatggttgctgctagcccctatgtattccccaggatggccaccaggggtctctgtggcccccagctggaagtgcccctgccagcgggggtg

SEQ ID NO: 767463 - DNA, 621 bp, Homo sapiens
ccattgccgagttagttgtttgattagataaacaaagcagcctggaagctcaaactgggtggagcccaccacagcttaaggaggcctgcctgcctctataggctccacctctgggggcagggaacagacaaacaaaaagacagcagtaacctctgcagacttaaatgtccctctctgacagctttgaagagagtagtggttctcccatcatgcagcttgagagctgagatcgggtggactgcctccacctgacccccgagtagcctaactgggaggcacccccccaatagaggcagactgacacctcacacagccgggtactcctctaagacaaaacttccagaggaacgatcaggcagaagcatctgcggttcaccaatatctgctgttctacagccacygctgcagatacccaggcaaacagggtctggagtggacctctaacaaactccaacagacctgcagctgagggtcctgactgttagaaggaaaactaacaaacagaaaggacatccacaccaaaaacccatctgtacatcaccatcatcaaagaccaaaggtagataaaagtacaaagatggggaagaaaacagagcagaaaaactggaaactctaaaaatc

SEQ ID NO: 767464 - DNA, 621 bp, Homo sapiens
ccattgccgagttagttgtttgattagataaacaaagcagcctggaagctcaaactgggtggagcccaccacagcttaaggaggcctgcctgcctctataggctccacctctgggggcagggaacagacaaacaaaaagacagcagtaacctctgcagacttaaatgtccctctctgacagctttgaagagagtagtggttctcccatcatgcagcttgagagctgagatcgggtggactgcctccacctgacccccgagtagcctaactgggaggcacccccccaatagaggcagactgacacctcacacagccgggtactcctctaagacaaaacttccagaggaacgatcaggcagaagcatctgcggttcaccaatatctgctgttctacagccaccgctgcagatacccaggcaaacagggtctggagtggacctctarcaaactccaacagacctgcagctgagggtcctgactgttagaaggaaaactaacaaacagaaaggacatccacaccaaaaacccatctgtacatcaccatcatcaaagaccaaaggtagataaaagtacaaagatggggaagaaaacagagcagaaaaactggaaactctaaaaatc

SEQ ID NO: 767465 - DNA, 509 bp, Homo sapiens
taggcaatgtggcaattaatctaggtagtttagggagatttaccagattggagaatgatgagaaaagaagagatgatacctatgaggctaatattgaggaaggagaatacaatattaacaaaacaggcaagggaatttaagccatttggtcatttggagccattaagtgaaggaaaaatggaaaattgacagatcataagagccaytggcacatcacccactgtaatacaatattatcttctatgtccagaagaatggaaagtctagaaaaaaatgttatactcgatacactctattcaagaagaaaaggtatggcatttataattatttctacccaagttacttaaggaaaaaacatttggcattaagtgtataattttaaattatttcaaaattcaagttaatgtaattgctctctttttcatgatgtacataaataagatggcatcagtagcccatacttggaacagatttgattcaactttctgtaccacatttggcaccaggag

SEQ ID NO: 767466 - DNA, 642 bp, Homo sapiens
ttaactcggactctctccaccgttttttttttttttttttccaagaaaaaaaatggagacgggggctctcactctgttgcccaggctggtctcaaactcctggcctcaagtgatcctcccatcttggcctcccaaagtgctggggattacaggcatgagccactgcacttggcctgactttctcctctttggggcagctgtgtgttcagtggtgtggcttyatacgggcatctaacctactggctgaccctgttctgtccgcctgcgctccatcccaccacagctggcacgtctcaggatggccaggcagcctggcatggggcagaatatgggcactggggccagccaagcctgacatctactcccagatccctgcttctcagcctgtgacttgggcacgttccttatctctctgggttacagttttcttaactgtaaaaaaaagatatgcaaagcccctgacacagaatgagttctcaacaatggcagctttggatgagagtgatgacttggaagcccagaaagccctgactgttgacggctcatgaggtagctccatggggccagcagtgttttcacaagtagtccagagggcagaagacagtcgcagtggtgccaagtgtggacagtttggccagatcc

SEQ ID NO: 767467 - DNA, 540 bp, Homo sapiens
agaatgggtgacctgttgttatatgagaaataaactcctatctcatctgaggaataaaatgtaaccattttagggctggacatagtggctcacgcctgtaatcccagcactttgggaggtggaggcgggtggatcacttgaggtcaggagttcaagaccagcatggccaacatggtgaaaccccamctctactaaaaatacaaaaattagcagggcgtggtggcagatgcctgtaatcccagctacacgggaggctgaggcaggagaatcacttgaaactggaaggcgaaggttgcagtgagctgagatcatgccactgcactccagcctgggtgacagagtgagactgtcccacaccctccccccacctgccaaaaaaaaaaagaaaaagaaaaataagccattttaaagtgaacaattcagtggctatgttaaggtcatttggattaccgtgaaaacataactgctttatgtgtctctctcttttttcttttataaacaagtctctcctttaaaaaaattctgttgggatcacagaaa

SEQ ID NO: 767468 - DNA, 595 bp, Homo sapiens
gccatgaggcataataaaaaagaaaagcttttattttttctgtctaaaaaatgtatcctgctctcaaggctgaaagtctctggagtttctgaacagcagatttttaacattgacatgtaactgtgacaactgtatgtattctattcttacctttctgaaatagaatataaaatacagtttgtcatgtttcttactgcatcattatatattgagttgactcaagactacatataacttttttttagtttattggtcacttgatcatgagaaaatacatcttggacttgraactaaatgcaaatattatatggaacactgataattcctcctttcataatttgtgaataccttttgtctgatattttctcctttcataatttgtgaatacctttcatgtggggaataaagggtgagtatggatatttagtcaggaaaagacagaccatggtgatgactaataaggtgtcctgcttgcatccattctgtcttatgtctgtattaagtttccagggtatttggttcccagttaaaaaccataatgttctgtatcctttgcagctaagtatggtcgcataaatcaattctatctaccaag

SEQ ID NO: 767469 - DNA, 563 bp, Homo sapiens
taacctttaccatcttatgccatcttagccatgtttaagtatacaatttagttgtattaagtataattaaaatgttgtacagtcacgttaccaacatccatttctataactcttttaatcttgtaaaactgaaactgtattcctattaacaaaaacttccaaatttccccttccacctgccactggtaacgaccgttctactgtctgtctctgtgagtatgactactataagtacctcatataagtggaatcatagtcttttgtgactggctcatttcacttagcatagtgtcttcaaggttcattcatgcagcatatgtcaaaatttccttctttcattaaggctcaatartgcttcaattcatgtgtataccatattttgcttattcattcatctactgatgaactcttggctggctcccatgttttagcaattgcagataatgctgctatgaacatgggtataaatatcattttgagatcttgatttcaattcttttgggtatatacccataattggaattgctggatcatatgataatcctatttttaattttttgagg

SEQ ID NO: 767470 - DNA, 542 bp, Homo sapiens
gtcctctttaattgcattgactctccacattttgaattttggatattacattttacatctctttataatgcctatctcttaataagttagggtcgttattatcatttttaataattttgtcttttagtcatcaaactaaagatataattatataattgcttacataacactaaaatagtattagaataagtattaaagtaagtctaattttgtctatatacttagttttgccagtgaattttttaccttcaaatgtttttctgtaacaggttagtgtgcatttctttcagtttgaagacctccttcgttatttcttgtatgacaygtctagtagtaatgaattacttcaactttggttgtctgggaaaatatttatcttttcttcatttctgaaggatagctctgttgggtacagaattcttggttgaagcttctttccccttcttcatcattctgaatgattcctcctggctggcaagttttctgctgagaagtcagctgccagatgtattggagctacattatatgttttttacctcttt

SEQ ID NO: 767471 - DNA, 634 bp, Homo sapiens
cacacacgttgtttccttacatctctttctttcttacacaaaggatagcgtactatatatacttgtttgctttttgcttttttctacctaactgtatgtcctgaaagtgactccagtcactataaagtcagtttatagagattaccttattgtttcctacagacaaatagtacttgattgtgtagatgtaccataatttagtcaaccattcttctaggtattggaattttgaatgtgtctaatagttttcatgaacaatgctgcgatgactaasctgttggtgtatatggttttaggcatatctttaagaaagtttcttagcagtggggttattggatcaaaggggttaggtgcatttgtaattttgttggatattgctaaattcctctcttgaaaaattgtagcagtttgcatttccaccaacaatatagaagtattactgttttcccacagctttaccaacagaatttctggttttactttttaatttctgccagctgatggatgagaaatggtatttagatgttgttttaatttacatttctctaattatgagagattttgaatatttttcatatataaaatatatacgtttcatataacatgagtgtattgcatgtgtgtgtgtatttgt

SEQ ID NO: 767472 - DNA, 634 bp, Homo sapiens
cacacacgttgtttccttacatctctttctttcttacacaaaggatagcgtactatatatacttgtttgctttttgcttttttctacctaactgtatgtcctgaaagtgactccagtcactataaagtcagtttatagagattaccttattgtttcctacagacaaatagtacttgattgtgtagatgtaccataatttagtcaaccattcttctaggtattggaattttgaatgtgtctaatagttttcatgaacaatgctgcgatgactaacctgttggtgtatatggttttaggcatatctttaagaaagtttcttagcagtggggttattggatcaaasgggttaggtgcatttgtaattttgttggatattgctaaattcctctcttgaaaaattgtagcagtttgcatttccaccaacaatatagaagtattactgttttcccacagctttaccaacagaatttctggttttactttttaatttctgccagctgatggatgagaaatggtatttagatgttgttttaatttacatttctctaattatgagagattttgaatatttttcatatataaaatatatacgtttcatataacatgagtgtattgcatgtgtgtgtgtatttgt

SEQ ID NO: 767473 - DNA, 596 bp, Homo sapiens
agtgcggctgcccagtgggtacaggagtggagtaacccggggcctgggctaggggacagcctcacggggagaccgtgttgagctggagtggagcctgttgaagggcagggctggagtagaaagcatggactttggggtttggcctggcttcaggtcctggccagtagaaggacagggtggtttgggctcagtcaggggtggggaaagtgtggcctcttactgaccagttggcttctctcttggttgcaggacagtgatggrgacaagagtgatgatctggtggtggatgtttccaatgaggtatgggcaggcccggtcgcaagggggctcttggtttggcatggtttggaattattcctccccagggtgggatctattctgtctgttctagtattactggcagcctgagcagggagacaaggcctccagtcttggggtctcagggggtcaagaggagcagggcagggctttgctgcatggtgtctgggcatttatgggcctggagggcctcctgcaatgggtctccagagagacacccccaaagatcccaggtaggggccatcttctattccccgtgatcctccgtccccccaggg

SEQ ID NO: 767474 - DNA, 605 bp, Homo sapiens
cagcagacctgagttccatcccccactggcctgtgagccgccctgtgacctcatgcaaggcagcctcccttttagtctgcaaaacggggctgacacctggctttcccagctctggggggtaggaatcccagggcaagtcaggtgatgtccatggagcaggggtctcgtagatgggactggttgtacaagactttctattgtggtgaataaataataagagttaggggtcgagcgcagtggctcacgcctgtaatcccagcactttgggaggccaaggcgggtggatcacctggggtcaggaaatcragaccagcctggccagccaacgtggtgaaacctcatctctactaaaaatacaaaaattagccgggcgtggtggcaggcgctattcgggaggtgaaggcaggagactcacttgaacctgggaggcagaggttgcagtgagccaagattgcaccaccgcgctccagcttgggcggcagagcgagactccatctcaaaaaaataaaaataaaaagaagagttagggttggcggggagaggggccctttttcaggagacagttttcctttttacctcctggacctggggtggcctcctctcca

SEQ ID NO: 767475 - DNA, 552 bp, Homo sapiens
atggtgggaaaatggatccctacctcacacagtacacaaaaataaattctcaaaggattaaggtttttaagcttatagtacagaatattggagaacaacctcaggactcagaggatgggaaaaattattgaacaagacagtaagcaaaagctataatgaaataaagatcaatttgatgatattaaattttaaaatacctgtacaacaagagatactataaagtaacaaaacatgaaaaaacataaacacaatgcctacaactgaccgaaaaaagtggtgtctggaatagataatgaattattccaaatcagtacattgaaagccaacaactcgagaggaaaatgggtagaggacataaataggtgattsacaggagaggaagcagaaatgctcaacaaacacgtgaaaatacctcatctcaccagctatcagggaaatgcaaatttacaaaacaaaatgaaatggaacgacccattcccattagactggcaagttttcgagtttgatcatatgaagcttccatgagggtggtgaatgactagtattgtcaaa

SEQ ID NO: 767476 - DNA, 548 bp, Homo sapiens
atcagatgaaaagccagcaactgctcctgagaggacctcattgattaagtctctccttgttattaacagcaggaactctgggcccagggtgtagccttgcagagctctgagggaaacagggtgatgaaacagagacctgtggtcacaatcaacacatgccccttgttggctaaagcccacactccctccaaggcccacagggtcccaggtgacttcagcagcctccgctggtgccccatgctgggctccagtttcagagctgcaccaaccctccccaggcctgctgccccagtagcacccagcaatgggcttgagccggctcccactgacctttgattgtctgcgttcagtgacatcatgccaccatgagagtgtttacaccatacaatgccaaatgctaccaatctgytgacccctccaccgcccaccctagagccaattattagaaatttaccagcaggtcactgtgcatgctgacctttgccagacacacacttccttcccttttaaaaaaattattattatttttttagagacagggtctcgct

SEQ ID NO: 767477 - DNA, 608 bp, Homo sapiens
cctttttcgaggactccaggaaccctttgatgaacattgacttctaacattgaggcctctggctccccagcttcccatctttctgtgtctcccattaatgtgagacatatttaaattctgggagcagagaatctggctctaggtagaaaagcgtccaagcttggatttagataaagaggctgaggagtctgaacacattgagaccaagcrgttgatgtgtcctcattcattcagaatcactcacagtcattgaaggcttgctgccagctgcgttatcttgcttaattctcacaacaaccctgtgagcaaggctctagcattatcccaattttacagatgaggaaactgaggcttagcaaaaacaagtgtcttgcctaaggtcctaaagcaaaaaagctagggtgtcaggattccaacttgtatatctgcaagtagcacttaagctctgagtagcaggctgtgcctaggttgcgtggagtcacctgttcatgtatatgcttaatggccttgtgtcatcattacattcaatatcactactctaataaaacagataaacatcaaggaaacataaatgaccccaaaaagcctcagtcaggcagagattggca

SEQ ID NO: 767478 - DNA, 683 bp, Homo sapiens
taaaacttgtacccatgaaaagaatgtgtattctgcaattgttaggtataaatcttttatacatttctattaagattaaggtactcaatagttgtggtcagttcttctttgtcctttctgattttcttaatctaattgttctatcaaccattgagagaagggcgttaaaactttctgctatcttcctttcaaaattctgtcgatttttgcttaatctattctgcaattctattagtaggtgcacatatatttataaatagttataatacttcagtaacttgtccattctatcattatgaaattctttatctcaggtaatatactttatcttgaagtccattttatgtgatatgaatatagcttctccaaccactctggccttcttacacttatggtttgcataaaccactttttttccagatatttgctttcaatctgtctgtctcattttattcaactttttttgtaggcagcatgtaccaggctctttttattcatcgtatyattaacatttctgtaagcactaatatggttagatttagttttactattttattaaccactttctgtttttcaaaacttattctgcctttcctgccttcctttacattatttgaattttttttagtgattcatcctaatttatttgttgtttcttttgttgagaactcttcatattttat

SEQ ID NO: 767479 - DNA, 569 bp, Homo sapiens
agtgacaagatatgccacagaagctaaaatcagggtgggtatggctaatcaccaacagcaacaaggatgtcaggggaaaagcagttgtataggagaagcaagaggaaaagaacaatctattactgacctaagaataaaatatatatatatatatatatatgtctccaatgatacactttctagaggaagatttcctgcttagactaaaggaataagtagatcaatctgagaacaattaataaaaaaaaaaagtttaaaagattgggcttcagatgtcccaaacttcaagyggttgtgtggagactgtagatagaggtgcaagtgtataggagttgcttgaggattagcgctctgaaatatgaagtcccacattgaggaggtaactattagacattagaataaaaatgaacccgaacaggaatctgtcattatgagaagaagatcgagatatttgtgggtgagtgacctgagtaggttaatttcaggaagtctcaaaaggcatactcagaagccgtatctttcgctacctcatggtacaagtgaaaacggatgccaagggtaccctaact

SEQ ID NO: 767480 - DNA, 646 bp, Homo sapiens
atgcatactatggagttcttaaagtttttttaccagtttgatgggcataaaaatatccaatttggccgggtgcagtggcttatacctgtaatcccagcactttgggaggccgaggcggccagatcatgaggtcaggagatcaagaccatcctggccaayatggtgaaaccccgtctctactaaaaatacaaaaattagctgggcatggtggcaggcatctgtagtcccagctacttgggaggctgaggcaggagaacagcttgaacccaggaggtggaggttgcagtaagcctaggtcgtgccgctgcactcctgcctggcgacagagggagactccatctcaaacaacaacaacaacaaaatttgataggcaaaagcattttttttcaacctgcatttttaaattatgattattgaacatattttctcttttcttgcatgtttaatatttaaccatcaatcagctgtttccttcaggtgaacataattttatatatgagggaaacatgcaaatttattttggcatattaaataacttatattcatagttagattgacacataaagtgttaaatgaacacagaggtgatgtcaaaactgtcccagtaaatccttgttcattcattttaaggttaaaattaactgtg

SEQ ID NO: 767481 - DNA, 637 bp, Homo sapiens
gagctaaaattaagagttttatgagctgttaagaatgaggtagtttctcctaggaccccccaaagacagtgcaagtaatgaccgtttggatctcattcgtcgatctttgatagtatgttctggagtctactccccaggagccaggacaggygtgaagatggagtccttgtcgcagctggagccttgcctagctggtgatcacacagcctggcctgtacctgcaccccactggatggtggtacatggtggcagggacaggaccacacccagttaaggccagaccaggctgagtgtgacccctgaggtaaacactccactaagctgtgtcttgttcatgccccctgctcagtgaaaggtgagtcccgagaccagttgggtacctctctatgcgaaccagagacatttctggatccaggccaggtgaagattagggccaggaagcctgagcccccggggcctcaaggtagggagccgaagaggctgccaggactctgctgggttgaaatttgccggggaggactcttgtctccccctcaggagtatttttgttgaggctttcctggaggtgaagaagcaattcccattgcagcaggttagagcgagaatcagacagagggcaaaaaccaattcgcttctc

SEQ ID NO: 767482 - DNA, 637 bp, Homo sapiens
gagctaaaattaagagttttatgagctgttaagaatgaggtagtttctcctaggaccccccaaagacagtgcaagtaatgaccgtttggatctcattcgtcgatctttgatagtatgttctggagtctactccccaggagccaggacaggcgtgaagatggagtccttgtcgcagctggagccttgcctagctggtgatcacacagcctggcctgtacctgcaccccactggatggtggtacatggtggcagggacaggaccacacccagttaaggccagaccaggctgagtgtgacccctgaggtaaacactccactaagctrtgtcttgttcatgccccctgctcagtgaaaggtgagtcccgagaccagttgggtacctctctatgcgaaccagagacatttctggatccaggccaggtgaagattagggccaggaagcctgagcccccggggcctcaaggtagggagccgaagaggctgccaggactctgctgggttgaaatttgccggggaggactcttgtctccccctcaggagtatttttgttgaggctttcctggaggtgaagaagcaattcccattgcagcaggttagagcgagaatcagacagagggcaaaaaccaattcgcttctc

SEQ ID NO: 767483 - DNA, 598 bp, Homo sapiens
cctagttcttcacattcactcactactcactcactgactcacccagagcaactcccagtcctgcaagctccactcatggtgagtgccctagacaggtctaccattttgtatcttggttttttattttttatttttttgagatggagtctcactctgtagcccagagctggagtgcaatagtgcgatcttggctcactgcaacctctgcctcccgagttcaagcaattctcctgtctcagcctcccgagtagctgggattacaggtgtgcaccactatgcctrgctaatttttgtatttttagtagagacggggtttcaccatgttggtcaggctggtctcaaactcccgacctccagcgatccgccagcctcagcctcccaaagtgctgggatttacaggcatgagccactgtgcccggcccattttttatctttatactgtatttttactgcatgatttctatgtttagctatgtttagatgcacaaatacttaccatcgtgtgacaactgcctgcaacattcaggacagtcacgtgctgcacaggtttgtagcctaggagcaaaaggctggaccatggagctcagggatgtagtcg

SEQ ID NO: 767484 - DNA, 586 bp, Homo sapiens
aagaattttggggggtgggtgtcgggggatggggaaagggactttccacggacaccagtaacgtgtccccaccatactatgtcatggggaggactgatagtgggtgccccacagttcctgagggtgcctgccccgctccttcactcagcccttggagacctggatgggtgggcacaggaggtggtgatctggtgccacccagtggagggtttcaattctgcagccctggggcagtcggcccaggtactgggtaaatgcagcccacctgattcgggggcagaggcgagggatcaaaggcraatcatctttttttattttttattttactttaagttctgggatacatgtggagaacgtgcaggtttgttacataggtacacatgtgccatggtggtttgttgcacctatcaacctgtcatctagattttaagccctgcgtgcagtaggtatttgtcctaatgctctccctcctcttatcccccacgccccgataggtcctggtgtgtgatgttcccccaccggtgtccatatggtcccattgttcatctcccacttatgagtgagaacatgcggtgtttagttttct

SEQ ID NO: 767485 - DNA, 505 bp, Homo sapiens
tggagagatttaagaaacaaataaacattccttcttgctttgttcatcccacaaagagacctgatctatctgttcagagccaaatggatgtaattaggtgaagaatcgctttctctgtatctgagcaaatatgttttgcagtgcaccaatttctcaagggcagtgggctgggacggccagtgactgctgggggatggctgctgaccttcaggccaggccgactttaatttgcagaacactgctggtcccaggaggctcttcaggccaggccacacaatcaacytgaaccagcagcctgctgctgcccagctgcacccaccaccctgcaggacatgaagatgtagctaactagacatagctgctgcacagactttggaattatgaattgagaaattaagcatcatcagaattcagccctttatacagcaaccaagaagccttgttgtctcagtggtgcctctttccaactgcattatttaacaggagagtctctgtagatgttgca

SEQ ID NO: 767486 - DNA, 507 bp, Homo sapiens
tgcttctgctttaccttcttccatgactgaaaatttcctgaggcctccccacccatggaaaactgtgagttaattaaacctctttcatttatgaaatattcagtctcaggtatttcttcatagcagtgtgaaaatggactaatgcacccagtaatgagattgatgggttgaatggtatttctgtttttaggtctcgaggcctcaattatcacacggtcttctgcaatggctgaactaatttacactcccacaaacagtgtataagcattcctttttctccacaacctctatagcatctgttattttttgactttttaataatagycattctgcctggtatgagatggcatctcattgtggttttgatttgcatttctctaatgatcagtaatgttgagttttatttcacatacttcttagctgtatgtatgtcttcttttgagaagtgcctgttcatgtcctttgacactttttaatggggttgttttttcttgtaaatttgtttaa

SEQ ID NO: 767487 - DNA, 435 bp, Homo sapiens
gagaatcacttgaacctgagaggcaaaaaagtttgatttaaattatcatgattgtgttcattactcacaatattggtaccccagaattgttctcacctatttattttgacagcacaaacttggcctaacacatgaatttatcttcatttgtttyttttattcttccttagccaacatcaggttttgctgacctgcttgtttcatgttctgattttctgaattaggatgaaatttcgttactctaaacctgtctctctcccatatgggttacaatagaatccaccactttaaacaatccccaattggaataagaaaatcctcataaaccctgccttcttagagtgtgtacatgggacctcattctgtagattttcattacttcttgttgtgtttttttttattattagttttttaaaaaacaggaggagaaagaga

SEQ ID NO: 767488 - DNA, 670 bp, Homo sapiens
tttattaactcacagttttgtaggtcagaagttcagtatggtgtgcctgaattttctgtggctgttagctagggacttctttgtagtttctggaggctactctcgggtctttgtcctgttgtccttttgcatttcagaattggagaacttcccttataccatatttctctcattctttgaatctctctgaccttttgtgaccagttagacaaaattccacttttaaattgcttgtttgattaggtcaarcccacccccataatctcctatctttaagtcaacttattaaggattttagttacatctgcaaaaattccttcacagcagtgcttgcatttgtgtttgaggcctgagaatcttgagggccattttcgaattctgcctaccacagtatcttcaggctagatttctagaagcatgattactgggttgaaaggtaaattcacgtgtaatatattccagtatatggttcttgttgctagatttccattcacagagaataatccttttgcattcccgtcagtaagatattatagtgcctgtttcctggtaggctgattaagaagattatgtgttcaaaaatttagatatttgtctgacaagtgaaaaatgttaatttatgtattttttcatctgaacagaacatccttttctatgcttaatagccatt

SEQ ID NO: 767489 - DNA, 744 bp, Homo sapiens
ctacttcttgctcactggatccaataggcataatgtcctcagtgtaatggaccagtgtgatatcttttggaaacaaaaagcaatcaagttctctctgggtaagattatgatataaagctggagagatatacctctgaggtgggacagtaaaggtatattgctggccttgccactgaagaaaaattgcttctggtgggccttatggacaggaatggagaaaaaggcatttgccaagtcaatggctgcataccaggtacaaggagatgtgttaatttgctcaagtaatgaaaccacatctagtacagcagctgcagttggagtcaccacttcgttaagcttacaataacccagtgtcattctccaagatctgtctgtcttctgcacaggccagatgggagagttgaatggggatatggtgggaatcaccacctatgcatccttcaagtccttcatggtggcactaatctcygcaatccctgcagggatgtgatactgtttttgatttagtatttttctaggtagaggcagctctaatggcttccatttggcctttcccaccatagtagccctcaccctaccagtcagagagtcaatgtgggcgttctgccagcttctaagtatgtctatgccaattatgcattctggcactgaggaaatgaccacagatgattctggggaccaactggacacactgtaagtcaacgtgagctaaaactccgttaattacctgacctccataagcca

SEQ ID NO: 767490 - DNA, 620 bp, Homo sapiens
cctcatccctgcatctttcaagtccttgatggtggcactaatctttgcagtttctccagggatgcaatactatttttgatttagtgtttttctaggtagaggcagctgtaatggcttctattttatctttcccaacataatagccctcaccttagcagtcagagagcctatgtgggggttctgccacaatttcagctctttctctgcaggagataaaactctcaatcagggcaattttagcagatttgaggctcagtatcttcttctgaagccaggagacagaatctctgagttcatcattttctttcmtcactttgttcactgaacttagaagcaaccaaccagcttcattatgttccttggttttccacatatggtcaaatgtattacatatagagtcactaaattccttgcctctcatgagcagtgaatcaggagtgtcaaatgcatttattttgcataactctctaaacagttcacgccaatgactatcagtgttctccatacttttagaaatagagtcctccagaaaccccaaaaccaatgaaagaattccaaccttaatattctcttcctctagaactactcctggtaccaaaatctgtattagtcagggatcc

SEQ ID NO: 767491 - DNA, 620 bp, Homo sapiens
cctcatccctgcatctttcaagtccttgatggtggcactaatctttgcagtttctccagggatgcaatactatttttgatttagtgtttttctaggtagaggcagctgtaatggcttctattttatctttcccaacataatagccctcaccttagcagtcagagagcctatgtgggggttctgccacaatttcagctctttctctgcaggagataaaactctcaatcagggcaattttagcagatttgaggctcagtatcttcttctgaagccaggagacagaatctctgagttcatcattttctttcatcactttgttcactgaacttagaagcaaccaaccagcttcattatgttccttggttttccacatatggtcaaatgtattacatatagagtcactaaattccttgcctctcatgagcagtgaatcaggagtgtcaaatgcatttattttgcataactctctaaacagttcaygccaatgactatcagtgttctccatacttttagaaatagagtcctccagaaaccccaaaaccaatgaaagaattccaaccttaatattctcttcctctagaactactcctggtaccaaaatctgtattagtcagggatcc

SEQ ID NO: 767492 - DNA, 608 bp, Homo sapiens
gaaaccccaaaaccaatgaaagaattccaaccttaatattctcttcctctagaactactcctggtaccaaaatctgtattagtcagggatccctagagagcagagctaatacgatagacataaatatacctatagaggggagtatattaaatattaacttacacaatcagaargcacaataggctgccttcaagcttgaggagcaaggagagccagtttgagtctcaaaactaaagaacttggagtctgatatctgagggaaggaagcattcatcacgggagaaagatgtaggctgggaggctatgccagtcttgtcttttcatgtttttctgcctgctttatatttgctggcagctgatttgatggttcccatcagattaacagtgggtctgccttccccagcccactgactcaaatgttaatttcctttggcagcatcctcacagacacacccaggatcaatacttcgcatccttcaattcaacaagttgacactcagtattaaccatcacacccagtaatgggattgctgggttgaatggtagttctatttatcgctgtttggggacaattgctacaatgctttccacaatggttgaactaattt

SEQ ID NO: 767493 - DNA, 627 bp, Homo sapiens
agatattatgtatttgttcatttatttgccttccaggagaatttaaggtcaatgtgggcagagtagttggttcacggttgttccacaataaataggttaataagtccatgagtgaatgagcaatacctgtaaagctctttgcccagtgtgtggcatacaataagcactcaagatattcatagtggtcataaataatgagaacacatttttattaatgatggtctttgaaatggcttgcctacattttcttgatcacactacagacatatgatgttaggcatgggttggcctatcatggattaytgactccagtctctgctcctcaaccccttgccaggaatataagggagccatttatctaaaatattaggatgttactggcttttcttgcaacttcaaaaatgtgtctattttgaaaagaaagctataccaataccttgaaaagttatttgtatcagttgatgtttgcaaaaatactgaagatactaatttttagcagaaatttgtttagaactcctgcaagccatgtgagcttaaaatctgaattgaagataaggccttttgcagtagtaaacagataaaaagcacaaaaagatcaagtgtgctaacatggtataccctggttta

SEQ ID NO: 767494 - DNA, 627 bp, Homo sapiens
agatattatgtatttgttcatttatttgccttccaggagaatttaaggtcaatgtgggcagagtagttggttcacggttgttccacaataaataggttaataagtccatgagtgaatgagcaatacctgtaaagctctttgcccagtgtgtggcatacaataagcactcaagatattcatagtggtcataaataatgagaacacatttttattaatgatggtctttgaaatggcttgcctacattttcttgatcacactacagacatatgatgttaggcatgggttggcctatcatggattactgactccagtctctgctcctcaaccccttgccaggaatataagggagccatttatctaaaatattaggatgttactggcttttcttgcaacttcaaaaatgtgtctattttgaaaagaaagctataccaatacctkgaaaagttatttgtatcagttgatgtttgcaaaaatactgaagatactaatttttagcagaaatttgtttagaactcctgcaagccatgtgagcttaaaatctgaattgaagataaggccttttgcagtagtaaacagataaaaagcacaaaaagatcaagtgtgctaacatggtataccctggttta

SEQ ID NO: 767495 - DNA, 589 bp, Homo sapiens
aaatactgtcaactacagtggggatatgcatgcatgaatcctacttgtaatacagagcaaatgcaactcttgtacactagtggtggaagtgtatattcgcagccatgttagaaaatcacttggcttatgcacacacaatcacacaggaattccactcttaggtatacatctaacaatactaagtttgtatagacaccaaaggacatatagaagaatgttccgtagcagctctgttcacatcagctcctaagtggagtcaaaaacaaaaaagccaatttatagtagaataagtaaatgaattttggtatatttacacagtgrcatgtaacagtgagatcaattaactattgccatatgcaacaccacaaatgaattcctccccctaaatatgttggtgtacagaaatgctagtgatgtttgcacattggttttgtatctggagactttgctgaagttgcatattagcttaagaagctgttgggctgagacgatggagttttctagatatagaatcatgacatctgcaaacaaagagagtttgacttcctatttgaatatgctttatttctttatcttgcctgatttccct

SEQ ID NO: 767496 - DNA, 456 bp, Homo sapiens
ttcaggagctagtttctaccctcattctcatctttagaggtgaagaaattgaagcctagagaactatagctagtaagattgaagttagggcttgaactcagacttgtctggtcctaaataaagcccatgttattaactgagctatggtatttaattcagctcaaatattttaattatttatgacagctcttaaaagcaaaggtataattatctatggaaaaaatagagagagtgttgataaaaacgttagagaacaaaaaagcagaatactactactgcaaaggagctgtgggtgttytgagtagacagaactcattcaagtgcttcctttgctggcatctggggacaagacagtctatccccctgaatttaatttttcttattttaaggtggtgttaatcactacccactcaccagaatggttaaatagaaaataccaagtggtaagtgtagaac

SEQ ID NO: 767497 - DNA, 597 bp, Homo sapiens
tcataagtgtgagaaatggattaaaagggagaccaactatagagaaggagagcaggtgcaatactttaagtatatggtatagaaagattttatagtgaggaaatggaggagcgtcagctgtgtggataattttcccaaatctatttaaacatctaccaacacaaaagaaaagtaaaatattggcttaaaaaagacaactcacaaaacacttgtaagacttaataacaggtcatgaaactagatagggattacaccaaacactttgcattccattttttgtttatcatttttaatcccagcaaaatcaaaatattctcatttttgagaaagcctctaaatgattaagcaacttgtccaaagttacgcagctggaaaatggcatggcaagaagtgaaatmcagggctcttcttgtcagagccatgtgactcagagcaactccattttaaataggagctggataaaatgaggctgaaacctactgggctgcattcccagatggttaaggcatttgaagtcacaggatgagacaagaagacaacacaaaacagaggtcatcaccaacatggcacatgtatacatatgtaacaaacctgcac

SEQ ID NO: 767498 - DNA, 597 bp, Homo sapiens
tcataagtgtgagaaatggattaaaagggagaccaactatagagaaggagagcaggtgcaatactttaagtatatggtatagaaagattttatagtgaggaaatggaggagcgtcagctgtgtggataattttcccaaatctatttaaacatctaccaacacaaaagaaaagtaaaatattggcttaaaaaagacaactcacaaaacacttgtaagacttaataacaggtcatgaaactagatagggattacaccaaacactttgcattccattttttgtttatcatttttaatcccagcaaaatcaaaatattctcatttttgagaaagcctctaaatgattaagcaacttgtccaaagttacgcagctggaaaatggcatggcaagaagtgaaatccagggctcttcttgtcagagccatgtgactcagagcaactccattttaaataggagctggrtaaaatgaggctgaaacctactgggctgcattcccagatggttaaggcatttgaagtcacaggatgagacaagaagacaacacaaaacagaggtcatcaccaacatggcacatgtatacatatgtaacaaacctgcac

SEQ ID NO: 767499 - DNA, 565 bp, Homo sapiens
ctgatgaaattctagttcacacatcgtaagcctaaatttttgttccggtaatcaggccacacattgtctggtaaagaagttaataattagtcactactctggttttccaggatttctcaaatatttgaatgtcattgtaataagccaagtttatagtttacccctgtgaattaattcaacatacataattcaactgatgtaaaaaataagtaaataacttacttgtcatttttcttatgcagtctagtttctgagaatattttaaatttatctgctgtagcttttgatacttacttcctggtcacaaaagatttataacctttaattatcawttactcacactttaaaagtttcttatttctttgaaagattggaacagactatcaaatcatggctgttatgttcctttcttaaaattcaatgtagtcattacagaaactttctgcatttttagtattttttaagaataagctgacttttcaatgtaactgttgagcttctattactggagttaatgatgtgtttatataaactcaaactgttctattcatcattttgattggac

SEQ ID NO: 767500 - DNA, 648 bp, Homo sapiens
tttttagttcccccccccccttcaggtctgaaaatattaaatggaaaactctagaaataaacaattcagagtttttaaactgtgcactcttctaagtagtgtgacaaaatctctcaccacccaaattcatcccacctaggatgtgaatcacccctttgcctagcrtgtctgtgctgtagacactacatgcccattagtcacttagaaactgttatcagattgactgctgcaatattgcagcgcttgtgttcgtcacccttattttctgtgtatagaagtatattgttataatttttctatgagcttattgttgttagtctcttactgtgcctaatttataaattaaactttatcataggtatgtatgataggaaaaaacatagtggtatatagagtttggtagtatccacggtctcaggcatccactgggggtcttggaatatatcacctgcagataatgggggactaaagtacatttgttttatcttaacagcttatgaagaatttcaccctggttggctgacttgtaaaggcaggattcaggcatcccagatccctggtaaaaataccatcttataaaaaattcagggtttatgcttaacaatctgcagggtaggtttagattgtgaagggccttgagtgtctggc

SEQ ID NO: 767501 - DNA, 713 bp, Homo sapiens
ggcatctgttagttatgtaactccaaggttggaacaaggaaagtggtggtgctggagagcagtagaccagtcaggaagaaatgctgttttagggaaggggtgtgaagaaaggtgtgagtttctccttgacatattgagcttgaggtggtatcagagggagacatccgagtgaatgaatctgaaggcagctgggcaagccaggatgaaggtgggctgagggacctcagggtgggagatttkgaaatctttggtcccgggacaggagctgaagctgggtgtcaaagagagcccttttagggaagatgtggaggcagtgaaggcacagagagacgagatccacaggatacagtgccccaggagccaagggaagacatgactccaaaaggcagacatctctgcttacattaccttgaaaaagatgcagatcccaaaggccctgaaattgtcctgcacatactggttgtttttttgtttgtttgtttttcatttctttctgtttttaatcctcttggtcttttggttttgtattgttgccagaaataaaaatcagcagccaaagattctgaggaaggacagctgaatgtcaggaaaaatagtgtcataatgttttgattatatatacagtacctacgtggttttttttttttccctagtttgtgcacattggtagcaatgttaccatactctttccctaacctatcctctggatccga

SEQ ID NO: 767502 - DNA, 629 bp, Homo sapiens
gtcctggaccacacagcagaggactctgctcttgtgtttcactgcctgcaccgcagcacacgaagagatgggcaggtgggatcatggagttgtactcacttgaagacagcacaccccttctagagcacgctatatgtatcaaggccacagaatttcctgctgaaacatctctgagccagatccctgggcctgtgtgggctcttccccagtccatcctctgaaggactgaccagtcttcagtgttctgtgaacacagagacccttcacaatgcaggatggagccagagtgggactggaaggtggattggctaaaaggaaggagccaggagctggggcctactcactccatgacatcacatgaactcctaaaactttcgaacttggccttycaggtggagactaagttctatttgtcaatctatggagatgaaatatgatttatttctcagtctgttagctcgatttataatttttaaagacttagactatggaacacgggcctctatttctactattgtcaggggtatgcagggctgaggaaaaccttgagaaagtagagcatttgggtgatgacacagagttcgagaaccttttcccatttctacaatcagggttgaggacacactcat

SEQ ID NO: 767503 - DNA, 640 bp, Homo sapiens
gggacagagcactgtgtaaacgtatgaatctgataatagccaagctgcgttttaaaacagatgcagaaacatctcaaaaatgtttgcttttcagtgatgcattctccatcatgtaaaaatttaactattgagatgctctggtgacacgtggaatgggtcacacaaggaggaatgtatctcatgtgaaaggtcaatatcaacacagatgaaagagattgcattaggcaggttatgccactcaaggaaggacacacattttctaaatgaacgttgaaaaaaaaaacctattatataatggaaaatgtgagacaaatattatttacttcagttgattacatatgaaaagtgtgtactaaggcacacacawaagcaatagtccctttgtcttgctgtcaactcctttctccttttgttgtcagtggtggcacttctccaggttctaaaggggcagaaattcatttatctttcttcctccacagtcccctgggcactttgcctctgtatagggcttatccagtcaagagcccccatagctaccttcatcatagtagatcctgtattctattaattagagatggtcaagaaaaagaaagatgaggaggaagagggggagggggaaacataaagtgataggtgacaa

SEQ ID NO: 767504 - DNA, 632 bp, Homo sapiens
atacagtgacccaccaaaaatgaggaatgatctatttctctctctgtaatagtccaagggtgggaaggcccttcaaagctagtggtcatttctgccattctcaacactggatccaaggcagctccccaagttcttgctattccccagctaactggaagaggacaaaaagcttggtaaatatacaactgatcattttatgggaaagacctgaaagagatacacrtcatatctgcccaaatgccatcagccagaacgtagccacatggccacatataacagcaaggaagtctgggaaatgtagactttagttagccatctgctcagctaatattctattactatagtagaaagcaagaacagatatggtggaaccacttgcaatctaccaagttgtttgcccattctccatgcctcctttgttctacttaaaagaagcccaatattgtttaagggagcaatgtgcctagctaattgctcatttttcagcctccattgctgtgaagttaggacatgcagtgtgacacagacacggacagtgaaaataaaagcagaaattggctggaggttttagataaaccctttgctatactactaaaggaggatagatacagctggtattgtgtccttcctaa

SEQ ID NO: 767505 - DNA, 548 bp, Homo sapiens
aatatacatacattacgattaaacgaaagttgtttgtttacatgagggttcactctgtgtgttgcacattctgtggatgttgacagcggtatgatgacacatatctacaattatggtatcacacagagtcactgcccaaaaagtcctctgtgtcccgcctattcatccctccttcccttctccctaatgcctggaaaccacttatctttttactgtctccacaggtttgcctacctttttggcaccaggggccagttttgtggaaaacaatttttccatgaatgggggtgtggggggatgaaactgttccacctcagaccatcaagyattagattctcataaggaacatgcaacccagatccctcaaatgcacagttcacaatagggttcatgctccaagagaatctaatgctgccactgatctgacaggaggtggagctcaggcggtaatgctggctcacccaccactcaccttctgctgtgtggcccagttcctaacaggccacagactggtaccggtccctggctcagggcttgaggacccctgt

SEQ ID NO: 767506 - DNA, 590 bp, Homo sapiens
ttatgttcaatgtagtgcacattacaaatctgagtttatatccaatgtacacttctcaataaaaaaatagatatttctacatatcaatcattatattctatagctttcatagtagcaaaaaaaggagatgattattttttcattattascaaaggacactgggctttgggtaatggggatctaaatcaaggtaattgataatagttgagagtagctgaaattacacataagaaaaaatgcgcttataagcagtgtccttagaacccactaactatccagaaataaaacaatttactgtgttaataaaagagagaaattcaaaaggctgcaggaaactggagaccaagggtaattgagaatcttctgaattcttcagcagcatccaggaaacatgttctagaaagtgtcctcagattgaagaccactaatgtaaacatcaagctatagaaggagaaagtgagatatttttatcctaacttttcaatgcgcaggctggagtaaataataaaggagaaaaactcagaggactgagaaagcagtcaaaattggaattaagaagttgttcagaagaaggcagtccaaaagagaaa

SEQ ID NO: 767507 - DNA, 565 bp, Homo sapiens
ttcttatggaaagctattgtatactgttgcctgtaattggatttgtggtaccgaaaaccctttgggacttttttttacatgaagaaatcatgagctgcaaatcctcccttctttgttaatattcaattttggaaactcagtgtaaaattttatatgtcccctgtcaaatttcatgttgtttatttgacttctcaaaattaggtttcatttttactcagaagtccagtgtattagctactcttcacaattttctgttcctaaaatttttctaaataggtctctatgtctttgttaatgatgtagtttaaaatgtataaaagtaggcccaacatcagagctttatggcwccaagtcttccttccagtaatttttctttttcttttctttttttcttttttgaggcagagtctcactctgttgctcaggctgtagtgaagtggtacaataacggctcactgcagccttgacttcctaggctcaagtgatcctctcacttcagcctcccaagtaactaggaccacaagcacacaccaccaaatccattaatttttttttgttttttttt

SEQ ID NO: 767508 - DNA, 608 bp, Homo sapiens
cagcagctggttttattatgtgccttttctagagtaatgctacttgactgttttttttcactagcatccgtgctcttttttttccaaggaaaatataaattaaaaatttattgttatcgttatttgtttgtttagttaacatttgccatcttcaatcagaaggactgaagcaaaaattataagtaaaaatctactattcaaaatccatagctgtcaataagtttaaaggaaatataaataattaagtattgtataagttgaaaacatttattcttgtgaatttggaataaagtacaatttgtacttagaaaactttttgaaaatgtattctcttcctcgtgcagtatgaagtgctctatttaaatcatgcctgtttkccttgcctcttcactgaattgcaagttcctagagtgtgagggccatacttgtccacacacccaacatggagctctgggtacagggggtatgcagtcaaatgtagctgacactaagaggcacttcttatgattatggctccttgggcgtattgaggccatgtataattgcaccaaagaaattgatatttctatgactgccttggctcattccttcttcaccacccacatccc

SEQ ID NO: 767509 - DNA, 607 bp, Homo sapiens
aatattccgcatctataaggaatttaaatttacaagaaaaaacaaccccatgcccaataacatgggcaaaggacatgaacagacacttttaaaaagaagacatacatgtagccaacaatcatataaaaaaagttcaacatcagtgattattagagaaatgcaaatcaaaaccacaatgagataccctctcacaccagttagaatggctattactaaaatgttaaaaaaaaaaaaaaacaggtgccagtgaggttgtggaraaaaaggaaggcttatacattgttggcgggagtgtaaattagttcaaacattgtggaagacagtatggcaatttctttaagacctaaaaacagaaataccactcaacctaacaatcccattacttggtatataaccaaatgaatagaaaccattctattatgaagcacacatatgttcgttgcagcactattcagaagagtaaaggcatgcaatcaacctaaatgacccatcaatgacaaattggataaacaatatatggtacatatacaccatgaaataccatgcagctataaaaaagaatgagatcatgtcctctgcaggaatatggatgaagctggaggacatt

SEQ ID NO: 767510 - DNA, 530 bp, Homo sapiens
tggggccgcaggcggagcttcccgccagtcccgcgccctgtgccctgcaccggcactcctcagccctgcgcccgcactcctcagccccagttgatgggaccgcgtgctacagagcggggggcagcgctcgtcagggaggcttggctgcgcaggagcccatggccccagggaggaggcttggacatggcgggctgcaggccccgagtcctgccccgtggggaggcagctgaggccccgcgagaattcgagygcagggccggcagaccggcactgctgggggactgagtgcactctccgcagctgctggcccgggtgctaagcccctcactgcctggggcagccagccggtgccagccggtcgctccaagtgcagggcccacagagctcgcgtgtggagctgatgcccacctggaactcgcgctggcccagcaagcgccacgtgcagccccagttcccacccgcgcgtctccctccacacatcctgacaagcagagggagccagctccggcctcggcaagcccagagagggg

SEQ ID NO: 767511 - DNA, 530 bp, Homo sapiens
tggggccgcaggcggagcttcccgccagtcccgcgccctgtgccctgcaccggcactcctcagccctgcgcccgcactcctcagccccagttgatgggaccgcgtgctacagagcggggggcagcgctcgtcagggaggcttggctgcgcaggagcccatggccccagggaggaggcttggacatggcgggctgcaggccccgagtcctgccccgtggggaggcagctgaggccccgcgagaattcgagtgcagggccggcagaccggcactgctgggggactgagtgcactctccgcagctgctggcccgggygctaagcccctcactgcctggggcagccagccggtgccagccggtcgctccaagtgcagggcccacagagctcgcgtgtggagctgatgcccacctggaactcgcgctggcccagcaagcgccacgtgcagccccagttcccacccgcgcgtctccctccacacatcctgacaagcagagggagccagctccggcctcggcaagcccagagagggg

SEQ ID NO: 767512 - DNA, 530 bp, Homo sapiens
tggggccgcaggcggagcttcccgccagtcccgcgccctgtgccctgcaccggcactcctcagccctgcgcccgcactcctcagccccagttgatgggaccgcgtgctacagagcggggggcagcgctcgtcagggaggcttggctgcgcaggagcccatggccccagggaggaggcttggacatggcgggctgcaggccccgagtcctgccccgtggggaggcagctgaggccccgcgagaattcgagtgcagggccggcagaccggcactgctgggggactgagtgcactctccgcagctgctggcccgggtgctaagcccctcactgcctggggcagccagccggtgccagccggtcgctccaagtgcagggcccacrgagctcgcgtgtggagctgatgcccacctggaactcgcgctggcccagcaagcgccacgtgcagccccagttcccacccgcgcgtctccctccacacatcctgacaagcagagggagccagctccggcctcggcaagcccagagagggg

SEQ ID NO: 767513 - DNA, 607 bp, Homo sapiens
ctgggtttactggtcagatagtttttatatttgcctttaccaaatattttaaagtgtcaggttttgacaggaaggttataaaactataaacccagcctaaaacagggagatctttgtgtaatttttgataagtaagattaawttaatattgttagtttaatgaaacagctgtatcttttgagttctcagaaaagtatccatacatttaaattttaggttctttcttaggtgatcatataatattcacagcctataaatatgcttaacaaagaaataacttgaaatgatgactagctttgtctgatatctcagttctcataaataatgtaggtaaactgtttaaaaaattaactaagtcttttcatgtaatttgaaggcttaaagtcatgttaagttaaacaatagatacttattcaatgtcggagtcatttccaagtagcattaaaacattatgttataggaaaacatgtttctaaaaattataaaataattattaataaaacactgatatgttacagttaattcaaaattttgccttctaatttagttttcactaaaatttaaggctactaagggttaaaaattttaattaatatttaattctgcc

SEQ ID NO: 767514 - DNA, 482 bp, Homo sapiens
gaatctcagggtcatcatgatccttagagaatgttagttcagtggttctcaaccttctgagaccctttgttcacactctctccttcaatcctactctctcagtggggagtgggggagaatgcttggcctctctttgttgactcttgagagtgtggcagaaaaagtcagctgctatggtagctgatgagttataaagcaggctctgcgatcacatatagatgcaggaatggtgagaaacagcataggatagcaataagaattcagkagcttttagttgatccactgtgttcatggccacgccagcaggaggtacgagttcccaggttcagtaaagccatctatccatcactgagtctccccgcagatgatgttattctccactgtctgcgcaaacgttttcaggttctatcttcattcttcttgtgattttaggactgtcaaatttgcttaatatcctctttctaattctgttaactggattc

SEQ ID NO: 767515 - DNA, 601 bp, Homo sapiens
ttggccgcctgttactttcctggtgattgtgatgatttattttattttgcaaaaatgatttattttcttggtctcccctcctttgaagaaacttagctaacttgtcttgtctctttgccctctgccccggactctacagtaagtctcatttcagaacactgcccctccttcccatgggtaatggggtttctgcaaaggaagcctctttgaaccttttgggctgctgaatcgtgtcagcctggagacaagaagtttgttatgctcattgtgtcagctgcagacataattcatgaaaccatcccagacacaggatgtcaccaagtgatgcttcaattttacagtctcccagagctcctgttggcaaacagtgttggatgaaagctgggaggttttcaaaggccatgggcctycttttcctgccccttggttcccctttactttgcctcctccatctttgcctttctgtatgggtcatgctgtgtgcccctaagatttttaaagccaattagcaggttagagactgtcgaggcatattgacctgtgagatcacagtatttactgtcaccgtaatttctcataatattgaagcttatactggccc

SEQ ID NO: 767516 - DNA, 633 bp, Homo sapiens
taaaaaaatgcaaagtgcttaggaaactctctttagtgcttatctcattgaaaagtattagaagctctttaagtgaccagagaagggcttgtgcttcttactttagagatgaggaaattaagtaacttgttcacagtcacstacttacagagaagtggagctggttctcatatacataatattctaagtacccaaatcccaaaaaaaaaaaaatgcctcacactttgtgtcaggagacttcaagtaaaaagcaagggttagatttaaatatgaggccaataagggtcatatagaagacctagaagagaagagatgttacgttattagatgataagcatgggacaagttgacacaaagtacaggtctaaagtagagactagaacagaatggaaaagaaagacatgttaagaagcccttcccatggaaaggaacacttggttgtgatctcaatgtggggactggaactttttattctttatctggagtatggctatacagatgttctggaggatggctatacatatgtctgaagtatggctgaataaatgctctggagtatggctgtacctatgttggagcacctgctttatccctgctccagaataaaggttcttatcctgatttgggatagaa

SEQ ID NO: 767517 - DNA, 633 bp, Homo sapiens
taaaaaaatgcaaagtgcttaggaaactctctttagtgcttatctcattgaaaagtattagaagctctttaagtgaccagagaagggcttgtgcttcttactttagagatgaggaaattaagtaacttgttcacagtcacgtacttacagagaagtggagctggttctcatatacataatattctaagtacccaaatcccmaaaaaaaaaaaatgcctcacactttgtgtcaggagacttcaagtaaaaagcaagggttagatttaaatatgaggccaataagggtcatatagaagacctagaagagaagagatgttacgttattagatgataagcatgggacaagttgacacaaagtacaggtctaaagtagagactagaacagaatggaaaagaaagacatgttaagaagcccttcccatggaaaggaacacttggttgtgatctcaatgtggggactggaactttttattctttatctggagtatggctatacagatgttctggaggatggctatacatatgtctgaagtatggctgaataaatgctctggagtatggctgtacctatgttggagcacctgctttatccctgctccagaataaaggttcttatcctgatttgggatagaa

SEQ ID NO: 767518 - DNA, 625 bp, Homo sapiens
acactattatcagccgtatgtctaataaaagggaaatgacaaattaaataatagcatacccacaaagagaaattctcaaaaaacactccaagtgacattttagtgattgtaataaaaatggaaaactcctcatgtaagagaagtataaaaaatgaacatccagaagtatgtkcaattgaaaaatataaaattatgcaaattaaatatttgtatttttatctcattttcttttgtaagatatagtatataagatattatctcttattttataggaacttggaaaagatttcaaaataaaaaggtgaagaaaaatgatagccctgaactttctgctgcttagctttttttatcttcatactatgagatagacaaatgtttgtatatatacttatttgatttccttgttctcactttaaacattttgaacaagacatacaaaagagaaaataaaggaaacaaaaagctcgtaattttgccaactagaaatgaccaccactaatattttagagtgtttcttacagcttttcattgcattatattttcatggttgaaatcaggctccgtataccgttattttaacaacaacataaaatgtcaacacaagattagttataggagatacgtt

SEQ ID NO: 767519 - DNA, 625 bp, Homo sapiens
acactattatcagccgtatgtctaataaaagggaaatgacaaattaaataatagcatacccacaaagagaaattctcaaaaaacactccaagtgacattttagtgattgtaataaaaatggaaaactcctcatgtaagagaagtataaaaaatgaacatccagaagtatgttcaattgaaaaatataaaattatgcaaattaaatatttgtatttttatctcattttcttttktaagatatagtatataagatattatctcttattttataggaacttggaaaagatttcaaaataaaaaggtgaagaaaaatgatagccctgaactttctgctgcttagctttttttatcttcatactatgagatagacaaatgtttgtatatatacttatttgatttccttgttctcactttaaacattttgaacaagacatacaaaagagaaaataaaggaaacaaaaagctcgtaattttgccaactagaaatgaccaccactaatattttagagtgtttcttacagcttttcattgcattatattttcatggttgaaatcaggctccgtataccgttattttaacaacaacataaaatgtcaacacaagattagttataggagatacgtt

SEQ ID NO: 767520 - DNA, 471 bp, Homo sapiens
cttgagcttgcagacaaaaatccagccgtggcccatgcttgattgtaggtttgtgagactcctagtgaatgacccagctaatccttggttgaatttctgatcctcagaaaatgtggttttaaagatctaagtatgttttaatttattatgcattacagtagtctccccttatctgtggagtctatgttccaagactcccagtggatgcctgaaaccatgaatggtacaccctatatattgttagcctttaatgccctttttatcttaactgagaactgcagctgtaactwttgcagtttgatgtatgacagcaaaactaccataaattaatttttccctcttcagaatttcagagttagaagatctgtttttaccttagaccttgacaacttcagcatgtgatttttttctttccttattaagacaagaactttcaccttttcaattaaagaaagcactttacggctgctc

SEQ ID NO: 767521 - DNA, 502 bp, Homo sapiens
aagatgagagtaatatatccattggctaatcacaatatgcaattgaaattgtgtaaagatcatggactttgacaagttagagatttgaacttaaagcctggtttcaaaaagtacaaggtgtttgatcttggcaaagtaatttaaccggtttctcatttttgtcatcttgtaaatgtgcatagtatttataatataaaaccrttaggaaaacgtagtgatgaaaaatatcaagcaagcacagttcttgtcacttagtaggtggtcaaacactgctagatctcttctctttccccctttatctttgtgtatcataggatgtcaaacagataatgaatagcatcaattatagctatgacatctccaggacgttactaatgagagtcatacatcaaaacattaggcttatgtgttatgcaactatttgctgaagctgttcctactttaatttttaagacagtaacttcagagctttctaacataacaaaatctatatttactttga

SEQ ID NO: 767522 - DNA, 592 bp, Homo sapiens
ttaggtttctcctgtgctagaagcctctccttaagatttgtctcttcattagctgatttgggtcctatttgtttttatagcagaggtcacaactggcccagaaaatggcacttggattctgaggatccaagtccatagcagaaaattccaatgctacaggagatattrgtggggagaggtgatctaaaatatcaaggaaagtgtctacacacaccagttctggaggggtcaaatgtgagtttgaacttgaaatcccaagagatgacaccataataggtggagaaacatgcagtatctttatgtaaggctagatgatgaaaagtttccaagagggcaaatttccccagactgttctacagaggatatcttacctttgtgatcataagactttattgtttatattcatagattaattaggatgtcagcctacagggcctgaagtactatgtcttggtaggtaaataacagtgttctagatatggcttcacaatttattaactgcattatcttagctatggtgctgaactgctcctgagtcttggtttaataaaatacaggaggtcaagtaatgcccatctcatggaaggattgg

SEQ ID NO: 767523 - DNA, 573 bp, Homo sapiens
tagagacagggtttcaccatgttggcaaggatggtctcaatctcttgacttcgtgatccaccagcctcagactcccaaagtgctgggattacaggtgtgagccactgcacctggcctacttttttttttttttctaatttacctgtttacatgaaatctatttgtaactataatgttcaatttttttaattttgtttttgttgtcagatatataacattgtctttactggaaaacataccatggcactcgcatttccaatcaaaataatctcccttttcttgaaaaccaagtaaaaatatcacttttccttgatattcatggctttatcagtagtacaagcttgtatgttttcacttcctgataaaatrtttctgacgaggagagatacccttatctatgaaattatatattgtaattcagcaaatactttatcttctggaacatgagtttaattggcatatttaggcttgggcaattcttgctagattaattcagattaagatccccaaggttttgcttttatgccaatctcttgaaggaaaaaaaaaatctgttctaacttctcccaaagt

SEQ ID NO: 767524 - DNA, 655 bp, Homo sapiens
gatggggtttcaccgtgttagccaggatggtctcgatctcttgagctcgtgatccgcccatctcagcctcccaaagtactgggattacaggcatgagccaccacgcccagcctctacatatttattaaaacaaaaaacaaaaaacaaaaaaacacctgcacactaatgctggcattctgaatgttctgcatttctcaccattctgaaacacgaccaagccttgtscaggtctttccaatactgcaaaaagtctgataactgggactacatctgtagaagaccaagcctctccttagagtttgacattataccacatttgtacattcaacccatacttattaagggcttgttctatgactaatactatactaggcactagtggtatgattaaaaattagacataattctttctttcataaagctttaagtctagttggaagactaaacaatggtatctatcttaacaatttttgtattataagaggaagcccaactcaacatggataggaaaaagaaatgtattggctgtaactaaagagactgtctgtgggtccaattcagacagagattgatcaaggttctcaaatgataatcacaatgaaaggacacacacaaacacacatgcacactcacaaacacacatttattttccttt

SEQ ID NO: 767525 - DNA, 527 bp, Homo sapiens
ctcactggtatttgaaatatcgatgccccctgtgtctccagtcacccggtgatcatcccagttgttctggagcagaagcgtaggttagacgtgcttccaggtactgacccgaggcttggggcagctttatgttctccctcacttgtcactcagtctccttgcagcyctgctttcacatcacctttttttttctgccttaagtgttgctgattctcttaggctctggacgtggaagcggcaggtttgggttttgactgtatggcactttccatttgctttttcaagtgctgttttgttgcagtggtggtagtggatgtggcagcttgtctacctgtccctccaggctctcctgtgctctctagtgctctgccctgtagtgggacagcctcctgcgggtgtgtccttcctggtgacatctcagttcttattttaattctctctgctttgcatttgaattgttaacccacagacattaactgaagtcttcctctgtgctaggccggaaggacaaagtctagggactctga

SEQ ID NO: 767526 - DNA, 527 bp, Homo sapiens
ctcactggtatttgaaatatcgatgccccctgtgtctccagtcacccggtgatcatcccagttgttctggagcagaagcgtaggttagacgtgcttccaggtactgacccgaggcttggggcagctttatgttctccctcacttgtcactcagtctccttgcagccctgctttcacatcacctttttttttctgccttaagtgttgctgattctcttagrctctggacgtggaagcggcaggtttgggttttgactgtatggcactttccatttgctttttcaagtgctgttttgttgcagtggtggtagtggatgtggcagcttgtctacctgtccctccaggctctcctgtgctctctagtgctctgccctgtagtgggacagcctcctgcgggtgtgtccttcctggtgacatctcagttcttattttaattctctctgctttgcatttgaattgttaacccacagacattaactgaagtcttcctctgtgctaggccggaaggacaaagtctagggactctga

SEQ ID NO: 767527 - DNA, 587 bp, Homo sapiens
ggattattgggaagagacatagtaggaaggctggtgttataccatcctgggttcctgagacagaagtgctggtgcttcaccttgagatggaaatgagacctgcctacttgtaatgtattttataaacagcgatcatggcctaaggagtagggtgcccatgtctcacacagccctctgtgcaagggccccacttgcataaggtcaccaccttctctctctaattccctcaaacacagcttgtttacagaaatggatgttacattgtttctggataatttttaacccagaattctgacttacctttatttgtgtagccttttccttatscagaaatggggcagatggcaacagtctcctttcagatacatgaactctccttattcctgcttgtttgatttctgtatgttttttataaatgtttgggagtgggatgaacttcagagcatctagcaaatggagttggatgtattaaaacaatttttacaacactgtcaaaggaatttttaaaagttcaccgttgtaatattgtgcaattgtcttctccttgtttccttctaatctttttcttatgtgtgtacgttttactt

SEQ ID NO: 767528 - DNA, 582 bp, Homo sapiens
tctccagccctcacccaggctcccagcttcttaccttgaggagcaactggtattttgttattctctgaatgggcttgatgaggaagtcactcagtgtcagcctctgatttatctcctgttttacctcctgaaacacaggcagcaatattagaagaaaaaggaactgaagaactggggtgctttgaataagggttcaaaggcatggaagacaggtctgcatgttttccaatgaagttgaagaatctttaagtaatgtgagaggtaaaattgcctagaggactgttcacttgttatgaacaacacataacacacatcaccactggcttcctgccttcctcccatgcttttacagtgagtacttccacaccttggtcttcatcccagtcctgggagaaaagctggaggggccttattctctccaccrcttcagggcaaaggcagggaaaaggggcttcttctaggacacacaagcctatggagccaggccctaaacttagatctccaaacactcagctgagcgctttttctaagtgatgatgctgcctttctcccagcaaaataaatccttctgggctagaccaa

SEQ ID NO: 767529 - DNA, 579 bp, Homo sapiens
atgccattggtatgttacaatgagaggaaacagaggatggtgagtttggctgactttctccaagggacccagccatgctacaataaactccaacagtcccttgggataactgcacttatcctcaccctgaactcctgctcttctttccccgsggctggtctaccttttgggaagccttgcccactttctcttctaactcctacacacacatctcactgagaacagttcagttctgattttgctcttgcagccctggcttgcatatgctggtagaagggtcatagtttaaatttagacttgaccacctcactgggaattcactgggaaacaagctgtgtgtggaacccatagacactctggcagagttggctgctaacactctaaaatggaagcactagttggtggtgaagctgtaagttaaattgggaaaggggtagaatttctaaaccaaagcccaaagaaatgggaacttcaaaattagaaaggctggaaaaaaccttaaaaggttattgaggtcttctgctttgaagcagaacccaagtaaacaaacaggattatctctggtttttaaatcccttt

SEQ ID NO: 767530 - DNA, 476 bp, Homo sapiens
gaaaggggtagaatttctaaaccaaagcccaaagaaatgggaacttcaaaattagaaaggctggaaaaaaccttaaaaggttattgaggtcttctgctttgaagcagaacccaagtaaacaaacaggattatctctggtttttaaatccctttgtggaatgggaattggaaaagatcgtaaaggccactgagtacaacgtcccaaatgttacagaaacaggtctacagcattgcccaaagagggtcatgcagactcagctgaaccctgccagcacaccctgaataacagttatcrcagcaggaggcagcagctgtggatggcaatgcctcagaacagaaatgagagacagatgggaaaggccaaggtgggttgcagggaatgggactctggttcttttaatctggatcccagtgccaacataattatgacgagactcaggttgcaaatcaggaagtaagagccctggcagtgatcc

SEQ ID NO: 767531 - DNA, 564 bp, Homo sapiens
ctttcacccccaccccaaagtttaatcagtacaaggtaaagaagtaagctgaactatggatgatactcgtcatctttagaacagttctccatgaggtatggtcacagatcagcaggagacttggctgcaggagacttggccaygaggggatggcatagacctagagccaatcttgcagtggcattggtgtggcatgtactgctgggagtaggagttgtacttgaaaacattcacaagcaggggaagggaaaggatgtaaacattagagcagaattacctccctttacctaattgggtattcttggaaagctttgtaaatctgactcctaggattcaaggtgctttattttcttcttaattaaccttcaaggatgcgcctgtatatctccccaaaacaccatggtgggacaaatgccagcctgaaggtagcaagcagccagtgtgtaagtaaagaccccaggaaactgcccttaaaggaaccatttggtccacttattgagaaaaagtaaagaatgttttggtgacatcattcccatgcaggcaggagatgagagcctatgcaca

SEQ ID NO: 767532 - DNA, 582 bp, Homo sapiens
atgttcagaaggaagactgagagtagtataaatggcaggacaggcttggtttcatattcttcccagaagaactcgtcatcatggtttggggagcttccatctcttggttgcaagcccagggactgatgtggacacagggtttcagtgacgtttatcctgtaggcatcacaaccaactctgacccctgtggttatggcaggccttggggagggtgtgctgagtgtcctccactggtaaatgctgacaacctttttcagtccactgctcccctccacacacacccccaacycttttgcaagagcggctgacaagaaatcaaaatgacccatttgtatttcaatctgctctcttttgctcggtctgacatccttttaccttccctcccatggaaggtatggataagtggccaacagaaccaaaggtagggaggaagaagtgtttagtgcctggatatttagaggataaatcattaagagttagctctgcaagtcccctgattagtaaaaacttcaatgctttgagggcctttatcccaaggcttacctaaaaggcacccaaaacaagtatacttaggataaaatg

SEQ ID NO: 767533 - DNA, 630 bp, Homo sapiens
gaagctgtgaaaagtggaaaaacacatatcatttctagccggtcctggttccttagacacagaggatgtgcctatctcagacttttgcccaaattagtaccaggtggtagtgatggccacaagacatatatcctgtgtcctataagtgaaatctcttctatcagaaagatggagcttctttttcataccctatctgttgtgyttgtgtattcagcttcagaaaaattctaaagtgtttctgaaaactacaaagttggagtacctataaaatgtgatctgggttcataactcaacatgaacctagacccaaggaagctcagaggtcgtggagtcccctgacacagccctgcaaggaaccaagcccagcacccaccattcaaaaagtctcgctgtgtttctaagacttgattgatgtcctgcacccaggcctgctggatgtcagcgttggcggcttgcagaacaaccctctcagaagtctctctgttcatgagtgcaaacttgcagggatcattgtccacattctcctccaggaccaagtaattcatctggaagaaaacgagttgatcctttttacatttaaaagattttttaaaaatcagcaacatattactcttcctcaaagtttctatt

SEQ ID NO: 767534 - DNA, 695 bp, Homo sapiens
ttgagtctcctcagtctctctctaatcaagtccaagtgtttgcccaagaacaggctccagggcagctattctcttgcagagcccagtcaccagagcagaagttgcaccccagattcagcctctcagtgctgtgtcaagcaaggggctgctgttgctgatgttagggcaatcggcttaccaagaggagaccgtgtatgtggctgagctgttatcagtgtcaaggatgttctggtctggacccttccaagtgatggtgggctttggccgcccacagactttgcactgcagtatcactgtgtccccaagcaarcaggtcacatccaccaagggcacaaggaattctggggccactgtgatcaaatcaacatacattaacatcattcagagcaaatttagaataaaatggccattttgttttaacacacctctctcatttcccacccatgtcatgtaatgattcaaataaccttcagtataacactggtgagtcatctgggtctctttaaaaagtgtttaaaagagataactgtttattatagaaaaaaataggaaatataaacagaaagaaagaaaagctccataatgtcataatccagagataattactgtaggcattctggtatatacccttttgggctttatataaacagacttcttataaaacttggatcccattatacatatcgcaagcttta

SEQ ID NO: 767535 - DNA, 658 bp, Homo sapiens
tggttatactgacccctggtggttctaaaagggctcttttttttaaggggcttattttttcttagctgaatgcctcaaattaacatacctcaaatgacaagtacctgatcagtatacttgtcttcaaaaagataaagatgctttayagaatatacaaaagggaaaattgcatttggttcaagacaaattattgctatatagttttcacacattcgttttaagaaaatactgctttctacttacatgcaaaagcactgaacttggtcccaggaatagagaggtgagcaagaccagaaggtcaccagctttacaaaggctactgtctatcatggaccactaattaaaagtgagatgaatgaattaagggaagcacacagtactatgggaatgtctggaacagccaggccactttagagaatggctgcaggttaaaagcaagtagcgagaataaggaagaaaaaacattctcagcagagggaacagcatgatgaaaggctctagaatgagacagatcggtgagtttaagaaacttaagggacataagatgtctaaagcatagagttcaagaggaagggcggcactttacaagactgaaaagttgggcaagggccagatcctgcaaatgcttttcattttttaagcacctaaatttccttaa

SEQ ID NO: 767536 - DNA, 504 bp, Homo sapiens
tttttatttgcaatcatttatttgtaactatttgcaaatatgacacatttgcttttattaatgcagatacgtgagccttaaccccctacctaatttacttctgtaatgatacttcattgccaccactgagcatgtgtatatgtgtgtgtgtgtgtgtgtgtgtgtgtgtgtgtaaaaaaaaaaaaaaatttttttttttttttttttttttagkggaaacatggaattggtgggtaggcaggcaagttggttttttggtttacctcagttggccatggccccaaaatttaagagccaccgttttagattattttgcatttcctcctctgtattgctggtctaagaatagaaaatacttttattttctactttggccttaaacttaaattaatgataccctacatagtatttttcttctgtagcaaacagtgctagatgactaagcattgaaacaattttgatgaacactagacagttaaataaaagtctgcctttaatttgctt

SEQ ID NO: 767537 - DNA, 594 bp, Homo sapiens
ttaattaatgacgtctaatagtttgttaggtctttaaggtgttaggacctaaaacacttttttacagttcttttatatttcactggcagatgtaatgcttttttattataacccaaacaaccaatccataggcagaggactttatttggaggcatatatatacatacatayatatatatatatatatatatatatatatatatatatatatacacacacacacatacatatatatatatatatatatatatatataatttttttttggaagaggcagggtttagctatgtttgccccaggctggacttgaacttcttgaacttctgagctcatgtagtcctcctgcatcagccccttgcataactgggactacaggcatgcaccactgtgcctggccaattcttaaaaggaattaaataagctctctatttaggggaataaattctgcttaagcatctcccacagtgttgggatgctgggacatgcactacacatacatacacacacacacacgcacacatatacacagagggaaggagcctggctttttaaatatgtaccatcactccttacacaggaacgattctgtctgtc

SEQ ID NO: 767538 - DNA, 597 bp, Homo sapiens
gtgtgaggaatacagatgaaaaggtggaaagagcgagagaaaaggagaacacaagagggaagatagattgattcatggttctctaaacagttatttaaattagacataatagagaaaatcatagaaaaaacacttttggccgggcgtggtggctcacrcctgtaatcccagcactttgggaagctgaggtgggtgaatcatgaggtcaagagatcgagaccatcctggccaacatggtgaaaacttgtctctactaaaaatacaaaaattagctgggcatggtggcgtgtgcctgtaattccagctactcagaggctgaggtaggagaatcacttgaacccgggaggcggaggttgcagtgagccgagatgatgccactgcactccagcctggtgacagagcaagactcagtctcaaaacaaaacaaacaaaaaaaaattataataaaatggtaacatattttttaaagaatatgaatagaatatctcctaagaattatttggatttggagaattatttgagccaagtgtctagatatctgtacatttcttctaggtttctaacattagaaatgagtacttctttctaaaatattat

SEQ ID NO: 767539 - DNA, 632 bp, Homo sapiens
aatagcaatacacttagctgcatttgagtgaataagtaatcttaaaaacagtataatatgtaaattggtaactttaaaaagttgcagtttttttctttaatggctgactagaagcatttcaagtacacctgatctacttagaagaaccaaaaataatgtgcaggcaatcatgttttgaatacattttacaagaggtgacatgaaagaccaacagaaaaatgaaaggatacaccaaaatctaggaagggtaaggaaaacaggtagcctgcatgcctgaggccagctgggaaccaggaatgatcccctagtatgggagaggatgagtgttgttctttggttcttgttcccactggggaacccacaaccagcattatattggatggaaaatttaattttctctaagaactagaacaagacaatgatgcccagtttcaccactgttatttaacatartactggaagtcctagccagagccatcaggcaggattaaaggcatccaaattagaaaagaggaagtcaaattatcctaccttgctgatgatataaccttatatttagacaaacctaaagatttcaccagaaagagctcttagatttgttaaatgaatttaataaagttgtagaaattaaa

SEQ ID NO: 767540 - DNA, 641 bp, Homo sapiens
gaaaatcaactcacaggaaaaaaactaggaaaaaagtaaaatggtgctttgtattcagttgctccactggcactaaaaataacacaagtgatgctgcatttttcttttctccataacgtatgacctaactgcatttggttattgcataagactaaaaataatttaattgaaaatgaactgtggctttgctttttgcaaatgcaggcaccttggttttcgaattagtttcttatgcttctaccaggccttgcccttgttttaataaaaggagagccctcaaccctttggacatccatgggacaataactgtcaycatgaatgtcaacaagccaaactgttgagagagtttaatgttttctgttgagctttttcatttccctattaactgaaaaagaattcatcatcatcatcatcatcatcatcatagaatcatcatcataacgattcctgtaccctgtataatgtttgagaatctacaaagcagttccatttagagtatctcacttgatactttcaaaaatatatcacgtgagtaaaacagatatttctttattgcttatgagaaaacaaaattcagttaagtgacttccctagatggcatatttgaagagccaaaacatagaactaacaatctaaataca

SEQ ID NO: 767541 - DNA, 641 bp, Homo sapiens
gaaaatcaactcacaggaaaaaaactaggaaaaaagtaaaatggtgctttgtattcagttgctccactggcactaaaaataacacaagtgatgctgcatttttcttttctccataacgtatgacctaactgcatttggttattgcataagactaaaaataatttaattgaaaatgaactgtggctttgctttttgcaaatgcaggcaccttggttttcgaattagtttcttatgcttctaccaggccttgcccttgttttaataaaaggagagccctcaaccctttggacatccatgggacaataactgtcaccatgaatgtcaacaagccaaactgttgagagagtttaatgttttctgttgagctttttcatttccctattaactgaaaaasaattcatcatcatcatcatcatcatcatcatagaatcatcatcataacgattcctgtaccctgtataatgtttgagaatctacaaagcagttccatttagagtatctcacttgatactttcaaaaatatatcacgtgagtaaaacagatatttctttattgcttatgagaaaacaaaattcagttaagtgacttccctagatggcatatttgaagagccaaaacatagaactaacaatctaaataca

SEQ ID NO: 767542 - DNA, 508 bp, Homo sapiens
gcaaatcttgcttttaaagtgttaatcattcctcatacatttgttctattaaaatcttatttgttagcttcccctgagggtggagctcctcaatgaagagtataccttgagtgatatctcaacaatgaccaccaatcttatttcatccaagtaccaacaatastgatttatctttttcaagttgagttgtacctaggctctaaatacaacaagagctaagataagtaatacattaggagctcccactgcaccagtggattatgcctgcaaagtccgttgctacatgctcagagtccaatgcctgtaggaaacaaaacacagtgtttttacaaacgtggtgtcccaggaacccgacctaccatctgctttgaatttttgaatcttacattccaccctggctctgtattattcatggaagccagaaccctacagaaaactgagcagttccttgagccttcctcctttttttcatggcccagtgagttcccagtgctactcctgggcagta

SEQ ID NO: 767543 - DNA, 508 bp, Homo sapiens
gcaaatcttgcttttaaagtgttaatcattcctcatacatttgttctattaaaatcttatttgttagcttcccctgagggtggagctcctcaatgaagagtataccttgagtgatatctcaacaatgaccaccaatcttatttcatccaagtaccaacaatactgatttatctttttcaagttgagttgtacctaggctctaaatacaacaagagctaagataagtaatacattaggagctcccactgcaccagtggatkatgcctgcaaagtccgttgctacatgctcagagtccaatgcctgtaggaaacaaaacacagtgtttttacaaacgtggtgtcccaggaacccgacctaccatctgctttgaatttttgaatcttacattccaccctggctctgtattattcatggaagccagaaccctacagaaaactgagcagttccttgagccttcctcctttttttcatggcccagtgagttcccagtgctactcctgggcagta

SEQ ID NO: 767544 - DNA, 621 bp, Homo sapiens
ttgaaaaacagaaatacataacataccaataaaatgagcaatgatatcagtaaaacttatagttaatactaagtaatggttgaaaatatggcagtgaaatttaatggaattgttaagtaggtagtcataaaacagaagaggcacaaagtaaaaaattaacaatctggaaccaaaattcaagataatttttaacaatatgaaagaggtagtaaggaagaaacaaagggaagttataaaataccaatgatacaacctgtattttgtttaagcgagattgttgtagacactgctttatttttatttggacaggaaaacaatttctgatttcggcaagtttaaggatgttcactagcagaacaaaaatgtaaggtgaaaatttcaaactactatraggtaaactgtaaataaaaaataagaaattaaagaataaaaacataaaataagaatatatgagacaatataatgaatatcagttgaatttttctaaactattctagaaataggcaatgttccatgttatttttttaaaaaaatcaacttcatcaaggtattatttgcatacaataaaatgcacagatttttatttatttattctaagcttttatattgggttcaggggta

SEQ ID NO: 767545 - DNA, 629 bp, Homo sapiens
taacttatcaatgctagtttcttagtttttttcaaatgttccatgataatgtaatatattgacaacagaggaaactgagcaaagaatatgcagggattatatacaatctttataactttttaaaaattaaacttattccgaaataaaaaggatatcaaatagctttatgtgcaccaaagaggttttgtttatgtgcattgtatgtattgagaatttttgggggatggacaagacagccaattagaaacagctagtgtgcctggttcttatggagaggaaaaaaaaggtgtgagtaaatacagcacctttaactgaaacatccaggtacttgtcttgggactaatcaaagaaacaacttgacctatggaaaatgaagaaaaataagacaggacaacagccctcctgggtgtgacatggagccaggggaacctcctccacccasggaagtggtaagtgaatgtgcaaagctgggaactcatgcttctctcatagacttttgcaattcttcggtcaggcaatcgctttgtgaacccactccaccacggccttcactctaacagaaagagctatgtggtatctctgcagagcagccactcaggcacttgtggaatcccaggaaccttaggtac

SEQ ID NO: 767546 - DNA, 678 bp, Homo sapiens
actagaaagcctagaagagatggataaattcctgtacatatacatcctcccaagactgagccaggaagaaatttatttcctgaacagaccaataacaagtttcaaaattgaatcagcaataaataacccaccaacygaaaaatgcttgggacctgatggattcacagccaaattctatcagatgtacaaagtagagtgggtagcattcctactgcaactattccagaaagtagaggagaagggatgcctccccaactcattctctgaggttggaatcatcttgataccaaaaacctggcagagacacatcaaataagaaaacttcaagccaataactttgataaaaattgaagcaaaaattctcaataaaatacttgcaaaccaaatttagcagcacatcaaaaagctaatccaccatgatcaagtaggcttcatcctgggatgcaaagttgattcaacatatgcatatcatttatgcaaataaataaatgttttattacacaaacagaactaaagacaaaaatacatgattatcttaatagatgcagaaaaatcttttgatgaaattctatactgtttcatgtttaaaattctcaataaagtaagttgaaggaacatacctcaggataataagagccatctacagcaaactcacagccaacattatactgaatgagc

SEQ ID NO: 767547 - DNA, 582 bp, Homo sapiens
ctcgttaatgtgtttaaaaggttaaaatattaaaaatagaaaaaacattccataatatatgaatttacagaaaaaagtattttagtgcaagtgtacaatatgtttgtgttttaacctaagtgttattacaatgagtcaaagtgttttaaatttaaatagtttataaagtaaaatcttacagtaagctaagattaatttattatcaaaaaatatatattttacaaatttagtatagcctaggtttggagtgttcatgaagtctacagtagggtacagtaatatcctaggccttcacattcactcttcattcactcactgactcacccagagaaacttccagtcctgtaaacttcattcattataagtgccctatataagtacaccattttgtrtctcttatatcatacttttactgtacttttgttatgtttaaatatgtttacatacacaaatacttacctttgtgttacaactgcctaaagtattaactgtaggcagtaacatgctgtacaacttggtagcctagaagcaataggctatactatatagcctaggcatgtagtagctatgccatccaggttc

SEQ ID NO: 767548 - DNA, 611 bp, Homo sapiens
gaatacttaccaaatataaaaataatcatcagcacacacaactacatgaaagaatttcaaagtaattattctcagtgacagaagctggggatcagaatgtactctacttaaccacaaaaatcaggataagaggatttcagaaaaagaagttgtggccagcatcatcatatgtaatagataatttaacgagaatcaaaataaaaaattatttactatacttgacaatgatgcaatcctaaaagggaattataacattcaatgacaagtgagttgaagaaatgaggagtrattgtgaaataaaaaagttaaaaaagacgattttcactattagtatttttattaatcatttttagcactttatagaatacaaggtttttcacatattttattcattgattttcaaagaaattatttgaaatggtgttcttataattggttcccctttgccaaactgaaaataatgcttgtatttttttcttcctcatctatagttgatcaagaatcatcaaaagatagaagtgcctagaatttttacagatttcagatatcaatgcaatcaagtgacatagccaaaatatctgtaaagcggatggaaactgttcttgctaaat

SEQ ID NO: 767549 - DNA, 498 bp, Homo sapiens
tgacacacgtggggcacaggtagcagaaaagcccagctcctttctctcaaagcagggtatcattgctgagcaaatcacaatgtgtacttcagggctctctctccctgaaatggatcaggaacaagtctaaactttatgtggraccacatcattgctcagccccttccctttccccatcccgtgtaattcttcatgggtttttcctccagagtccttctgtaagctataatgcacctgagtctctgtcttaggctctgcctttaaagaacctgtttgaggactcttttggataatgtgctactattatgtgcttttatgttgagagttttgctgaaaaccaaaacttccaaagccagtgcttccgtcaccgtacttttgcagtccaagtggactgaaagcaggcaaatttcatcaggcttggtatcaggtatatactgactgctgtgtaatggtcccatctaagaaagaatgtaagaaaaaaaaatctagggtagttta

SEQ ID NO: 767550 - DNA, 600 bp, Homo sapiens
attcaatctgtagaagattttagtcacctcagactaaaaaacaaaaacaaaaatcgtgatggctatatttagctaggttgaaaaaatcagccaaaaataaatcttccccccaattcctttattaaatgctatatctaacagaaaacaagaagaccttttgtaaggctttccatctgcttaatttaccaaggtagtaatgatttatgttaaatgacctccaatgaagttcaatgagcaaagaatcaagattaagctatgatggaaggaaaacaaggagggcaggggatagaaaatacaaagtctcataaatacctggaaaaatgagataaacacattcatattgctatcgtatattaagaaattaacgcattctgagatgayatggatatgccctgttcagtatgctctgaggtttgaaattcaaccacaatgtgagagttacctatcttctacccttggaacccagtggtttttacccactgattatgcccaaacactagagaagaaagttggctgctttcagatgtttaaggggaaagggaaacgtacatgtaagcactgagtgtcctaactggcacactctaagatggctcccagtga

SEQ ID NO: 767551 - DNA, 600 bp, Homo sapiens
attcaatctgtagaagattttagtcacctcagactaaaaaacaaaaacaaaaatcgtgatggctatatttagctaggttgaaaaaatcagccaaaaataaatcttccccccaattcctttattaaatgctatatctaacagaaaacaagaagaccttttgtaaggctttccatctgcttaatttaccaaggtagtaatgatttatgttaaatgacctccaatgaagttcaatgagcaaagaatcaagattaagctatgatggaaggaaaacaaggagggcaggggatagaaaatacaaagtctcataaatacctggaaaaatgagataaacacattcatattgctatcgtatattaagaaattaacgcattctgagatgacatggatatgccctgttcagtatgctctgaggtttgaaattcaaccacaatgtgagagttrcctatcttctacccttggaacccagtggtttttacccactgattatgcccaaacactagagaagaaagttggctgctttcagatgtttaaggggaaagggaaacgtacatgtaagcactgagtgtcctaactggcacactctaagatggctcccagtga

SEQ ID NO: 767552 - DNA, 547 bp, Homo sapiens
gggagaattttcatagttggtacaggacatgagtagcacatacactagatttggcccttggccctaaacctccctgggcaaccttccagcactgagtattctgtccataggtctttttatttctctgacctcaagatagaaagtccagtttcattcatatttttatatctgatttagaaattaaagggaaaaaacccacatattttatacctactttgtgtccaatactatgctaaagtcttgtcatatataatcgtttaaaaataaaattttgttagtaaaaagcaagtaacacagggtaaaaagtttttttttttytattaaaaatcagatttcaaacactgactctaccagctgaaaactaaaacaagagtaagtcactttatcttcttgaggttttggttttccaaaacctcaagaagttttttgtcttagtttttttttttttttttttgtcttaaatttttattttaaatttatgtgtgtgtgtaagagagatacaaaaacaatgtgggtgctgacagatagtgggtataccaggcttcca

SEQ ID NO: 767553 - DNA, 600 bp, Homo sapiens
tgtgaatcattacattagtttcacagctaatacatctatgcaaataactgagaatctttttcttaagagaggctcaatgtaagtaactgatagagtataaggtatttttacaaacaaaccaaaaataattgtttcttttcttttctcatcacctattttatgtaaggaagacgaaactcccctttgatccaagaaattaaatacctaagatgacaaaacactgcctttacttttgaataagtggaaactagtatagatttaagcttttatctcttttagygttgatgctatctttatttgctgagataagaaaatattccagtttataaggaacgaatgattaacaaaataaatgcaaatgaagtaactaattttaaccagatcttcagtgtcattattgctgacataaaaggagagctgggaaatttaattgcaatttgtcaatatttacaatctctaaataaaatagcaatcacagtggtagcttcttgggacctctggcaggccacttacattgtgcaaattctcttttcactaacctgaactagggagtaatatcctctctgccaaccctatattaaagttcttttcatgcccatt

SEQ ID NO: 767554 - DNA, 679 bp, Homo sapiens
cctcagatgagactttggactatgaacttttgggttaatgctgaaatgagttaagaccttgggggactgttgggaaggcatgattggttttgaaatgtgaggacatgagatttggaggaatcaggagcagaatgatatggttggactgtgtcaccacccaaatcttaacttgaattstatctcccagaattcccatgtgttgtgggagggacccagggagaggtaattgaattatgggggacagtctttcccgtgctattctcatgatagtgaataagtctcacgagatctgatgaatttatcaggggtttctgcttttgcttcttcctcatttttctcttgctgccaccatgtaagaagtgcctttcacctcctgccatgattctgagacctccccagccatgtggaactgtaagtccaattaaacctctttttgttcccagtttcaggtatgtctttatcagcagcaagaaaacgaactaatacacctgggcaacatagtgagaccccatctctaaatatttcaaccaactaaccaaacaaacaaaacaaccaagaagaggaaaaaaccagtatggctattctgactcagttttggctttaaattcaggattctttttgggttcagaaacatccatataagaagcaaggatccctttatttattcagtatatattga

SEQ ID NO: 767555 - DNA, 590 bp, Homo sapiens
taacgtggaaaaactgagcccatcctgaatgctattctgttataaatcatagaatgcctgggatgcagctccctcttgttgccattttatcccttggtgtcctgcaggacctaaccttatgtcccatctctttcttgatgtctttttccaccactttgccccctttgatcttcctttttctggactcttactggattttgtcatcttttcctagtttgagctttgcaaggtcagtgcttagagtctttattgcatttgggccgmctgctgtccccaggtgaatatacctccttatgacctaatgtttccaacagctgggctctccacggggaaggttaagagcaaaagatagtagcattcacttctattaaataatactcaagactaaaagatgttagaattacttttactagaaatactgaactgacacattagcttacataaataatcattggatttaaatagataattaccactgctattgagaggggctatttttgtgtgttgttttacctattttttttggtctattctcaatgctatagcccaagcatctagaggagtgcccaacacatagtaattacgtttgt

SEQ ID NO: 767556 - DNA, 614 bp, Homo sapiens
gcacatgtttaaacaaccagatctcataagaattcactcattatcagaagaactgcataaagagaatagtgctaaaccattcattagaaatccacccccatgatctaatcacctcccaccaggcctcatctccaacactggggactacaactacacatgagatttggtggggacacagatccaaatcatattacccacaaacagygtacaaggttcccttttctccacatctttgttagcatttgtattgcatgtcttttgtataaaagccgttttaactagggtgagatgatatttcattgtagttttaatttgattttctctgatgatcaatgatgttgagcacattttcatatacctgtttgccatttatatgtcttcattttaagaaatgtctatttatatcttttgcccattttaaattggattatttaaattttttcctatagagtggagttccttatatattctggttattaattccttgtcagagagatactttgcaaatattttctcccattctgtgggtgtctcttcaccttgttgattgtatctttttgctgtgcagaagctttttaatttgatgtgatcccatttgtccatttttgctttgg

SEQ ID NO: 767557 - DNA, 614 bp, Homo sapiens
gcacatgtttaaacaaccagatctcataagaattcactcattatcagaagaactgcataaagagaatagtgctaaaccattcattagaaatccacccccatgatctaatcacctcccaccaggcctcatctccaacactggggactacaactacacatgagatttggtggggacacagatccaaatcatattacccacaaacagcgtacaaggttcccttttctccacatctttgttagcatttgtattgcatgtcttttgtataaaagccgttttaactagggtgagatgatatttcattgtagttttaatttgattttctctgatgatcaatgatgttgagcacattttcatatacctgtttgccatttatatgtcttcmttttaagaaatgtctatttatatcttttgcccattttaaattggattatttaaattttttcctatagagtggagttccttatatattctggttattaattccttgtcagagagatactttgcaaatattttctcccattctgtgggtgtctcttcaccttgttgattgtatctttttgctgtgcagaagctttttaatttgatgtgatcccatttgtccatttttgctttgg

SEQ ID NO: 767558 - DNA, 559 bp, Homo sapiens
cccatagaaatacaaaagatcctcagagactattacgatcagctctgtgcacacaaactagcaaatctagaaattttctaaaaacttttctagaaatctagaaatggatacattcctggaaacacacaaccactcaagattggatcaggaagaaacagaaaccctgaagagaccaatatcaagttctgaaattgaatccatcatttaaaaaacctaccaatcaaaaagagccccagaccagatggatgaatagcctaattctaccagatgtmcaaagaactggtaccaattctactgaaactattccaaaaaaattgaggaggagtgactccccactaatacattctacaaagctaccttctagtattagagctagcatcactctaataccaaaatatggcaaaggtacaacaaaacaagaaagtcacagtccaatatccctgatgaacatagacaaaaaaaatcctcaacaaaataactaggaaactgaatccagcagcatatcaaaaagttaattcatcatgatcaataggcttcattcctaggatacaaggttcat

SEQ ID NO: 767559 - DNA, 554 bp, Homo sapiens
agatgacattacaatggatcccatagaaatacaaaagatcctcagagactattacgatcagctctgtgcacacaaactagcaaatctagaaattttctaaaaacttttctagaaatctagaaatggatacattcctggaaacacacaaccactcaagattggatcaggaagaaacagaaaccctgaagagaccaatatcaagttctgaaattgaatccatcatttaaaaaacctaccaatcaaaaagagccccagaccagatggatgaatagcctaattctaccagatgtacaaagaactggtaccaattctactgaaactattccaaaaaaattgaggaggagtgactccccactaatacattctacaaagctaccttctagtattasagctagcatcactctaataccaaaatatggcaaaggtacaacaaaacaagaaagtcacagtccaatatccctgatgaacatagacaaaaaaaatcctcaacaaaataactaggaaactgaatccagcagcatatcaaaaagttaattcatcatgatcaataggct

SEQ ID NO: 767560 - DNA, 645 bp, Homo sapiens
caggtacagtatcacagtacttgtattcaagtcacccatatttttcttgataatggccctaaagcacaaaagcagtgatgctggcatatttttatgaattgttctatttagttattgctgttgttaatatcttactgagcctaatttatttttatttctatttttatcttataatttataaattaaactttatcctaagtatctatatatagaaaaaaacatagtatatataggatttggtgctatctgtggtttcaagcattccctggagaactcggaacatatgccccccagrtaagaggaaactactgtgtatccacataagggagtattaagcaattgaaagaaataaagtactggtaaatgctataacatggatgaaccttcaaaacattatactaagtgaaagaagccagtcgtgaaacatcatagtgtaatgcattacatgaaatgtccaggctaggcaatctataggaacagaaactagattagtaaaagctaagactggaggatttcagaggaaatgaggagtagctgctgataggtatgaggtttcctttggggatgataaaattcgtctaaaattggttgtactgatggtttcacaattctgtgaaacccaaaaagcattgactggcaggagag

SEQ ID NO: 767561 - DNA, 645 bp, Homo sapiens
caggtacagtatcacagtacttgtattcaagtcacccatatttttcttgataatggccctaaagcacaaaagcagtgatgctggcatatttttatgaattgttctatttagttattgctgttgttaatatcttactgagcctaatttatttttatttctatttttatcttataatttataaattaaactttatcctaagtatctatatatagaaaaaaacatagtatatataggatttggtgctatctgtggtttcaagcattccctggagaactcggaacatatgccccccagataagaggaaactactgtgtatccacataagggagtattaagcaattgaaagaaataaagtactggtaaatgctataacatggatgaaccttcaaaacattatactaagtgaaagaagccagtcgtgaaacatcatagtgtaatgcattacatgaaatgtccaggctaggcaatctataggaacagaaactagattagtaaaagctaagactggasgatttcagaggaaatgaggagtagctgctgataggtatgaggtttcctttggggatgataaaattcgtctaaaattggttgtactgatggtttcacaattctgtgaaacccaaaaagcattgactggcaggagag

SEQ ID NO: 767562 - DNA, 556 bp, Homo sapiens
atgcagtgatctggtaaatttcagtttattgacactatctaggaagcctgatggttggatgcctgagaaagaaactgagcaaagacaaatgtaacttcctcaagtttcaagactgggaggatcagtttctatgtttattcaaaagaagccataaatatcagttctatgggacaattggaccagtttcagaggtatattaggagaacacattctattgctttcaaatgcacagccagrcccggcaatgcgactgcatctgagcatcttctaagaaaataaaggctggccaggtgaggtaggtcacgcctgtaatcccagcactttaggaggccaaggtgggtggatcacctgaggtcaggagttcaagaccagcctggccaacatggtgaaaccccgtctgtactaaaaatacaaaaattagctgggcatgatggcgggtgcctgtaatcctagctactcaggaggctgaggcgggagaatcgcttgaacccgggaggcccaggaggcagaggttgcagtgagctgagattgcgccattgcactccggcctgggcaa

SEQ ID NO: 767563 - DNA, 556 bp, Homo sapiens
atgcagtgatctggtaaatttcagtttattgacactatctaggaagcctgatggttggatgcctgagaaagaaactgagcaaagacaaatgtaacttcctcaagtttcaagactgggaggatcagtttctatgtttattcaaaagaagccataaatatcagttctatgggacaattggaccagtttcagaggtatattaggagaacacattctattgctttcaaatgcacagccaggmccggcaatgcgactgcatctgagcatcttctaagaaaataaaggctggccaggtgaggtaggtcacgcctgtaatcccagcactttaggaggccaaggtgggtggatcacctgaggtcaggagttcaagaccagcctggccaacatggtgaaaccccgtctgtactaaaaatacaaaaattagctgggcatgatggcgggtgcctgtaatcctagctactcaggaggctgaggcgggagaatcgcttgaacccgggaggcccaggaggcagaggttgcagtgagctgagattgcgccattgcactccggcctgggcaa

SEQ ID NO: 767564 - DNA, 646 bp, Homo sapiens
tgcagtgagctgagattgtgccaaaaaaagactcctcaagacttaaggaagagtggcagcagggactgctgaggaagctgccgggctccctgtgtaccactggccttcatgaacaaagctgacaccatcatgctccttcggacatattctgctagcataaagggacccccatctccccaaccgaattaggcagagctggccttccttctagcggagttcctaggagtgagttggtgccaccccttgtgaggcttgatccaaaaaccagaacctctccagaccagggatccatgtcctctaacacaagaggggcagacctaacctctaaaatccctcccactctaaccttcagcatccacagctcaaaacaaccaggatgcctcagaaacagcactcactggggcgagcaggattaggcttcagaaaaaccaggtagatccagtttcttctgtcagaaaatgtttttttttaattacaatttttcataagttgccactayatgccaggcttttctcattttatctcattagagcctctttttcttttctttctttctttttttttttttgacacaaagtctcgctctgtcacccaggctggaatgcagtggcaacaatctcggctcacatgcaacctctgcctccca

SEQ ID NO: 767565 - DNA, 633 bp, Homo sapiens
gttgctggtctaagaaacaaatgttgaaaattactggtctagaaagatagaggaaagtaataattagcccttgcctacaaatgtatccctgtataataaatagacaattataataatgtcataagtgttataataaatgaaacacagggtattctagaaactcagaaaaggggaaatctaatatacctagagattcagaaaaaaatccaagaggaaatgatgttatgctgttctataagaaccctcttaacatgttggtatcaatgwccaggtaattatgagcatgcatgagataagacatccttccccaatatctgccccttgcactagcagcaaggttcacacttgcatttgacagatgttattggcaattgagatcctggctgcacagaggctactttcatgcaagcagagatagatgctaaccaggcgtcaggaagtatcacagggacctgcagattcagccaacacaggaactttgagggtctactgtgtagcaggcattgttcaaagtgccgtatgtggaagctctgtggaaatgggtattgtcaccccctactttacagtagaagaagctgaggctcagagaagtgaaatagctcacttgtcatacagcccataagtggcaaaaat

SEQ ID NO: 767566 - DNA, 633 bp, Homo sapiens
gttgctggtctaagaaacaaatgttgaaaattactggtctagaaagatagaggaaagtaataattagcccttgcctacaaatgtatccctgtataataaatagacaattataataatgtcataagtgttataataaatgaaacacagggtattctagaaactcagaaaaggggaaatctaatatacctagagattcagaaaaaaatccaagaggaaatgatgttatgctgttctataagaaccctcttaacatgttggtatcaatgtccaggtaattatgagcatgcatgagataagacatccttccccaatatctgccccttgcactagcagcaaggttcacacttgcatttgacagatgttattggcaattgagatcctggctgcacagaggctactttcatgcaagcagagatagatgctaaccaggcgtcaggaagtatcacagggacctgcagattcagccaacacaggaactttgagkgtctactgtgtagcaggcattgttcaaagtgccgtatgtggaagctctgtggaaatgggtattgtcaccccctactttacagtagaagaagctgaggctcagagaagtgaaatagctcacttgtcatacagcccataagtggcaaaaat

SEQ ID NO: 767567 - DNA, 631 bp, Homo sapiens
caggtacatgggttgagccacgttttactagtgggtgtgataactaagcctgaagtatcagaagccaagcccctctccctaactcacttcctgtccccatgcatgggagactcttcggcttccatctctatgtggtaaatgcactctcaggagaacttctagagcaggacttctcaacctcagcactaccgtttggatagtttctcactgttcatgagtattggggttagggtagggtcctgtgtattgtaagatatttgagcagcgtccctggcctttactcactagatgccaggagccatcaacctttcccagtggtaacaataaaaaatgtctccaaatgccaccaaacaccctgaaggaggtaggagggaggcaaaattgtccctggttgagagccatcgcttcgagagaggtctagcactcaaggasacagcaggaccatatagctattgccgtccataaagttgaatagccaagttcaacatctccttaattcacccagcccttctagattcgagagagccaagagtagaagtcactatttcagtttctacacccaagcatcttgccccagcaccaatcaccagagaatcccgggactggggagatattatgtggtcacagctaa

SEQ ID NO: 767568 - DNA, 562 bp, Homo sapiens
tgctcaaaaagagagcatgaaccgatactgtccacttctgtggcttcatcactgactatgcctctggttctgactttggagatatttaacacactgatctggccctcaggcaacctgaattctatttcctccactgccacagactcactattgaggcttgactacatcatgtccctttttttggatcccaataaaatggacaagttggtcactaaggattttccagatctgttacaagtcagacttttccctatatcccctttgagggaggcttaaagaagagacccaccttttgccccctgcagtcctcaaacacctcctcaacaggtggaaagcagagtgcaaagaatctgccaaatgcctccacccttacatcctctccctgcctatttcttgatgaacccaacacatyggttcacccaggacatctctgtaacagaagttgtaaagaaagcacccccaacacatagcttagcctaggcacattaattagtcctgtcacctagaatattatggatgttgtaacttcttcttcttcttcttcttattattattattatta

SEQ ID NO: 767569 - DNA, 574 bp, Homo sapiens
cctccattggacactagatgtacccaggaagatcactcaaggtccagcaccaaccaggcctgaaacaacaccccagagaggggtggagctgtgccctggagctttgcagggcgtcagcccaagggaaggatttctgagctgctggggtttgagaatttcaatccttagaattagtgcagcagcttactgaggttatatagcctctaagtctcttttttctatctaaatctctttttctagacataaatggtcttcttcaaagaaattttagctgagccatttcagtcaatttacactagctttttgaaagtaagaaaagttcttgaacatagatsaaacttgcagaagtgaaaaggaaccaagcacaggagtttcaatggggttaaaacccgctcttaactataaacactttcaaattttattccctcccctagtacagagcagctctccacatagatcaacaaattttattttttcatcacgtaagtgttcaataaactttgtgtcctccttaacatgatgctgttctggtggactgaactattgaatagcaatgtggcacattaagtcagag

SEQ ID NO: 767570 - DNA, 551 bp, Homo sapiens
cctaatattaaccatcgcagtcaccaagttccctgcctcctgtaagtggtaaattaggagtatcaaatatggttgtgtatctctataaacagttcattccacagattatcagtgttgtctgtactattagacacatagtcttaggtatttttatgtctaatcagattagagaattgaaaccccaaaaccaataaagaaacttcattcttaaaattttcttcctctacgaccactactagtaccaaagtattagtcaagattgtccagagaaacagaaccaataggataaatatatatggggattttttttagaggaattggttcatacatgtataaaggctgagaagtcccatgaaagaccatctgtgggttgagacccgggataccagtagcatggwtcaatccaagtctgacggcctaagaacccagggggctgctggtataagtcctggagtccaaaagccaaagcctggagagcctggagttttgatatccaaggagaagaagaatgtttcacagctccagaagagaaagagagagaccaatttctc

SEQ ID NO: 767571 - DNA, 548 bp, Homo sapiens
ctatagttaccatgctgtacattagatctccagaacttattcatcctataaatgaaaatttgtatcctttgaccaaaatcccacatttctccaacacccccagcccttgggaacctcctttggtacttcctgattttatgagttcaamctctttagtttccacatataagtgagatcatgcagtatttgactttctgtgtctggcttatttcacttagcaaatgtcctccagtttcttctatgttgcttcaaataacaggattttcttattttttacggctgaacagtattccattgtatatgtatacattccaccttttctttatttcttcattcatcagtggacacttaggttgttttcatgtcttggctattgtgaataatgccttaatgaacagggagtgtggatatcaattcgaaatactgatttcaatttatttggataaacactcagaagtagaattgctgatcatatgggaattctatttttagttttatgggcaacctccacattgtttttcataatggccacaccaatttacaatccc

SEQ ID NO: 767572 - DNA, 618 bp, Homo sapiens
tatgtgccagacactgtgctaggtgcttgagatataatgataagcaggaccggctgtataatttgtgggaccagtgcaaaagaaaaatgcaggacctcttgttcaaatatcattaccaatttcaagatggcaatggcagaccatgaaaccaagcacgtggcccttctgagtatagggccctgtgggactgcactgtatgtccatgaagctggccctgatgataagcctcaggaaagaagagactttgtcttcatggagctgagtttctgtgaagaaatttattaatcacactaattaatctaaaattrtggctgggcgtggtggctcacgcctgtaatcccagcactttgggatgccaaggcgggcggatcacgaggtcaggagatcgagaccatcctggctaacacagtgaaaccccacctctactaaaaatacgacaaattagccaggcatggtggcacgcacctgtagccccagctattcgggaggctgaggcaggagaatcgcttgaaactgggaggcagaggttgcagagagccgagattgcaccactgccctccagtgtgggcaacatagtgagactctgtctcaaaaaaaaaaaaaaaaatgaccatgaca

SEQ ID NO: 767573 - DNA, 618 bp, Homo sapiens
tatgtgccagacactgtgctaggtgcttgagatataatgataagcaggaccggctgtataatttgtgggaccagtgcaaaagaaaaatgcaggacctcttgttcaaatatcattaccaatttcaagatggcaatggcagaccatgaaaccaagcacgtggcccttctgagtatagggccctgtgggactgcactgtatgtccatgaagctggccctgatgataagcctcaggaaagaagagactttgtcttcatggagctgagtttctgtgaagaaatttattaatcacactaattaatctaaaattgtggctgggcgtggtggctcacgcctgtaatcccagcactttgggatgccaaggcgggcggatcacgaggtcaggagatcgagaccatcctggctaacacagtgaaaccccayctctactaaaaatacgacaaattagccaggcatggtggcacgcacctgtagccccagctattcgggaggctgaggcaggagaatcgcttgaaactgggaggcagaggttgcagagagccgagattgcaccactgccctccagtgtgggcaacatagtgagactctgtctcaaaaaaaaaaaaaaaaatgaccatgaca

SEQ ID NO: 767574 - DNA, 595 bp, Homo sapiens
acccagcagcacatcaaaaagttaatccaccaagatcaagtaggctttatccctgggatgcaaggttggttcaacatacgcaaatcaataaatgtgattcatcacgtaaacaaaactgaagacccaaaccacatgattatctcaatagataccaaaaaggctttcaataaaattcaacatcctttcatgttaaaaaccctcaataaactagacactgaaggaacatacttcaaaataataagagccatctatgacaaacccacagccaacatcgtactgagtgggtraaagctgcaagcattccccttgaaaacaggaacaaggcaaggatgccctctctcaccactcctatttaacatagtattggaatttctggccagagcagttgggcaagagaaagaaataaaaggcatccaaataagaagaaaggaactcaaactatccttgtttgcagatgacatgattctacaccgagaaaaccccacagtctctaccccaaaactccttcagcaacttcagcaaagattcaggcagggtacaaaatcaatgtgcaaaaacagtggcattcctataccctaacatcatccaagccaag

SEQ ID NO: 767575 - DNA, 649 bp, Homo sapiens
ctggatcctggaaaagtagtatcaaattattaaggaaatgtaaaaggtaacagtggaaggtaaggaaaagtggtttaggaataaattgtagccttgctttattttgtttgggactacaaccttatcttcttagagtcagttgccacttgattccttcagtaatactgaaaggagatctagcaaaactttaaaaggcaggggktgtatattaggcttgaacaattactcagctcatcttcatctattgctcaatagccagtaacagataagtaaaagttattcacattttctatcttttggttattcttccaccattttcccaaagtttctcactaattatttcttttcctatagtcactctaccataactattagttttatgtgtatacatttacaaccatagagcacaaaaatctttcaaaaagtgctgaagatcaaaagaatttaatttaatgacactatgattctgtttgatggaggtaagaggaagctgacaatatctttatgttttcctaccccttctgtttttcagattcagtgcatagcaaatctcccttaagtaatagggatttttaatgtgctcaagagactggaatgcctattttaaggtctaattttctattttctatcatgttccttccaacacttc

SEQ ID NO: 767576 - DNA, 592 bp, Homo sapiens
attcattcattcagtaaaatgattaagatcctcctacatacacaaggcattgagttagggaatgggtatagaacagtaaacaatatagtgtcccttcattcttagagcatacagtacagtgggaaaatgtacattaaagaagtacttacatgaatatctaattatacctgggaaaagggcagtgcagatgcacagagagccaggagaatgtgtgacagctagaatatgacctagctagtgggccagggaaagcttccagaggaggcaaagtttgtgttcatgtttcagttttccartggacttggataatgaacaatgcatagttcacaaaagtgatagacttgtattgaagaagagaaaggagaaaaatgtcaaaagtagggaccactactgagccctgtcaaggcatagtgttgtccatgatggcagtccatgacagcatagaggtacggagcaggttgagtcaaaacgtggggcacagtttgctcacatcagagagtcacccagcactaacaataacttgacccagctatgctcaatctaactgtctgatattattggtaatttgaattgtgactcatacagttccctc

SEQ ID NO: 767577 - DNA, 592 bp, Homo sapiens
attcattcattcagtaaaatgattaagatcctcctacatacacaaggcattgagttagggaatgggtatagaacagtaaacaatatagtgtcccttcattcttagagcatacagtacagtgggaaaatgtacattaaagaagtacttacatgaatatctaattatacctgggaaaagggcagtgcagatgcacagagagccaggagaatgtgtgacagctagaatatgacctagctagtgggccagggaaagcttccagaggaggcaaagtttgtgttcatgtttcagttttccagtggacttggataatgaacaatgcatagttcacaaaagtgatagacttgtattgaagaagagaaaggagaaaaatgtcaaaagtagggaccactactgagccctgtcaaggcatagtgttgtccatgatggcagtccatgacagcatagaggtayggagcaggttgagtcaaaacgtggggcacagtttgctcacatcagagagtcacccagcactaacaataacttgacccagctatgctcaatctaactgtctgatattattggtaatttgaattgtgactcatacagttccctc

SEQ ID NO: 767578 - DNA, 687 bp, Homo sapiens
acgtggatcccttaattagttaatccatcatcatctccggttgatttatttaatattatctcaaacatcagagaattgcttgtttctcacaaaaattgtccattctttctctggtatcttctaacttctgtaagcaacaatgtccactcaacagtttaactgaaattacagacaagccttaataagcagacaatgtctcatacataaaaacactccaggagcatctggactggaattttgcccagttaagtgacagtttatgaaaatagcccaatagccccagttgcagttaaaaaaaaagtccaaagactacaaagagttgcatactatsagggcacaaatccataaaactggttgcaacattgtggctagaaaaagaatattttgagtgactaaacaagaaaatgaattctggttgcttaacctgtctgactttgtagctttcttgatacctttcagactctaccatatcgatactatcctaattgcttgtatgtattttatttttatttcacagactttgtatttataacagtggctatcactctgtcagcatgggtgtattctgaagaagactttcagcctctcctgggcagatgtggccattagactcaatcggttttaaaattatttccaacctcaaacactcaatgtaacaatatagcacccagcagtgcctcacatatt

SEQ ID NO: 767579 - DNA, 496 bp, Homo sapiens
ggaattttgggcatctaaactttagcatgggccatgttttaatccagattttagccatttggccaagaaaacactttgattgaattgattattaaattcagtctaatgtagtgctcttcctttcttggtacttcagaatatcttctcacacatatctcccaaagttttgttaaaataattgtccagttctttttatttctttggggtgaaatcttccctttttaggttttaactttgaatgtggtgaaatctcctcctcttaggcttaaagctttgaatctggctwacatgtatattccattccccaattctagtaggatgtgtgcagacattgaggtacaggcaagtcttcagaagaactgacttaccttgcaaagaacttttcttcatcatcttcaaatcagatgaaactgcctcatcagacataaaagatggcatagcttcagctggcaaaggaagctagtgagagttagggtacaaagtacatcaaggtcat

SEQ ID NO: 767580 - DNA, 644 bp, Homo sapiens
acatgacttcacatcaactagggtggctaaaatcaacaatagggacaataacaagtattagaaaggatgtgagtcattggaaccctcaaacatagctggtgggaatgtaaaatagggcagtcacttcagaaaacaattttgcagtttctcatggagttaaacatagagttgccatatgacccaacaattytaagtattacccaagagacatgaaaatatatgtccatatcaacctgcacatgaatgtgtatagcagcattatttagaatagccaaaaaagtagaaatgtccatcaaatgatgaatggataaacaaatgtggtatattcatataatggagtattattcagctatacaaaggaaccaagtactgatactggcaacaacatgggtgaacattaaaaacattatgctaagtaaagaaaagccagaaacaaacacattttgtgattcaatttttatgaaatgtccagaataggcaaatctatagagacagaaagtagattcgagacaaaaagtagaaatctaaagagacaagaagtagagactgaaagtaggttgccagaaacctgggaagagggaaaaggagatgactgctaatgggaacagagtttcttttcaggattgtgataatgttccagtatc

SEQ ID NO: 767581 - DNA, 612 bp, Homo sapiens
aggaatcatttattactttgtaatggggaaacgtgagacatcacaacccagtcttgtgctacttatttgtatttcagctgaaacggctgacacattaaaaaacattttcaaatcatggatttttagagctagagctagaagaatccttaaaatgaagtctaatcttttcattttatgtgaaggaaataatacctggagtgttttgctccaggcaaaactagatcttggacacacatctccctacttctaagcatcttgcatcctctctgtacrtgttactattgggatagattcatgcctctactctggaatagattcatgtatctactctagaattttaaggaaaatataaaccataatactccttcgactatgcttaatattatgagaaaaagcttagctcagtaagcctcctcggtggagagttaatgttaaaaaaattaggctattagttactggcacaataataagaaacaatttttaacagattttgcagattgcgttttaattcagaatgatgggataacttcctttttgcttttctttgtattgaaagtcagtcagatccatacatattttttattgaagttttttttttaaaaaaggggatga

SEQ ID NO: 767582 - DNA, 652 bp, Homo sapiens
gatccagtgcttgtcattctatactctatgtccatgtgtacacattatttagctcccacttaaaagtgagaatatgtggtatttgactttctgtttatgagttgtttcatttaaagtgttggcctccagttccatccatgttactgaaaaagacatggtttcatttttttaatggctgaatagtattccattgtgtacatatacmacattttccttattcaatcatccattgatggacatttaggttgatttcatatctttgctattgtgaatagtgctgtgataaacatatgagtgcaggtatctttttgatataataatttgttttcctttgggtagatacccaatagtgggattgctgagtcaaatggtagttccatttttagttctttgagaaatctccatactgttttctctcggggttgtactaatttacattcccactaacagtatatcagcattccctgttctccctatccatgacaacatctgttgtcttttgactttttagtaatagccattctgactggtataagatgatacctcattgtggttttaatttgcatttctctgatgatttgtgattttcaacattttttcatatgtgtgctagccatttgtatgtcttcttttgataaatgtctgttcacat

SEQ ID NO: 767583 - DNA, 613 bp, Homo sapiens
ctcatatttactctagatgggcttgtttaacttccgaccatcagtacgcccagttccactggaagttcacattcaaggctttccaggtcaacattactgtcctcgtatggctagtatgaacaagcctgcatttcagggtaagcttcagattcttggaataaaatagtaaccattgtttatggtagctatcaaatatcttctaattggtgttggtttctttgaaaggatgatactggtccagcttctacktatatctaaaactgtttgtctcaactgttaaggaatacaaatatatgttaaattacctagtgaagattggagcgatttcacaaatggtaatgactttgtagttgaataaaagtatgtaattaaaaaaagttatcagagttttcttaatattaatcaaagtgtttttatgatagtagcttggacagatgagaaatggaagctacaggtcaaaaacatctcataatcatttttatgagaaatcataaaacttagaaatttcagtactttagtacagtgcttctgtttttagtttttcctcttctaacaaattaggcaaacaggaaagatttaagaatagcactcctattttattgaaacatgtttt

SEQ ID NO: 767584 - DNA, 619 bp, Homo sapiens
aaaatgactaagttacacaaacaaacaaatgaaaacaaacacctaaaaaaggacaaattaaagttcacgatacactacaatctagtaacattctcatgcaaagcaggagtgttctcaagtcagagtaataaatacttaataaataaaaatcctgggtagttcaaaccaacaatcaagctcatctatatataatcattttcaaatttaaaagatatttaaaatttaaaatatattcaaaaggtctttttctccagtaacgtaatttataccacttgaaatgaaagcagtcccaaagattaaaatcatctgaccacatgttactcatcctccacatgtattcaaattcaaataattccagttattcataaattagtctaaagtaaaacataaacctatccagatctgagtgagctcataattaccaagagaaagattacatgtgagatagatgtatgtttaacactactctcacayatcaaagttaatatacgttcaattaaattggaaataaaaatttttaattcattctttctatacttaaaatatatcgtgttagtaaataagttcaggaaaaaagacaatttttttctcataaaaggaaaaacacttgcagaaatta

SEQ ID NO: 767585 - DNA, 528 bp, Homo sapiens
cagatctccagctgcgtgctgggagaaccactgctctcttcaaagcagtcagacagggacatttaagtctgcagaggttactgctgtctttttgtttgtctgtgccctgcccccagaggtggagcctacagaggcaggcaggcctccttgagctgtggtgkgctccacccagttcaagcttcccggctgctttgtttacctaagcaagcctgggccatggagggtgcccctcccgcagcctcgctgctgccttgcagtttgatctcagattgctgtgctagcaatcagtgagactccatggatgtaggaccctccaagccaggtgcaggatataatctcctggtgtgccggtttttaagcccatcagaaaagcgcagtattagggtgggagtgacccgattttccaggtgccatctgtcacccctttctttgactaggaaagggaactccctgaccccttgcgcttcctgagtgaggtagtgcctcgccctgcttcagctcgctcatggtgcactgcacctactgtcc

SEQ ID NO: 767586 - DNA, 539 bp, Homo sapiens
tgtcagtgaaggatatacaaaaattggtcctatatcaggtgaaaaaataattcaaatttaaaagaaagaaaatgtcacaggtttcatgtattcatcgctcagtcattatctctggttttaaccatctaagaatagacccaagtcgccaatatggagagcaaagcttcagctgtattattgaggccccagggagcatcactactaacraatagggctcccttctaaggttaggttggagagtgcctgggaagtcagtccacagtggttgcctcctattgtttctttccatatgtggaccttggacctgcctgtaggtcctgaattggatttgcaaatctgcatggcaggttgcagcctgcctagcaaaactgggtatttataaatgaaaagccacagagataagggtatcctgacttaacatctggaagtaaggctctgtgtgccgttctgggtgtgctgaaacaccggaagccaggaggaggcctgaatctttttagggatccacagagtaggcagcaaggcagagcctgctttctttt

SEQ ID NO: 767587 - DNA, 633 bp, Homo sapiens
ccagttggccaggctggtcttgaactcctgaccgcaggtcatctgcctgcctcgggctcccaaactgctaggattacaggcgtgaactaaagtgcccggccaaatttcatgttttatgtgacttcttcttagttggaatcttatctcaagctccttagttcagaattcatcatttgcctcttccctctaggtttgacagattatctgcacactgagaatttcccgtctgtttagaaaccactttctgcacctttcctgctggccacctgacattcacatayacctgaccatataataacaactccttagtctttggcttatggtatttgcctagtcaatccttttttacttttgtatttcacgtcccatgactattgctaatcctgaatcactgtgactttgctattccagtgctagtgattgtcagtgaagaatctccagaccatgccttagggaaaccaaaggacaaatggtaaaatggtagttttctgttgaggtgtacaatggcctcattgctcctgaacatatgtatccctcctctccctggagctaagccttctgaactcattgctgtctcaagttctaagacatacccctagccattaaggatccctggatccccagagcagatac

SEQ ID NO: 767588 - DNA, 558 bp, Homo sapiens
ataatatttaacagttttaaaaaaacatgtatcacattctaaaaatgcccagattttcttttatcttctgattaaaatatgcagcagcccaatggcataaagcttaactcattctgataactagaaagtatatgagcatatayattttactttcattgaatatatatatatatatgtcattcacctcttccttttggcttctcactgccaaagttccaaatggcatgcggtttaacaagacaatgctgaggaaagcagcatttctgatcatctgaattggcagctcaaaacagataccactccttttacaaagggaacaaagggtgaagggtatgtgaaatttgggcagtgggctaaagggaaaccgtgcacatgaaatttgggttaccatgccccaagtgtgtaccacccaaaacataacacaattacctacttcaacagagctactaccaacatttactaaaaccacattaaaaatacacaggataatgaatggtttgaaagagcgcatttgaagcagagagaacccaattacacaccttcctgcaacagagtgcc

SEQ ID NO: 767589 - DNA, 581 bp, Homo sapiens
attgaaaacaaacatacaataaagaagaccaatgaagctaaaagttggttcttcttttcaaagaaaatattaataaatgcctgcataatttatcatctgcataaattaatatctgaaatggaaaaaagacatcactacacaacctatggatattaagacatcataaaatattytgaacaactttcggcccgtaaatttgaagatttacataaaatgggcaaatttccagaaaacacaactttcagaaactcatagaaagagaaatggaaatcagaatagtactataattattaaagaaattaaatcagtaatttaaaacttcctaccagaaaaaaaaaaaaaacccagaaagaaaaaaaaaattcaaccttaaataaattcttccaaacaacagaaaataaggaaatacttaaataaattttacaaaaccagtgtaactttaatatcacaacttgacaaggacactgaagaaaaagaagtactggccaatttcagtcataaacacagatgcaaaaaatcctatataggctgggcgcactggctcaaacctgtaatcccaacattttgagaagccaaggtga

SEQ ID NO: 767590 - DNA, 627 bp, Homo sapiens
atcatatataagggacacatctagagtataaaaaagactcttacaactcaataattaaaaaactcattataaaaatgggcaaagaatttgagtcttttcacacacttctctccaaagaggatatacaaatgtccaacagcacataaaaagcatcattagccatcagggaaatgcaaatcaaaaccaggatcaaatcacacctgctagaagaactatgatgaaaaaaggagataataacaattgttggcatgaagtggataaatyagagctctcatacactgctgatggaaatgtaaaatactgcgactgctttggaaagcagtctagaagttcctcaaaagtttaaacacaaagtggtatatgttccagcaattccactcttaggtacacacccaaaagaattcaaaacatacatacataagaacttgtacatgaatgttcacagcggcatgatttataatgatagccaaaaagtctatgtccatcagctcatgaataagataaatgtggtgtattcttatgctgacatactattcagccattacaagaatgaaatacttgctatgacacggatgaaccgtgaaaacacggtaagtgaaatatgcttatcataaacgaccatatatt

SEQ ID NO: 767591 - DNA, 622 bp, Homo sapiens
taaaaatgccctaaaataaacccaaagcagagaaaatctgcattacaatatcccaactggaattatctatctttaaacaactgtttggagatatttcaaaagattttgaaccacatatttaaatctttcaatataaatggattaaaaagggaagctatgaaatgagagtcaattaaattcaaaacaaactraaaacaaactgaaaattatctcagaaatgaaagctaaatttaattacaatgtatgtaagagaatagatacaactttaaatatactaaggagaactgagaaatgaaaatatccaaggaaacaaaaacactataacaaagaaaatgatttcttaaaaaagaattatagagtgataaataagtagataaacaacaatccatcaaattattggagtccctaaagttcctaaatacaaatgttacatattctgaaaatgtagagataacacaatttttaaaaagagaagagaagggaaagagaaaaaggaacatggaataagcacagtgattgccctaaatgtgtgatgttggaatcaaaatatattcccttgaagcagaaaaactaaaaaaaccaaatcaggctcaaataagaaaacatataatgaaagtatcat

SEQ ID NO: 767592 - DNA, 618 bp, Homo sapiens
agcttgcagggaggtgtaggactccagcctctgcagtgcccagagtgtttggtacaggaatgtgttcagtggagtatgaccagggatgcctatcccccaaggttcgccatgtgccctttggagactttagccttagaggaactgttaggcctgaacagagcaaagtggcctcggctgtaagatggggcagtctgacttgagagcccccttgtcagctggcctcttccagggcctcagcctcactgtgcgcatttgcagtacatccttggatgcccatccagagtgcctccagcactgaatccaccttataacacaatcaaacccccaagcacatcaaaaagataaaagaaaaaaaaatccaaaggayggcaacttcaaagattaaacgaacatcaacccacagtgatgaaatagaactagcacaagaatttaggcaacttaaagagctggactgtattcttacctccaaacaactgcactagttccccagcaatggttcttaaccaggctgaaatgactgaattgacacaaatagaattcagatatggataggaatgaagatcatctagattcaggagaaagtcaaaacccaagccaaggatcctaaggaatacaata

SEQ ID NO: 767593 - DNA, 581 bp, Homo sapiens
acacctccatcaagtgagtactcagctttgtacacattaccttgagaaaatgcagtgaacaaagtcatgtaaaataatccagggttcctatggaataatggcaacttcctaaatctaatctctttgcccgtaatctaactaccatatggaggaaaaaaaagggagcaaataaaactacctttaaaacatgccaaagaataaatttggagacaaggaatataaaacagtttacacacttgagatttcaacaagatggctgaccagagatgcctggcactcatacccctaacaacaacaacaacaacaacaacaacraagactagagcaataaataaacaattaaaattcacgtatagtgtctaaaaagagaactggagtaccacaagggaggtgtgaattccctgtgaagcatggacacccagaacagcagcatagaaaggggagcagagcaccctgcttctggtactacatcacctccaacaagattgactgggaaccagaaaggactttcatttgcaggggaaaaggtaagcagaagatctccagcagctccattacatagaagtcacatacaggagaat

SEQ ID NO: 767594 - DNA, 657 bp, Homo sapiens
gagacagggttttgctatgttgcccaggctgatcttgaactcctggcctcaggagatccttccacctcagcctcccaaaatgcttggattacagcactttttcagatctcctcccaggaatcatgaatgttcttaatgaaatctggaatggtgaatcctttccagaggttttcaatttactttgcccagatccatcagaggaatcactatctatggcaactactgctttctaaaaagtatttcttacatacaaagacttaaaaattgaaatcactccttgatccagactgtgggatggatgctgtattagcaggcgtgaaaacaacaatctccttgtgcatctgcatcrgaattcttgggttactgggtgcattgtcaatgagcagtaatattttgaaatattttttctgagcactaggtctcagtggacttaacatattcagtaaactgtactgtaaattcatgtgctatcatccatgatttgttgttccctttatagcgcacaggcagagtagatttagcataattcttaagggccctagggttttcataatggtaaatgagcactgcctgcaacttaaagtcatcagcttaactaacccttaacaagagatcagcttgccctttgaagtcaggcattgacttctcccctctagc

SEQ ID NO: 767595 - DNA, 582 bp, Homo sapiens
ttatatgccatatttccctaacaaaattataagctctgagggcaaggcagggtaacaagggtgccctcttttatattcttcagtgtttagcttggtgcccaatcagtactcaataaatactgattcccatcaatggagaaccctttaattttactcaattcagggagttcttcgtagaagccatcactagtggtggcttmtctcctactttacaggaaaaaaaaaaaccaaacaagaactgccttaacttccttccaacatccaaatccacaaatgcatttacatgtagatccattattttttgtcccctcctgaaattatggagaagtattcccccaaaacagacttagcatacatgaaacaaaaaatatttgttacattaaataaaaatgaataaagccaacgatccatgatagatgcggcaaactggctccaacccaagaaacacgaaatcatggattagttatggttttgtgccaacaagtctaaaagcaagaccttaaaataattttggccaggcgtggtggctcatgcctgtaaatcccagcactttaggaggcccaggcgggcagatcatctgag

SEQ ID NO: 767596 - DNA, 582 bp, Homo sapiens
ttatatgccatatttccctaacaaaattataagctctgagggcaaggcagggtaacaagggtgccctcttttatattcttcagtgtttagcttggtgcccaatcagtactcaataaatactgattcccatcaatggagaaccctttaattttactcaattcagggagttcttcgtagaagccatcactagtggtggcttatctcctactttacaggaaaaaaaaaaaccaaacaagaactgccttaacttccttccaacatccaaatccacaaatgcatttacatgtagatccattattttttgtyccctcctgaaattatggagaagtattcccccaaaacagacttagcatacatgaaacaaaaaatatttgttacattaaataaaaatgaataaagccaacgatccatgatagatgcggcaaactggctccaacccaagaaacacgaaatcatggattagttatggttttgtgccaacaagtctaaaagcaagaccttaaaataattttggccaggcgtggtggctcatgcctgtaaatcccagcactttaggaggcccaggcgggcagatcatctgag

SEQ ID NO: 767597 - DNA, 531 bp, Homo sapiens
cctgaaacatataaaaccaagttataatccaatcatcatgggcacatgttctcagaacctcttgagactgtgccttgggccttggtcactcatgtttggctcagaataaacctctttaaatattttacagagtttgactctctttgtcgacactgccctaatgtcttgaaggaaaccaaaatattccagtccaaaatacacttctttggcatatttcctttttttttttttttttttgaggkggagtttcactcttgttgcccaggctggagtgcaatggtgccatcccggctcactgcaacctccgcctcctgggttcaagcgattctcctgcctcagcctcctgagtagctgggattacaggtgcccaccgccacgcccagctgaattttttcatttttagtagagagggggtttcaccaggttggccaggctggtctcgaactcctgacctcaggtgatccacctgcctcggcctcccaaagtactgggattacaggcgtaagcaccgcacctggccctctttggcat

SEQ ID NO: 767598 - DNA, 601 bp, Homo sapiens
gctgtttcgctcatagacagaatttataggtccaagaatcaagaggtgaaaatggaactgtctcctctcactaatggccttagtgatccatgagcaaaacttttgcttttcccccgtgactttaggtttagctggcctagaggtctttgttccaaaggatgtaatgcccctactaggagataaaacaatccattaaactgggagttgagactggctctcaacactttcagctctgcatgacactgaatcaacaggtgaaagagggggtgactgaactgctaaaagtcagtttctgactggtgaaaatagaggaattgaggttaytttatataatgagacaaataggaagtttgttggaatacagaagatgctctgggacacctcttagtacattcctgagagcaaagtccatggaaaactgcaacaatccaatttaaacagaactgctaaaaactcagacccctcaagagtaaaagttaggaccacctcacccaggaaaaacatcatgaccagttgagggacttggttagggcaaaggaaatagagaaaggaccatggaagaaggtatggaaatacctgagactgggttatgtataagaaa

SEQ ID NO: 767599 - DNA, 556 bp, Homo sapiens
acacacacatacacacagttatgcatgttatgctatgcagttagccagtgttgtttaggtctgatgctgtcttgggttagtgaggaatcaagtgaagggcagtacattcttccctgtcaagttttttatttttatttttttggtttgttcgtttttttttttttgatgatgcttgtctccatctgcctgcttctacttggtttcctgcatatttcaattcctatcaatctcctgccttctagacagctgcataacgttgaagttgatctatcatttgatttctgtgggcatctctaacttttgcctgtcctccttcactaagctgagcctctggtgcattctgcttttytttctcctagcttcttgcttccttaccttgattggcagccactaagagcccacttagacaaaagcattatgagatcatctggcagcatttggccttaggtacggaacagaggagtatatcacggtggagtgatgcaatgaattgaacaaaaggtcaggtcacaaaatagaaaaatactggggaagtatagtcaagaataatattttg

SEQ ID NO: 767600 - DNA, 638 bp, Homo sapiens
ataggctttcatccctcaaaggggatgaaagaagatattccttgcaaataataccaacagaggacagggacaatacttattctagatagaaaaaacttaacacaaaaattttcacaagagacaaagaaagtcattattaaagagctcaagtcattaagaagtcatagcaattgtaaatacatgtgcactcaacattggaacacctaaacatataaagcaaatattaattartcaacatgaaggtaaaaaatagataccaaaacaataatagtaggagacttcaatacccctctttcaaagatggaaagatcaaccagaaagaaattaataagaaaatactggaattgatctgtgctttagacaaaatggacctaatagataaatatagaactttttatccagtagcaccagtgtacgcattcttctctagtacatatagaatgctctccagaatagaccatatggtaggccacaaaatatgtcttaacaaattcaaaaaaattgaaatcatattaagtattgtttctgatcacagtggtatgaagctagaaatcaataacaagagaaactttggaaactacaaacacatgcaaattaaacaacataatcctcatcaatcaaggagtcaatagagaaac

SEQ ID NO: 767601 - DNA, 610 bp, Homo sapiens
cacatagctctgtggtaagaagaggaaagtgtattgctacccctgccaagtaaaagcaaatgttgtcaggcaatctttactcatcatcaccaaagaaaaggaacattttccaaattgatagcagtatgccaggcccatgggatatgtttaattactccagaagaaaccataactgggacaccagctaaaattggaatcatcccctgattaagttgcatgattcaagtatcattttccaaaattgacttttcttttacacaggccaaacagatgaatttataaacataattatacttgtatcttatgtgtttggtattaatatttgaaactatctcaagatattcagcaggacaaaatatgacttttgagattaataaaaaaagtttttccktacaaagcctagattttaagacatctaactatagatccaaaagactaactctgaaactcaaggtacaataaaaatacaaagataatcttattgttcaagaaatatattttcttctcttccctaagatttaagtcttttattgaaaaaaatggcttacatacaagaaagatacagatggtgataaaaatactcctgttaaaatcacttcctcaggaaagc

SEQ ID NO: 767602 - DNA, 534 bp, Homo sapiens
acatatcacagtttatccattcactggctgaaggacatttgtgttacttccagcttctaaaaactattattagagctcctgtaaactttatgtgcataggctgttgcatttttctacctaggagtggatttgccagatcatgtgggaagtttaactttatgagaaactgccaatctgtttttcagagtggctttaccgtatttcattcctacyagcaattttgaagagttccagttactctgcatcgttaccagtacttggtaggtttagccattttcatttttggtaatctagtaggtacacagtaattctcgtggtggtttggaagtgttgaatttattttcatgtgtgtatttgctttccatataactttgatgatgtgtcttttcatgtattttgctcatttttttcctgagttttgagggatcttatatattttggatacaaatcctttataaaatatcgattgaaaatattttctttcagcctctaacttgttttttaatctctgaacaatgtcttcacaatatagtt

SEQ ID NO: 767603 - DNA, 534 bp, Homo sapiens
acatatcacagtttatccattcactggctgaaggacatttgtgttacttccagcttctaaaaactattattagagctcctgtaaactttatgtgcataggctgttgcatttttctacctaggagtggatttgccagatcatgtgggaagtttaactttatgagaaactgccaatctgtttttcagagtggctttaccgtatttcattcctactagcaattttgaagagttccagttactctgcatcgttaccagtacttggtaggtttagccattttcatttttggtaatctagtaggtacacagtaattctcgtkgtggtttggaagtgttgaatttattttcatgtgtgtatttgctttccatataactttgatgatgtgtcttttcatgtattttgctcatttttttcctgagttttgagggatcttatatattttggatacaaatcctttataaaatatcgattgaaaatattttctttcagcctctaacttgttttttaatctctgaacaatgtcttcacaatatagtt

SEQ ID NO: 767604 - DNA, 601 bp, Homo sapiens
attttgatatgttgtatttctgttttcatttgattgaaaaattttaatatccattgtaatttcttccttgacctacaaactatttagaagtatatttaatttccaactaaatggggtttttctagatttttttctattgtgaatttcaaatttaattctgctatggtcagagaacatacttcatatgatttcagtcttttaaaacttgggagttgttttgtcaaccagcatactatgtattgtggagaatattccatgtgcrcttgagaagaatgtgtattctgaaatcaattggtggggtgtcacataaatgtcagttatgtcaattggttgatagtgttgttcaagtcttctatgtacttctatattcacgcttttctactgagttgttctgtcaactgctgagagtgcagtattgaaatctccaattagtattgttaaataatctatttatcttttctattacttgttgtttcacataccttgggtgctgttttaggtgtatatatatttagaactgttatatcttcctaatgcattaacacttttatcattattaaatgtccctattttttctctagtaatatttcctgttataaag

SEQ ID NO: 767605 - DNA, 643 bp, Homo sapiens
tactgaatctgtaaattaatatttttcaacaaattgatttcttcaaatattgttctaaccctctcttctcttctgggattcttattacacatatgtttgttgctatatttgatgtctcacaggtctctgaggctctgttcacatttcttcaatttaaaaaaaacctgttttttggccaggcacgggggctcaygcctgtaaccccagcactttgggaggccaaggcaggtggatcacgaggtcagatatcgagaacatcctggctaacatggtgaaaccccgtctctgctaaaaatacaaaatatcagccaggcgtggtggcacgcacctgtagtcccagctactcgggaggctaaggcaggagaatcacttgaacccaggcagtggaggttgcaatgagctgagatgacaccactgcactccagcctgggcgacagagcgagactacgtctcaaaaaacaaaacaaaacaaaacaaaagcctatttttttagattgaattatttcatttgctttaccttcttataagtggtacttataaaagaacttataagttcacttattctttcttctgccacgtcaaatctgttgagtccctctagagcactttcagttcagttattgtactttttacctctagaatt

SEQ ID NO: 767606 - DNA, 532 bp, Homo sapiens
aaagaaactcctcaccagaaacctccactccaggtggctgtgaggcatcccagggcccagacccagatgtgctgtcagcccagtgaggagaaaaagggcaagacagacgacagccccaagggctagcactactgggtgttcaccacgcatcatccattgaaccctccccctccaaaggaacaagctttcaaacttagaaaactgttcagtgtcacaaagcaaacaccccgcctgactccagtttgggaatcaacatgagggacagtctgacttcaagtctgtgctccctgcgaccccratgccccgctctccactacataacccagctcaacaccactgacaccagcagctgagaaagggcctggggtcataccttgcactcctgtgtgtattccagctgggaattatcagggataaaattacaaaaatcctgaaaggaaaaacacacagacacacacaaatttggattaggcagcatactgccaacctacgttggcatactacaagacaagaaaaataaatattaacttaa

SEQ ID NO: 767607 - DNA, 686 bp, Homo sapiens
atcagttagtctcgaatgtggtaatattgtgtcacacttttcaccatggcaatttcatgctttgtaatctttagaaagatgggattcactcgctcactcagagtcagcagaattgtaactgcagaacacaacagtgagggcctaactcggactccattgcataagccgcgtgttgctgtagcaaaacatgtttacaactctttttttttttttttttgagatggagtctcactctgtcgcccaggctggagtgcagtgggacaatctcggctyactgcaacctctgcctcccagattcaagcaattctctgcctcagcctcctgagtagctgggattacaggcacccgccaccacgcccagctaatttttgtatttttagtagagatggggtttcaccatcttagccaggctggtcttgaactcctgacctcgtgattcacccacctcagcctcccaaagtgctgggattacaggcgtcagccaccgcgcccagccttgtttacaaactctttagccacttgatttgtgcttaagccgtgtagttcagcactagatggtgcaggagtgttgttttgcagcagactcctggatcgagtttgcatgtggctggggccagccagccacacgctgcaacctcttccgggggtatttatagcacagtcactaacatttgctgttcctgggt

SEQ ID NO: 767608 - DNA, 633 bp, Homo sapiens
cttttgtaagaagcaaatagtccatcatttatttcattaaaaaaattgttttaaaaagcatgtcagtcttagtcacctttatccaagactgtccaaacgcattattgaatatttatctctcttttacacggctgaaagagaaaggcaacaaaaagttgttcttaaaaccacccctctttccatggccccaaaaagccttacacacctattccatatttacactttcaaagctgtgatgagtaatgggaagctccctctcctcaatctccctgtatgtcaagcaactctttggcatccatgaacttctttacctttcaagatcttttgaaaaattgcaagcaatgtttctttggtcacatgggttaatagtcctaattttacctctttagcaactcagttttctaaatggactttacttcctcaaacaatgactagattttggctgaaygtttgaacgatgaatcaggagactcatctactctccacagatgccattttacctttgggtaaatcatagcaattcctccaattctcatttttaaaatgcctgcatttgccaaatctaacgccatccgatcaatctcctgttctcagccccattttacagaaaaggtgactgaggctccaggtaac

SEQ ID NO: 767609 - DNA, 559 bp, Homo sapiens
gaatataggggaattttctgtaccttcggtttttccgtgaacctaaaactgatgtaaaaaataaagcctattttcaaaaaaaatctgaaaccaaacaaacacaaaataaaggtccttcaagtctcccctatttatgttatatttgccatgtgtatttcatctacatatattgaaattctcccaatgttatatatatatatgtatatatatatacatatatatattttgctttcaataatcatgcatattttawagaacttaagaggatatgactttggctttttcttttaacctcacaataatcttggtaaataggtaaacagatataatgaattccatttaagaggcaagcaaactaagttagatacttgtctgctctgacacagctggtgaagagttgaaccaggactcaaacctatatgctacttctttcccctgtaccaggctgcattttgttcctcatttgtaagttacagctttgatacagaactagagtctgtgtggaacagaacgtaccatgaaattgtaaaaatatattggcactgagaatacctaggtt

SEQ ID NO: 767610 - DNA, 486 bp, Homo sapiens
accagaggttactttcattgccctcttggttttggggggttttggccggcttctttaccacgacctgttttataagcaagatctttgtgacctgtatcttgtgccaacttcctatctcatcctgtaattaagaatgcctagcctcctgggaatgcagcccaataggtctcagtcttattttacacagcccctattcaagatggagtcactctggttcaaatgcctctgacacaaccagakaaaatatttatcagaaacttagggcaatcctgaacccacgcacccaaactcatagcttcaaaatataaaaagtaaaaatggacagaactacaagaaaaaatgtgaaaatgtaatggtgtcagaaaatttaatttggatattaaaaacaaaacttccaaacaacttgtaggttggagaaagactcagtatattttgtaattttaaataaaagcaaaacacgatcacagcttgtaagatcaatgttag

SEQ ID NO: 767611 - DNA, 602 bp, Homo sapiens
ataagttatatgcaaatataacaccattttatatcagaatttgaatttcatataagaattttggtgtcctcttgggtggggaataaatttcccacagatgctgcatgatgactgtagatgcaaacagcaagctggtatggtttcatattcaatcccaaagtcatcataagatgaccacagcagatcctttstgtttatcccacaagagtgtttcctatgcgaaaaagttcttacatccacttgggttgcggattttttgattggtttgatttgcatgctcatccatgaacctgtgctagaagaggatggaccttgctcattggtttaggcctaggttacaactccatttcttagctacacaatgggacccatcaaaccacctggtcagagaatacgaaagagttggatccctaaactaacatcaggggtgatggacagaatgaggaataaggacctcaggatagtcaacaatcaatgtttgtcactaaacattcatactacttcacaaaattagttcaagcttctctccatgactagctggcacagttaccatcacagcctgtatcagtccattctcaagctgctaataaagacatacctga

SEQ ID NO: 767612 - DNA, 614 bp, Homo sapiens
aaacgttctcaatcttaagagagtataaatatcaccaagggtgcttcttgaaaatgcagattccctgccagggcctttggctaggcctagatgtgtacatttttaacaagaaccccagacgtttctatgtagatggttcttggcctattccctgagaaacgctggaacatctggcctgctgaagaaaaatgtaatcccatttgaaaaagtgctagacaaactaaaaatcattttagggatttatgtgggctaccaaatgaggtctgaccaaaatgattagaaatgcagtctggaaaaatataggctgagaaaagatccagttgaacattatattgtcatgatccagagatcagaaatattttttaaagtggggtacccaattaaatccaaggcatrtttgacagtctactactgttcttctggacattggccaagggaattaaaggctgatttccttgaaaatgctagatacattaaattttaatatttccttttttccctcgtaggttactcattttcaatgcaaagcctactctctactaatcaggctggtcatttagggtatagatgattcaatcattatgcccttcttctaaattatgttagcctactga

SEQ ID NO: 767613 - DNA, 519 bp, Homo sapiens
ataccctttatttctttctcttgcctgattgccctggccagaacttccagtactatgttgaataggagtggtgagagtggttccttgtctagggtgcacccctttttcttggaaactgtgagtaactatcttttaatgaaaatcatttcctgatctgttgtcttcctatacctcagatcttctataaatacactatcttttaaaacagtttttttccaagcatactgtaagtactttgaaggaagkgattgcacttcaaaatttcttagtatcccaggactgcttaagtatagttggtattatttattcaataaatactcgctacttgattccatttaggacctacggatttaggatattatatgttaaattgaaaattattcactggaaaaacctcaatattcacttaaacaatgtggattcaatctgctatagttcttcaggaaaattgggctaggattatgtgaaagattattattaagggttcctatgttctctgttcagttcttcccttcatat

SEQ ID NO: 767614 - DNA, 618 bp, Homo sapiens
ggtaagagcaaagatagctcgtggcctctgcttgataggtgccacagatatcacaggtgagtccacagatatcatagatgtcatggatatccatgaagacatccatgacctcaataatatcatggagagtctgattacacctccatagatgtcacagatgcccacaggtgccaaagatgatgcccatgtggttacccagaatggagacttaaataatttaactgccaacaactaaaattgccaaccctgcaggaggagaatattcttaagtgtagatcaaatattgttttggttactgtaatttggagrtggtcccgagccacccacgtagggattgtaggtagaaggcaggagtctgaagttcaggaaaggggtccaggtgggagatacacaggtttgggagcctccacattaaggtttgatgatggacgaatccacaaagaagagaaggggtccacggacacagccacaggaccctccagcatttagtgtcagggagaagaggtggaaacagcaagaagactgtatagagcagctgctgaggagaaatgagtgaccaggagagtgcaagttcaggtgatggtggccaacgggggctggagtttcaaggagagattg

SEQ ID NO: 767615 - DNA, 638 bp, Homo sapiens
atccctcagcttccagatggtgaagccttgggactcgcggggacaggaggccactgacaccgagtactcggagatcaagatccacagatgagaaactgcagagactcaccctgattgagggatcacagcccctccaggcaagggagaagtcagaggctgattcttgtagaattaacagccctcaacgtgatgagctatgataacactatgaattatgtgcagagtgaaaagcacacaggctttagagtcaaagtatctcaaacctgaatccacactgtgccctcccttttatttttttaactaaaagacagacaaattcctacctctctgtaccttggtttcctgctctgtaaaacaggaatgagaagccctacttgcaaggttgtggtcaccattccaggagtcacatcccgtyagagctcctggcacaggtgtatgccgagcactgatggatcgctgtgctttgaacacaaaggtcctgctgggaacctctcctgattctggtggcaactagtacttatatgtctgtgtcacttgcctgcaaaatagcgattctgcaactttccaggaaataacctcagcctgcaaatcaggtctaggtagcatctggatcctgcccacctcttcagcctcatctg

SEQ ID NO: 767616 - DNA, 621 bp, Homo sapiens
atgataaaactacatagaacagcaggaagactattatcattaaagtgaggctaggggctccttcaggagggagcgggggcatggccaataggaaaggggaatgtaagggtgaatgaattaataaaatctctttcttcatttcaagggacagacttgacagttcttttgtgttctagttcttcaagggtgcttattttgtgtgaatcactgagttggtttttaggggacacttttatgtacatgtcttgtgtttctccccgctcaaaaaaaactgtttcaagaaaagctggcctggatctaagggggctgcagcttgcaggatttttcccacwtcctcccagcccagtcacacagtttaaaataatcttctgttgaagtcaggtgcgtgtttcttctctcagaaaatcgcgcccatcactgagggtggacgccccggggctggtgtctttgctccacgtctcctgttcacctgaacccctaggagcagttcctgcaggagcaaagccccagggccagcagacccctcacactctgcactaaccaggcctcatgagatagcagtggtgaagggaaatgtccttgtgctcagagagctgtgaggatgggaatagtgtctgctct

SEQ ID NO: 767617 - DNA, 644 bp, Homo sapiens
aaggacagaagagtaaccggaaggattactcgctgacgatgcagagttccgtgaccgtgcaagagggcatgtgtgtccatgtgcgctgctccttctcctacccagtggacagccagactgactctgacccagttcatggctactggttccgggcagggaatgatataagctggaaggctccagtggccacaaacaacccagcttgggcagtgcaggaggaaactcgggaccgattccacctccttggggacccacagaccaaaaattgcaccctgagcatcagagatgccagaatgagtgatgcggggagatacttctttcgtatggagaaaggaaatataaaatggaattataaatatgaccagctctctgtgaacgtgacaggtaaggcacgggctccaagagaggccaaaggcaaatgtgatgagggctttagggcacggctgakacgggacacatgtcctgggagggggccgggggtgatggactcaggagaggagctggaccagagcctgagcttccccaggaccgcaccttggatgcccctcctgatcctgcaggcccctcccctcaccagccctgacccacaggcctgacatcctcatcctgcctctgacgctggcattgtggcatgtggggcctta

SEQ ID NO: 767618 - DNA, 546 bp, Homo sapiens
cattccggttgtttactctgttgatggtttattttgctgtgcaggagctcttaagtttaattagatcccatatgtcaatttttgcttttgttgtgattgctttggcatctttgtcaggaaatctttgcctgtttatccagaacgatattgcctacattgtcttccagagtttttatagttttgagttttacatttaagtttttaacccatctcgagttgatttttatatgtggtataaggaagcagtcccactcaatcttctgcatgtggctagacagttatcccagcaccatttattgaatcaggaktcctttccccattgcttttttttgtcagctttgttgaagatcaaattgttgtaggtgtgtggctttatttctgggctctctattccgttccattggtctatgtgtctgtttttgtaccactaccatgctgttttggttactgtagacttgtaatatagtttaaatttgggtaacgtgatgcctccaggttttctttttgcttaggattgccttggctatttgggcacttttttggttt

SEQ ID NO: 767619 - DNA, 546 bp, Homo sapiens
cattccggttgtttactctgttgatggtttattttgctgtgcaggagctcttaagtttaattagatcccatatgtcaatttttgcttttgttgtgattgctttggcatctttgtcaggaaatctttgcctgtttatccagaacgatattgcctacattgtcttccagagtttttatagttttgagttttacatttaagtttttaacccatctcgagttgatttttatatgtggtataaggaagcagtcccactcaatcttctgcatgtggctagacagttatcccagcaccatttattgaatcaggattcctttccccattgcttttttttgtcagctttgttgaagatcaaattgttgtaggtgtgtggctttatttctgggctctctattcygttccattggtctatgtgtctgtttttgtaccactaccatgctgttttggttactgtagacttgtaatatagtttaaatttgggtaacgtgatgcctccaggttttctttttgcttaggattgccttggctatttgggcacttttttggttt

SEQ ID NO: 767620 - DNA, 618 bp, Homo sapiens
tcctctctccatccgaaagaagtatgaacgattatccctcctcctggcgtctacgatgctcagggagcagttgttcttactgggatccccaaggaggcggaatcagccctgagtctcctcctgtacttcttgatctagcttgtttgtggccactggagagtccctggatacaatggctccttcccggaaccagtaaccatgaactgagaaattcctgttgtagtagggtatgggatgggagaaagtgcagggcacgaggacgcacaaaccctcctgtaccgtcactgactcctgcacttgcagccggatttttggatccatagccagggcccctgtggggaaacgagggtcagctyggcccagcccgacaacccctctccccgcagccattcacctgcccacagcaggggcagcagtagcagcagtggcatgtctgaggcagaggcttcccgggcttcctgtgtgagcagagaagaggaagggagtggaggggaaggactacagggccggacaggaagctggggaggagcaggaaacctcagccctgcatggaagaggaacctcagacccacacgtgctcagagcttgtcccctccacacagattgaccctcatgggc

SEQ ID NO: 767621 - DNA, 556 bp, Homo sapiens
ttcataacacccccgctacgtccactggcaagccccaggtagcttcagtatgggggttggtcacaggaaagaacaaggcatgattaaaaggttgggactttcagctcatctcccagcctctgtggaggggagagggagtgaaagttaagtggagcaccaatgggcaatgatttaatcaatcatgcgtatgtaatgaatgttccattaaaaaaccgcaaaagactgggtttagggggcttcyggacagttgaacacacggaggttcctggaaggtggcatgcctggagagggcatggcaactccattctccttcccctgcacctcaccctgtgcgtctcttcacctgtatcctttgtaatatcctttataataaactggtaagcataagtgtttttctaagttctttgagctgctctaaaaaattaattgaagagaaaagtgttatggaaccccaatttatagctggtcagtcagaagcacaggtaaagaacctggagcctacaattggcattggaagtgggggacagtcttgtgggaccaagccctcaacttgtgg

SEQ ID NO: 767622 - DNA, 564 bp, Homo sapiens
atccttgcatccctggaataaagcctacttgatcgtgacgaattatctttttgatgtgctgttgaatttggtttgctagtattttgttgaggatttttgcgtctatgttcatcagggatattggactgtaatttacttttctcattgtgtccttgctaggttttgatatcacggtcatactggcttcatagaatgagtcagagaggattccctcctcctgaatattttgggagagttattctttgtacatttggtagaatttgactgtgaaaccatctggtcctggacttctatttgttgagagatttttttctattgctggttcaatctcactacttgttattggtctgttcagcatttctatttcttcctgattcaatcttggcagaatcttatggttctaggaatttatgcatttcctccaggaaaagttcctctcsatgttttgaaacaaaagatattattctctcacagttctggaggctagaaatttgaaatcagtaaggccaggcagaaatgaaggtgttggttggactacaacactccagagacttgagaggatcc

SEQ ID NO: 767623 - DNA, 514 bp, Homo sapiens
cattacagtagataattttaagatctcttcaacctacttgtcgtgcctgccaagtgagtcggcctgccactaggtggcagggtttgctatcgatctcccaaagttagacacaaatgtgcctctgagacggggcagtgcctgaatcctcaaaacagaggtggtagcrgtggcagaaaccaggctggaggcttcccctggggagttcaggacttgactaaccattgttcattctgccagaagcaaaatgcaaactatgcaaagcatttcagagctgtgctcccacccatacgcccttcctgcctggctctgcagctcactccccttgcctgcctacagtgcctggaaggtcagagtccaccctcacctccccactgccccactagctgcacctcaaatccctaagctcatcctctaacctgtaccctccatttacacatagtctgccattctggaatgaccccaaggtaccagtgcaatggtgagccctggctctaggggtcaaaacaaggtaact

SEQ ID NO: 767624 - DNA, 666 bp, Homo sapiens
ggagaaaaatatataattttaataaatgcaaaaaaaagcattggacaaaattcaaaagaaattaattttaaaaaactttttttcttttcagacagggtctcactctgtcacccaggtggttgtgcagtggcataatcatggttcactgcagcctcaacctcctgggttcaagtgatcctctcacctcagcctcctgagtagatctgactaaaggcacttgccatcacgcctggcttttttgggggaggcgggggagatagtgtctcctatgtttcccaggctgcttgtgaattcctgtcctcaagcaattctcccaccttggcccccaaagttttgggattatacgtgtaagccaccatacccatcctaaaaaaaagtattaacaaaacaaaaatatccattcccaagggtctcagttaaaaaaaaaamgaaagaaaaaggacaaaccaaaaatagaaggaaatctcctcaatcttataaaaggtatgtatggcaggggaagttataattaacattcataatagtcaaatattgaaaaaagatcaggaaaaaggcagtgaatgctcaggctcaccaattctattcaatgtagcactgaaggtcttagccattacaatatggcaagaatagaaaataaaaggaaaaaatatacattttttaaaaaag

SEQ ID NO: 767625 - DNA, 557 bp, Homo sapiens
ctaaaaaatatttctccacttacctccctgtttaggttgtccgtctctctttaaaagaaaaagaaaaaagctttagtagtaatcagttagacttcactgaagttttgatttgcgtgtgcgtgtgtgtgtgtgtgtgtgtgtgtgtgtgtgtgcgcgcgcgcgctttctgagtcttgctctgtcacccaggcagtggcgtgatctcggctcactgcaacctctgtctccaggttcaagggattctcctgcctcagcccctagtagctgggactataggaakgcaccaccatgcccaactaatttttgtatttttagtggagacagggtttcgccatgtaggccaggctggtgatccacccacctcggccttccaaagtgctgggattacaggtgtgaaccaccggcacctggcccactgaaatttttttagtgagctttctccacagctaacaaatttagaatcccccttagatatttttattctcccaaacccctcctcaatgcagcctgccccaacctcgtaagaagctcttcctttctgcctttgctctcatttg

SEQ ID NO: 767626 - DNA, 668 bp, Homo sapiens
aaaaaaaagaatggttgtatctgtactgaacaagtacagactttttccttctcattattccctaaacaaacagtataacaactatatacatagcatttacattgtattaggcattataagtaatttagagacaatgttaaatacatggraggatgtgcataggttatatgcaaatactacaccattttataaaagaggcttgagcatatgtgggttttggtatccacaggaggtcttggaatcaatcccccacggataccaagggatgactgtagttccccagaaagaagccagttctctatatgtaattcaccaaaggaaaaagatctctgaggattgcatcagggataaaaagaagactttcatcaatggatattatttccatagctcccatacactgctgtactgagacagattgcacaaaggtgaattctgcattttatacttagcaaatctagaaatgaaaaaataaaattctatccaacacaaaataagcaaaattttcattaaatcttaagacctagtaatctaagaagcctaatagagaagttaatcaaaactggaatgtaagcataatataacagaataaaatacagaaaaatgagtggagtaaatgaaaatcaaaaacagtattttcaaacccaaaataaatcaccatgcattttaat

SEQ ID NO: 767627 - DNA, 531 bp, Homo sapiens
cctgttggataagtaacagattcatagaaagacaggaaataccagaccaccattattgcctgatggcaagagacagacttagccccttcaaggagtttgtgtttctactgttctaagaacacatgtgatatcttaattctattcaggaaacactgcagtctttgttgtgatatttagaaataaacagaatccggccaggcatggtggctcaggcctatactccactctttgggagacctaggcgggcagattgcttggggtcaggaatttgagaccagcctggccaacatggtgagaccccgtctctaccaataagaaaaaaaaamacacacacacacacaattagccaggcctgatgttgcatgcctataatcccagctacttgagaggctgaggcaggagaattgcttgaacctgggaagcagacgttgcagtgagtgagccaagatcatgccactgcactctagcctggtgacagagtgaatgagacttcatcccaacaaataaatgaataaacaaacaaacaaacag

SEQ ID NO: 767628 - DNA, 600 bp, Homo sapiens
acaatgatggtccttcctactgtcaagactgcctggattcaaattttggctctgctgatgattagctgggtagtgattgctcaaattaattgagctccttctcagtcttttctgtgaaataaacatactaacacattcgcctcctagtgttatcatgagaactggctctgagaaagcagtcagtgaatgttagatattattcttttatttcattgttagtgtcttcctgctgctttaactaagaaagtgatttttaaaacctgctcaatgtatataagaagtttcacctaccktctcaaagataaggcaaggatctccctgaacagagtttgtattttttgtggcttgcccagttctgtataacattgtgcatttttcttcctttttgtatttagcgaatacaaataagaaaaacagaagaggctagatgtagtgactcacactttgggagaccgaggtggtaatatcacttaagccaagaaatttgagaccagcctgtgcaacatagctagaccccatccctacaaaaaaattaaaaattaaaaattagctgggcatggcagcacatacctgtggtccaagctactcaggaggctgagg

SEQ ID NO: 767629 - DNA, 600 bp, Homo sapiens
acaatgatggtccttcctactgtcaagactgcctggattcaaattttggctctgctgatgattagctgggtagtgattgctcaaattaattgagctccttctcagtcttttctgtgaaataaacatactaacacattcgcctcctagtgttatcatgagaactggctctgagaaagcagtcagtgaatgttagatattattcttttatttcattgttagtgtcttcctgctgctttaactaagaaagtgatttttaaaacctgctcaatgtatataagaagtttcacctaccgtctcaaagataaggcaaggatctccctgaacagagtttgtattttttgtggcttgcccagttctgtataacattgtgcatttttcttcctttttgtatttagcraatacaaataagaaaaacagaagaggctagatgtagtgactcacactttgggagaccgaggtggtaatatcacttaagccaagaaatttgagaccagcctgtgcaacatagctagaccccatccctacaaaaaaattaaaaattaaaaattagctgggcatggcagcacatacctgtggtccaagctactcaggaggctgagg

SEQ ID NO: 767630 - DNA, 654 bp, Homo sapiens
tttctgattcatatatcctgtactctttacataaaagctaaaaaacaaaaaaatcaaatgaatggttttggagtgtttgaaaacctggaaagctcttgaggccttagttaatatctgctagaatgagactatctggattccagagacctgtgacaattattaagaagcyctaagtcttttaaggctgctgctgctgtccatgaggaaggccagctcagcagtctcatcaacagaagacccaaatcttgcctgctatggtgttacagttacacagtctcatgtaaggtcaggctagtattggtgcaactatatgcctcttagagtttaaaatgttgcagagactgacttcagaatcagaatacctggttatatgcttcatttctattccacagtttccctaacatttgacccttacaattcccctccaaccttgatcctactctgaacccaatcctcacccccattcctccaatgcccagtaggccctggaacaaagcagctaagggcccttggtatgctggtatgattgcaacatcggagtaggagacagcaagtctttcagattactatagacataaatgatggtctctttatatactgtcacttaatatgtcattggggatagatttttttgcttttactccaaaatatcag

SEQ ID NO: 767631 - DNA, 620 bp, Homo sapiens
gaaacgatcttttggaatgatcacgtcataaaatatgaaacttatcatgaaggaaagcatgtaactttaaggagagatgtgtgctaaccaatattggaaaaatctgagctggttaaaccagggtgtgaatgagcttaagaccataagttcacctctggcattggtcggagaaactagaatcctgggattcaagaagacagcaaaagctgctttagttatccttgtgggcatttggtcttcaaagcacctccagagtgttccatcattctatcacatagtaggagatcctcagtaacatagtttacatcttctagggagcacttattctattttcagctccctaagatgttggaaccttctacttgataagctgaactatttctttcagttttggtcatcagtatctcgctcctacaatctacttttccacagtgacttcagatgctgaggtcacaggcaaatgatgggcattcagsgtgaacagtggcagaaatctcacatccatattacagttttctgttacaatcatcagaaggaatcatcataagaaacattatttctgaatacatagagaaaccaatatggccttcctggtcttactcatgcacctcagagctcta

SEQ ID NO: 767632 - DNA, 626 bp, Homo sapiens
gatgcctgtattttgttgactctttttggtcacaagggcagattgaattgatattttcaaagaacagatctcctggccttcttggtaagaagttatagcttagagcctattagattaaaaagcataggccgggcgcggtggctcacgcttgtaatctcagcactttgggagaacgaggcaggaggatcaagaggtcaggagatcgagaccatcctggctaacacagtgaractccgtctctactaaaaatacaaaaaattagccgggcatggtgacaggcgcctgtagtcccagctactctggaggctgaggcaggagaatggcgtgaacctgggaggcggagcttgtagtgagccgagaccgtaccactgcactccagcctgggcaacagagcgagactccgtcaaagaaaaaaaaaaaaaaaaaagcatagcatggattcctttttcttaggaaggcaacttgtatttaggataatcctagttattttagtttaaaaaatccaatatcataaaggggtgatcttacctaacactaatacagagaaggtacagacctgaggctaactgctagataaatttgctatatccatccctatgaacacaaattatggctcttagttgaat

SEQ ID NO: 767633 - DNA, 626 bp, Homo sapiens
gatgcctgtattttgttgactctttttggtcacaagggcagattgaattgatattttcaaagaacagatctcctggccttcttggtaagaagttatagcttagagcctattagattaaaaagcataggccgggcgcggtggctcacgcttgtaatctcagcactttgggagaacgaggcaggaggatcaagaggtcaggagatcgagaccatcctggctaacacagtgaaactccgtctctactaaaaatacaaaaaattagccgggcatggtgacaggcgcctgtagtcccagctactctggaggctgaggcaggagaatggcgtgaacctgggaggcggagcttgtagtgagccgagaccgtaccactgcactccagcctgggcaacagagcgagactcygtcaaagaaaaaaaaaaaaaaaaaagcatagcatggattcctttttcttaggaaggcaacttgtatttaggataatcctagttattttagtttaaaaaatccaatatcataaaggggtgatcttacctaacactaatacagagaaggtacagacctgaggctaactgctagataaatttgctatatccatccctatgaacacaaattatggctcttagttgaat

SEQ ID NO: 767634 - DNA, 586 bp, Homo sapiens
ggagtttgagaccagcctgaccaacatagtgaaaccccatctctactaaaaatacaaaaaattagctgagcgtggcggcaggcacctgtaattccagctacttgggaggctgaggcaggagaatcacttgaacccgggagccggaggttgcagtgakccgagatcttaccactgcactccagtccaggcaacagtgtgagactctgtctcgaaaaagaaaaagaaagaaaagaaaagaaaagaaattggcccttagtctagaattagcatatgtgttaaaaaaattcagggtaagaacctgataattttaaaagggaggtggagaggaggcttattgcattttcataagtctttcttgagtaaatactatcacctacatgttgtggtgaggtgattaagatactgtgacagactcttttttttacctgccttggtagtggagcctgaatcattcagagtagctaacatgtctactttgtttgaattcaccaaatatgtttttctcagattttcaaatctgtttctgatattgtcagaattgacaaaaattaaatcactctgctaatgtgaaaataacaatttaacc

SEQ ID NO: 767635 - DNA, 586 bp, Homo sapiens
ggagtttgagaccagcctgaccaacatagtgaaaccccatctctactaaaaatacaaaaaattagctgagcgtggcggcaggcacctgtaattccagctacttgggaggctgaggcaggagaatcacttgaacccgggagccggaggttgcagtgagccgagatcttaccactgcactccagtccaggcaacagtgtgagactctgtctcgaaaaagaaaaagaaagaaaagaaaagaaaagaaattggcccttagtctagaattagcatatgtgttaaaaaaattcagggtaagaacctgataattttaaaagggaggtggagaggaggcttattgcattttcataagtctttcttgagtaaatactatcacctacaygttgtggtgaggtgattaagatactgtgacagactcttttttttacctgccttggtagtggagcctgaatcattcagagtagctaacatgtctactttgtttgaattcaccaaatatgtttttctcagattttcaaatctgtttctgatattgtcagaattgacaaaaattaaatcactctgctaatgtgaaaataacaatttaacc

SEQ ID NO: 767636 - DNA, 612 bp, Homo sapiens
tgtatgagcatttatgtctaaagtaacacccagtttagaggtgtgctttgtaatccctgatggagtaatacaaaaccttcagtagagtcattaaggaatgacaccaattattgtaaaatatctcaggaaaatgtatgaggacaaactttatttacayacaaaaagttgttttttcttacagccttacaatatcctgtgtcttacttcttctcataagaaattgagttacaaattagtctagaaattgtcatttctgtcctagaaaattccaaatatgcttgccttaaaggagagtttcttgttttaacctttaaataaaataagaaataataccatgaagactgtctgctggtattcttcagtttgatcatatgtacaaaacttaactgaaatcctatttatttatgtagcatttttaaattgcaattattacagccatttaccatttacaggcacttgcattgtttgtttaagctgcaatactcaggataggtctagaaaattggtagcatgaactatcttcaattgcagcttatatagttgaatctttttttatgctaattttggaggataaaactaatcctggattataagataatcacattatatcat

SEQ ID NO: 767637 - DNA, 617 bp, Homo sapiens
gcagcatctggtttaaaaaaaaatacttgaaattcagatctccctagctctatcttttctgagcatacgaaggcaaatattctccaggaatgatgttttgtcagtctggtagagcaatttaaaggacatctgaaacttacaaaaccgacagcaggggacatgctgagaggctatgctattaaccgcrgaatcttaatttgaggggttcccaagtccaacagagcagcctcatttcatgatttcaaacgaacagccaagaccaagtcttcaaaatatgccctgattaaattattttgaaaagcatggtttgttgcaataatttgtaataattgcaagtaacttttttttttttggcatggagcagggcccatcacatttttagtgaaagacttatttgaaaacaagtagtgattacaatgtatcatttccacacccaggatctggaagtaccagtaaaacatactccagaaagtcatgcatttattcagaaggtttcctgataaataaaatggatgttagtttcactctttggctgctcacactgaggcttcattttgttttgttttggtcagcagcaagtagagaaagctgaggggaattccaagacttcaagcctc

SEQ ID NO: 767638 - DNA, 617 bp, Homo sapiens
gcagcatctggtttaaaaaaaaatacttgaaattcagatctccctagctctatcttttctgagcatacgaaggcaaatattctccaggaatgatgttttgtcagtctggtagagcaatttaaaggacatctgaaacttacaaaaccgacagcaggggacatgctgagaggctatgctattaaccgcggaatcttaatttgaggggttcccaagtccaacagagcagcctcatttcatgatttcaaacgaacagccaagaccaagtcttcaaaatatgccctgattaaattattttgaaaagcatggtttgttgcaataatttgtaataattgcaagtaacttttttttttttggcatggagcagggcccatcacatttttagtgaaagacttatttgaaaacaagtagtgattrcaatgtatcatttccacacccaggatctggaagtaccagtaaaacatactccagaaagtcatgcatttattcagaaggtttcctgataaataaaatggatgttagtttcactctttggctgctcacactgaggcttcattttgttttgttttggtcagcagcaagtagagaaagctgaggggaattccaagacttcaagcctc

SEQ ID NO: 767639 - DNA, 559 bp, Homo sapiens
tgggtactttcttaaaaaggaaactgcatggtcttcattctttctgccttcccatggcagagcacctagaattcagacttgccagtggcaaaccagcagtggccatgacgatgaggacaaaaatctgggagatgacagagcagttagagggaaggggcttggatccctggatgatcttatggaacagagcctcctatcytgccctgacctcctcccttaacaactcttagcatcgtatagcaaagtaattatgaaatggaattaataattgaatataaaaaacagaagccacagacaaaagaaacagacagttcataggaaaggaaacaggaatagctcttaagcatataccagaacattaatttattcttaataagaaatgacaaattaaaatagcattttaacctctcagattggcaaataattaatatgaactgataaaacaaaaacagtaagcttcgagtaaataaatgaggaaaggatacaaataaaaatcatacagaaaaggaaatacatattgaaaacaccatgccaacatttccatatattaattggcaat

SEQ ID NO: 767640 - DNA, 570 bp, Homo sapiens
cccagatcccaatcccaaagaaacttcttcaggccactgccctcccacttcaaccagggaatgtgcccaagagctaggggtgtcccaaagcgcaaggcatgacacatgtagaaactatgaagatttttcggtgattttttatttgctcaaacctgaacacagtccacgtggggtctcggtgtctctgcctctctctctctctcacatgtgacaaaaccattttcagagaagcctggcatctagggacctccctactctggccctgactggcctttccacaatagggttctcagctgtaactggtttctcccttcactggaactctgggcccaccaaaagaaggatgaagttatccagaaagcaaagacscttggttgatacaaagggagcctcagatggagagatccaagaggtggtcaaaactgtgggagaagtggttacacggggagccttagagctaggtgccaccagcagggaagaggtgtgaacggcaaggatggaggtgagggcctgactcctggccggcacacctggggttcaagtgctaatccacagcagaggctctcaact

SEQ ID NO: 767641 - DNA, 601 bp, Homo sapiens
ttttgttgcaggatattcaattttcactatagcccttaatgggctctgagttgctccttcatatattctacagaaagagggtttccaccctgctgaataaaaagcaaagactgggcacagtggctcatgcctgtaatcccagcattttgggaggctgaggtgggcagatcacctgaagtcaggagtytgagaccagtctggccaacatggtgaaacaccatctccacttaaaatacaaaaattagtagggcgtggtgtcagacacctgtaatcccagctactcaggaggctgaggcaggataattgcttgaactcaggaggtggaggttgcagcaagctgacattgtgccattgcactccagcctgaaggacaagagtaaggcttcatctggaaaaaaaaaaatgatttgactttataaaatgaatccacagattgcaaagcatttttacagatagattgtttctagtttttatggctggttattcagttgttcactacaagcctcaaagagatatgaaatgtctcttcatagattattaaacaagaaggattctaacctgctgaatgaaagccaaggtttaactctgaaatgaatccaca

SEQ ID NO: 767642 - DNA, 370 bp, Homo sapiens
tctttgccatgccttaactttctgactttgttttataaccttccttactaaaagtgcattcttatatctataactttcttaaaatttccttttcctcttcctactttacctctcctctttgtgttactttttgtgtcgctctatgatckctctctcttctagactttttgttactcattctttccctcttgagctggcataagctggaccattatttgttttgattttttagggccattccataaatgcacaagttaaaagaagatgtttaatgacatatcaagttgactctttagggaaagcatgtgcacttattaaatgagtgttggtttcaatggattcatgtacatatctaagttttccaaattca

SEQ ID NO: 767643 - DNA, 613 bp, Homo sapiens
tataaaggttgttaagtttgccttcttctgggaacaatgggttatgggaaacaacagtttgcattaggtcccttaattgagcctgtgaaactgaggctccactagctttaagcagttgtttcaatacttttatatactgttgcttttgagctgataacttgtcccatgatgaaatgatagcctgaacaatttcttgaacttggaaatcccgagtgggcaacaatgccttactgaatgcaaagtstcttcaccttcatttttcagggtttcttaatgatctgttgcagggttcctcacatgtggcatcccccacatgcggcaccccctgctgagtctgtcctgcaaactctgggtgagcaacggatgaaaggagtatgcagacacaggtattttacctgacagtgtggctatgggattgcaccgctcagaaccaccgaccagagtgcagcagccaatgagagtgcagcccccatgagcaggccctgcttgcatttatttagtacagatttaatgacaaaggcttggagcaaaaacaacttgtgggtaataaacattgtcactccccaagtagagaacagtcctgcgtgtgaatgaccaaaagttggtttctgga

SEQ ID NO: 767644 - DNA, 613 bp, Homo sapiens
tataaaggttgttaagtttgccttcttctgggaacaatgggttatgggaaacaacagtttgcattaggtcccttaattgagcctgtgaaactgaggctccactagctttaagcagttgtttcaatacttttatatactgttgcttttgagctgataacttgtcccatgatgaaatgatagcctgaacaatttcttgaacttggaaatcccgagtgggcaacaatgccttactgaatgcaaagtctcttcaccttcatttttcagggtttcttaatgatctgttgcagggttcctcacatgtggcatcccccacatgcggcaccccctgctgagtctgtcctgcaaactctgggtgagcaacggatgaaaggagtatgcagacacaggtattttacctgacagtgtggctatgggattgcaccgctcagaaccaccgamcagagtgcagcagccaatgagagtgcagcccccatgagcaggccctgcttgcatttatttagtacagatttaatgacaaaggcttggagcaaaaacaacttgtgggtaataaacattgtcactccccaagtagagaacagtcctgcgtgtgaatgaccaaaagttggtttctgga

SEQ ID NO: 767645 - DNA, 470 bp, Homo sapiens
ggccagggctgggctgctagaacagccaggccaccacaggcttcctggccaacatcctccttcaggtagtcttcctacctattcattcattcaatcattcgttcattcccccagatcctcgcagagcaccggctgagtgccaggcgctgttctaggcgcaggttacagagctgtctcaccaccaggtagtggtgggrcaaaaaaaacgaagggggcacaggatgggggtgcagattgtggagggtggtcagcaagggtcccaggggcgtctccacagagaccctggagcaggcccttcagcaaatctgggaggcatttgctgttggaggaggactctgcatgcaggaggcacccaatgcagaatggatgggagggtaggagatggggcagggtggctggacagagccaccaccctgtattcctcaagctgatgtgtctctccagaggatccttatgcctggcgaatgtct

SEQ ID NO: 767646 - DNA, 579 bp, Homo sapiens
ctggtgttcaccaaaggagtcactctgtaaaatttggggagttatttattctgagccaaatatgagcaccggtggcctgtgacacagccccaggtcctgagaacttgtgcccaaggcggtctggctacttaattgtrtacattttagggacataggacattgatcattacatctaagatgtacgttggtttagtcggaaaggtgggacgatttgaaggggagggactttcaggtcataggcggattaaaagatgttctgattaataattggttgattttatctaaagacctgaaatcaatagaatggactatctgggttaagaggagttgtggagaccaagattattatgcagatgaagccgccagattgtaaatgtttcttatcagacttaaaaaggtaccagaatcttagttaattctctcctggatcaggaaatagacctggaaagggagggggattctctatagaatgtagattttcccaagagacgagctttgcagggccatttcaaaatacatcagagaaatatattttggggtaaaatacttcggtttctttcagggcctgctgtcacgttg

SEQ ID NO: 767647 - DNA, 611 bp, Homo sapiens
agagaaaaaacccccgtagctcaggtcacacggtctggagacagtttgtgttcccacaaaactatataatacacaggatgtcgggaagggtcctcataagagcctctcttgagtgctgattctaaaccaaccctagactaaaggcagccctggattcaccctacaaagcatagaagcaaagctccaaagatccgatgggtatcaggaactcatggatgccagaacaaaatccgacagcaattaaaggaatacaacaaaatctagcaacggactgtgcaatatttgcaaaaaaaaaaaaaaaaaaaaaaaaaaaaaaaggccaggcatgcagaggaacagggaaacgtgacccagaaccaggagaaaagccagtcagtggaggcaggtgcagaaaggccagaggtgctactgtgaccagacaaggattgaaacagctgttttagaggggcccyacgtgtaagaaggtccagtaatagaaagagggtgataaagcaatggtggcaaggtgctcacagttggagaataggcggaggtacaggaatcctttgtactatttatgaagcttttctgcacattggaaatgatacaaaacaaaaagttaaaaaatgaaa

SEQ ID NO: 767648 - DNA, 588 bp, Homo sapiens
acaccgtgcctggcctgatattttaataaatatgctttcttgtacctgttggggaggcatcattccagcaagacggcggactaaataagaagaaaacctgtctattatgaattcctaggaatgtcagaccaaataaatcagaattcttcacaaggcctagctaatgtcttaagaaataaagggaagccgggcgcggtcgtcacgcctgtaatcccagcactttgggaggccgaggatggcrgatcacgaggtcaggagatccagacgatcctggctaacacggtgaaaccccgcctctactaaaaatacaaaaaattagctgggcctcgtggtgggcgcctgtagtcctagctactcgggaggctgaggcagcagaatggcatgaacctgggaggcggagtttgcagtgagctgagacagtgccactgcagtccagcctgggtgacagagccagactctgtctaaaaataaataaataaataaataaataaatggaaatactcaggtatcagaatcaaagataggatgagaagctctaatgagcatccaataggatttccaggagaaaataaagaaaacaaccaaaaa

SEQ ID NO: 767649 - DNA, 588 bp, Homo sapiens
acaccgtgcctggcctgatattttaataaatatgctttcttgtacctgttggggaggcatcattccagcaagacggcggactaaataagaagaaaacctgtctattatgaattcctaggaatgtcagaccaaataaatcagaattcttcacaaggcctagctaatgtcttaagaaataaagggaagccgggcgcggtcgtcacgcctgtaatcccagcactttgggaggccgaggatggcggatcaygaggtcaggagatccagacgatcctggctaacacggtgaaaccccgcctctactaaaaatacaaaaaattagctgggcctcgtggtgggcgcctgtagtcctagctactcgggaggctgaggcagcagaatggcatgaacctgggaggcggagtttgcagtgagctgagacagtgccactgcagtccagcctgggtgacagagccagactctgtctaaaaataaataaataaataaataaataaatggaaatactcaggtatcagaatcaaagataggatgagaagctctaatgagcatccaataggatttccaggagaaaataaagaaaacaaccaaaaa

SEQ ID NO: 767650 - DNA, 588 bp, Homo sapiens
acaccgtgcctggcctgatattttaataaatatgctttcttgtacctgttggggaggcatcattccagcaagacggcggactaaataagaagaaaacctgtctattatgaattcctaggaatgtcagaccaaataaatcagaattcttcacaaggcctagctaatgtcttaagaaataaagggaagccgggcgcggtcgtcacgcctgtaatcccagcactttgggaggccgaggatggcggatcacgaggtcaggagatccagacgatcctggctaacacggtgaaaccccgyctctactaaaaatacaaaaaattagctgggcctcgtggtgggcgcctgtagtcctagctactcgggaggctgaggcagcagaatggcatgaacctgggaggcggagtttgcagtgagctgagacagtgccactgcagtccagcctgggtgacagagccagactctgtctaaaaataaataaataaataaataaataaatggaaatactcaggtatcagaatcaaagataggatgagaagctctaatgagcatccaataggatttccaggagaaaataaagaaaacaaccaaaaa

SEQ ID NO: 767651 - DNA, 660 bp, Homo sapiens
ataacaatagtctggaaaactgggatcctcgttacagagctctggggctgcggactgagaggaagtgcagcctgatgacctaaaactgcatttccactatgttgcatgaaacaccacatcatgttttcctgcaactctttctgctctaaaaaaaggacaytttgacagccaccaaggcaggccccaagtttgtagaaaatacacaaagtaaaggaaaaatatttgctcttcatctttctcttctgtgatccctgggaagaaaataaagggatgcttaagagtggaaaaatgcaattcatgaagaaggggaaaagggatttagatgaaaaccaaatttgtgtataagtaacagaagtgttattattacttctttttcttttttttttttttttaagagatggagtctcgctctgtcacccaggctggagtgcagtggtgtgatctcggcttgggcaaccttcgccttctgggttcaagcaattctcctgcctcagcctcccgagtagctgggactacaggcgcatgctgccacgcccagctaattttttgtattttattagagacggggtttcaccatgttgcccaggctggtctcggactcctgagctcaggcaatccgcccgcctcggcctcccaaagtgctaggattacaggcatgag

SEQ ID NO: 767652 - DNA, 581 bp, Homo sapiens
cttggatatattccctttctttaggagaacaggaaatgaccatttgatgtccagaggccctatcaccaactgggactgtagaggtatagctataatagataatactggcatatgtgtatattggatgaacagtaactttaaaaccaatatttaattatcactcattttcatttttccccctattagacataatattagttaacactagagttgtttctgcacataaaataatctcattcattagaatgtccaaatgtctgagataggaccacaggctcttaagcctgactcccaggctacacttacgaggtgtgtagccctcagcaagtcttaattggtttgtactttggtttttaggatgtaacagaaccttccttgcagacatgttgaaatggtcacaagagctacttactctgtgctaagtgcagacagctataycaagcactaggaaagcactctagagagtcatagctgggtgccatgattcacacttgtaatcccagcactttgggaagctgagtccagaagttagagatcagcttggacaatatagaaagacacccatttctaaaaaaatttaa

SEQ ID NO: 767653 - DNA, 581 bp, Homo sapiens
cttggatatattccctttctttaggagaacaggaaatgaccatttgatgtccagaggccctatcaccaactgggactgtagaggtatagctataatagataatactggcatatgtgtatattggatgaacagtaactttaaaaccaatatttaattatcactcattttcatttttccccctattagacataatattagttaacactagagttgtttctgcacataaaataatctcattcattagaatgtccaaatgtctgagataggaccacaggctcttaagcctgactcccaggctacacttacgaggtgtgtagccctcagcaagtcttaattggtttgtactttggtttttaggatgtaacagaaccttccttgcagacatgttgaaatggtcacaagagctacttactctgtgctaagtgcagacagctatatcragcactaggaaagcactctagagagtcatagctgggtgccatgattcacacttgtaatcccagcactttgggaagctgagtccagaagttagagatcagcttggacaatatagaaagacacccatttctaaaaaaatttaa

SEQ ID NO: 767654 - DNA, 605 bp, Homo sapiens
caaaaacatgtgttattgaatgtacattttggacatatattttctgtattcattttctactgctttttgatcatcactttaagtttaaaatgtaaaatattcagaaatttacttttgtggtatattttcacaaagtattcataaacataccagggcctttcgattactaatactgatattcattttggcctaagctggatattggttgcccctgtaggagcatacaaagagattagctgtaagcaaagggcatataattagggggacagatattatttaacaaatatactaaaatatagtgttcttatgraacataatttcctgccctgataaactgaattacctgtatttttcctttagagttttttttagagtgggaagtgagaggttatataatatatagtatttttgttaggacagagtttatattttaagtaaccattgggttttatctaagaaaatgcctagggcaaatagtgatggtcctgaacatgaccttcagacatttaaaggataaaagttaaatgtagatggtaaataaattgatacccctctaagttccgtattaaatttctgaaatttgtgattcctttgtccacatgtaa

SEQ ID NO: 767655 - DNA, 456 bp, Homo sapiens
tcaagttaaaattgctgtttaactgtttccccaactacattcaaaatcaaatcttcatattctatcatgcccttacttgaaatattatcctctattaattcgtaacacagtaaacagaacagtgtagtgattaagagccacagagttctgaaaatagactacaagggttcaaatcctggctctttccattcctagctatgttcccttagtcaaatcaacctctctgtgcccatttcctcatctgtaaaactaccgtatttataaaatttacaactacaataaacttataaaatctacgatatatttataaaayctacttataaaatttataaaatattaagggttgtaagatatggataatgaatgtagagtacttagaacacttttaggcccatagtaaggcttcaaaaaatgttagctattattatcattacattatcatcacatgaactccat

SEQ ID NO: 767656 - DNA, 654 bp, Homo sapiens
ggattaagattagacatggagcattctaggctgagagcatagtcaaagacttagaaatgaggaagcacaatgcaagttagaggaatagagacccagcttggctgttccccacactatcctccaggatattaaaactgttcgttgttgtatccccagcacttggaggagtggttggctaataattggtgcttaataaatatttgttgaatgaatgaatgaatggtcatatttgaraaataccgatcatcattttcttggacattaacaaagcattttaggatattgaacactttaagtcatttagagaaaaaaagtgtttatctcaatcttctttaattatggaatgtgcattaacaactcttgaaatcctctggaaaatattacactggtctgtatggtagaggtgaggtggaaggctagaaagtgttttcttctccaagctaaacacacccagtttcttcagtcattatacacttgacatttggtttctgatccctcactagtttgatatccctccttccaaggattctgtcctgtaagtgttcttaaaatgtggtgttcagaacagaacatgtttccctccataggtgatattttttaattctatattaaaacaaaacgaaaaaccctcagaatacaatactccagttgtga

SEQ ID NO: 767657 - DNA, 654 bp, Homo sapiens
ggattaagattagacatggagcattctaggctgagagcatagtcaaagacttagaaatgaggaagcacaatgcaagttagaggaatagagacccagcttggctgttccccacactatcctccaggatattaaaactgttcgttgttgtatccccagcacttggaggagtggttggctaataattggtgcttaataaatatttgttgaatgaatgaatgaatggtcatatttgagaaataccgatcatcattttcttggacattaacaaagcattttaggatattgaacactttaagtcatttagagaaaaaaagtgtttatctcaatcttctttaattatggaatgtgcattaacaactcttgaaatcctctggaaaatattacactggtctgtatggtagaggtgaggtggaaggctaraaagtgttttcttctccaagctaaacacacccagtttcttcagtcattatacacttgacatttggtttctgatccctcactagtttgatatccctccttccaaggattctgtcctgtaagtgttcttaaaatgtggtgttcagaacagaacatgtttccctccataggtgatattttttaattctatattaaaacaaaacgaaaaaccctcagaatacaatactccagttgtga

SEQ ID NO: 767658 - DNA, 607 bp, Homo sapiens
ttttcttctgtagaatatctataacctgtaagtttggatgctttatacaatcccatatttctccaagactttttcactttttttttcttttgagatggagtttcactctgtcacccagtctggagtacagtggcaccatcttggctcgcacaacctccacctcctggaatcaagcgattctcctgcctcagcctccaaagcagctgcaattacagtcacacgccacaaygccctgctaattttttttttgtatttttagtagagatggggttttcaccatgttggccaggctggtctcgaactcctgaccctcaagtgatccacccgcctccgcctccaaaagtgttgggattacaggcatgaggtaccacaccggacttcgttcacttattttacttctttttttctttaaattcatctgactgggttaattcaaaagacctgtcttccagctctgaaattctttcttctcctttctctagactagtattaaagctttcaactatattttgtaattctttcaatgaatttttcatttccaaaagatgtttgggtttatttttagtgatatctcctttcatatcccaaactgtttttctgatgtgtg

SEQ ID NO: 767659 - DNA, 575 bp, Homo sapiens
aaatgccacaggcaatctatcagattgctgatgtaaaaatgagtattccttctttcatggctctatgatgccttatatattcctcaatcgtggtatgttatctaaagttatttgatagacatcccttgctatcgagataccgcattattattttttgacttatttgcctattcctcggactcttcctgatttcttaataagggaatcttccataactttgattcatctgtgttccaatcctcttcccattaataaactgatattatgtgcccaatctaaaatacttggagttattttagatctctctckctctagatcatacatatttagacaatcaatgaatcttttgtttctctctcttaaatattttttactctaatatttactcagatggttcagtttgtcctcatccattgttatcagaatttgatagtctgtctccagtcttgccctctcttacccaccatttacaccatctttctgatttgtaaaaatagtcatgtcacttgttttctctgcttgtttgtttgttttctgctttttcatccccaaggctatttctttggttctgaatt

SEQ ID NO: 767660 - DNA, 614 bp, Homo sapiens
ttaaaggtgagcctagaatctatcaattacattaagcaagaacttactgtataattcctatattaagataaagaaatgaaggcatagaaagacttcaattagcttgcttggtattgcccatctcctaagtggtgaaaacctgagtgttactttgacatcaaagctcaagttcttaagcactgtgtttgttaatatacaatatgtgaactctaaaagaatacattctaatttgaaaccagaattccatacttatcacactcaacatattcattcaatgaacacttatttatactgctgtatatgacacagtctattaatcaactatggatccaggaaaaagtaaactaatatctctgcctttggaaccttataaaagcaatggcaccaccaacaaaatccaatcatagaaggatattatatttacatgaaactacatttggtacaaatcacaaatcctcacytaagtagaaattgaaaagaaataggatattaaatgaaagattaaagtaatggcaatatttatttcagatacatgtagagttattgattaatttagtaattaattaaagttaaccctcaaaaagaaaaaatcctgtaccaggctctttttaggt

SEQ ID NO: 767661 - DNA, 343 bp, Homo sapiens
ctgatagttctatttctgcctagccacccactatactttcaggcacttttagaataaagataatcatacaaaatctagtgcctagaattatcataaggatggattttaaataagaacagtggttgtttaagaattcacyagtcagaggagaattctaatgaagtatttttgtatacacttttatattatatcaagctttgttatgttatttcaaaataaaaatatatgcccattactagctagatgtatttaatattataacgataagactaaaataacttatcttgacagctgtatcaattaactataatcactctacttaatatgcatccagcctaaattt

SEQ ID NO: 767662 - DNA, 621 bp, Homo sapiens
ttgggttgttttcttattctattttagcggctccaattatatgtctgcatgatattcattgcctgccttctactctttaattattttcattctaatacttttaatttatttatttatcttatttttgaaaatcttgtatatttaccacttttaatgacctttattaaatttttattcaaacatattcttatttggttattttatattttattctttaatactcaaatgattttcaattttctttttaatgtcctccctgagtttgagaaattacactgatttatttctatttttattcatttctgtccttcgttttaaaatatttgattcaagttctttccccctgattcttacacaatttttaaaattattaatcrtatctgaagggttacgttgcagctttctcccccttgtagttggtttcagtgaatggatttttatctactgaaaaggatgccttttcttttattttttctacccaaaataggatgcctctctgagactgctgcttggtctttcatatttcaattatgttccttagttttagtgttgggtattagcaaggcctaaatttgcattatatgcttcagcacttagtgataaactttctctttctggagg

SEQ ID NO: 767663 - DNA, 648 bp, Homo sapiens
ccctgccctttcccacatgttccatgtagagcccaacatggtgtttggaatgactcatcccccttcgtggtaaccggacctttctaccagttcattgaatgctgccctctgctgtgtttttctagacatgcaatccccttaccttgctgtgcctgttgcgtttctaatttccaagacttccatgatgcctttccatttccctgcttggagttcattgcttcctctttggaacccacttggactttgctcatggcagttatattcctgggcatcgtgctgctgctagtttttaatgtctgtttctttagttaaactgtaatctccttgcaatgaggggttgcatctttttcatttctgtacccctagtaactggtacatcatctggaaacagagtgggcttataaaaattttggttgaattcattttattggctcttggcctgttacttacggttttctcattacctgcttgtttcctgttaacagagtyctaactgagctggtttccaaaatgaaagacatgcagatggacaagtcggaactgggatgcctgcgagccattgtactctttaacccaggtaaccgcccttcaaccccaggggatgtgtgtgttcagccctcttccacggtcaacctccagtgctcccat

SEQ ID NO: 767664 - DNA, 513 bp, Homo sapiens
aatgctgcagttaacatatgtgtgcatgtgtttttatggtagaaggatttatattcctttgcgtatatacccaacaataggattgctgggtcaaatggtagttttgttgtaagtactataagaaattgtcaaactcattttcacaatgtctgaactaatttatatacccaccagcagtgcataagcattcccttttctccacaacctcactagcatctcttattattagacattttaacaatagccattctacctggtgtgagatggtatctcattgcggttttgatttgcattactctaataattagtgatgtttagcattttaaaaatgtacgcgttggctgtgtgtatgtcttcttttgcaaactgtctcttcrtatcctttgcccaccttttaatggagttgtgtttttcttgtatatttaagttccttatagatgctggatattagacctttgtcacatgcatattttgcaaatattttctctcattctgtaggttgtctgtttattc

SEQ ID NO: 767665 - DNA, 613 bp, Homo sapiens
taaatacaatcagaaatgtcaaaggggatattaccaatgataccatataaatacaaatacacatcacagactattatgaaaacctctatgcacacaaactagaaaatctagaagaaatagataaattccagaatacatacacccttccaagactgaactaggaagaaattgaacccctgaacagaccagtaatgagctccaaaattgaatcagtaataaataacctaacaaccaagaaaagcccaggaccagaccaattcacagcctaattctacaagatgtacaaagaagagctggcatcaattctactgaaattattccaaaaaattgaggagaaagractcctcccaaactcattatatgaggccaccatcatcctgatagcaaaatctggcagaaacacaacaaaaaaagaacacttcaggccaatatccttgataaacattgatacaaaaatattcaacaaaatacttgcaaactgaatccagcagcacatcaaaaagctaatccaccatgatcaagtaggctattatccctgggatgcaaggttgtttcaacatatgtaaatcaataaatgtgattcatcatataaacagaactaaagacaaaacca

SEQ ID NO: 767666 - DNA, 560 bp, Homo sapiens
aataagtttaatatgcatttgttttattagtattattttagttgacccataatcattgtacatatttatggaataccatgtgatattttaatacatatatacaatgtataaagatcaaatcaaggtaagtaggatatgtatcatctcaaatgtttatgattgctttgtgttggaaacattcaaaataataygcattttattaaattaaagaatgaataactgggaaatagctgatggaagtaattgaaagaataatttttggtgggtgttaaagatagaatcttgattgcacaatgttttaaatgaacacaaacaagatagaaatttcagacgacctctgtagtgtcaacaggtagagaataagacaaggtaaatactttttttcattagaaaaaaatacgagtttttttggggggggattatgaggtattgataataaagaaaaagagatagaactagaagccatccttttcctgaataaaaactaaaataatttttattcatagtatattttagtatcaatagacaaattagttttctattgttgctgttaacaaatt

SEQ ID NO: 767667 - DNA, 646 bp, Homo sapiens
tatttccttgttaaatatgttgatacagacccatagtagaaggaattgccattctttccaagttaaaaattcacacttctttgaaacaagtgaattggcactttcttagttctagcatactgtgagctttctccattgttgaaataaattggccactagagattgattgagaatatgaaaacgctgttcatttattaggaggtatgctatgcttatgttgagacaaaatctatgtgcttgccagcatcagtctactgagtttttaagtaattggtattgctttgaaattgttaaatcatttcaatgtacaagtatagatctcttttcaactcatatgtcttttaaatctaactttatcaattattttatatctatgtaaactgttatataacacttttagttcataggtttcatatccttcttctgttctccaaaatatcaccttcaaactatcacctatattgtstgtcattattttaaactttgttattttcttttgcattctgagattttcaatattttcctttatctcttgctatttgaagtgtcagttctctttgtgtttgcattcaatctgatttttattttattgctgcagttctggtttcctttaaatttttcctcttattcatcttccctttaattg

SEQ ID NO: 767668 - DNA, 562 bp, Homo sapiens
ttattagagtttacatgtaacacttattttttcctgcttaacagaaattagaaaagagcatctttagctgttttggaagaaactccttgtccacaatgataaaactgcgttctcagcatacaaatgcttgcctattttaaattaactggtatatgtcacagcaggacagaatgtatctcagttcatctaaaagctgtatcaagttcttaagaaataagtagatgaaaagtcaaactaaaatgtactctattttatatcacttgagattgaaatctgatctgtcaggagattcatctagatagttctgacacttgcagcagtacgaaaatataggctctakaaatagtagtataatgtgatttgtgttaagcttatgaaatatggtccatagaatattaaaatatgatggtagataaatgattattgtgaagcttcttaaattattctttgctgatttctcagtgagatgactgaaagtagccagtggagtattgtgtctaagaattagtagcacaaagaatcagtggtagagctgagatagcctgtatatccattatcctgt

SEQ ID NO: 767669 - DNA, 534 bp, Homo sapiens
atcaaacacctgtacctccattgtatctaggaagtaactaacttgcttttggctttaaaggctcataggctgaagggacttgccttgtttcagatgagactttggactttgggttaatgctgcaatgagctaagactttgggaactgctgggaaggcatggttgtgttttgaaatgtaaagacaagaggtttgggaggggccaggagtggaatgatatggtttggatatgtccccacccaaatctcattctgaattgtagttcccataatctccaggtgtcatgsgaggtaattgaatcatgggggtgctttcccccatggtgttctcatgatagtgagtaagttctcatgtgatctgatggttttaaaaagcgttttcccttttgctaggtcactcttctccttcctcccatcatgtaaattaggatgtttgctactccttctgccatgattgtaggtttcctgaggcctccacagccctgtggaactgtgagccaattaaacctctttcttatagaaattacccactcatcg

SEQ ID NO: 767670 - DNA, 636 bp, Homo sapiens
aggtctctgttaccttcttttggcacatgggttcaccaatcagaaataaataatttttgcccaaagccccatcatggtggggactatctggaattttaggataactcctcagactagcaggcctagcaaaagctattcctgaagctgggatatgaggagcctcagaaattgtatccttcctattcatataagtgaggacaaaaggtgtcactcttccaaccctggagatcccttccctccctcaaggtatggccctccacttttttggggcataacatctttataagacacaggtaaggtcccaatactaacaggagaatgcttaggactctaacatgttttcgagaatgcgttggtaaggggcactaaatccaatttttctcggtcctctttgtggtctaggaggacaggcaagggtacaggtttttgagaatgcatcrgtaagggccactaaatctgaccttccttggtcctccttgtggtctgggaggaaaactagtgtttctgctggtgtgtcggtgagcacaactattccaatcagcagggtcctggaaccattgcaggttcttgggtgggggagaaacaaaacaaaaaaaaccacaggcagttttgtctttcagatgagaaacactcagg

SEQ ID NO: 767671 - DNA, 626 bp, Homo sapiens
aattgacttcctcctggacaatggcatggccttctcagtgttaatctcctgtcctggactactgtcctcaagatccgttaccatccaaggaatcctgggacagcctgtaaccaggtatttctcccacctcctcagttgtaattgggagacttttctcttttcacatgcctttcttgttatgcctgaaagtcccacacccttattaggtaaggatatattggccaaagctgaagctattatctacatgaatatggggaacaagttacccatttgttgtcccctacttgaagagrgaatcaaccctgaagtctgggaattggaaggacaatttggaagggcaaaaaaatgcctgcccagtccaaatctggctaaaagacactatcgcttttccttatcaaaggcaatatcccttaaggcctaaagctcataaaggattgcaggatactttaaacatttaaaagctcaaggcttagtaaggaaatgcagcagtccctgcaacaccccaattctaggagtacaaaaactgagcggtcagtggagactagtgcaagatcttagactcatcaatgaggcagtaattcctctaaatccagttgtacccaacccctataccctgctctgtcaaa

SEQ ID NO: 767672 - DNA, 588 bp, Homo sapiens; identical to SEQ ID NO: 759141

SEQ ID NO: 767673 - DNA, 420 bp, Homo sapiens
ttcacagaaattaattttctgggtgtttgttctaacttgctgaatctctgacaccatcaccagcaattctgattcttaaggactggttgggtataaggaattggcatttttaacagatttcccaagatattctagtcatagagttttctaagcacactttttttgagaagtacaacccatgccctctgaaccattctggatatgcgtttgtgtgcatccactttgygcagccatcttcattaaagaacacactctcacatcacactctgagccaattaatctcatttctctaatcatgagtgttataattgttcactcttcaaagtggcaagagatttctcagaaaccactttggtttttgcagaagcagaatgactgcctcaacactgattttgcttttgtaatgtgagcagaggataa

SEQ ID NO: 767674 - DNA, 658 bp, Homo sapiens
aattgttttcttattattgacgtcttattatagacacaagtcttatcaaatatgtgttttgtaaatatttcctcccttctatggctcgtgttttcattttcatttttgtaatattgtcttttgaatagtagaaatttttaatttcaataaagtagaatttacaaacattttcttttaaaggttatgctttcaatgtcatatctaagaaatcctagccaaaggttacaaataatttctcctgtatttttataaaagtcttataattttaagttttatrtttagttctatgatgcatttgagtaaatttttgtatatttttctttaatttcctttaatttatagtagtctccttggtttttagttttgctttttatgatattgacttttttttagaagtgaacagaccacttgtcttgtataatatccaacaagttggatgtgtctaactggtttctcatgcttaggttcaggttaaacatttctggcaagattaatttacagaagttttgtactcaatgcacaacaacaaaggacattaaaaagaactcacactgatatttttaattcaaatttgatattacatggtttcttctttagctattcaaatgttatatttatatttctttatctctcacagtgaaacccttggttcctctta

SEQ ID NO: 767675 - DNA, 290 bp, Homo sapiens
ctcgcttcagccgggcgattcttcccctcatttgttgcattgtttgcattaatatgaatatcttgttctgtttgttttgtctcctgagagccaataaagctgtgttttttctttacaccaaaaaaaaaaaaaaaaaaaaaaaawaggaataagtagcttatggcacagtgacacactggtagaattaagttatggtggtagcagtcgctgactggggaagccatatttacatcatcctgtttccttgatgagtcctgtgcctgccccctctccagctgattcataggaag

SEQ ID NO: 767676 - DNA, 584 bp, Homo sapiens
gtagatgtaatagaatagatagacatgatagatatacagagatacagaagatagagatgtagagatagatatacaaagatagatagttagatagatgcatacatttaaggcaactgcataatttagagtatgttctctgcccataacataattaaattgaaaaccagtaaccagttaaatatatctgaaaaatctccaagtgtttgacataaacaatacacttccaagtaatccatgagtcagagaagaaatgacaaaggagaccaaatgagaatgaaaaaaaactatgtcaaaatttgtgcgatataaaaatgaatcaaacaggaawtcagctgaggaatacaataagtggactgaaaagttcactagaggaattcaagagtagacttgatcaaatagaaaaatcagcaaactcaaagacaggtcatttaaaattatccagttagaggagcaaaaaaattataataaaaaggaataaagaaagcctaagggaatcctagaacagagagagaaaggggcagaatgcttatttaaagaaataatgccctaaaaaccaaaaaagaaataatgccttaaaactcccc

SEQ ID NO: 767677 - DNA, 629 bp, Homo sapiens
caaaatatttgaatactgagctcaaaacagctttgatrgaatcagattcctcctccctttctttattttttaccctggtgctaggaggtggtgtagaggaagggtgatcttttcacaaatggtgctaagacgattaacagtttacaaaaataaaataaaattgggtgtctacctccccatacaagaaatcaactcaatgtatgggtagtatagctcttaccagataatatagataatatagattatctggtgacctgtgggtaatagaagatgttttgaacagaacatgaatgcactagccacacaggatgaatgatatatttgcctgcaataaaactgatcactttatttcatcagaggaccttcatacaggaatgaaagggcaaggcacggagatggagaagatgtttgtaacatacatagcatttaattatatgaagttcctaaaaataaatatgtaaaagacagtgctattgaaaattggagttgggcgtggtggctcatgcctgtaacccaaacgctttgggaggccaaggcaggaggattgcttgagccctggaatttgagaccagtctgggcaacatagcaagaccctgcctctagaaaatgaaaaattaaagagctaggca

SEQ ID NO: 767678 - DNA, 644 bp, Homo sapiens
gaaaataatgttttaagagatttccagtaccatccaaaatcttgtagttaccaactgcaagcctaacaaaagacctttagatggtttgtggggggaaattattaaacattgttgagagacagtaaaaaatatctcaataaatggttagaaagctgtaggagacctgaaagtgtaaatcccagtcaaccatagttctgttgggtaagagaatgctgacaagcgcatagcaaaggccaagctgcccttgaggaatgcagtgtgggggcctttgctgtaccagacagcagggtgtcctctaaagcagcagtgctccagatacctggacccaaaggcaggaagagatgaacagatcaaaatatttgaatactgagctcaaaacagctttgatagmatcagattcctcctccctttctttattttttaccctggtgctaggaggtggtgtagaggaagggtgatcttttcacaaatggtgctaagacgattaacagtttacaaaaataaaataaaattgggtgtctacctccccatacaagaaatcaactcaatgtatgggtagtatagctcttaccagataatatagataatatagattatctggtgacctgtgggtaatagaagatgttttgaacagaacatgaatg

SEQ ID NO: 767679 - DNA, 629 bp, Homo sapiens
caaaatatttgaatactgagctcaaaacagctttgatagaatcagattcctcctccctttctttattttttaccctggtgctaggaggtggtgtagaggaagggtgatcttttcacaaatggtgctaagacgattaacagtttacaaaaataaaataaaattgggtgtctacctccccatacaagaaatcaactcaatgtatgggtagtatagctcttaccagataatatagataatatagattatctggtgacctgtgggtaatagaagatgttttgaacagaacatgaatgcactagccacacaggatgaatgatatatttgcctgcaataaaactgatcactttatttcatcagaggaccttcatacaggartgaaagggcaaggcacggagatggagaagatgtttgtaacatacatagcatttaattatatgaagttcctaaaaataaatatgtaaaagacagtgctattgaaaattggagttgggcgtggtggctcatgcctgtaacccaaacgctttgggaggccaaggcaggaggattgcttgagccctggaatttgagaccagtctgggcaacatagcaagaccctgcctctagaaaatgaaaaattaaagagctaggca

SEQ ID NO: 767680 - DNA, 421 bp, Homo sapiens
tttataccattaaatattttagtatgcatctcaacatatacaagcttttacagtgacagagctaccattactaaacctagaaagttcaaaatagtttcttcatatcatcaaatacccaatcagtgcttacattcccttgattggcttataaatttatttttattttctggaactcctgacatcagatgatctacctgcctcggcctcccaaagygctgggattacaggcatgagccaccacccctggccagtcaccacgcccgaccccctatttttattttctataatttgtttgttggaatcagaatacaaatacagcccacaaacttcaagtagttgaaatgtctcttaatgctcttttaatacatagattctgctccattgctttaacttttctccttataatttttttgtggaagaa

SEQ ID NO: 767681 - DNA, 610 bp, Homo sapiens
tcagccatcaaatggccctaaatagctgccaaccagaataatcacccaaattgggagctcttctggtgtccagtgaggagacccctttaaaaagcaagggctaagagtaacaagagaaagctcggggataaaatcttgtttgaggcacatcaatttagccatggtcatagtgtttccctacccggcaacagctcctgttaggtmccaagcttaatttttggcagctctttttcacttgccaaataattaatgcaataatgcagatggatccataggtgtataagggatatccaacatcccacaaaacaaaggtagggctcaacatgatctaaacctcactagccatccctctccctagtctttcactgtcttggaacctaatacctccagattttacacctcgtcatttctgcctcacagaagagggatccaaatcaccagactgcatcacaaagccctcctgttccacaaggcagggatagcatcacagacctttatttgtttttaaagaggcttactatggtgattcaatgttcagatgagggtgtctggtgctctgtatgggctacagagcctggggcaaaagatgccaaggtcatgggcaacatgt

SEQ ID NO: 767682 - DNA, 610 bp, Homo sapiens
tcagccatcaaatggccctaaatagctgccaaccagaataatcacccaaattgggagctcttctggtgtccagtgaggagacccctttaaaaagcaagggctaagagtaacaagagaaagctcggggataaaatcttgtttgaggcacatcaatttagccatggtcatagtgtttccctacccggcaacagctcctgttaggtcccaagcttaatttttggcagctctttttcacttgccaaataattaatgcaataatgcagatggatccataggtgtataagggatatccaacatcccacaaaacaaaggtagggctcaacatgatctaaacctcactagccatccctctccctagtctttcactgtcttrgaacctaatacctccagattttacacctcgtcatttctgcctcacagaagagggatccaaatcaccagactgcatcacaaagccctcctgttccacaaggcagggatagcatcacagacctttatttgtttttaaagaggcttactatggtgattcaatgttcagatgagggtgtctggtgctctgtatgggctacagagcctggggcaaaagatgccaaggtcatgggcaacatgt

SEQ ID NO: 767683 - DNA, 552 bp, Homo sapiens
tatatatatccaggagtgtgattgctggatcatatttaatttttaaaggaaactccatactgttttccataatggctgtaccgatttatgttcttaccaagagtgtgcaaggattatctcttctctatatccttgtcaaagcctatcttttgtctttgataatagccrttctaacaagtgaagtgatatctgattgtggttttgatttgcatttacatgttgattagtgacgttgagcatcttttcatatatctattaaccatttttatatcttcttttgagaaatatctatttaggtcctttgcccattttcaaattgggttatttgcttttttcctcttgagtcgtatgagttccttataacactttatcagatatatggtttgcgaatattgtctcccattcataggtgtcttctctctattgtttccttcattgtgcagatgtatttagtttgatgcaatcccacttgtcaagttttgcttttattgcctgtgcttttggagtgaaatccaaaaaatcattgttcagaacaacgtcagtaggcgtttt

SEQ ID NO: 767684 - DNA, 508 bp, Homo sapiens
caattctccaaacaagcttttgtatgtcccagatgttcccgcctttgttcagatttaatcctccctatttatcctccctctggtacctgtttattatgttctatttctcttcggaagctggggctcagcggatctgccacatctgatattatctgcacttgggcaracacaatcgtgcctatgccttgtcaaccagctctcgtctgaaagggctggagaaagagaagaattaaaatcagcaccgccaagaacagcaagcccaaaaagatttaaaaataaacatgaaagctgctttaggccccgtttcgaggcactcgcaaagcccttcagtggagacacaatggtgctgggtgcacccattctcactgcctcatcctctgcagctggaaaacatgtggctgtggctctcgactcctccttgaagaaggaaccatgtctcctgccagagctgtgagacagtaactcagagcttcttctgctcagacttaatatctaggaacattacagc

SEQ ID NO: 767685 - DNA, 524 bp, Homo sapiens
agcatccaagctctctccagtctggcccacaaccttgcaaaattgcatcatgactaagagcagctctgagtcatcagccatgatttcccaggtttgtcaaatccctgggccccagaatccctatctgcacaaggtggggataatcatctcagggtgggggtggagtgaggatcaaatcaggtagcttggataagacactgggcacagtgcaggtacatagtaagtgcttaataaatacatttgagtgttctgcctcttcagtcattccttccattcacscttggcttcccctaaattagccttctcaccctcacccaagcctgccagagctcttggaaatgctgtgcctatgtctctgcttggtcctctttggtggggttgtccctcctcccaatttcctgctcctttttagtcctgattctaatgtcacctcctcggaaatgtgttccctgactccctaggtgttttattgctctcaaaacactttgcttatacctccattataaggcattttgacattgtat

SEQ ID NO: 767686 - DNA, 592 bp, Homo sapiens
atgtctcagtttctccctgccacaccaccccatgatttcctttactgcaatttcatgatctatgactattattcattcacgtgtttacatctttatttcaagttccatggggtcagtgaccttgtctgtcctgtttactgtaartccctatctctgggcacagtacctggcacctggcagatgtttgcctcttcctgtattcatgctttttgccatgaactttgcagtgccctctcatgtgggtgggtgtatttctcacttctccttttgagtttcgccatgtgacctgctctgaccaatcgaatgaggtgaagcaatggtgtgctagctctaagcccaggcctctggaggccttgtgtatttctgcttgctctctgccaccactgccacagccatgaagagaacatgcctaggccatcccactggtctcaggagctgaaggagaaggggcatgtgaagcaaagccacctccagccaaccacagcctacatctgctgacccacagatcaatggaaatgaatgattgctgttttaggacatagagtttggggagtggattgttaggtaacattctcctccacctgtaaaatta

SEQ ID NO: 767687 - DNA, 581 bp, Homo sapiens
tcataccagctcaccagcaacggatccaaaccgagacaaaacctatgaaacgccagaaaaagaattcgggaggttgattattaagctaatcaagaaggcaccagagaaaggtgaagtccaacttaaagaaatcaaaaacatgatacaagatatgaagggagaattcttcagtgaaatagatagcataaattaaaaaacaatcacaacttctggaaatgaaagacacacttagagaaatgcaaaatgcactggaaagtctcaggacagaattgaacaagcagragaaagaacttcagagcttgaagacaaggctttcaaattaacccaatccaacaaaaacaaagaaaaaagaattttaaaaaatgaacaaagcctccaagaaatttgggtttatgttaaacatccaaacctaagaataattggtattcctggggaagaagataaatctggaagtttggaaaacatatttgagggaataatcaagaaaaacttccccagccttgctagagatctagacatccaaataaaagaagctcaaaaaacaccaagaggagtcattgggaaaaggtcatcgtctaggc

SEQ ID NO: 767688 - DNA, 646 bp, Homo sapiens
ttccattgggtgaatataccacccaatggaattttatttcatattgatggagatctgggttgtttccaggtttttaatcataaaaacaatgctgctatgagcatccttgaacatgcccctgatgcaactttgcatgagactctaggsatgagtctcatacctaggaataagattgctagattttatactgtcttgtcacatgcttgttatttcaggttctcagactttttacattttgtgatctattgagcatctaacagtatctagttgcagtcttatttgtgtttctctggttacatatgaggtaaagtatcgtttcgtatgttggtagtcatttgtgcttcctcttcagtgtgatggctgctcacgtgttttgcctattaatttactgggttctttgccattttcttattgctttgtggaacttttctttaaaaaagtattcccaaatcgtaacttatcttttcattttcttcatgctgtctctgctgaatagaaattcttaattgtaatgtggtcaaatgcatcaaatttacattagctttttttggtaactgccttaagaaaccctctactggggcctgactcttagaaggaaaactaaaaaaaacagaaaagaagagcatcaacatcaacaaaagggacg

SEQ ID NO: 767689 - DNA, 620 bp, Homo sapiens
cagatttaaaaggcacacgccccctgcttggagagggactcaggcaagcagtggggagtgggacatcaaactagggtcatggggacctggttccacggtaaatcctgatggaagcatcgcaagaatggccagccaagagggaggcgttttgcaatacaaggccaattttgacaagggacaggtggtgattctggcagctgattaacttaagagagagccaaccaaggacctgagccagccaagggagtgctggcaggagggcagggcttgcccagaggttctggaagggaggggatgatagcaggyggatacatcagtgacggcaaggttccatgacatccctgggaacttgtgtcagaatgcttaggcacaaatgtcacatctcctatatttattctcccaggtctcttctgcctcctcataggtcagctgtattcaacagacactccagacacatgggaactcaagttagactctacttaccatgcttactacctaagaaataactgcttttctaaaaaaaaattatgaattcagaagctgttagtggatttgcaaaaacctacttctttccacgttggcagatttctggctttgtagatgcagaatagcatgtgggt

SEQ ID NO: 767690 - DNA, 582 bp, Homo sapiens
ggtttgagaccagcttggccaacaaggtgagaccccgtctctactaaaaatacaaaaaaaattgctggttatggttgcacgtgcctgtggtcccatctacttaggaggctgaggtaggagaatcatctgaacccagaggtagagattgcagtgagctgagattgcgccattgcactccagcttgggtgatggagtaagattaaaatatatatatatacatttttacataagaaattttattttaatttttttgtaaattagaaaatagcaattaatatggtatttrtataccagaatctttgaatatctaaaatttaagaagatgtgagcaatttcatgaaacttttcaaagcttagaaaaaggtagctatgtaaaataacaatgtatgttgtttatgggaacattagatgaagtaagtcatgaaaacatgcatagaaatgatcatataaacttgcaagaaattgaatgtcttgctatcaaaggaaaggatggaggtgtaagagactgaggtagaacgtgagaagctctgtatatattgtattttccttaaaaatatatatttaaactcgcatttcttgttt

SEQ ID NO: 767691 - DNA, 560 bp, Homo sapiens
catctatactgaacatgtgttgacttttttcttgtcactattttctaaacaacacagtatcacaacttttgacatagcatttatgttgcattagttattataagtaatctgagatgatgtaaaggttatatgcaaatattatattttatataaaggacttgagtaattattactttaagtatccatggtggttcctggaacaaattcctcatggatatggagggaggaggaatcactgtarttaaacaaatcatcactttaaaacttaaaaccttttgcatgttgaatacagtcatgcaccacataaatgatggtggtcccattaagtttattatgccatatttttatcggaagtttcctatgtttaagtgtatttagatacacaagtacactgtgttacagttgcctatagtattcagtaaaataacatgctttacaggtttgtagtctaggagaaataggctaagccatctaggttaatgaagtccattctatgacatttgcacagtggcttaattacctaagggctttctcttcagaacctactcttgtcattaagc

SEQ ID NO: 767692 - DNA, 578 bp, Homo sapiens
gatagaggcatccactggcaaaaaatgaatatgctaactataaacaattttgaactatttattcaaacaagaaccgctgtatgccctgcctttaagtctctaagtcacttaagagtcaggctatacctgtaagtagtttgacaaattttttttgtttttctaaattttttaatatagattctctttccttcctcaaggcaccccaaattaatgaggtcctgcaattattcatactgcaaatatatgacgacattctgtttatactattgtcatggagtaaatgatggcataagcatcaatatattttattattctaatgtgtgattactcaaacatttatgtcagagacacackcaacagaatgaaagaaaaatgtgatgactgctgacttgcatgaaatattctgtattaaattatcccatgggggtagcctacacagcagctaagaaatccttgaattattaaggaaacagttatttctttcatgatttctcaagaatttgggtttctacattttaataaccttcgaaagtgatttttttaatttaatggaaatctgagtatagtcttagaatcct

SEQ ID NO: 767693 - DNA, 610 bp, Homo sapiens
atgaaaactaaaaatgaagtatgtgtagagaaagagtggattcattgaggaaatgttgacaaaaagacaaggggagttttggtgggggtaagacatattgagcttaagatttaggaatgtaaagaagagggagcttcttataatggctcactgttgtctttagggcatcatgaggtgaaaggcactgcatatatgacccacaacataaaaccagagccagggaggtactcacagtggtgcacacctttaatcccagctacttgggaggctcaggtggaaagacggcttgagctcagaggtttgagactagcctgagcaacatagtgagacactatctctcctctyctcttttcctctcctctcctcttctctctctttggggttcaccagccctccctcccatcttctacacccttgcagataacacaaagattgaacaactctgccacatcttcctggtgtccttgagagagttgggattgtcagcaaactctcattctgccaataacaccctgtccattgtctctgtaaggctgataatgggttccagacaggacttgaatctgcaaaaataaattccttcatgttactccttacaaagacctgcccc

SEQ ID NO: 767694 - DNA, 594 bp, Homo sapiens
ttagttctttgaatctatttttgctttagcataatgaataacttattttctgcacctgctggagcctataccttattcttcaagataagtggctaaacgatgagtgcttttggctgctttttcagaaaaagacatttaggatgaatctgtagaatcacctgtgtmttttctgtctgttatttttcactgagggcaaatggatctacctcaccctcagacccccatcaggcaagtttgcctttccttttcccatccgcaagacaaattaagaatgctgaaacctttcactcataacaaaacagtgataaagcaggtaacaagacctcacattaatcaggtctttcaaagaagaggccccaacctgcaccctttgtctagcctgctggtaggtgggttttttttcagtctctttttaggggcctagcattctttagttcggcagcacattctccttggaaatgtttcacttttcagacagcctctgtgttgataaaaaaacccagagagccactacagaaatctgaacttctaatgatcttcttttatattttcttacaatggacaatggctctgtcaatgctaatggcatcagta

SEQ ID NO: 767695 - DNA, 594 bp, Homo sapiens
ttagttctttgaatctatttttgctttagcataatgaataacttattttctgcacctgctggagcctataccttattcttcaagataagtggctaaacgatgagtgcttttggctgctttttcagaaaaagacatttaggatgaatctgtagaatcacctgtgtattttstgtctgttatttttcactgagggcaaatggatctacctcaccctcagacccccatcaggcaagtttgcctttccttttcccatccgcaagacaaattaagaatgctgaaacctttcactcataacaaaacagtgataaagcaggtaacaagacctcacattaatcaggtctttcaaagaagaggccccaacctgcaccctttgtctagcctgctggtaggtgggttttttttcagtctctttttaggggcctagcattctttagttcggcagcacattctccttggaaatgtttcacttttcagacagcctctgtgttgataaaaaaacccagagagccactacagaaatctgaacttctaatgatcttcttttatattttcttacaatggacaatggctctgtcaatgctaatggcatcagta

SEQ ID NO: 767696 - DNA, 596 bp, Homo sapiens
  misc_feature 545: n = A,T,C or G
atgcacattgaagctgtggaagaattcagaaataagatcatattttttgtcaagcacttgcacgaatccctgtgagcacacaattttccttgcctgaattctgaagcatacttaccacctgcagatactgagaaaactgacaaatagtttctgacaaataggcaactattctatagcaaaatgacactgggaaacatccactgtgccaagtagcattttatattgaagaaaatacactaaattttcacattgtaggtcaagtttatatacttcatgatatcrcttttggggaaaagctttcctcttccctcttttataatacccttgtaacaacctcaatcagaaaaccatgggaaaactaaaccatatgcagtgacaatcttaaattagaaaattgttccctagctagacctcttactgggtttgctatgactacgcacttcaatttgaagagacagcaatggtcaaagaagacgggcaggatgctataatgagcccacgtttcagaaacaaaatgtcaggaaggagaatacgaggtcattcanacatgatataagtatagttagaatgtatatcagaaaggaaatgatgcataa

SEQ ID NO: 767697 - DNA, 619 bp, Homo sapiens
taagataattattaacccaatttttggtggctctacgagtgatagcagtcatagtggtggtgggcaaaatcaaggaataaaatgtttgtgaagtgaaaattgtcaggagcacctccttccactgtgcagctcaaaaacaaacaatcacaactggggcagcttgctgagcactttgcacggcatcgtttattcttatgcacttgtgtgactatcagctactcgtaaaatttttatttgacaatgtttttcagggcgtatgttcattcattttccagcctgcttattccagttcagggtctcggatggctgcagcctgttctgcagttcaggacacaagtcaagaaccagccctgtccaggacttcatcccatggcagggcactcacacactyatactctggcagatggggacaacttagacagctgattcacctaatggcacagctttgggatatgggagaaaacctaggcaggcatggggagaaagtgccatctccacacaggtggtggccccaccgggaagcaattttttttctcatcaaccttgtaaagaaaagacacgacatggctgggcatggtggctcacgcctgtaatccccgcactttgggaggtcaaggct

SEQ ID NO: 767698 - DNA, 565 bp, Homo sapiens
gatgagtcagcctatgtgtccattaatgaacgaatggatacagaaaatgtggggtgtatatatacatggaatattacttagtcttaaaaaagaaatccagccaggcacagtggctcatgcctgtaatcccggcaccttgcgaagctgaggcaggcagatggcctgagctcaggagytggagaccagactgggcaacacggaaaaaccccaaaaccctgtctctacaaaaaaaaaatacagaaattagctgggcacggtggtatgtgcctgtagtcctagctacatgggaggctgaggcaggaggatggcttgagcctgggagacagaagttgcagtgagctaagatcatgccactgcactccagcctgggtgacagagccagactctgtctcaaaaaaagaaaaagaaagaaagaaatcctgccatttgcaacaatatatacatgacactgaaagacacgaagttaagtgaaataagccaggcacagaaaccacatgatctcactcacatgcagaatctaaaaaagctaaactcagaggagcagagtaaaatggtagttgccagg

SEQ ID NO: 767699 - DNA, 660 bp, Homo sapiens
ctaatttttgtatttttgtattttttatttttttgtagagatggtctcagtatatcccccaggcctgtctggaactcctgggctcaagcaatccacctgtctgggcctcccaaagtgctgggattacaggcatgagccaccaaaccyggccaaaagtcacccttttgagtttattcacagggttctgtgatcactatgatgtaactctagaacattttcgtcattgctgaaaagaaaactcataccctttagcggtcacccccacttttcacgacccctcaatcctggcaaccacgaagcaacttcttatttctacagatttactcattctgggcatttaatgaaaatggaatcacatggctcatggcctttggagcctggctgctcactcagagagttttccaggctcatccatgctgtagctggtgtccctgtttcattcttttttgttggctgagcggcttcagcattttaaaagcccaccatgaatgtaggagagtcccagctgctccacatcttggtctcgctccttttttttttttttccttgctaactggttatttcttgctatttaaaatttttattttaatccattagacagtaggcttaattttcaatctattatttagtttcatgtctctcagtctcccatgccaccat

SEQ ID NO: 767700 - DNA, 510 bp, Homo sapiens
aaattgagttcctctaaaccagaagtagccacaacccttttatttcaattcatgtgctcactccccaaagcaccctttaataacgtctaaattgggccattgacactatcctcagacttcagctttgaagctggtgtatacattgacaagcaacagcatcttgcgtgtttacgttctctttgatgttggcaaactcaacaaattgctggataaaccctttcccttgttggccactaagagctcctctagggcaggattaactcyctgtgtatccatttcatagacactttttaattttcctttttggtacagtagcagaggagctattttcttcaacaataatcgtgggatgtgtacgtctgaactgaagatctctgcaatgggttaattgattccctgacaaaggcctctgtcatctaagaacccagcccttcaagtccattagacacattgattttaagcggacaaaagaaatcaaatcgtttggatgcttagctccgagaagtaaat

SEQ ID NO: 767701 - DNA, 656 bp, Homo sapiens
tagggttctttccaatcctggatcctagaagcaaattcttccctacaaagggggttttctgggctcattggtggtcattgtctaaagcatgtctgatctaaccctgaggggggctgggtactcatgaagaactgagctttcaatggcttcaggattcaaacttcaaactgggaccatcccacatgcaggaaaagcttttctgacatgtacatgtgggttttcattgcaggtttttgaaaaagtaggaaacttacacatttctatggttacctgtacttcttttaacacggcacttttcattttattgtttctaatccgaatcaaaatgttaaggtccgacagaactcaaagactctgacaatctaaatgccagcagtgacaaatggctcttgggttccatggtgtttccagtgcatctgtcaaatgccattatgcttttataatggctgggaatattcatcttttggaggaacagtgcaatcattctagcctctgaattatgaamaatgacaatttctctcttatgaattgtcatcttatgctgtgacacacacagccacatggctgactaattttataaaacaagcaaatcatacgaaaaaagctgcactcctattttctaggctgccctcctctgaggatttgcagtctgtcac

SEQ ID NO: 767702 - DNA, 647 bp, Homo sapiens
ttctcttctaactaccttgaaatatatactacattgttactgctacagtcaccctactgtgtaacagaacatcaaaacatattcttcctgtctctctgtaactgtgtggatttttcaaagtccagtttaagaacataaaccttttytttctcaggagaaattgtagtccatacccaatctctgtaatgattgataaaacatcttatatctttcattttgctttatgttttcatttatctggccttttttttagcactttttacagaatatatttattttttattttgatcgacatgagtctttcccaaaatcaaaaaatcagaagaattagtctttatgttcactcagcaacttgcttgttccatgaagttagacattgctttttctgtaatccttaaagcataaataatacctgactttgattacctcttagaattactacaatgatgaaataatctatatgtactttctaaaccatttatctgcaaggtgttgtaaatacttcaaggaaatattaacatacaagtaactaaggataaaagctagcaaatttattttgttatatagctgacaaaaatctgttgttactaaattatatatataattaagatacaagtgctaatatatatgagaaatttcggctgagt

SEQ ID NO: 767703 - DNA, 602 bp, Homo sapiens
ccatgcaagctaccattcctttccagtttccttcaatatctgaaaccactcctccatctgctttttatcttttagaaatttgttgaaatatctcaaactgctgatggatctttccttgcacatttatgttggaaacatatataataggatgtgtgtgtgtgtgtgtgagagagagagagagagagagagagagagagagaaacaagtctcaggaaggtgaaaaataaatttatgttgctaacttaacatatcttcttgtgaatttttaaaagggaaaattttcaaacaatgactacaaagaatcatattacccaggaccaaggtgctgaggttcargattcaaaacagtagttttgattttttaaagtattgataacttcaacagggaaagcaataaaatttcagatgcactttgaaaatatgaataaatgaaaacaatctctaattttctcatgaagaagtctaaacttaaaactgattccggattccagggactgtggtaatctcattttgacacaaaaggaagaaagcataaatgattaacaaaaataaaatcataaaataagctaattcaataaaactgatccttgttacatattttt

SEQ ID NO: 767704 - DNA, 483 bp, Homo sapiens
ttttaaaaaggcaatttaatgcaatttgtttcaaaatgtcatattttagcatatttagagctgtcagcaactgggtcatcaacagcaaaataaccagtatggatttttcagctacgttaattagatttgcctcttagaatcgcttgtatgtaatgatgttaatcagtgratgacattccctttagactggccagccctgcctctccagtccctgctgaagtggacaataatttgtggcctgaaatggcttcttttttatatagagtgagtgtgaactgataatcaatgctagtagctgagccaaagaaatagaggtgattgaagtgtgaagatggaaaaattagcatctcattctatcaaagttgtaggagaccagggcacaaacaccttgtgcttactaggtggaggaactggggaagcaacaggggataagggtaggttctttcacgggatccactccaataagaaaaaaaaaaaatgaac

SEQ ID NO: 767705 - DNA, 520 bp, Homo sapiens
atgagttaacatatctttgtgtttccaaaggacttctacattgtcaacaatttagcattttagcagtgactctgaattgccagaagctgcagcagatgacacgtagagaatgatagctattatcctccagctcattatcagcaccctggaagtcccccttgctctccctctcaatcactgccacctcaaggaaaacgggtatcctgactttttttctcccagttgtattaagatataatcaacaaataaaaaytgtatattggctgggcatggtggctcatgtctattatcccagtacttttggagaccaaggctgggagggttgcttgagcccaagagtctgagaccagcgtgggtaacatagtgaggcctcatctctaccaaaaaaattaaaatttaaaaaaaaagaaaaagaatttgtatattgttggtgaggatgtagagagaagggaacccttgtatgctgttggtggaaatgtaaattggtacagccatgtggaaaatactacagaggtttctg

SEQ ID NO: 767706 - DNA, 520 bp, Homo sapiens
atgagttaacatatctttgtgtttccaaaggacttctacattgtcaacaatttagcattttagcagtgactctgaattgccagaagctgcagcagatgacacgtagagaatgatagctattatcctccagctcattatcagcaccctggaagtcccccttgctctccctctcaatcactgccacctcaaggaaaacgggtatcctgactttttttctcccagttgtattaagatataatcaacaaataaaaactgtatattggctgggcatggtggctcatgtctattatcccagtacttttggagaccaaggctgggagggttgcttgagcccaagagtctgagaccagcgtgggtaacatagtgagrcctcatctctaccaaaaaaattaaaatttaaaaaaaaagaaaaagaatttgtatattgttggtgaggatgtagagagaagggaacccttgtatgctgttggtggaaatgtaaattggtacagccatgtggaaaatactacagaggtttctg

SEQ ID NO: 767707 - DNA, 621 bp, Homo sapiens
ctgggggcatgagggtcagaggccagccttccacagccacagcctccagtgctggattatctggcacctctgccaggctaagaccagctggctccttgggcactctgtttgtcatgcgctgtgtggacagactcctatggccgggcagctagctggccctgcctgactttaggggccttgcctccttgtagcccccatggccctgggcttggtcagggcctccgccacccctgagcccagggctctgcctgtaactcagcagtttactctctccctgtgaaatgcggccatgcagctgccccagccsgggtgagaaacctgagggtgtgtgaggctccatgcagggggcggctccagcgcccggtaaatgcaatcctggatgcccgcgtggcgggcggctgcagtcccggtaaatgcaatcctggatgcccacgtggcagggggcggctccagccccggtaaatgcaatcctcgatgcccgcatggcaggggcagctccagccccggtaaatgcaatcctggatgcccgcgtggcggcggctccagccccggtaaatgcaatcctggatgcccgcgtggcaggggcagctccagccccggtaaatgcaatcctggatgccc

SEQ ID NO: 767708 - DNA, 621 bp, Homo sapiens
ctgggggcatgagggtcagaggccagccttccacagccacagcctccagtgctggattatctggcacctctgccaggctaagaccagctggctccttgggcactctgtttgtcatgcgctgtgtggacagactcctatggccgggcagctagctggccctgcctgactttaggggccttgcctccttgtagcccccatggccctgggcttggtcagggcctccgccacccctgagcccagggctctgcctgtaactcagcagtttactctctccctgtgaaatgcggccatgcagctgccccagcccgggtgagaaacctgagggtgtgygaggctccatgcagggggcggctccagcgcccggtaaatgcaatcctggatgcccgcgtggcgggcggctgcagtcccggtaaatgcaatcctggatgcccacgtggcagggggcggctccagccccggtaaatgcaatcctcgatgcccgcatggcaggggcagctccagccccggtaaatgcaatcctggatgcccgcgtggcggcggctccagccccggtaaatgcaatcctggatgcccgcgtggcaggggcagctccagccccggtaaatgcaatcctggatgccc

SEQ ID NO: 767709 - DNA, 628 bp, Homo sapiens
acctccaggtgcctcgggtgtttccgtccatgactgtgtttttacagagattcacaggaaactcagaagagcctcctttttgccctcataaatctactgctgtggacgcttgctgttgcctttgctgacatgccatcatcaaatgattttgcaccatcaggggctgatttatgggattatgttattgttccagcacagattgatatctgggttttttcacctctttaactttggtatcataagaattccattacattggtagcatctttaaattagcttgatttcttttgctggcgttcagttagaaaattaygtagaagaatattcttatttaaaacatttacctctgtgctccctaaatgcacatcaaaagtccttgttagccattaaatgttgttgatattcattctttgttacagaatgcaatgcccacttgaaaacttcttggctaccattttgtttcaaggtgaaaaaccggttcataaatcaaattttaaaatttgtaaaaagctgtggaccccagcaattatcacaagtcacacagaatgaacatcaactgtttcagtacaactgaaagagaatttccctgtagtcaattacatggatcctttctaatattaatactttt

SEQ ID NO: 767710 - DNA, 628 bp, Homo sapiens
acctccaggtgcctcgggtgtttccgtccatgactgtgtttttacagagattcacaggaaactcagaagagcctcctttttgccctcataaatctactgctgtggacgcttgctgttgcctttgctgacatgccatcatcaaatgattttgcaccatcaggggctgatttatgggattatgttattgttccagcacagattgatatctgggttttttcacctctttaactttggtatcataagaattccattacattggtagcatctttaaattagcttgatttcttttgctggcgttcagttagaaaattatgtagaagaatattcttatttaaaacatttacctctgtgctccctaaatgcacatcaaaagtccttgttagccattaaatgttgttgatattcattctttgttacagaatgcaatgcccacttgaaaacttcttggctaccattttgtttcaaggtgaaaaacyggttcataaatcaaattttaaaatttgtaaaaagctgtggaccccagcaattatcacaagtcacacagaatgaacatcaactgtttcagtacaactgaaagagaatttccctgtagtcaattacatggatcctttctaatattaatactttt

SEQ ID NO: 767711 - DNA, 494 bp, Homo sapiens
cggcgtccccagctttgttggaaaggtgaacacagcaggctttgcagcagctgttggtcagcacttgaccttattggccatgatgaaggccagtaggctggacaagcccaagcgagggtgatggtcgtttaacctctacaggcctttcagaccaccccatgctgtctctgtggccagaagatgctccgagacttcagaactgggtcttggtcaggactcgaccagaaaagacaatctcaacctaggactcaagacccagatgtgggaggaggcgtatgaaraaagcagccaatgggctaccctgagagtcagggacctggtatcaagaaaggagggggatctgccggcagctgcagggccaccattgagggtaagggcaagagcaaggcaaggcccccaccccagatttgcattcagctttccagtggacggggcatgcaagctttcccagaagcccaggcaacagagggatcctggactgaggagtgaggcca

SEQ ID NO: 767712 - DNA, 600 bp, Homo sapiens
agcattttccataagtaaaagctttcagagtgtgcatctctaaatcatccacttcttcgctactgactcttttcctttcttttgatgttgttattttcttgacataattacagcaaagattggtacattgcacccaatcttaattgtatctcccttcagtctcatttatttcattgttacctgctattcctttaaattagtaagtcatgatgtttacagattggtagtattcttaaaaatatttcaaattgtgctagaaggtttcaccctgaaatggggtgagtacattcttttatttattctagagcttgcaaacatattttaagtgtataatacagtgatcctaaagaaaggctggggaaagaatttgagtttggaggatagcagtgaaaagagggycacatgaacaggtgaagaggaggctggcgtgtccttggtgcagggccttgggtaaggaaggtgctaagtaaggaacagggtggtggcctcacttttctgcgtggtgcagactgcaaacgcccttgattttttgatcaccaccccctccccacattctgtgagcagcaggaccgggagcgagaccgtggtccgaagttctcc

SEQ ID NO: 767713 - DNA, 600 bp, Homo sapiens
agcattttccataagtaaaagctttcagagtgtgcatctctaaatcatccacttcttcgctactgactcttttcctttcttttgatgttgttattttcttgacataattacagcaaagattggtacattgcacccaatcttaattgtatctcccttcagtctcatttatttcattgttacctgctattcctttaaattagtaagtcatgatgtttacagattggtagtattcttaaaaatatttcaaattgtgctagaaggtttcaccctgaaatggggtgagtacattcttttatttattctagagcttgcaaacatattttaagtgtataatacagtgatcctaaagaaaggctggggaaagaatttgagtttggaggatagcagtgaaaagagggtcacatgaacaggtgaagaggaggctggcrtgtccttggtgcagggccttgggtaaggaaggtgctaagtaaggaacagggtggtggcctcacttttctgcgtggtgcagactgcaaacgcccttgattttttgatcaccaccccctccccacattctgtgagcagcaggaccgggagcgagaccgtggtccgaagttctcc

SEQ ID NO: 767714 - DNA, 624 bp, Homo sapiens
gctggatcccgaggctgctgcttggcttgtagacatcatcttctccctgggtcctcacaggatctgtctcctctacgtgtgtctgaatttcctcttcctagagggacaccagtcctattggattaggccccaacctgattacctcattttaaggtaattatctctataaagatttctatttccaaatacagtctcgttctgaggtgctgagggctgggacttcagcataggaatttgagaggacacagctcagcccacaggagagccttgctttccaagcacgtatgagtttgttcatttgtcttctttcctgcagcttttgcctctcagatgtcctcctgtttgtctttgccgggggtctctgccctgcgggccccaccgccccagcctctccacccgcgccccccagactgtgttccttcccatccccctttgttcctgcagcatcgacacatycctcctcacaaactttaggttttgcaggtttatctgtttttcttagctgtcccagaattttttctttcttcctttttcagatcactgtatcgcctttatctcttacgcctgacttttccctccgccttcaggattcttcctgccttgtctgctgggcctctctccttg

SEQ ID NO: 767715 - DNA, 628 bp, Homo sapiens
ggctggaaacctcccaggcctctccaaccctgatgatttcactacttcccgatctcactggcatagcatatctcatcttttttggcttacatattttctattttattcaggtgtagcatctttcatacagttgggtttttgtattttggtagggatggatttagggaatgggttttggccacttgactttctcattttgcccttggtccatttttcgtttgattgttatttatcttattatctttaggaattttttgtcaagtggattcccagccctcagcattggttatctcytgcagcatagcccattatcctaaaactcagtgtcttgaagacaccaacatgtcttctctcctagtttctgtagttgaggaatctgagtgctgcatgcctgggtgcctctggtctgggtctgtcatagagctgcaggggaactgcaggccagggctgctgtctcatctggaggtctgactggggaggattggttcccatgagcactcatgtgctggcagcaggatgcagtccctgggtggtgttggctgaaggcctcagttccttgcctatgggcctctccatggggcagctcacagcatggcagctggcctccctcatagggagctagggagag

SEQ ID NO: 767716 - DNA, 632 bp, Homo sapiens
ctccaggtctctcgctcccatccaggcattctccacctgatatctctctggagggtggatgcttttgtcagctgtgtcctcaataaactgcaaccaggcatggggcaatgtggagggagggaagagatttaaattcattttctggggggaagagtcacctcctactggaatcaagagctaaaaagagttctcccatgtgtgcagtgccacgtaacttccggtgtaatgccacgaaacacccacacgtggaaaacacagttgccagytcttcctcctccaccgtgcagctccggggagctgtggggagccagccccctccagaattatctgatgccagcgttggcgtggacataataatgaacaaataagcatttttttaaattgacaaggtgaaaaagaaggtttaggattaaggaatcttgcctgaggattagtcgaatgtcagtgaggagaaataacactgaatagacccaaaatatgttttcaggaaacctcgaaaatgctttctgcataatattatatctccctctgctagaactgccaattttgagtttctcactatttttattttcttgagaaatgatcatttttataaatagccttttaaatgtcaaactaactggttgaataat

SEQ ID NO: 767717 - DNA, 647 bp, Homo sapiens
gctgccctggtggtattttatgctaagagagaacacacagggaagatctggagtgtgactcacatgagcaagtgtgacatcccagggaggaccgggaagctctatgggatgggaggaccatgatcagatggtaaaaccacagtatctctccttgggtacccagagagcaacaaacaggccaatctagttgcttgttgtctcatgagctgatttcaataaagatgcaaccagagacaaagaggaaaggaacgtcacagtatcagcgtgcactgaagcagaccaccttttccartgtgaaaatgggacgttttagacattttcaaaaacagttgatttacttctagtaaagtactatagatttttctcgtgattgtgcctgtgtgtgtgaaagcccacccacatatctcatgcgtccaaaacacatacactttttgcagaaatagttataattaaaatgtacgttttaaacgaaagacaaagtgaaacacaaatacgggtatagaggtataaggacaactcagaccaaaaatatcactgaccctaaaataaatatctagagtccctaatcagcagtgcctaccatcccctatatctagctttctttcagctaaattaatactcttgcaactcggaatggtatcagatcc

SEQ ID NO: 767718 - DNA, 504 bp, Homo sapiens
tttcctttttgtgctgtatactggctccttcttccaaaaatgtatttgatgatgtcattcctcaacctaaaacctcctgacatcaccccgctgtctacaccagggatgttaaaatcctctctctgcatagccccatccccatgrccatgtactcactctattaccccaattctctgggtgaggcaggaggagaggagtgggtgcatgtgcccctggcagagggaaaggattctcggaggggtgagacaagtagtgtgaaaagagtcgacctccaggaagctgctctgcagccctcatttctcctttgagaatcgctggtcctcagaacaagttctaaatccttaccacctgatctgataccaccttcccactgaccagtgccctacagcctcatgggaccctcaccaatcccgcctctttgcctttgctggtttcttttctctgctttaaagtcttcttccataccttctgctttacttggggaaatctgaaataaatgtcagc

SEQ ID NO: 767719 - DNA, 600 bp, Homo sapiens
atccagaaatcatcctaatctctgaagaaacctaataacaaagctatactgaacaaagctatacaacaacatacacatttatatctatgtatgcttatatatatgtatgtgaatatataaagtgtccgtacataaacattttaatcagtcttactttgcatcacaagtagtagaatatgaatgttttttcccaagatacttacatcatgcagtatataattgtttttatgaaagctgttttccacaattcacaacaatgatatatataaacctatattatatatgtgtgtgtaagtctttatcaatcataaagtgttttagacctacttgatctttacaraactccaggatgctgtaaactcaaggaaagaattagcacactcattttcaaataacacacaaagcttgtcaaaattcacatagtttttaaattacagagacaaaattgtaacctaggcctttgtattccaaatccaatagccctcacctttttgaaacagggtcttgctctgttgcccaggcttaagtgcagtggcgtaattatggctcactgaagccttgacctctcaagctcaagtgatcctctcaactcagcctcga

SEQ ID NO: 767720 - DNA, 600 bp, Homo sapiens
atccagaaatcatcctaatctctgaagaaacctaataacaaagctatactgaacaaagctatacaacaacatacacatttatatctatgtatgcttatatatatgtatgtgaatatataaagtgtccgtacataaacattttaatcagtcttactttgcatcacaagtagtagaatatgaatgttttttcccaagatacttacatcatgcagtatataattgtttttatgaaagctgttttccacaattcacaacaatgatatatataaacctatattatatatgtgtgtgtaagtctttatcaatcataaagtgttttagacctacttgatctttacagaactccaggatgctgtaaactcaaggaaagaattagcacactcattttcaaataacacacaaagcttgtcaaaatkcacatagtttttaaattacagagacaaaattgtaacctaggcctttgtattccaaatccaatagccctcacctttttgaaacagggtcttgctctgttgcccaggcttaagtgcagtggcgtaattatggctcactgaagccttgacctctcaagctcaagtgatcctctcaactcagcctcga

SEQ ID NO: 767721 - DNA, 579 bp, Homo sapiens
tagatgcaggttaaacacacagttcatttagctcaacacatccgtttctaacagtgatgtatcacggaagcattaaattaagcaaatgctcgttgagcaccaagttatgcaatgaaccattagatgctatggaattaaaagaatgacaacatgtatcaaattgggcaattcacagatggcctcgtagaagttctgcttcccgtgggtctttaaagatgcatagtctgacagtagtcagcaaacagagatggtctttcctttctactcctctccattgtctttccagtgaggtcagcatctacatgtgtaacgcatccagcaccagccgtcagaccaccrgcatcctcaccttgaataatattttcctccatcctgcctcacaactcgcatccaaggcaaacatggacatacaccacctctgaaatcttcatctgaaacatccaactctgactcacctccctcctgtcctacagtattttcttccaccacttcccaacaattcctcagtcttcctgagatccctaatccttcgttctcactcccgtccaccatcacgtgtcctgtccttttacatttggc

SEQ ID NO: 767722 - DNA, 576 bp, Homo sapiens
ataacgtgtgtagctgtaaactatcttgctgtccaatatttttcttatagttttaaaacattaaactgcagggctgggtgtggtgtctcatgcctgtaatcccagcactttgagaggccgaggtgggtgcatcacctgaggtcagttcgagaccagcctggccaacatggtgaaaagctatctctactaaaaatacaaaaattagctgggcatggtggcatatgcctgtaatcccagctacgtgggaggctgaggcaggagaattgctcaaacccggtaggtgraggttgcagtgagctgagattgctccattgcatgccagcctgggtgacagaacaagactctatctaaaaaaaaaaattaaaatacaattcagataccataaaatttacccttttaatgtgtacagttcagtggttcttagtatatgtataagtctatgcacccatcaccactctaattcctgaacactttcatcacctcagaaaaaaactccatgcccattagtattcacttcttatagaattttgatgaagcaaaatccttcaaaagctttctactaaaagtccaattttc

SEQ ID NO: 767723 - DNA, 614 bp, Homo sapiens
gaggcggggagataggagggaaagtttaccagagagatcgctgtggcttctatggtaggtctcaagaaatgtgtataatttatagggtcagagacgtgttcaggtgataggagaaaagggtggaaacacccattttgtattgtgcccctcctttggtaatgagttttgactaatgagcaattgctttttttccttgacattcataagtatttattatcctgaactgattgacctcatattttgcaaaataaacagctcatattttactatgatgatttaaaaacattttccttccatttgaattagataactcatctttaaagttttcttatggctaacgagctcgtgtttattcaagacaacttgttacagtgctattagaagagatggaaaacgtccaactgcagccccaaatcctggaggtatctatttgaagataaraaaaaagttctcaaacaaatgacaaaatgttcaaactcaatcataattagagatatgcaaattaaaacattacaatcacactgacataaatgaaaaagtaggacaatacattatgttggtaaggctgtgggcaaataggcaatcatatattgctggcaggaatctaaattcat

SEQ ID NO: 767724 - DNA, 599 bp, Homo sapiens
ctattcataggagtcccgtggcatacattggttttcaaaagacagcaggtgacattcatcagcagactttctgtgtccctctgctcacacttacagcacaattttagagtctcaggttaaggctgtttttccttaacaatactcaattttcttctgaatcactgagaaaatctaagtctaccgtggggtcatcctcagtagactggaaatggggaagagaatgtgagcttcttttgtttttatatcctcctgtccataattaggcaatatttttaaaagagaaaaacaaaaacgttccaagcacaataaccttgatgccgttctgtaatccagagtggcatactggcaaactgggttattattyttttttaatttcagataaccttctctcaattgtcaagggtatattcagcaaatcaaatcgacttccctcagcatcataaatcccatttgtatcctagtagaaacacacatttcctgagaaagggagctgggtcttaaaaaaggaagttgaagtttttaagctggagataaggcatttcaaaagggaagaagcttttggcaggactcgagtgcatcctgcactaatggaaattgga

SEQ ID NO: 767725 - DNA, 568 bp, Homo sapiens
tgttaaataataagagctaaccgtttttgagtggagtatagtgagcactttacatgcattatctcactctgtcctcctagtcaccttatgaatgaatgggtggtgatattatctctattatcagacgaggacactgaagtacagacattaagtatcgtgtcctagatcacaaatactggggcaaagttggactcattcagactgattctgtttaacattgagcccatttgcttttaacctttgagccatgctgtcttatcctctcaacaagaatttattattctctgggagaytgaaaaccgagtctgaagaaacattgactgcaacaagtgtgcatttattatatactggaaaagaaagctaccctgcccctggctccgggactcaccattctaagagatctagctgatatgcacagagacaggcttgtatgtctcaggtacctgttatccaaattaggacacaatggtgcccatatcctgtggggcccctcagtgcttccagagcattccaggggtcagatttctcctgcttcctgggtcttggatccttgactttgtgaggccat

SEQ ID NO: 767726 - DNA, 616 bp, Homo sapiens
caccccctccccttttaaaatccctaataaaaacttgctggttttgcagctcggggtcatcacggtcctaccaatatgtgatgtcacccccagaggcccagctgtaaaattcctctctttgtactctttctctttatttctcagaccggctgacacttagggaaaatagaacctactttgaaatattggggctggttcccccgatacccatctctactaaaaatacaaaaattagccaggcatggtggtgtacacctgtagtcccacatactcaggaggctgagacaggagaatcacttgaacctgggaggcagaggttacagtgagctgagatcaccccactgcactccagcctgggtgacagagcragattgtctcaaaaaaaaaaaaaaaagaataagaaaaaagttcacctcctttcccaaggcaaaaagaagccccatggttcttagggaacttggcatgagtaaagcctcttgggcattttaccctttgagcataaaattcatgtttccaaatgatacttctgcacacaggcagtagttccataataggctaagagcaggtgtccctgagtgagagttctcacagtcttgttgcattgttaaaggctcta

SEQ ID NO: 767727 - DNA, 495 bp, Homo sapiens
ccaccccgcggcggcggcggcgcagggcggccgcgcgggtgttggcaccagaggcaacagctgcagcagccgcgccgccccctcgcccgcggctcccagggtgatcccgagcacagccggtggctcgcggcgcggcagccccagaagacgggaaagttcgcggccggagcgcggagatgccgggcagcgacacggcgctcaccgtggaccggacctactcgkaccccggccggcaccaccgctgcaagagccgggtgagcgcagcgggctggggggcggcgggtgcgcgcgggcccgggggcgaggcgggctggggcggcggctcagtgctaacccacgcgcccccggcgtttcgccgccgccctccgctgccgccggaggtccgtgcctccccgatcctccgagctaaaagggtgggcgtcgggggcgtcggagcccaggctgcggttctgggatcccaggtccgcctgcccctcacggcgcccaggtccccgc

SEQ ID NO: 767728 - DNA, 647 bp, Homo sapiens
cccgttaacctctgtcaaaactaagtcaaatctggtcattcctgtttgaaaccccctaatggctctcgtctcacttagagaaaagtcaaaatcctacaagaccctatatagtcagagcccatctacttactactccaccacctgtgttccctgttcctagaacacacaccgggcctcctccttgctcaaggccttcgtatctgctgtttcctgaaaggctctctgagtatctgaatgttcattccctcacttcacatcttcactcaaatgccatcttttcagagaggctttctttggcctccctacacaaaataaccaccacactccctcatattacccatctctcttccctgctttatttttcttcttagcacttcacgctttctaacctaccataccaaccttacttgttaggtttattgactgttccccccatttgaatataagccccatgacagcaaaaaaaawtttttgtctgttgtgtttgctgccaaacatattctctagctagcactgcagtgcctggtacataggaggtgctcaataaaagacacagacataatgtaggtcatcttaaagtttgcacagtcatgctcatttatgattcttctgcagcctctgcttagagttctctgaatcaaacccat

SEQ ID NO: 767729 - DNA, 630 bp, Homo sapiens
tcactcttgcttccatgacactagatttttttgagtttttatcctatctccatggctgcatgttctacatctcctcttcttgcaccacttttgcaataatgtatatatagatatattgctatgtcacaggcagaaacattgccgcatgtatcaatattgaaatgaacaaatatataaacaaaactagtcttcaatgcagaggagtgatacttgaactaatagctcaagttttaggaaatggaagagcaatgagcagaggcacctgtgtagcccttctgcttggaagtttgtgtgcaggaccagccctgcaaaggtgaaaacacaactacagataaacaactttaaggaacaggcactctacaattccttatcaaaaactaaattttggaatamttttacaaacttcatgcttgatttctcttagtttccatgcagcttgaatcattgaatcattcttgaagttcttttgttgttttaacacattaaattagctaattacagctgaatatgtagtggaaaatagcatctgtttacggtgtaataatataaaaattacttaccagtaacagaataaggagcaatttgcaaaagctaatcatatttgtgcacttgtctacaaaaagtaaattg

SEQ ID NO: 767730 - DNA, 549 bp, Homo sapiens
ataataaaactacagaacgcttttccctaatcccacactttaccaccacatctatgtaatacaggagattatgttgaaagaactgcaagtcttagaccctatttaaggcatctctaagaaaaccctagagcaatagcgggggagggagaaaaaagggaactagaggaaattttagcctctgaaatctacaactagagcaaacagtaaaacataacctacagatagcatcataattaatgacgrgaaactagatgctttctctctaagatcagggatgaagcaagaatatctcctttcacctctcttaacgtcatactgaaagtcttaactaatgcaataaaacaagaaaaggaaattaaaatatacagattggaaggaaaaaatgaaaccatcattattaacagatatcataagtgtctatttagcatattccaaataatcaacagcaagaaaaaccccttggaactaataagcaattatagtgagattgcggaaagtaagattatatacacaagtcaattcttttactatataccagcaatgaacaat

SEQ ID NO: 767731 - DNA, 557 bp, Homo sapiens
cagaagagtgagacatggaacagtcttcctctgacaatctaagaaacaaccaatcctgctaatactttgatttttgacttcccacctctagaaccgtgagagactacattttttgttgtttcaagccaacaaagtttatggcaatttgtttcagaagcccaaggaaactaatatacctgagtatacaatggcagtgagttagcataaaataggctttcttaaataaatytggcagagccatatctgtaccaagcaagcatccctggcaactgtggccctgtttctcctacctcccacctaaaaggaatccagaggaaaagaaacagtggccacaatagacctcgttttctactgccctgtatagcattttgcttcccataagttctgcatctttggctaaataaatcacaaacttgcagaggttatgattatctagtcttttccatcataacccaacccacctgaaatgctctgacactctagaaaataattctaattaatgaataaaacatggtaaactgataattagcttttgaaggtgaaagtgagctctttaa

SEQ ID NO: 767732 - DNA, 557 bp, Homo sapiens
cagaagagtgagacatggaacagtcttcctctgacaatctaagaaacaaccaatcctgctaatactttgatttttgacttcccacctctagaaccgtgagagactacattttttgttgtttcaagccaacaaagtttatggcaatttgtttcagaagcccaaggaaactaatatacctgagtatacaatggcagtgagttagcataaaataggctttcttaaataaatctggcagagccatatctgtaccaagcaagcatccctggcaactgtggccctgtttctcctacctcycacctaaaaggaatccagaggaaaagaaacagtggccacaatagacctcgttttctactgccctgtatagcattttgcttcccataagttctgcatctttggctaaataaatcacaaacttgcagaggttatgattatctagtcttttccatcataacccaacccacctgaaatgctctgacactctagaaaataattctaattaatgaataaaacatggtaaactgataattagcttttgaaggtgaaagtgagctctttaa

SEQ ID NO: 767733 - DNA, 567 bp, Homo sapiens
gacccttaagactagctagtaaaagagtacctggtggctaagaacctataagccatgctgggggttgcaaaccaaacttattacagggacctgcacaaagcaaagactggggccttcaagtacagattgtagaaagttgtaaaattctgtttagtccaaaggggccagtcgcagttcatttagctagttctgcagccaataaacgcctagtgggaattcagtaccaggacactctcagattttttttttttttttttttacttttcaagaaaaatcagaaattctcattttattttaattttggaagcaaatgtttatttttcccttaggcatataattctttcagaggctttaaagtttactactgtttttcccacaaagtctattcrttcagtctcctattagagttatatctgggcattttaaggttgtttttataatgttacatcttgtctaacttttttttcttccacttttcctttttcttcccctctttttggtattattatttctgctcttttcgctaagatgaaatataaagacatcagccttagaagaccagtagag

SEQ ID NO: 767734 - DNA, 610 bp, Homo sapiens
  misc_feature 85: n = A,T,C or G
tactgaagtaattaaagtcgggtgagtgtgaacaaaagggaagttagcaaaaacaactatggagttacaaagcaaggacaataancctagtctctgatgaagggatttgccaggcgaaaaaaccagtgtgcatgaaaaatgggagtgaccatggcaagagggagagtggcacaaagcaaggctggaaagttaggtgctagatcacgcagggccttagaggtcataggatttcatcccgagacagccattgcagggcatttagtatggtagggcatgatcagatgttamtttataatgttatgagaatagataggagaaagtgtgtggatacaaggaggcctgtgggatgaccattgccatgggccaggtgagggaagatgttaacttagattggtagaagtaatgatgagaagaaatgagtggatttgagaaatacttgggaaatatatcactaggattaggtgaggtttctggcttgagcaactgcatgacttggtcccattgtgttgagaaagggaagcgagctctggaggactaatccctaggtttggcctacattgattgtttataaacagtgaccaagagacagactagttggaggattttttcc

SEQ ID NO: 767735 - DNA, 610 bp, Homo sapiens
  misc_feature 85: n = A,T,C or G
tactgaagtaattaaagtcgggtgagtgtgaacaaaagggaagttagcaaaaacaactatggagttacaaagcaaggacaataancctagtctctgatgaagggatttgccaggcgaaaaaaccagtgtgcatgaaaaatgggagtgaccatggcaagagggagagtggcacaaagcaaggctggaaagttaggtgctagatcacgcagggccttagaggtcataggatttcatcccgagacagccattgcagggcatttagtatggtagggcatgatcagatgttaatttataatgttatgagaatagataggagaaagtgtgtggatacaaggaggcctgtgggatgaccattgccatgggccaggtgagggaagatgytaacttagattggtagaagtaatgatgagaagaaatgagtggatttgagaaatacttgggaaatatatcactaggattaggtgaggtttctggcttgagcaactgcatgacttggtcccattgtgttgagaaagggaagcgagctctggaggactaatccctaggtttggcctacattgattgtttataaacagtgaccaagagacagactagttggaggattttttcc

SEQ ID NO: 767736 - DNA, 533 bp, Homo sapiens
tgtacctgttatcccagctgctcgggaagctgaggtgggaagatcctttgatccaggaggtggaggctgcaatgagcctcaagggagccagtacactccatcctgggcaacaaacagagtgagaccctgtctgaaaataaataaataaataaataaataaataaataaataaataaawaaaataataaataaataaataaaataaaaactcttagagattatcaggccttggaagagattttccccaatctacataaagacccagagcccccaagagaacaattgcttttcttcccttccctgttatctcattatctattgcaggaaagaaggtgaggaaggtaaccagagcaggcccaatccttttgcaaaataatgtctgtctctcaggttcatttaacttccaaagaaaactatttgcaagtcaatctgtttcccccatccatttattcacctaaatcatcacttaatgcccctctactgaactacctatattccccatctcccccacccctctgaaaagaggttatata

SEQ ID NO: 767737 - DNA, 533 bp, Homo sapiens
tgtacctgttatcccagctgctcgggaagctgaggtgggaagatcctttgatccaggaggtggaggctgcaatgagcctcaagggagccagtacactccatcctgggcaacaaacagagtgagaccctgtctgaaaataaataaataaataaataaataaataaataaataaataaatwaaataataaataaataaataaaataaaaactcttagagattatcaggccttggaagagattttccccaatctacataaagacccagagcccccaagagaacaattgcttttcttcccttccctgttatctcattatctattgcaggaaagaaggtgaggaaggtaaccagagcaggcccaatccttttgcaaaataatgtctgtctctcaggttcatttaacttccaaagaaaactatttgcaagtcaatctgtttcccccatccatttattcacctaaatcatcacttaatgcccctctactgaactacctatattccccatctcccccacccctctgaaaagaggttatata

SEQ ID NO: 767738 - DNA, 560 bp, Homo sapiens
cagtctctcatggtacagcaaattgtgttgtattaggttgtatcagacataacagaaatagaaaacaacctgctgagcacagtgacttgtgcgtagaatcccagctgctctggaggctgaggcaagatgatggctagaagacagatttcaaaccagtatgggcaacaaagcaagatcccaactctgaaaatgtttaaattagccagacgtggtgatgcatgcctgtagtcccaactactacactagaggtagaaggattgcttgagtccaggagtttgaggctatgtgagctaagatcatgccactgctaaactgaattcaatccagttctttcactttgcagctatgtaatcttggaagaatcayctacttcctttttcatcagaaatactctgagcacacgtggtaagtccaaaacactatgaaaatataagatgttatattatctcagaaagaccagccaatgaaacaactgggtttatattagacactgaaggttccttctcaaagtaactgccatcaggttttcctgccagaatgtccagttatttttaaatttt

SEQ ID NO: 767739 - DNA, 519 bp, Homo sapiens
agcatattctgaattacatatatgctgatttcccacactatggctattcaaagagttctcaaaacatctacacaaatccaccatagcttttatgggggaatattttcaccagttggcacatcaaatagaacatacctaaacaaacaggtcttttctctagatatttcctcaagaaaaaataaacaaaacaccaactagtaataaacgagcagaagccaaaagactaagaaggcagtgacaatgagaaatcagaaagaaaaaagtacttgacatttscaggggtgagcaagggagagttctgagaaatacatcactttcctgttagataagtggctactcgaaaaaaaatgtgtaactttctccaagctctccaaatatatgctttttcctaagaataaacacttggggaaaataataactcatcactctaaatcactaaaattaaccactcctcactcaaatttaaacattgaagccatcacttaaattcacaataatgaaaggagtcctcaatcttca

SEQ ID NO: 767740 - DNA, 628 bp, Homo sapiens
aaaatacattcatttgaattttcttgtagagttgaatttctttgaattcagtgttatggccgcatgcatttttttttttttttttaatggagtttagtcttacagggtttttatttatttcttttttttttttttaaatggactttaatcttacaggttttgtttytgttttttgtttttttggttttttttggagagagagtctcactttgacgcccatgctgcagtgcagtggtgcactcttggctcactgcaacctctgtctcctgggttcaagcgattcttgtgcctcgttctccggagttgatgggaatacaggtgtgcgccaccatgcccagctaatttttgtatttttagtacagatggggtttcaccatgttggccagtgtggtcttaaactcctgggctcaagttatcttccccccttggcctcccaaagtgctggaattagaggaaggagccaccgcactgggcccttttatttctctcttagtaaagaaacttgctgtcagatttccagcaagtcaaaatcaagtatgaatttcactcattgagttaaaagctagccagtgtgttctgacaaatttctaatttgataagatattgccactgaaaatgtttaatttat

SEQ ID NO: 767741 - DNA, 604 bp, Homo sapiens
acataagtggtcacctgggacttttgatataactcttcagaaaaagaagctcttcttctgttaagaatgtacatcctagaattgctgatagacacaagaagggggacagagagaaagagagagagaacatgtcagtgattgagggagggcattactgtcttgatgacactgttgagttcctagatgcagtatccaggttatgggactataaatcctcttttttacataagttactttgagtttctatgactttccgtcaaaggagtcttgagaagtatagttctatgcaactatttaatcatactgaaatcataattgtagaagaaggcatatgcttatttattaaaggtaaagagtgcttccatcccctctrcctcccctgggcaactctaagagcaggacactctagtgcttataagatcagattcaggcttctgagacactcctctcatgttgctttaaggcaaggccccctaaactggtagcctgatcctctagggattctatggaagagtgctattatgtctatgcaaacatgtgctcttctggggaaagagtctgtatttcatcacatagtaaagggaatggtaaacaaaaagaggtt

SEQ ID NO: 767742 - DNA, 591 bp, Homo sapiens
caattctccatagttgtcacttttatagctacattctggatcctgttacctcttaaaacagctccacctctgaactcacaaaatcagacatttcactcactggctataacctcctatcctccttccagggtgctaacttatttactcctgccacactgcttcattaatttcactgaggtgtcatgtctattttctctcctattttctccctatccattctattgtctcttcttttattcatttaatttttaaaattatactttaaattctcgggtacatgtgcagaacatgcaggtttgttacataggtatacatgtgccatggttgtttgctgcacccatcaacccaccatctacattaggtatttctcctaatgctatccctcccctcgcaccccaccccracaggccccagtgtgtgatgttcccctccctgtgtccatgtgttctcattgttcaactcccacttatgagtgagaacatgtggtgtttggttttctgttcttgtgttagtttgctgagaatgatggtttccagcttcatccatgtccctgcaaaggacatgaataaaagaggacacaaacaaatggga

SEQ ID NO: 767743 - DNA, 634 bp, Homo sapiens
tgataatgctatcacattacccttccccagattaattgcattatcaccaactgaaattatctttttgctttggttgttattcgtcttccccaattaggatataagcactatgagatcagggacattatccatctcacttagccctacagatgttccttaacttatgatggggttgtgtcctgataaacccatcataagttagaaaatataatctaaattgaaaatgtacttaatatacctaacctatagaacatcagaacttagcctagcctatcttaaatgtgctcagacactgatattagcctgcagctgggaaaaatcatctaacacaaagcctatgttataataaagtgtttgatatctcatgcaatttattgaatactgtactgaaagtgaaaaacatgatggctctccaatttatgaaggttatgatgtaagtccaaccatygtaagttggagactgtgtgtgtataatccatatgtctgatgtatagtaagcaatatatttattcaacaaatatttgagcatgaatgcctgagtgaacaaagaaaagataactgctctatcttaatcagacttttataaaactaaaatttgtatcctctaaaaggcaactatcctctcaattgtatc

SEQ ID NO: 767744 - DNA, 595 bp, Homo sapiens
ctttgccacaaccttgaactcacaaaaacatgtgttgtatggaatcaaggtttaagggatctagggctgtacaggatgtgccttgttaacaaaatgtttacaggcagtatgcttggtaaaagtcatcgccattctccattctcaataaaccacgggcacaaacaccgcagaaagccgcagggacatctgccctgaaaagccgagtattgtccaaggtttctccctatgtgatagcctgagatatggcctcgtgggatgggaaagacctgrccatcccccagcctgacatccatgaagggtctgtactgaggaagattagtaaaagaggaaggcctcttacagttgaaataagaggaagacctctgtctcctgcctgcccctgggaaaggaatgtctcggtataaaacccgattgtacatttgttctattctgagataggagaaaaaccgccctgtggcgggaggcaagacatgtttgcagcaatgctgctctgttattctttactccactgagatgtttggttggagagaagcataaatctggcctacgtgcacatccaggcatagtaccttccctttaacttattcgtgacaca

SEQ ID NO: 767745 - DNA, 626 bp, Homo sapiens
ggggatccttttttttcccaccctcatgctttcacggagactgtggagcagcttggcaggctcaaattgttttgaggacaaaaggttattgtcaccaggaccttcataatgcagttggcctcttccctggctcccccacctccccttccccctctcctcagatagtttgcacagtggctagatttacaaagccattctcttcgcagtgcccccagtgctgagttcattcctgatggagtcttcccttgctctccctatcacccccttggctctcacctyctgcgcatggtgtcattggtcccggtgccagaatccccaagctggggcccatcctccccatccctttgtgttgagctgctgttgcaggatgcacactgtagctggcattgtgttgccttgagagcagtgtatcccgacccgcagccctctgagatgtctcaggccataatttactggcaagtgtctatgttaccgagttgaaacagcagtttctcacagctcgctttgtggcaccaagtctctgctcctgtgaccactggctattccgctttctcaagtaggatcagcgtacttcgtgccatgtccagccacctggggtggcaagcaagccagggacccagagggac

SEQ ID NO: 767746 - DNA, 626 bp, Homo sapiens
ggggatccttttttttcccaccctcatgctttcacggagactgtggagcagcttggcaggctcaaattgttttgaggacaaaaggttattgtcaccaggaccttcataatgcagttggcctcttccctggctcccccacctccccttccccctctcctcagatagtttgcacagtggctagatttacaaagccattctcttcgcagtgcccccagtgctgagttcattcctgatggagtcttcccttgctctccctatcacccccttggctctcacctcctgcgcatggtgtcattggtcccggtgccagaatccccaagctggggcccatcctccccatccctttgtgttgagctgctgttgcaggatgcacactgtagctggcattgtgttgccttgagagcagtgtatcccgacccgcagccctctgagatgtctcaggccataatttactggcaagtgtctatgttacygagttgaaacagcagtttctcacagctcgctttgtggcaccaagtctctgctcctgtgaccactggctattccgctttctcaagtaggatcagcgtacttcgtgccatgtccagccacctggggtggcaagcaagccagggacccagagggac

SEQ ID NO: 767747 - DNA, 609 bp, Homo sapiens
tccatgatatactcagcaccagcattgccccatctgattttggagggatctcgctcctggaagatggtgataggattttcgttgatgacaagcttcccattctcagccttggcagtgccatggaatttgccacagacaaaatcatactggaacacacagaccatgtagttgaggtcaatgaaggggtcattgatggcaacaatatccactttaccagagttaaaaaccgccctggtgactaggcacccaatacaaccaaatccattgactttgatcttcaccttcaccgtagtgtctcagggatgcagctgtcaatgagagagaagaggcggctgtctgtcaaatgggaggagcagagagctacttatgtacaatttaaatatacaaataagattaagaaaagaaagacatgatattctyaccatccaaagacgatcactggcttgagcctctcatcatccaggtcgctccttggcctgttcttgtgtgatttccctgttcacatgtggcatctctcagaactgaattgacctgcgtggtagagagctgaaggccacccatcttgtaaagataacatccttaaaacctaccctcactctcccgacagcc

SEQ ID NO: 767748 - DNA, 612 bp, Homo sapiens
acatttgagctaggatctagcaatgaagaggcattggccatgccaagaggcagagaaagagcagttcaggtagaggtactgcaggtgcaaaggccctggggtaggtatgagattggtacgtttgaggagctatagaaaggggctgcagaggccagataattgcamggctttgaatgccatagaaaggaatgtagtgtttatcctacggcaatgggaagcccacgtaaggttttaaatggcagctgcccacgctactctgggggtttcctgatggccaagatcctacctcctcttgcactcagctggttggttcaatgtgtcaaaatgcatatgggttagaatagtgatggcatcaaggaaacccagcgccaaagggcacaagccaagagaaaaggctctggggtatcctgactgtcagtttgccatttccacctatgtggggctcttaggaacgataccagtgaatttcatcaggatcctttcccagggattggggtaggatggggcgaggtattaggggcattacctaaacatcttgtaattgaggggctcagactgtgtgccccaggaaaaaagaggaaggaagaactggatttccccatgccccccagg

SEQ ID NO: 767749 - DNA, 612 bp, Homo sapiens
acatttgagctaggatctagcaatgaagaggcattggccatgccaagaggcagagaaagagcagttcaggtagaggtactgcaggtgcaaaggccctggggtaggtatgagattggtacgtttgaggagctatagaaaggggctgcagaggccagataattgcaaggctttgaatgccatagaaaggaatgtagtgtttatcctacggcaatgggaagcccacgtaaggttttaaatggcagctgcccacrctactctgggggtttcctgatggccaagatcctacctcctcttgcactcagctggttggttcaatgtgtcaaaatgcatatgggttagaatagtgatggcatcaaggaaacccagcgccaaagggcacaagccaagagaaaaggctctggggtatcctgactgtcagtttgccatttccacctatgtggggctcttaggaacgataccagtgaatttcatcaggatcctttcccagggattggggtaggatggggcgaggtattaggggcattacctaaacatcttgtaattgaggggctcagactgtgtgccccaggaaaaaagaggaaggaagaactggatttccccatgccccccagg

SEQ ID NO: 767750 - DNA, 619 bp, Homo sapiens
ggatcccaggggaccccaggtgagcattgaggccgggttctcaagagactgaagggggtcggggggttacagagagaggacaggccctttgcttccccgagtaactgttgacaatggtaatacctccatggcccctactatgaatcagataattttctgaggactttatgtatattaactcatttaaactgaaaaacaatccatgtgataggtattgccattgtcctgattgtatagataaagaaattgaggcacagagaggtgaatttatctaagatcacacaggtgggaagttgtgtttgagcccgggcagtccatcatcctaaccatactccctactgcctcaatgagctgacacagcccagccctgataaagggggtggcagaggggagggggatgaggtgccttcctggctgttggcattcatttcattcacatttttatcaggcacccctttcraccagatactgctgtaggcactgaggatacagtggagtataaatagataagagttatattctagcgaggagacacaaatcccatataaatgtacaaataagacaatttcagagaatgccaaatacaatcaagaaaataaaaccaagaggtcatagtgtc

SEQ ID NO: 767751 - DNA, 512 bp, Homo sapiens
tattctggaatattctattatttcctgctagttccatctcattccatcccactccactccacttcatttcattccattctcatttcatttataaaatgacggtcaggactcatgaaactgatctcatggtccactaataggttgcaacctgtgattttaaaaataccagattgggttatattcaaattccctttaacccccaaatcctgtgagtccaatgtaaattgctactmcagtattagggtacaaaattctgtgcacagcaggctcacagataaagtttttgacaaactgaaaaccatgtgttattaattcacttactcattgattcacttcctcatccatcccgttcattacttaccatgtgccaggtactgtgctaggccacattgatataaggtaaataagacacagcccctgttctcaaagagctcttggttacagggacactgattaggtttcctggggttgccaggatcctagcatctgctttccctgagtttccttggaag

SEQ ID NO: 767752 - DNA, 588 bp, Homo sapiens
ctgtaatcccagctacacatggggctgagggagaataatcacatgaacctgggaagtggcggttacagtgagctgagatctcaccactgtactccaggctgggtgacagagcaagactctgtttcaaacaaaagaaaatttaggccaggcacagtcggctcacgccagtaatcccagcactttgggaggccgaggcaagtggttcatgaggtcaggagttcaagaccagcctggccaatatggtgaaactctgtctctactgaaaatgcaaaaattagccaggcagccaggctcagtggctcatgcctgtaatcccagcactttgggaagccaaggagggcggatcatgaggtcaggagttcaagaccagcctggccaacatggtgaatcctcgtctctactacaaatacaaaaattagaygggcatggtggtgggcagctgtaatcccagctacttgggaggttgaggcaggagaatcgcttgaagccaggaaaaggaggttgcagtgagccaagatcacgccattgcactccagcctgggtcacaagagcagaactgtctcaaaagaaaaaaataaaaagaaagaa

SEQ ID NO: 767753 - DNA, 609 bp, Homo sapiens
tcttcccattatttataattactatgtttccaattcagtttctgtaaatatgtgtcattaatattgaacaaattctacattaaattaaaatgaacatatttcattttacttataatttacaaccatgcttatttcttaattattttactttgaattactagatcaggtttccargtttagccccgtgttaatttgcacaaatggctggaggtggtctggggagtttataaaaagctcaaccgttttgctatccacaaggtgaacatgttctttgcagtagaagaaaccgaactcttctattttggtcactgaaacatccatattaaaaaaacaattttaaaggaaaccgtttaaatgcaagtcagcaaacacatgaaaagagtctccccaaaaggatagattaatttagttttattccaggagggcagcagaacgaatcacaggaagtgtcactgacatgggtgttttcttctttggcggagaggctgaccaagaatcgcctggggaaagcacctctaaaaagaaagaattcatcgggacgttgacagctagaactcaaaccgtatgtggtcgccatcttgtcgcctcactccatatccttcattttgg

SEQ ID NO: 767754 - DNA, 459 bp, Homo sapiens
tcagaatttgacattaaatttaattgccatgtccagtttgtctcctttaatccagaaaatttactcagctttcatcttttatgattttgactttaagaattcagcccaattactttgtagaatgttcctcaatttgggtttgttgcatgtttcctcctgattgaattcaggttatgaggtcatgcttttcttttcttttggcaggaatattaaaraagtgatgtttcctcctcagggtgtcataactgtaggcagatgatatcagtttgtcctattattgaggatattaagttggatcacttggttaaggttgtgttacgttaacccatcctaaagtttttattcctgttgtaaaaaaacaaataacagtgaatgtatgtaaatattactatttagcaaactcacattcattattttctgtgtccagcaaagaatgctgcctggatcaattgttatagt

SEQ ID NO: 767755 - DNA, 615 bp, Homo sapiens
ggcttagcaatggtgggaaccccaggcaacttgttggctcactttccctcagtttcattgaaaagaatttctacagtgtgcccacatcacagggcatgatgcactttggattattcaaagtttagaaacatttaggtgattatggtaaatcattyatgcaaacagcgataaatgcaatttattcttttgtgcaatcttacaaggagagcagaaatcgcagcccttttctctagttctcagtccttttggtgacatctagtggaagatctttgaaaaacacatttgcttctatggtgttcctccaaaggtaagcccatccaattaagtcatttaaaccttggttccacctacaagtccctctgtgtttcagtctctgagttagaaattccaaggccaaatggactctctttggctgctggtaagcacgtgccatccgggaccctatatcacagtagtcagaaactctgcatttgaatctggttgtcacttttcagcagtgtgatcacctccagctaaaaaatgcatctaataataggacctgccctatagggttattgcaaggaccaaacgaaatgatacccatgaaggactcagcacagtacctgacatacagta

SEQ ID NO: 767756 - DNA, 581 bp, Homo sapiens
gactctgtcaaataatagtaatagtaatgagatctgggaatataaaaaaagatactatatcatggccaagtaatgtttatttcaggaatgtaaggcagattcaatgatttgaaaatgaatcaatgtaattcaccaaattaacaaagtagaaaatgtcttgatcatcttaatagatgcagaagaagaatttgacaaaattcaacataaatttgtgataaaaactctcagaagtctaggaataaaaaggaatttccttagcctgatgaaagtgcctataaaatatctatggttagcatcttaatgttaaaatataacttctgcatgttaaaataaaaaacagatgtccaatattactattcttattcaacrctatattgggagttctagccagtataataaggcaagaaaaagaaataaaaggcatacagattagaaaggagaaaataaattgtctctatttgcagatgacacaattatctatgtagaaaatctcaatgaatctaccaaaaagttcctagaactaataaatgagtttggcaagatcacagaataccagaccaatacataaaaatcaactgaat

SEQ ID NO: 767757 - DNA, 626 bp, Homo sapiens
gctcagcttcagtagactctaccactggtcagcagtagcagtagctagatcagccttcatagaagacagcccattcataatccctgtattagttatctattgccacataacaaattacctcaaaagttactggctaaaaacaagaaatatttattatctcatagtttctgtgggtcaggagtttgggtaccgttaagctgggtccctctgcttcaagttatctcaagagactgcagtcaagacgcagtrtggggctgtggtctcatctgaagactcaactcagagggattctcttctaagctcaatcatgttgttgttggtaggccttagttcctcatcatgtgggcctctttacagggctgcttcatgacatagcaactggctacccccagcatgagcaacccaagaaaaaatgagaaatagcacccatgatggaagcccttttactaacctgatatcagaagtgataattgtcacttcagccatattctatttatcaaaattaagttaatatggagaggagattacacaagggcaggaatgccaggagacaggaatccttgatggacatcatacaggctgcctaccacagcctgcacccctgcagctatgactactctgttcat

SEQ ID NO: 767758 - DNA, 604 bp, Homo sapiens
aagtgtaaaattattacttttctctttccttgtctgtttgtttatgcaatcagttttaatttgtcgtcagcttaaaataatcagttatgatatgatatttctaaaccttgtagtaacctcaaatcaaaaaacatacaactgayacacaaaaaataaaattcaagaaattaaaaacatactagcagagaaaatcacctttactaaaatgaagacaggaaggaaggaaagaagaaagaagaaaacaaagcaaccagaaaacaacaaaatggcagagtaagttctttcttaccaatgctaatattgaatatcaatggactaaactccccagtaaatacacagagtagttgaatggataaaacaacaggacccaacaatctgttgcctacaagaaatgcacttcgctgataaagacacacatgtactgaaaataaagggatagataaatatattccacgtaaatggaaaccaaaaaagaacaggaatagttacagttatatcagacaaaataaatttcaggacaaaaactataaaagagactacatggtcactatataaggataaaagggtcaattcagcaagaagatataagaattgtaaatatata

SEQ ID NO: 767759 - DNA, 508 bp, Homo sapiens
cctctgtgccacacagagacagcagcctgctatactgggctccctggatccccttcacaaacttctgttgtaatattaataattaccttgctacattgcagtaatgtgtttgtgtctgtcttccccactcagctataaatttctagaggccaaggactgtgtttagttcatctttgtatcccttagttcataataaatgctcaattcagttttcataaatgsatgaaaaagaggatggatggaagaaaggaaggatggataaaaaagaaggaaggaaggaaggaaggaagcaaggaaggaagcaaggaaggagtgacagtgatggaccacattgcttctgactttctgatttctaagaaggaagaaaaacaaggtaattccagcagaggcggcttaattccctcttgtccaatttttgtacaacctcttcacacaccatccgtggcattttccttatcttacaaataccggaggacactagccttcacagaaattatcttggctcctt

SEQ ID NO: 767760 - DNA, 553 bp, Homo sapiens
tgatgacaatctaaatcatctctttttcccaattcaaataagaccctgtctttataccactttgtacaaatctatggacgaatccaacaattaaactggattgttgtccaaccctctaagggaggatcaccaaggtagtatgagagaagagaagttaaatgactttaaaacttacaaagatttttacttttggcaacttctaagacattagcccccgtcttcagactccaagtctgatattgtctagccagcacyctgctctgggagggacagtaagcacatagcctgcatgttctaagtccctgacgtctatggcaggtaccccaagtgacattattatcaccctggccaggacgcagccctcaaaaccttattcacatcatattctaagtagccaccattaatggatcagaacttgcatccaaaatgaaccttctttgtctttgctgatttggagcaggagcccttcttcagcatgaagctgattttctcccttcctcccccagagcacatttgactcaaccttcatgatctatcaaccaaagattctgag

SEQ ID NO: 767761 - DNA, 575 bp, Homo sapiens
tgctctaagttctgcaataaacacatcacctctagatttatgggactagtaggaagaatttatgagagttatgggaggaaagagatatgttcctccctgagaaatatttcaagaaatttctccgagcaaatcaaaaggcagaaggactggagatggaccaccattactccccctgggtcttgaaggctgagagtgggtgcttaaattcaaagagcctcatctaccagtttcttccctgcacaaacaatcctggggcacatgctcagttctggaawgggcattttcaggggaacactgacaaaacagtacatgaacatagaggaatgactagaaagtataaagattcaaaagctacccttgttgaaaagaaatagaagccaggaaggtggaggctgaactgacaaacaatcagagattgctggctaatcataaaacctatttcccccacttcctggacacagagctagatcccatttttcagttgtcctgacaattagtgtgcccacaaactgagttctagtcactggaatatgggtggaagtgatgtaggacacctccgggcttggcctcaaaaa

SEQ ID NO: 767762 - DNA, 504 bp, Homo sapiens
caaagactttctatgtgctgggtgctggagatgcagatgaatcgtaattactgcaggcgattaagcgcttgataacacctaaaaccttgtgtacattatctcatcacctccactgcagcctgcaaagcagatgctgtcactatccctggttttccsatgagggaactgaggctctgaggtctaacctgccagaggtcactgactgggcaggagcacagccagggctgaaacccaaatcttcccccaggcccatgctctccttcactgctgagctcccctctgtcctgcctggtagcatcccccagtcttggggggcacagccctagtcagaactttctggaatggggtcttggggaggaaggaagtgagtcttccttggggacaccccccacactcaaagcctccttacccgggtcgtcctcgtcgcggggcaccttcttgaagcagtcgttgagcgacaggttgtggcggatggagttctgccagccggccttgctcttgttg

SEQ ID NO: 767763 - DNA, 528 bp, Homo sapiens
gaataaatcaagaaaacttttttggggaagcaattttcaaagtatctgtaaaaattgtaaatgcacatatcctctgaccccacaactctactttgcagaatctgttctacagaaatattctcagaagtatgcaaagatataatactcacaaatgtgtctaatagtgaaatagatggaaccatcttaaatgctcatcaattgggaaaggcctaaataaattacagtatattcaccraatggaattctatgaagacattaaaaatattggagagattcaatatgtctgggcatgaaaagctctataaaatatagagctaggtgagaaaagtaagtctcagaacaatatttgcttttcacttaaccaactaacatagagcttagcatggccagggtgttattctaaacctcatgcaaatggtaactcatttaacctcctgtcacaattttatgagatgggacttttgtagatagggaaacgaaggcatggagaggtccactaagctgtccaaggtcacatggtcaggaata

SEQ ID NO: 767764 - DNA, 609 bp, Homo sapiens
attagactacagtgggaccgagacaaggagcataatgaaagctgctgcactgatggtgcaaaaagacacatggcatcattaatgtctctgtggtgagcaaaggtagaacgcaagacagaaaacaaggaaacctctgcgttgtaagaaaagtgttcagcatgggtatcaaccggcatgtagaagcagcaagcatacattccatttttattctattgacaaaaagaattgcaggactaatgcttgctcctattaaaatatgagaaatcacattttaatcctacaaatcaaaggtcaaatatttgttgcaataattccaaaaaaaagagaagatctgtaagacttagcaaayacttattacaaacagactgctttcaattttttatattttctctcaattcaacaaaagtttattgagcagcttttatgtgcattgttttagatagtaggcattattcaaaaaagtaacaattattttccatctttaaggagtttataatgtctctagaaagaaattaactcattggagtagccaaagttataactgatctataaaatgactagtgaacttagaggaaaattatatataaatatttttgtctccattggctg

SEQ ID NO: 767765 - DNA, 685 bp, Homo sapiens
tgtgtgactttgggaggtcacataatctctttgtccttcagtttccttctctgtaaggtggagatattatagtgtctatctcatagagctatttgtaaaatatttaacaatgtctgtcacatagtaaaccctacaagtgcttgtagaatacaatacaaaaatcttgatggaagcccttttattatgctccttctgtatctcagagagttttccaaacatttaaattcagcaaatatgttttgagcactcacctggactggacatgcaccaggcactggtcagaatgaattttcatggtctctgcccttctgggtgctcatgagctagctcacarccttttctttgttaattagatttttaaaatacttgcaacagtgataaacttatgaaaaagtatgaagtgcaatataaataaagtttttttctcgacacatgtgagagtaagttgtcacagaatgcccatcattccagagtactttagagtgtccttcctacaaataaaaatattctcctccataaccacaatacaatttccaaaatcaggacagtcacaggggcacattattaccatctaatcctccaactccattcaagtttcaacacttgtccttgcaacgttttctatagcaaaaggatccaggttgaaattacatgttgaattatgttgtgatatctcttcagtctc

SEQ ID NO: 767766 - DNA, 657 bp, Homo sapiens
gagtgctgagggtggtgcgagagagtgcgtgcctgtgagaatgcacacgtgtgtgcaagccttctctcttctgaacaaattcatcccaataggtctccatttcctcaggacccataacatcacccacttatgggagggctatgaagaacaatgggtgatagctgcaaagaaatattaaggcatgaattattgcttcatgattgtcttctattagaaaagccacatgtgagacaaaacaaacaaacaattcctccccaacgcccccccaccagcatacaaaaagtctacactggctgctcctgagctgagctgttcttaggatacgttgtgtaaaccaggctctcaattgcagaactgcattggcatcaactgtgttagaaaccrtaagtaattttgggcacactgcctaaggggttggagccaggaggactgatctttatgttaacaggcagagcacctgcctgagaaatctgggaacacaggttttcttcccacgacgccttcttcatgcgaattaatctattagctggtatgtgtgtcagtttatttaggagcatatgtgctgacaattggcttccgactgtaaaatacggtcttgagggagaaaatgattaattgcctgctttaaagtgtgtgtgtgtgtgtgtgtgtgtgtgt

SEQ ID NO: 767767 - DNA, 697 bp, Homo sapiens
tcataaaacaagtacttctagaactgcaaaaagacttagacagccacacaatcatagtgggggactttaacaccccactgacagcattagacacattatcaaggcagaaggctaacaaagaaattctggacttaaacttgacacttgaccagttggacctaacagacatctacataatgtagatgttgatgtgctgttgggtttggtttgctagtattttgattgtccacccatcaaccacaaaatatacatttttctcatctgcacttggaatatactctcagatgaaacacatggttggtcataaagcaagcctaaatatattttcaaaaaaactgaaatcatgccaccatactctcagaccatagtggaataaaaacagaaatcaataccaagaagatctctcaaaaccacacaattacatgaaaattaaacaacttgctctgaataacttttgggtaaacaattaaattaaggcagatatacaaattctttgaaataaatgaaaacagagacacagcataccaaaatctctgggatgcaacaaaagcaatgytaagaggaaagttcataacacttaaacgtctaccttaaaaagttagaaagatctcagattaataatctaatatcacacctagaagaactggaaaaataagaacaaacccaacccaactctagcagaagaaaagaaataact

SEQ ID NO: 767768 - DNA, 546 bp, Homo sapiens
tgtttgcctgcctgtctttctccctttttcgtgcctctatctccaagaaagatgaatagagatagaggcagagaggctggatgtggtggctcacacctgtaatcccagcactttgggaggccgaggcgggtggatcacgaggtcaggagttcaggaccagcctggcccaaatggtgaaaccccgtctctactaaaaataccaaaattagccgggcctgctggcagaygcctgtaatcccagctgcttgggaggctgaggcagagaattgcttgaacatgggaggtggagtttgcagtgagccgaaattgtgccactgcactccagcctgggcgacagaacgaaactccttcacaaaaaaaaaaaaaaaaaaaaaaaaaaaaatcattgttttctccagtaaccggctggcctttctcatcttgtcaaagctatttttttttttcaccttaacaagttaacataaggctcccattcagtagatcagaatctcccagtagatctaaaagttgcttcctgctggagcaaactttctcctgttctttatt

SEQ ID NO: 767769 - DNA, 611 bp, Homo sapiens
tctttatcagcagcacgaaaacggactagtaaagtaaattggtaccggtagagcggggcactgctcaaaacattcccaaaaatgtggaagcaattttggaaccgggtagcaggtagcagttaaaacaatttggagggttcagcagaagacagaaaaatgtgggaaagtttggaactccctagagacttgttgaatggctttgatcaaaatgctgataatgatatgggcaatgaaatccaggctgaggtggtctcagatagagatgaggaaattgttaggaactggagcaaaggtgactcttgttatgttttagcaaagagactggtggcattttgcccctgccctagagatctgtggaagtttgaacttgagagagatgatttagggtatctggcagaagaaatttctaagcatcaaagcattcaagagttacttgmaggcattcagttttataagggaagtagagcataaaagctcggaaaatttgcagcctgacaatgcaatagaaaagaaaatctcattttctgagtataaattcaagccagctacagaaatttgcataagtaacaagaagccaaatgttaatccccaagaaaatggagaaaacatct

SEQ ID NO: 767770 - DNA, 630 bp, Homo sapiens
attccttacaggcaacttggagtcctcctcttcaacccataagacgtgtttatctcattcccactgcactccaggccatcttactaatattgttaaatgttgattttataacacctaaccaaaacattaaagaaatattcttaagcctctaggatcaagagcatctagcctggaattaatggttctccataagactacttgtctccacccattcactttattccttccttcttcataacctgccatctcaagttccacatttgccatggtgctttacctgctatctaacacacgccgaccttccatctcctccaaataccacttgtatgtattatgatcttttctctcttagtacscatggttaatttctaccatgtccctaacattgttgcctccatcattggtgaaaactggctggtcacatttgccatgtctatcacaaaacaaaatgcctaatacaagatgtaattaagtcaaaggagagtagacaattctaaaggaggaggaggaggaggaggagaaggagaaggagaagcccagacacaactcactttcccccactacctagtcagatctgtcttcctctccagagtcagaagactgcatgccagctcaacaaagagaaaaatc

SEQ ID NO: 767771 - DNA, 614 bp, Homo sapiens; identical to SEQ ID NO: 742599

SEQ ID NO: 767772 - DNA, 647 bp, Homo sapiens
tgggtggatgccagctgtggtggaattggcaggttgggtcagcctgatctcagaccataggagtggtgttcaggtgcccacagctgcaaattggaatggacagccctcaagcctcttgatggtgtgcttggtactggagaracagaaccaggccagtggcttctcttcaggcccctggtaatgtgttcaggcactagctgtgataggcaggggcagcatggtccctaggttatggcaaaatgttcaggtgggggcggtggtggttgcactgtgggcctgccactggggaggatgagaccacactagtgagaacagcataggtaggaagcggtggggtgtgtgactagctcacacctcggtctcacagcaaattatagcagcaatagcagtgggatttgttttgggggctacattattggggtcttgatttgcatttccttgatgactagagatgttgaacacatttttatatattttttggccatttgtatatcttctttggagaaatacctattcagctgctttgtccattatatattggggtaatttgttaatttgctattcaattgttctttatatgttttggatattaacccttatatgagttccttatatgttttggatattaaccccttgtcagatatatg

SEQ ID NO: 767773 - DNA, 613 bp, Homo sapiens
ggataactacaaagaacataagttgccaaaattacattccacaaagaaacttacatttatacctgagatataacagttttaaaatgcaattatcacccaagtaggctgcaaacaatttgaaaatgaatttgtgaattccaccatcaattttgaggctactgaattcagagtttwccacatacttgctaactttattgaagggttgaatcattgttctatgattttaaatgtaaattgatataaaaaacctaagaatgtatataatttaataaaataaaatatgtccagaaacaactaataattacattatgtattacctgacttgtataaacttgcaaatattcagggtcaaataaattaggataagcatatagttatttttgtatatatatttttgttatgaatgacatctgtattaacattttcatctaaatggttctgtgtatacatgtttttgcttctcttgggtaaatacttaaaagttaaatatctatttcttggttacatgtgagaaccagctacttaatattcccttggggtgtgtgtgtgtaaaatatttcctatatacatatataataataaaatggctcacatgattatggatgctgacaaa

SEQ ID NO: 767774 - DNA, 613 bp, Homo sapiens
ggataactacaaagaacataagttgccaaaattacattccacaaagaaacttacatttatacctgagatataacagttttaaaatgcaattatcacccaagtaggctgcaaacaatttgaaaatgaatttgtgaattccaccatcaattttgaggctactgaattcagagtttaccacatacttgctaactttattgaagggytgaatcattgttctatgattttaaatgtaaattgatataaaaaacctaagaatgtatataatttaataaaataaaatatgtccagaaacaactaataattacattatgtattacctgacttgtataaacttgcaaatattcagggtcaaataaattaggataagcatatagttatttttgtatatatatttttgttatgaatgacatctgtattaacattttcatctaaatggttctgtgtatacatgtttttgcttctcttgggtaaatacttaaaagttaaatatctatttcttggttacatgtgagaaccagctacttaatattcccttggggtgtgtgtgtgtaaaatatttcctatatacatatataataataaaatggctcacatgattatggatgctgacaaa

SEQ ID NO: 767775 - DNA, 619 bp, Homo sapiens
atgggtgctaccaatttcttctttcttttcattctgttcttaaaattactctattgtctttttattgccagaaaactaggcttggaagattttattttcttaggagcatgcctgaagtcttaaaggtaaaacaagaatgtttttgaggaaaatcagaattatcaaccgcaaagatgacagtgagggagggataaagtcacataygagggttagaggccctttctttcttcatccttgtagtactatgactgcgcttgtcagtaaaatcttattaaagaagtttgtgtccacctattttttcgtggaaaactgagataagacaataaatattcaacatgtgcattgaaaaagtacatttaatggtcatatgagcatagggctgaattacttataccttacatacttaatatgtaatatactatgagacttcaattttataggaaaagaggaatttttgttagtaaattgttttcatttataataaatgaataatctttgtactcagtattttttcatgatttttatggcaaacaaaagatacagcatcttggcctactatgtatctgcggcaatgttacataaactgtgtgattataattttcattatccattaaattta

SEQ ID NO: 767776 - DNA, 637 bp, Homo sapiens
ataatgtctgctatactagagagttggaagtactagagagggagagtttatctccagagggtgatattattttaatggttatatcaggaaatatcttcacatctcatcaaagtgacaaggtttcctgcttataaataaatgttttcccaaaatgaccagagcaaaagcataatttaaaatacatcaaaaaagccaaccctccccccacagtaaaaaaaaaaaaaaaaaaggcagggtcatgcatcatgtatactaaaatgggatggacagggaagaaaaaaaaaatcaaaatgagaaaagaagggagggaaaaaagggataggatgacaaaasaaataagagaaaagactcaatacagaaggcaggacagaggctaagaaaaacgaaaatgatcagtgtcagtacacagtaaagaaaccctagagctggccaagtcctgatgctaacagcaggacactgagatacctgcaatgggagtccataagccacagcaaagcacaaaagaacaagataagagggctaccaattcagcaagcacgatcaggggtgatgtactgggacatacaggaaaaggacaacaaagagactgaaaatgacacaagggtttagctaactctggtgactgaactcttgccaa

SEQ ID NO: 767777 - DNA, 335 bp, Homo sapiens
gtgcaggtcaatctgtttagcaactcagcttatgactctaggcaagctacttaatctgtctttatctatacaatggggatcatacataataatgcctatttcataagacagttgtaaggataaatgagtaacacacataaagaccttagcaagaacctggcacatrcacacattataacaccattatcatggtgatggcagtgactgctataaatcttattttcctgaaagatggcactgcctgattgaagtgagattactccccagaggttggccaacctaggaaattcatcccgagaaccattcatggaaaggagaagtgaagtttctgtttg

SEQ ID NO: 767778 - DNA, 635 bp, Homo sapiens
gagatggaaattcatagtgagtaatttcttattactctaaactatcagagtatggtattttctcagaacttacatactcattttggctattttttaggaaacaatctgagaagaaatttcatcatttctgaattttgaaaaatgccagtgattggaaaccctaacaacctaattatgtaaatactttttaaaaatatgaccctgagaagccagatacagtacacgtctgcagtcccagctactagaaagacagaggtggaaggattgcttaagctcaggagtatgagaccagcctaggcaaatagtaagaccatatctctaaaaacaaacaaacaaacaaacaaacaacttaataatttgatttttttaaatgaccctaaccaagttgcttaaattctctgaactccaatttccagatatttaaaaygatcaaatctgacctaccttcctacctcccagaattgttgaggattgaatgaaatgttaataggagccctctaaaaactataaaaagatatacaaattttattttcttacacagaagaaactccgcaaaactactaaaatctctttcttgtacagagaagcaaactaatggatagaaggaaagcaatagcaataattaaccatgattt

SEQ ID NO: 767779 - DNA, 601 bp, Homo sapiens
ggtgagcagaagcagggtggggtgtcgcctcacctggaaagagcaaggggtctgggaactccctcccctagccaaaggaagctgtgagggactgtgccatgaggaatggtgcattccactccagatactacgcttttcccacagtctttgcaacccacagaccaggagagtccctmgggtgcctatgccatcaagaccctgggtttcaagcacaaaactgggcggccatttgggcagacaccaagctagctgcaggatttttttttttaataccccagtggcacctggaatgccagcaagacaaaactgttcactcccctggaaagggggctgaagccagggggccaagtgatctagctcagaggatcccacccccacagagcccagcaaggtaagatccactggcttaaaattctctctgccagcatagcagtctaaagttgacctgggatgctcgagcttggtgggggaagaggtgtccaccattactgaggcttgagggtggttttcccctcacagtgtaaacaaagccacctggaagttcaaactgggtggagcccatggcagctctgcaaagccactgcagcctgactgcctctct

SEQ ID NO: 767780 - DNA, 565 bp, Homo sapiens
ttacaaggtagaatatgccataagacgaatgtagataatatgcaatatgagttcaaaggcaaaagggattatttgcgattggcatgagtcaaaaaactattcaatggttttattattgatatcacaatatggagcaattagaattatcttagaagcaaggatctcagaattaggagaatgctgagaaatcaagtccagttctctctcccatgggttctaaagtggaaatgcatggacttgctttaggtctatgtgtgttcagattctctacattgcctttcattctgtttcctttggagacacactttcttctaccctgccattaagcgggaaagctcctcaaggattaaccacaggcccatctacccacatccatgacttcaataactctctctctctctctctstctctctcatgacacataatctctctccagcctagatttcacttctaagttctagacccatatatttcactgacttcttgtcctctccactaataaaacttaaaagcagcttacacttaacacatccaagatctacctcataatctgccccttcatacc

SEQ ID NO: 767781 - DNA, 440 bp, Homo sapiens
tttgtttattataaaggtcacaactcataaatagccaaataggagaaatgcacttggcaaagtatggtgaggggggcacagcttccatgtcctctctgggcacaccaccctcccagcacctagatagctttaccaacttggaagctctctgaactttatcacttaggggattttatggaggtttcatattgattaaataaatcattggccattgggataaytcaatctctagcccctcccctctgcccagaggtggggacaagaagcagaggccgaaaggctgaaagttccaaccctctaatcatgactttttttgttttttagatggagtcttgctctgtcacccaggcggctggtgtgcagtggcatgatctcagctcactgaaacctctgcctcccaggttcaagtgattctcctgcctcagcctcccaagtagctg

SEQ ID NO: 767782 - DNA, 440 bp, Homo sapiens
tttgtttattataaaggtcacaactcataaatagccaaataggagaaatgcacttggcaaagtatggtgaggggggcacagcttccatgtcctctctgggcacaccaccctcccagcacctagatagctttaccaacttggaagctctctgaactttatcacttaggggattttatggaggtttcatattgattaaataaatcattggccattgggataattcaatctctagcccctcccctctgcccagaggtggggacaagaagcagaggccgaaaggctgaaagttccaaccctstaatcatgactttttttgttttttagatggagtcttgctctgtcacccaggcggctggtgtgcagtggcatgatctcagctcactgaaacctctgcctcccaggttcaagtgattctcctgcctcagcctcccaagtagctg

SEQ ID NO: 767783 - DNA, 546 bp, Homo sapiens
caaagtacaagtttctgtctatgaaaatttagtagatggtgggatggtgtctcctagagatgcaggtgaaagaaaaggaatggattttgggttctgaccactgttcctcctatttccccataactctgagcaagctctctattctgccctaaataatgtcatttgggccgggcgtggtggctcacgactgtaatcccagcactttggaaggccagggcaggtggatcacatgaggtcaggagtttgagaccagcctgrccaacatggtgaaaccccatctctactaaaaatacaaaaattagctgggggtgatagcacacacctgtaatcccagctacttgggaggctgaggcacgagaatcgagaatcgcctgaacctgggagggggaggttatagtgagccaagatcatgccactgcactccagcctgggcaacacagcaacactccgtctcaaaagaaaaataaataaataatctcatctctaacatgggagacgagctaagaaacactgggagtggtgccaggccttactgtctctcagact

SEQ ID NO: 767784 - DNA, 425 bp, Homo sapiens
ctgtattgaactaaaactgaacacttgtattccatgtgacccagcaagtcaactttcacagaagcactgcctatatgtaaaaatagctatatgtatttacctaaagatatacacacaatggttggtaccaaccctgaatataatagcccaaaactagaaacaacttaaatgtacatcamcaatagaatggatacatgaattgtgctgtatttatacaatggaatgatgcaatggaataaactgtgtctacatacgaaagttcaaggtctgaagattttttttccttttgaccagtaaattgatttttattattattgttgcctttatagctctaagactcttcctttatcctacaagtacaataatttcccttcagatatgtcttgacattgattattcattaatgcatcactgcagattcaggt

SEQ ID NO: 767785 - DNA, 610 bp, Homo sapiens; identical to SEQ ID NO: 741022

SEQ ID NO: 767786 - DNA, 540 bp, Homo sapiens
aaaataaaatatgatagcaaagcataaattatacaagaaaaaaaggtgtcttgagactgttggaaagctggaggaattgtaggctatttgaaagtgtatatttggatttctaaaatagacttattattcatgtaattgtttgtctgcattcaatttaaacctgtacatacattaaaaggtttcaaatttcaaaatatrtgtaattttaaacagaaaaaaagaatcagaaaactagttagcatgcaaaaatacagtggatccattatcttaagtttccataactgtgtcattatatcagccttttaaacaaaaaataccttctccatattttgttagatatggatatgcatggatgaaaaaatactcatgtttggtattctaaggaattatagctgaccctgtttagttctctggaataattagagttatatctagtctaccatcaaaactagtgtctaggaaataaagaggcaaatataattcacaagagttaaaaataaagatcctaccgggaaatactgcaatttatattttctggtc

SEQ ID NO: 767787 - DNA, 666 bp, Homo sapiens
ttttatttggtttgaccaaggcccagtcgttcccctgttcatttgcctccaccggatacccagcagtgataatccacttgtgttagtaaattttcccactgctgtaaagacactgagactgggtcatttgaaaacaaaggaggtttaaytgattcacagttccacatgtcttgggaggcctcaggaaacttacaatcatggcggaaggggaagcaggcacctccttcacaaggcaggaggagagaaggagaacaggagaaactgccacttataaaaccatcagatcttgtgggaactcactcactatcatgagaatagcatgggagaaaccgcctccatgatcgaatcacctcccagcaggtttctcccctgacacttggggattacaattttgattacgatttgagataagatttgggtggggacacagacgcaccatatcaccacctatctccaaactgggtcagttatcctatagatttcagctatagaactgtaggcactcccctctgtttgtcccaccttgtaaaccttcttgtgggcttgccttccaccaccagctatcgccacatttccccaaaatgcaggacaagttctagattctttatatcgcccatgtgctgagaatggctgggaagtgctaacttcctccctttctgccttccc

SEQ ID NO: 767788 - DNA, 666 bp, Homo sapiens
ttttatttggtttgaccaaggcccagtcgttcccctgttcatttgcctccaccggatacccagcagtgataatccacttgtgttagtaaattttcccactgctgtaaagacactgagactgggtcatttgaaaacaaaggaggtttaattgattcacagttccacatgtcttgggaggcctcaggaaacttacaatcatggcggaaggggaagcaggcacctccttcacaaggcaggaggagagaaggagaacaggagaaactgccacttataaaaccatcagatcttgtgggaactcactcactaycatgagaatagcatgggagaaaccgcctccatgatcgaatcacctcccagcaggtttctcccctgacacttggggattacaattttgattacgatttgagataagatttgggtggggacacagacgcaccatatcaccacctatctccaaactgggtcagttatcctatagatttcagctatagaactgtaggcactcccctctgtttgtcccaccttgtaaaccttcttgtgggcttgccttccaccaccagctatcgccacatttccccaaaatgcaggacaagttctagattctttatatcgcccatgtgctgagaatggctgggaagtgctaacttcctccctttctgccttccc

SEQ ID NO: 767789 - DNA, 666 bp, Homo sapiens
ttttatttggtttgaccaaggcccagtcgttcccctgttcatttgcctccaccggatacccagcagtgataatccacttgtgttagtaaattttcccactgctgtaaagacactgagactgggtcatttgaaaacaaaggaggtttaattgattcacagttccacatgtcttgggaggcctcaggaaacttacaatcatggcggaaggggaagcaggcacctccttcacaaggcaggaggagagaaggagaacaggagaaactgccacttataaaaccatcagatcttgtgggaactcactcactatcatgagaatagcatgggagaaaccgcctccatgatcsaatcacctcccagcaggtttctcccctgacacttggggattacaattttgattacgatttgagataagatttgggtggggacacagacgcaccatatcaccacctatctccaaactgggtcagttatcctatagatttcagctatagaactgtaggcactcccctctgtttgtcccaccttgtaaaccttcttgtgggcttgccttccaccaccagctatcgccacatttccccaaaatgcaggacaagttctagattctttatatcgcccatgtgctgagaatggctgggaagtgctaacttcctccctttctgccttccc

SEQ ID NO: 767790 - DNA, 666 bp, Homo sapiens
ttttatttggtttgaccaaggcccagtcgttcccctgttcatttgcctccaccggatacccagcagtgataatccacttgtgttagtaaattttcccactgctgtaaagacactgagactgggtcatttgaaaacaaaggaggtttaattgattcacagttccacatgtcttgggaggcctcaggaaacttacaatcatggcggaaggggaagcaggcacctccttcacaaggcaggaggagagaaggagaacaggagaaactgccacttataaaaccatcagatcttgtgggaactcactcactatcatgagaatagcatgggagaaaccgcctccatgatcgaatcacctcccascaggtttctcccctgacacttggggattacaattttgattacgatttgagataagatttgggtggggacacagacgcaccatatcaccacctatctccaaactgggtcagttatcctatagatttcagctatagaactgtaggcactcccctctgtttgtcccaccttgtaaaccttcttgtgggcttgccttccaccaccagctatcgccacatttccccaaaatgcaggacaagttctagattctttatatcgcccatgtgctgagaatggctgggaagtgctaacttcctccctttctgccttccc

SEQ ID NO: 767791 - DNA, 519 bp, Homo sapiens
ttttgcagatatattaataattaaggttattaatcgctcactttgagttaattgaaagggagattacctggttgatcctaaccaaattccatgagcccttgaaaagtacagaattttctccagctggtagtagaagggaaagtcagagcaactcaaagcacaagaaatgyctgctttgaaggtggaggaagccacttgaaaggacctgagagtgacatttaggggctgagagcaactccaggcaaacagtccacaagaaagcagggacctcaatcctataaccacatggaactgcattctgccaacatcctgaatgtgctttgaggcgggctcttcccactgagcttccagatgagaatacagctctgctaacactttgacttcaaccttgtaagaccctgtgcagaaaacctagtgcagctacccaggcttctgatctacagaactgtgagataataaactgatgttgttttaagcagctaagtttgtgaaaattttttattcattagaacattaata

SEQ ID NO: 767792 - DNA, 519 bp, Homo sapiens
ttttgcagatatattaataattaaggttattaatcgctcactttgagttaattgaaagggagattacctggttgatcctaaccaaattccatgagcccttgaaaagtacagaattttctccagctggtagtagaagggaaagtcagagcaactcaaagcacaagaaatgcctgctttgaaggtggaggaagccacttgaaaggacctgagagtgacatttaggggctgagagcaactccaggcmaacagtccacaagaaagcagggacctcaatcctataaccacatggaactgcattctgccaacatcctgaatgtgctttgaggcgggctcttcccactgagcttccagatgagaatacagctctgctaacactttgacttcaaccttgtaagaccctgtgcagaaaacctagtgcagctacccaggcttctgatctacagaactgtgagataataaactgatgttgttttaagcagctaagtttgtgaaaattttttattcattagaacattaata

SEQ ID NO: 767793 - DNA, 573 bp, Homo sapiens
tattggtgctagttaatagtaacaaggtgatgtcgattattagtaaatctgacaggatttctcttcattagcaatgaaagttataagagttcaatatatcaatgaattcaaaaattttggatgtaaaaggagatttgaagagttagatcagaaagctatgagctttagtgactctgtgatggaagaccacacagagggaagaagagatttggaatcgtgcctgatttccattcctatctttgtgctttctagtcacatgctcttgggcacttctctgagaaacaagggtggtgctgcctcctcatctgaatttagtgaggattaatgcaaataatccacgtcaagccccagcacatascatggcagaaccagacccaaaactgagctccctgctgacttcctatagtaaccctaattccaaagcctcccctagaagcagaagatagctactgcactgaactggctgaaggcagcctgcctggaacttgctgaaaggatttagtcattttaggcccagtgattagaactaatggattattctgagggctgagacctgggcttacccctgaccct

SEQ ID NO: 767794 - DNA, 566 bp, Homo sapiens
tctaaattcccactttttttgtcttataaatagctgaagtgttcgttgaactgttcgatctgggcaaaatgcaaactaacttgacttgaccaaagtttagtaaggcttttcccctttgcccaggtacctaaactttggcccactttgggcactggaacatggagccatgttaaagttagaggcccctccttcagggaactggctgaactcaggaaaaagtgttccctagtcaatgtcccatcatacctgtcacccatcccatcctagcacccagttcttgtttacttctctccataaaagaaagcctatttgtgtttgtcctctgagctacagatctcatagatctcagagccttttccctattgtcgtagtcaccttccccttayggcaataatccttttgaataaagtccctccttacataagtttaagctattttttttttttaaatgtgacattattaacagcttttaaaatgtctaggcttttttaccaaataatctcacttctggaaatttaatcaaaggaaataattatatgcacacatagtttatttttttaaaaaga

SEQ ID NO: 767795 - DNA, 626 bp, Homo sapiens
ataagattaataaagtgcttgctgtacttcaggcatatgctgagaatcgtggtgatattaatgacatagtctatgagtcatgcccagtgaccaagggctcatgtgtcctctcaacatttgaagcagtcttcgaagctacccaaagccccactggatgttgatctcatcagaatatggttatcaatgatctttgacccgttgtcatcctgaatcaaggataatttcgatcttagaataaatggaggtaaaaagamgtaaaagacttttatcttgagcccctcactatagactggtttctctctctttcaagggcctatctctcccctcttttgttgaaagcaggcctgctcaactatactcaaagcataggaagctacttaggtcatttgcatatttttagtattttatattcctttgcaacctttgtaacttttactttctacccaacgtgagaatccctcctacacagtaaggcattcaggttaaatatctagagccgaacattacccagactcaagttctaattcctgcactgtcatttacaagctgcatactgagccaagttgcttgaccatttcaagtaaaaccgggatgactaaaatgcctctatttgttagaacattata

SEQ ID NO: 767796 - DNA, 550 bp, Homo sapiens
attgcaggtctcctccaagctgttctattgctcaataaactcagactcctcttcgtcttgctcgccctctacttgtctgcattcctcattcttcctggtcacaggatgagaactcaggacccaccaaatggtgaggctaaaagagtggtaacacaaacagggctgaaacatgctccttgctcaccaccttgaaggctacaagaaggagagaagagctgtgagctccctgaaccagggctgtgactccyactttggggccctgtggttcctagagtctccaagctcccggacaccaccaagtcccctggtgccagcagtagaagcaccttgcagtgcacctggtcaagccacagccttgcaatgagccagcacctgtgcgagcatctggaactgcccgccctgctgcagcagctggcatacctgactgtgcacagtgcccggaccccacacttgctcattttcacacccctcgccactcctttccagtctcttcagaagcataggatccaggacagtagtgtgagccaagcacagcctaccaggacgagtg

SEQ ID NO: 767797 - DNA, 489 bp, Homo sapiens
gtaactaaaaccatatgcaaaaagaaagatatgtagttttttctgtgtgtgtatatttatatataattgtatatgtatacatacacacacaccaaatacatatggtatgcacattgaagcagttgagagacataactgatgtctatggcccacttcaaaatgcataaaagtgattgatgtgatggataaagggatggaaagatgtacagatacatttaaaaagtcagtatagtataatattactgtagaatctagatggtggggatatagatttatactgtaaaatttcttcatgttttcyatgtttgaaccattttctaatacaatattggagaagaacatagatgaaactggaggttaccatgagataggaagcaatcttttatctcatgacaacaagggaaaaagctgaaaataaaaagattattgaatctgccgagtcaaaatgaaaagcttttgggtcaaaaatttttaaaaattaacaaagtt

SEQ ID NO: 767798 - DNA, 604 bp, Homo sapiens
tacaacccactgcacaaggaaacagttcatgctcacggataggaagaatcaatattgtgaaaatggccatactgctcaaagtaatttataaattcaatgctattcccattaaactaccattgacattcttacagaattagaaaagattactttaaaattcatatgataccaaaaaagagctggtatagccaagacaggcctaagcaaaaagaaygaagctggaagcatcatgctacctgacttcaaactatactacaaggctacaggaaccaaaatagcatggtgctggtacaaaaacagacacatagaccaatggagcagaatagagaacctagaaatattactgcatatctataaccatctcatctttgacaaatctgacacaaacaagcaatggggaaagggttccctatttaataaatggtactgggagaactggctagctgtatgcagaaaattgaaactggactccttccttacactttatacaaaaagtacctcaagatggattaaaaaattaaatgtaaaatcaaaaactataaaatccctgtaagaaaatctaggtaatatcattcaggacataggcacaggcaaagatttcatg

SEQ ID NO: 767799 - DNA, 631 bp, Homo sapiens
ttttttccctagacagattcaattggcagcctttgcagattcctttgcacacaaatgacaccacaacaccaaagctctaggagcaagcagcaaattctataccttggtaattctgccaacaagatacagcattgcaagctaatttttcttttccttaaggaaaaaaagcagaaaggatagartgaaaagctctctataagccttgacaagaaaacatactcacatatcataagagagcaataggctttagagctttctatgatttttaatgcttggttgactctacaacagccccctcagacttatcacttgccacaatatcagaagatcttggatgctgagaacagatgtaattagcatgactaactcttatagtcccaaagcttcagacatcagcagcagagaggagccaagcagacacaggatgaataatgaataatgagaaaggttgcaaaatatgctttaaaattatatgtctaatttttcttaaatccacaaaacttctgttaaatgaagctatgccatttcattaaattatctacatgttatttaagaaaaaaaaaagaaaacaactttagtataatttcaaatgtctccttcacacagacacaatcatgctcatggccctctg

SEQ ID NO: 767800 - DNA, 618 bp, Homo sapiens
catgtctgatatgttttttattaaatttattccgtagtatctcttgttctttgatgctataatgaatggtatttctacttctattttcaattgtttattgcaaatatgtaaaactacaactaatttttatatattgactttgtaacttgcaacattgctgaatgtgcctattagttgtatattagtttttgtagattccttagagttttctatgtacccgatcttgttgtctgcaaacagttttctttccttccaatatctatgtctttcatttctttttcttgctttatttagtattagctaccctaatatgacattyaatggatatagtgaaaaggccattcttacctttttcccaatgttaggtagaaaatattaagtcattcaatactatatgattttaatacatagccttttaataatttgatgacatttcattttattcctagtttgttgagagtttttatcataaggtaagctgaatttcgccaagtgcttcttctatatcaatcatattgtttggtattttgtgtaagtcaatctagggagttacattgattcattttcaaatgttaagccaacattgtattattgtcatgagcctcacttggtaatgaa

SEQ ID NO: 767801 - DNA, 618 bp, Homo sapiens
catgtctgatatgttttttattaaatttattccgtagtatctcttgttctttgatgctataatgaatggtatttctacttctattttcaattgtttattgcaaatatgtaaaactacaactaatttttatatattgactttgtaacttgcaacattgctgaatgtgcctattagttgtatattagtttttgtagattccttagagttttctatgtacccgatcttgttgtctgcaaacagttttctttccttccaatatctatgtctttcatttctttttcttgctttatttagtattagctaccctaatatgacattcaatggatatagtgaaaaggccattcttacctttttcccaatgttaggtagaaaatattaartcattcaatactatatgattttaatacatagccttttaataatttgatgacatttcattttattcctagtttgttgagagtttttatcataaggtaagctgaatttcgccaagtgcttcttctatatcaatcatattgtttggtattttgtgtaagtcaatctagggagttacattgattcattttcaaatgttaagccaacattgtattattgtcatgagcctcacttggtaatgaa

SEQ ID NO: 767802 - DNA, 618 bp, Homo sapiens
catgtctgatatgttttttattaaatttattccgtagtatctcttgttctttgatgctataatgaatggtatttctacttctattttcaattgtttattgcaaatatgtaaaactacaactaatttttatatattgactttgtaacttgcaacattgctgaatgtgcctattagttgtatattagtttttgtagattccttagagttttctatgtacccgatcttgttgtctgcaaacagttttctttccttccaatatctatgtctttcatttctttttcttgctttatttagtattagctaccctaatatgacattcaatggatatagtgaaaaggccattcttacctttttcccaatgttaggtagaaaatattaagtcattcaatactatatgattttaatayatagccttttaataatttgatgacatttcattttattcctagtttgttgagagtttttatcataaggtaagctgaatttcgccaagtgcttcttctatatcaatcatattgtttggtattttgtgtaagtcaatctagggagttacattgattcattttcaaatgttaagccaacattgtattattgtcatgagcctcacttggtaatgaa

SEQ ID NO: 767803 - DNA, 506 bp, Homo sapiens
cttgctagaacttctttctctaattcccttttcatttcggttatcttctgctctgaaacaaatggcccgtgctccatgaaatttatgtggaatttacaacaggaaatgacctctgacagacttgttttcgactcctttcttcccatccccaccactcagtctgcatccagtgccatggcctggcacctgcttgcatccatagccccgtggatctcatgatcatgaagaatttacaccaagaratgtctttttctctcaattaacacaatggcattattttgttacgtggttaattattatttcagaataatttcactgttcggatgtgttcagtgtataaactcctggataaaagcttttccactgtattcatagatagtccctgctttaaatcaagccacaaatagggtctcaaatttaaaagataaccaggaatcagcaaaaaggcatgaagctgcactggctttatattgttagtctttcttccagcaatcttttggccttcg

SEQ ID NO: 767804 - DNA, 595 bp, Homo sapiens
gtttaatggactcacagtcacacatgactggggaggtctcacaatcacgggggaaggcaaacaaggagtaaagtcacgtcttacatggcagcaggcaagagagcatgtcccagggaactgccctttataaaaccatcagatctcataagacttattcattatcatgagaacagcatgaaaaaaactcaccccagtgattcaattatctcccaccgggtycctcccatgactcatggggattatgggagctacaaatcaagatgagatttgggtggggacacagtcaaaccagattagacactaatagatgactttggcctaatgtccccatttctgtttacagaagctgagcctcagaaggatcaattgtctggttcatggctacagagaaacctggtagaagagccctacagagatggctattcagattctgtacacactgccagggcttttggagtgggctcatgtttccaagctatgcatatctgagtggcaagacagaaactatcttctataattcaatgtgctattacaccacaccccattcagacagaaatgtataatccagccacctccagaaaacctggtctaactg

SEQ ID NO: 767805 - DNA, 595 bp, Homo sapiens
gtttaatggactcacagtcacacatgactggggaggtctcacaatcacgggggaaggcaaacaaggagtaaagtcacgtcttacatggcagcaggcaagagagcatgtcccagggaactgccctttataaaaccatcagatctcataagacttattcattatcatgagaacagcatgaaaaaaactcaccccagtgattcaattatctcccaccgggtccctcccatgactcatggggattatgggagctacaaatcaagatgagatttgggtggggacacagtcaaacmagattagacactaatagatgactttggcctaatgtccccatttctgtttacagaagctgagcctcagaaggatcaattgtctggttcatggctacagagaaacctggtagaagagccctacagagatggctattcagattctgtacacactgccagggcttttggagtgggctcatgtttccaagctatgcatatctgagtggcaagacagaaactatcttctataattcaatgtgctattacaccacaccccattcagacagaaatgtataatccagccacctccagaaaacctggtctaactg

SEQ ID NO: 767806 - DNA, 623 bp, Homo sapiens
gagagggttgcataggagctgaaatgtttcacgcaatcagcgaccttttatgcagagatcacaaatgcaccaccatcctaccttccaattcctggacgtaaactccccccactgcagacttccccaaggctcacgtaggcccacgtccactttatttcaggcataggtgagttcaggaacccaccctctgctcttccatctttttgtccaggttgctcagagacttccccgtggcaagtagggatgagttctcacgatggagctgcacaatctgagttggccagcaaagattaaggttgatcatggaccttctggaaggttctgggtgtasacaacctggcttaaaaatgttaaacaggagctcaaaaaaaatttagcccctctctcagacctaattaagatcgcggcactcatccatgcccaagaaccttttatcatctctctcttttacaaagagagcctctctgctgtgttttttctgcgatgtctcctttcacaaaagcagccagtttgtgcattcatgtctagggtaaggaagtcttcttgtaatcaactgaactgatcccacagatttggcagaggggaattcttgcaggcaactgagctctcactcacagctttga

SEQ ID NO: 767807 - DNA, 598 bp, Homo sapiens
gtcattcccaaggatatactaatgaatttgtagccttaaaaagaaaaaaaagtttcatttatacattcacctgaggtgaaagaagtcatgttaacattctgagttttatgtggactttccataggctgaagtactctctccactgcacctcctgctctgtatagctcaccttaatttccattttgtaggccccaatgtgagaataattttttaaaaatgagactttgagtctgaatgtagtaatgactaactatcttccttcaaatgtgactttaagtttaaaatgtttaaactacatgaagtagttcaaggtccaaaatgtgcttcaggttgctccttttccttccrtctttcactcagccttctctttctctgcctttcttgtctggagaatcatctcccagcttggcattctagcaatggcatcagtcgaagatgaggccggacgccttcatcacatactgcccacttgtgctgaaatgctttcatatttatgcctgatatctccagctgaagagtgaatttcttgaggttgggaactgtgtaacatggcatagaactcatacagaaaaggggctcaaaagccatctctatcaat

SEQ ID NO: 767808 - DNA, 547 bp, Homo sapiens
aaaaaataaattcagagaaaatgaaaataaacataaaggagacagattttaaccagagattttaaagtgcacagtaggtagtaatctgtcgtcatcatcattgccatgctatttctctggaggtcaagagaggcttacaaaaacaaataatattagtctcccaaccagttcaaagctctggacgaaatagtcaagaccgagatctaggcagcgtgccagtgctgctaggtgaacttcaactttcttgtaaaaactgcacacacagaaaggtagcaaataactcaatgccacttttaaattttgcactcagcagctcaatcaagagttttaattaatgcctccataatgctcccatagaacagagcatccacctaccrcctcagtatttactccacagtgcttgggtgtagagagtgaactatatgtgtgttagttactttaagctgcattatagggaaagctagttctctcatcttgaatctacatacaaggaaccatttgctagtacagggttataatctgaaaaaccacactccagagggtccat

SEQ ID NO: 767809 - DNA, 679 bp, Homo sapiens
atatgaagaagaataagactagacccctacctctggccatataaaaaaaaaaacaaacctaaaatgtatgaaagacctaaaggtaaactccaaaactatgaaactactggaggaaaacaaaggagaaactgcacaatattgggctgagcaaatattttctgaataagatctaaagagcacaaacaaaagcaaaatgtacaaatgaaattctatcaaactaaaatgctcttacagagcaaaggaaattattaacggagtaaagaggtatgggagaaaatatttgcaaactatacatccaatattaaactatacattctagattaatactcaacatacataagaaacctaaatgtctcaacaaaaaaataagaagaaccctattaataagtgggcaaaagaccttcatagacacttctcaaaagaatacattcaaatggccaacatgtacatgaaarattattcaatagcactaattatcagggaaattcaagtgaaaaccacaatgaggtattatctccccccagttagaatggctgttaccaaaaagacaaaggaaaataagtgttggcaaggatgtgaagactacaaaacacttaatgcactattagtggtagtgtaaactagtacagtcattatggaaaacagtttgcaggtttctcaaaaaattaaaaatagaact

SEQ ID NO: 767810 - DNA, 571 bp, Homo sapiens
agtgtgttcagacctgtcactcagagcttctccaaggtcaatgaatattctgcatctaaagcagctccaaatttagccaatccctcctccttcctactgtcttcatgctcaaatggtgacctattctacatgaatttattgctttctccagacataattcacagctatctttcagagaacagaaatattctattcttaatttttgtttttaagcctatggcaaaagtattgaaaagaaacattctrttgatttgttaagagagaaacttcaggcaaattaaatttaacaacgtttaattgagcaaagaatgattcatgaattgggcagcacccagaaccagaatcagttcagagtggcagtgcagctgtcatgtggccagacacagttatgaacagaaggaaaatgggctacaggaacagcgggttagttacagctccgcttttgccttatttgaacacagctacgactcagctgctgtgattggctgaaattcagtggttgtgataggctgagacttagcaacttgttacaagagaaaattacaacctatttatacccctacggttcact

SEQ ID NO: 767811 - DNA, 630 bp, Homo sapiens
ctgcaggcccaggtgccttcgtaacgttggcatgttccttaagcacatgctctttatcagaagtttgcaccagggaccatgtggcgatcttacctttttatggcaatgtgtggttccaaagcactttaacatacaatatctcactttagcctcataacaacctgagaggtagaaagagtcattgttatcctcatttcatgattgaaaaaacaaacaaacaaacaaacaaaaagaactaaacaaaaccaagacttcaaaaactgtggagcarcctaagatgagacatctgggaatgggtagagacgggaccacgcatgctgctaggaactgtggatacagccagaaagaaggcagatccagagcttcggttgagagggtagacagccaacgaagaaaacaaaataatcctattaacattaaaagaagtggcacacatatcaagatgaaaaagaaacgcgtccttctttgaatatttccagaaatatttagccttgtttatcgtaacctaaaagcatatcttaaggtagaagactctaaaagctgaataaatccaaaagataaaaagaatagacttcaaggtaacaattagacttccaaaaccagtcccaggatgcttctaagggccagtac

SEQ ID NO: 767812 - DNA, 454 bp, Homo sapiens
aaacaatatattaatttaataaaattaaagttaataaaaaatgagtaagtgtcttacttccaaattacctaagtgaaaagacccaatgttactaggagaaatgattactagcagtaattgatctaattgtgaccactttttctcctttaagatttgtaccttttaaaaaatgactattaggagagcttaatctggaagacaaaaatagtctgttctaatagcctgtttagaactttaattgaaaatgtggttgcrtcttcctccaattaagctaattgaagtggaattctgattgggccctgtgagagaggagttccccagccgaggctcatagaataacagctgactctaaaaagagaaaaatagaagcaaatgcttaggaagactggtgaatcaattctagagggatttcaatctacttattgactgatatatgcagggaaagtagccagaa

SEQ ID NO: 767813 - DNA, 646 bp, Homo sapiens
gcaacaaacatgggggtgcagggatcccttttatatacttatttcttttcctttgaataaatacctaatagtgggattgctagattatatggtagttctatttttagttttttgagagacctccatactgttttctmtaatggctcttctaatttacattcccagcaacagtgtatgagttcccttttctctgcatcattgccagcatttgttatttttgcctttttgatactagccattctaactggggtaagatgacacctcactgtggttttgatttgcatttccttgatgattattgatgttgggcatttttgccatatacctgtgggccatttgtatgtcttcttttgataagtctatttggaacatatgtccactttttaatggaatttttgttgttattgttgagttgagttccttgcatattctggatattagttcctagtcagatgaatggtttgcaaatatttgctctcattctgcgggttttctcttcactccgttgattgtttcctttgctgtggagaaactttttagtttggtatagttctgtttatctgtgtttgtttttgtttcctgtgcttttgaagtcttagtgataaaattgttgccttgaccaatgttcagaagcgtttctgctatg

SEQ ID NO: 767814 - DNA, 611 bp, Homo sapiens
cagatatatctgcttaaacctctgtgtgcaagccatttgcagtggcgccattggtggtttatgcagtcagcctaagagataggctgctgcttcccaaggccaccaacttcagcaaatctgtttcatgtttgaattcctattcttttacagactgtgtcataccactaactagtctaaaattccactctcttgattatttcatatgagttcatcatgtctctccaactagcttccttctttgagctaggaaccttgtcacaattattttatttcacatcaaatacctggtatgttgctggtctcatcgaaagagttcagtgaatatcttgctagtctttaagttaaatacattgagacacaaatgaccatgtctacagataakacatgctcccacattgtagtcttttaccaaactataaaatattgactttcaaaaaggaaactttcatttctgatgttcagaaatgtaacatttccatcaaaaagtcttctttctttttttcagccttgttataaatttcccaaccggttagattgtccaataaaggatccttctgttttgtttacctgtttatcaatgtatgagcttgctgtgtattattgagcaagtc

SEQ ID NO: 767815 - DNA, 636 bp, Homo sapiens
cagtgaacaagaagtagcaaacacactggacttattggtgagacatttatgtgccagaagatggaaaatacatctgactaaaattcagggaccttctacctaagtaaaatttctaggagtccagtggtgtgaggcctgttgagatattccttctaagatgaaggatgagttgctgcatttggaccctcctacaaccaggaaagagtcacaatgcctagtgggcctacttggattttggaggcaacacattcctcatatgaacatgagaaggctttgcaacaggtccaggctgctgtgcaagctgctctggcactttggccatatgacccagcagatccaatggtgcttsaggtgttagtgccagatagggacgctgtttgaagcctttgacaggcccccataggtgaaacacagtggaggcctctagaattttggagcaaggccctgccatcttcttcagatagctagtctccttttgacacagctcttggcctataactgggctttggtggaaactgaatatttgactatggatcatcaagccatcatgcaacctgaactgcttatcatgaacagggtgctttctgacccacctagccagaaagtgggctgtgcatagcagcattgcatcatcaa

SEQ ID NO: 767816 - DNA, 621 bp, Homo sapiens
actggacttattggtgagacatttatgtgccagaagatggaaaatacatctgactaaaattcagggaccttctacctaagtaaaatttctaggagtccagtggtgtgaggcctgttgagatattccttctaagatgaaggatgagttgctgcatttggaccctcctacaaccaggaaagagtcacaatgcctagtgggcctacttggattttggaggcaacacattcctcatatgaacatgagaaggctttgcaacaggtccaggctgctgtgcaagctgctctggcactttggccatatgacccagcagatccaatggtgcttgaggtgttagtgccagatagggaygctgtttgaagcctttgacaggcccccataggtgaaacacagtggaggcctctagaattttggagcaaggccctgccatcttcttcagatagctagtctccttttgacacagctcttggcctataactgggctttggtggaaactgaatatttgactatggatcatcaagccatcatgcaacctgaactgcttatcatgaacagggtgctttctgacccacctagccagaaagtgggctgtgcatagcagcattgcatcatcaaatggagttg

SEQ ID NO: 767817 - DNA, 621 bp, Homo sapiens
actggacttattggtgagacatttatgtgccagaagatggaaaatacatctgactaaaattcagggaccttctacctaagtaaaatttctaggagtccagtggtgtgaggcctgttgagatattccttctaagatgaaggatgagttgctgcatttggaccctcctacaaccaggaaagagtcacaatgcctagtgggcctacttggattttggaggcaacacattcctcatatgaacatgagaaggctttgcaacaggtccaggctgctgtgcaagctgctctggcactttggccatatgacccagcagatccaatggtgcttgaggtgttagtgccagatagggacgctgtttgaagcctttgacaggcccccataggtgaawcacagtggaggcctctagaattttggagcaaggccctgccatcttcttcagatagctagtctccttttgacacagctcttggcctataactgggctttggtggaaactgaatatttgactatggatcatcaagccatcatgcaacctgaactgcttatcatgaacagggtgctttctgacccacctagccagaaagtgggctgtgcatagcagcattgcatcatcaaatggagttg

SEQ ID NO: 767818 - DNA, 536 bp, Homo sapiens
acaatcctgtgtggagccagcatcaggaccacccgggggcttgtgaaatacagatatctgggcaccatctctgaggttctgggtcagtaggtctggggtggggccaagaatttgcttttctaacaggttctcaggtgctgctgctgcagctggtctgggggtcttattttgagaccccctggtgtaggtcgtggaaagccaccaaaaggctgtgaccaggagagccagagtcccmtttcccctggagaaggccatgtgcaggctgggtgggaggggaggtactccagcaggggcgaggcctccgcagcccagggaggggagcagagggtggtggaggtcgtggggggaagagcaactcaggggcagcctagccgggtcctctcaggccccctccctggccccacagctgcggccctcacttcaagcccattagcacatctcctccagaagacgcaggcctcctggctcctcactcatttgaaattttaattatctgccagagcacgattcccacagccacccccactaggggtggg

SEQ ID NO: 767819 - DNA, 604 bp, Homo sapiens
gcaggaggcagcagagggaggatttgaacccaggcaacttccatctagaatctgtgctctgaacagccttctcatgacattggcaggacatggcaaatactacatgatgggaytccacacactgacatttgggaagcaccgagcagggcatccttcctgcctcagccattacaagaccccaaaatgcaccagagtgatgaggcaggggcgtgacataggagctgtctggatccttccaaccacggagcctccccagagctcagaggcggaagcagtggctgggcctgccttgtgcaaacatgaagtgctcatgctgtctgcactgaatgccctcaatgactgctggtaagcagggaggaacgcggtgagcctgtcaccctggagtgctgcaggggagcaggagagaccaaggcagaggggccagtgaagagacaggtctttaggacggatgctgtggctgcaggacaacacttcagtcacagagccccaatgtcatcaggatcctctggatacatggctctcagctccttacacacaatgcaagcaatatatatcatcatttttttttgtaatcattattttgtgatcaatatttttgtaatca

SEQ ID NO: 767820 - DNA, 609 bp, Homo sapiens
taatcaatttttttattgtttttgaggcagggtctcactctcttgcccaggctggagtgcaatggcacagtcatagctcactacagccttgaacttctgggctcgagcaaccctcctgcctcagcatcctgagtagctggagccacaggcatacaccaacacacctgtcttattttttatttttatagatacaaaaatttgggtctcaccaggttgcccaggctggtctcaaactcctggcctcaagaaatcctcctggttcagcctcacaaagctcygagattacaggtgtgagccactgcgcccagcctcaaatattttttttaaactaattacatatcaaaatattagcagtttttctggtaggtattctggacaatttttctttatactttaatgagtgtgcgtttctcttaaagaataagctttaatatatatacacccataataccttcaaatacatttttaagcacttaaagactaacagtggttatctctcagcgggattataaatgttttggtttttttttttttttgtacattttagtattttttgaaatttttttaataagcgtgtattacatacagtaaacaaaagcacattaatgt

SEQ ID NO: 767821 - DNA, 653 bp, Homo sapiens
ttcctcttaccaagtgctgtagccatgtctcagtcttcctttcattccactttcttagcaacatctcacacacttagctatcactgcttccgtttcttgaaatctgtgactctctctcactttgtttctttcacatctcagtacaattttctgtctcatttcctgatttctccttctcagatcaatactgtagtgaaatattctaggacttggttctttgtyttcttctctactctatcttcaaatccagaaaattctatctagtgccacaatttcatatatcatttgtatcttgaacacttatctcatttagaaactcctgactgcatttcccattgccaatctgacaaatctgattgtctaacaagcagcttaaactttacatgtttgactcagaaaccctattttcccacagaaacctatcccttaacttgagatttcccatctcaataaatgtcacttaactccattgtttgtcaaggataaacccaagctgtctattcttaattcctctcttttcctcatcccacattcgaacagcttcagaataacaagtcgattctaacaccaaagtgtctccagaattgactacctaatagctttactactacaccttaagtccaaataaccatttctttttgtccacacactgc

SEQ ID NO: 767822 - DNA, 653 bp, Homo sapiens
ttcctcttaccaagtgctgtagccatgtctcagtcttcctttcattccactttcttagcaacatctcacacacttagctatcactgcttccgtttcttgaaatctgtgactctctctcactttgtttctttcacatctcagtacaattttctgtctcatttcctgatttctccttctcagatcaatactgtagtgaaatattctaggacttggttctttgttttcttctctactctatcttcaaatccagaaaattctatctagtgccacaatttcatatatcatttgtatcttgaacacttatctcatttagaaactcctgactgcatttsccattgccaatctgacaaatctgattgtctaacaagcagcttaaactttacatgtttgactcagaaaccctattttcccacagaaacctatcccttaacttgagatttcccatctcaataaatgtcacttaactccattgtttgtcaaggataaacccaagctgtctattcttaattcctctcttttcctcatcccacattcgaacagcttcagaataacaagtcgattctaacaccaaagtgtctccagaattgactacctaatagctttactactacaccttaagtccaaataaccatttctttttgtccacacactgc

SEQ ID NO: 767823 - DNA, 585 bp, Homo sapiens
gaattgtatgcttactagagtagaatgctattttgtgcataattggtagtcttcaacctagagcacagaaggttgggactacttaatattctgttacagaaagagacaaaaaaggtggtaacactatattttgctctttgccacatcacaaatccctcttttacatttaaaaatgaagataacatgaaattgattaaagcatatttactttcaattcctgggcagttttagttgaaaaataaaggttttgaactattgttcaaaactattattttgtcaatattttctacaatgtttttgggtttcaaagtgacttcagtaaagctgtcatatttggagacattcaactttcaaatggcataagacagtgttataaytggactaagagcataaatataataaataacttagacaaaggccactcaattaaaaaaagttttgtccttacccatatataggcacaatccttattattcaaatattccattttccttccatcaggtaagtggtgaatattctaacctaacaattgattataattcattataatttaatttgaaataattataattgcatataattaaa

SEQ ID NO: 767824 - DNA, 575 bp, Homo sapiens
tcctaaatttataaccatatgaattcaccttaatatagatgacatactattttatctatgcttttttggcctttcttttcatcacctgcatgtggcaatgcatccacagtgacatatgcagcaataattcatttatgaatatgtcaaaattaattcatccctttgtatgttaatggtcatttgggtcatttctacttttttcctcccacttaaaataatgctgtaaactttcttgtatatgcttcctggtgagtgtatgagtaatttcattactggatagcatgggatctattamttcaactttaccaaataatcctaaattgttcccacaggagtacctgagagcctccactgcccaacatctttagtattatttgtcataatcaatttctaaaatgtatatattagtgagaaacattattgtcaaaccatgtcatgtttttaatttgcatttccttaattatcaatgtcatttctttgtaagtataattactatgtaacacattaggcaaagaattactgagcatactactgaatcctgagtcaaaaaagtttactgcaattgtatcatgttt

SEQ ID NO: 767825 - DNA, 629 bp, Homo sapiens
agccgtgggagacccatgcattgcaaggggctaaatcttatgtacttgctttctcctcttgctataaataaacgttgtatcacttgagtctggtgtgcatgttgtctcttcatagtgacctagaaacttgcactgtttccctgatggtacttacctgccttttgaccttggccacactgatgttacactttatcctgcagcacaagcttatcacctaataaaacatgaagcaacaacttaaaaacatccagaaaaaatagacaaacttttttattttatttttatttttttgagacagagtttcgctcttgtcacacaggctggagtacaatggcgggatctcagctcactgcaatctccgcctyccaagttcaagtgattcttctgcctcagtgtcctgagtagctgggattacaagcatgtgtcaccacgcctggctaattttctatttttagtagagacggggacgaggcaggcagatcaactgagtaaagagatcatttctacagcttctacagatattcaaagtatttttaaatagatttaaaatctgtagatgttatagtattctatagatgataaatagatactagaagataaaagcacagcataaacaactttatactatt

SEQ ID NO: 767826 - DNA, 586 bp, Homo sapiens
agacctttgccagagcatctaccacatactgtgtaccttctaagtcacagaaatttagataaaattgatagttcattatttgacctctaggaaatctccagcgaatgtgacaaaccaccaggcaattatatggtcctgtgatgagtaccaggtgggaaaaggttcaacctaggccatcatggggaaaccccatagatgatgtgtgagctgttatcctagggttaaaagagtaatgcactggcctcaatgttgagcacagaggaggtgacataggcaaggcagggattgatggaaggaccagcacatgttggaaactttccccacaggaagtgccagttgtgggttggggartgaagtggggttgtcttacagaggttgccaggatcacatcgtgaaaggcagttgcaggtcatgtttaggatctggggttttacccagaaggtaatggtggggaatgggagggcatagcattttcctgaatgattcattgcatttgacaaattttctcagggaagactgtaaatgacttgagattataaaggtatcaggggtcctggcagcctctagaagttacttttcaaacacg

SEQ ID NO: 767827 - DNA, 628 bp, Homo sapiens
ggatatctgaagctttatttctatctctcttaaaggaggaaaataatcatatttcatcacagtatttaagtaaggatcaaagactctaagataactgaaagcactaaattaattttcttcaccaagatcacaggaaaaacagaaactacaaggagaaatggaaaaagctggaccttccctatggacatggggaaaagtggctatctggaagtcaagggaaaagagagatttttctttataaaataaaagaaatgcctgaaccaccaaactggaccacaagcttgatccaaggatggtgcctgaccctgcacaaggaactctcaggaaaggaacacttcaatgagggtgataaggaaactgtgtagttttaagggaggcctgagccctgactcrtcagtttgcttctaagtgttctctcagcccatcaccaactcagcttctgacctaatcaaccccccaccccgtgagcccagctcctactttcaaccccaaccccagactgaaaccttagcacctactttagctaacacctctagctccaaacaccctacatcctattccagtctaacctcatcatcaaacattacctgtattcaaactccatatctttttttcaaagaagtgcatt

SEQ ID NO: 767828 - DNA, 628 bp, Homo sapiens
ggatatctgaagctttatttctatctctcttaaaggaggaaaataatcatatttcatcacagtatttaagtaaggatcaaagactctaagataactgaaagcactaaattaattttcttcaccaagatcacaggaaaaacagaaactacaaggagaaatggaaaaagctggaccttccctatggacatggggaaaagtggctatctggaagtcaagggaaaagagagatttttctttataaaataaaagaaatgcctgaaccaccaaactggaccacaagcttgatccaaggatggtgcctgaccctgcacaaggaactctcaggaaaggaacacttcaatgagggtgataaggaaactgtgtagttttaagggaggcctgagccctgactcatcagtttgcttctaagtgttctctcagcccatcaccaactcagcttctgacctaatcaaccccccaccccgtgagcccagctcctrctttcaaccccaaccccagactgaaaccttagcacctactttagctaacacctctagctccaaacaccctacatcctattccagtctaacctcatcatcaaacattacctgtattcaaactccatatctttttttcaaagaagtgcatt

SEQ ID NO: 767829 - DNA, 642 bp, Homo sapiens
aataaaaatgctttcaaaactaaacaaacctttatattaagacaatttaagaagacacaggattatgccagcacttttctaaaaacacacatagtattttaactactctaactttgcctaagggggtgttataggaagtcagctggacctaagatggcctctgaattctggcattatgcatgcattttagaaatgacagcagagtaggagaaaagattagcctcctcctatgtgcctagcatttcatctaaaaatttctgtagctcagaatggtttttcttaatgaaaagaatgccctgtcttcttatccatttctgggtaataacacacagaagttaatgtaggccagacaygatgtagtaagacatgacaagtagcaaccacagctggagcaataacaagagagttttctacactgtcaaacaccaagccggatatgtcaaaactctaataagggtgtacaggtggggagcttgtgatgcaccccaaggaatgagaaaatctccagcgttgtgtggaaaataataatttccaaggggaaaccttaatggtagggaaatatttatatgtacttaggaataataccagtattacctttcaacatattttatcagattgactccctgtgaggtaaagattatt

SEQ ID NO: 767830 - DNA, 658 bp, Homo sapiens
ctcccacatggtcaatattctgaattatgaaaccatctgcatacacataattgaagccagtttcccacaggtggccctcaatttgtgaaagttcatttccaaggtagtaaaattgattacatttgcttctggaagggcaacaagaagtggagcccttcctaattttctttcatagaataatgtttctaatttgtccacttcaaaacccacaaatatatctaatataagaaaaaaataaacaatagcaataatgaaaataggtatcatttaatgaatacttatcatgtcataggcaaacactaagtatattataaatgttattttatttaatgtaccctagcagatagctgttaatatccctgtttttgtcatgaagaaacaggcatagagagatttggtgatgtagccaattaaatgacgtagatatagcttactgaaaaataaaaagcaagcacatatttattctgaaaggagtttgataacaaatmaggaaactctctagcctcgtatattataataagaaattttaaaacagtattctgtaggtacttaggacatcccaaagcacttgattgaaacctctgtatgtatacatatttatatattaatcaatgttataaactataaagctaattacagtttattacgtaatatatta

SEQ ID NO: 767831 - DNA, 574 bp, Homo sapiens
atggggcagaagaagtgcctgtcttggaatgacctgcttaggccctcaaaaggagcaggcaccagtaaccactgcaaatagatgactgctccagctgactactccaccttcttcttctttttttttttttttttttttttaagacagtctcactctggtgtccaggctggagtgcagkggtatgatctcatctcaatgcaacctccatctcctgggttcaagcgattctcctgcctcagcctcccgagtagctgggactacaggcacatgccaccacacctggctaccttttgaattttagtatagatggggtttcaccatgttggccaggctggtctcaaactcctgacctcaagtgatctgcctgcctctgcctcccaaagtgctgggattacaggtgtaagccaccatgcacagctgactctaccttctagatttaatttgattaaaagatatgacacagactgaaaataatagagtgattcattcatttggcaggaaactataatatttcaggaacaaacaagaacctgtgactacaaaaaggtggtcatgggaggatcaaggacatgag

SEQ ID NO: 767832 - DNA, 574 bp, Homo sapiens
atggggcagaagaagtgcctgtcttggaatgacctgcttaggccctcaaaaggagcaggcaccagtaaccactgcaaatagatgactgctccagctgactactccaccttcttcttctttttttttttttttttttttttaagacagtctcactctggtgtccaggctggagtgcaggggtatgatctcatctcaatgcaacctccatctcctgggttcaagcgattctyctgcctcagcctcccgagtagctgggactacaggcacatgccaccacacctggctaccttttgaattttagtatagatggggtttcaccatgttggccaggctggtctcaaactcctgacctcaagtgatctgcctgcctctgcctcccaaagtgctgggattacaggtgtaagccaccatgcacagctgactctaccttctagatttaatttgattaaaagatatgacacagactgaaaataatagagtgattcattcatttggcaggaaactataatatttcaggaacaaacaagaacctgtgactacaaaaaggtggtcatgggaggatcaaggacatgag

SEQ ID NO: 767833 - DNA, 574 bp, Homo sapiens
atggggcagaagaagtgcctgtcttggaatgacctgcttaggccctcaaaaggagcaggcaccagtaaccactgcaaatagatgactgctccagctgactactccaccttcttcttctttttttttttttttttttttttaagacagtctcactctggtgtccaggctggagtgcaggggtatgatctcatctcaatgcaacctccatctcctgggttcaagcgattctcctgcctcagcctcccgagtagctgggactacaggcacatgccaccacacctggctaccttttgaattttagtatagatggggtttcaccatgttrgccaggctggtctcaaactcctgacctcaagtgatctgcctgcctctgcctcccaaagtgctgggattacaggtgtaagccaccatgcacagctgactctaccttctagatttaatttgattaaaagatatgacacagactgaaaataatagagtgattcattcatttggcaggaaactataatatttcaggaacaaacaagaacctgtgactacaaaaaggtggtcatgggaggatcaaggacatgag

SEQ ID NO: 767834 - DNA, 577 bp, Homo sapiens
gctgcactgttgtccttccctacttttgagacttttggtgtcagactgagccactgatggcttctttcttcatcatcttgcagatggcctatcatggggcttcaccttgtgatcatgtaagccaattctccttaataaacttcctttataatacaatatcctatagttctgtccctctggagaatcctgactaatagacagattctgccaatrtgattgtgtccaggtggtgagacaaattcctggtgcttcctacttctccatcagcctagaatcctctcccgtctctgaatttacttttcatcaataattgatgatataaaagtgaggaagctgatttccatgtgattggaatgtctgtaaagttagtgtgaaaaaggattaaagggtttttttccttttgtatataaaaggttgtttgatgtttacaatgctggaatgttttgtctctcatttctcttttgggaagtatttggagcttaatttatagaaatctgtcatttgcacactataaataatctaatttaaacacagtctatcatcaaaggggaaaaatatatgcaaaaaatatatattt

SEQ ID NO: 767835 - DNA, 588 bp, Homo sapiens
ctgcaagacagttgttactctttcgataactcgaaggcagttttaattattaactaattagggtggaaacagaggcttgtcattttcattattctcatggcacacattgttaataattttctggcttttggcatagtgatatagggcacttcagttatggcttaaaaaaggggaggagggcacatcttggaggtggattaaataaagatttagcttctttgcctcaggattgatatgtgccattttaaagcaaggctcatgagatctctggatcragaggtcagtactaaatacaggaatgaaaatgctgcaggctctggggaagggaggtggttagttctgccctgcctggggagaaggggttcatagcaagcaatttcacatgggctttgaagaagtcagaatcgggtaaggatggggtgtgggagagagaatatatgacaaagagaaccagagggaaaaggacatggatgtgaggctgtcgagcatttattcagtcaacaaatatttattgctgtctgctatatgccacatacattctaagccctgggcacagcagaaaattaaatgggcatgtttctactttcc

SEQ ID NO: 767836 - DNA, 597 bp, Homo sapiens
atgcacatgcactgttcccggagcgcctgtgccctgctcctcacacccaggagtcgggggaggccgggtagtggctcgtttcatagttcagttcactgtagggacgggcagctgagtagaagtcaacgtagttgccggtggacttgagacccaggtgcatggtgtactcgctggcgggagggcgatggtggacctggtcctcgaagaaggactcatcgtaatttcttgtggaattctgaaatggctggtwggtctcgtaatcttttctgctgggctcctgtgggactggctgtgctgaaacctaaacgggaaagaagagccacactgggttacttggtttcccttgactcagcctgcctcttgccccggcacccaactctccttcaaagaataggctgtgtatatccaggcattcaccactgtggccctgcttctccaaaactgccaactgtcattggctttccttttgaaaattggatcctaggtccacgtgctatcattctacataatctttatcatggcaaaatatacataacataaaacagcttgctttaagaaatgttgaagtgtaagattaattaggtggcattaagaaca

SEQ ID NO: 767837 - DNA, 593 bp, Homo sapiens
tgcattcctgggataaagcccacttggtataattttttttttttgtatatagtgctgtattcaatattttcatattttgttgagaatttgtatgtcaatcatcatgaaagataccggtgtgcagtttttttttttctttttataatatctgtgttaggtttgatactggggtaatataggccccctataatcagttggaaaatattttctcatcttttattttctagaaaagatttgtggaattggtattatttcttctttaaatgtttgataaaattcacaagtgaaaccatctggagtttttgggtttttttgttttttttttttccggaggttttaccttacaattttttaatagatatagtcagttcaagttaccaatttcttcttaagtagattgtggtagtttgtacctcttgaataactttcgcatgtcatctgaaatttatttatgggcatgggcctgtggtgatacttctcaactagacttttaatgcctgagcaatcagtagtgataasccatttttttcattaaaaatttacgccaatgtacatactgctgttgttggacaaagtattatataagcatcaat

SEQ ID NO: 767838 - DNA, 372 bp, Homo sapiens
ctcccaaagtgcaagtggacgtgtgttacagtgtgttcttttagccttgccatccacagatggcttaagtgttagacagctcagtggaccctctaccttttcacaagggcaaagggccagtgcaacagctttctgtatcyggagctcttgtctggcatccaggaaaagtcaggtcacacagggacttgaaggatgaatgtgggggttttattgaccggtggaggtggctctcagcagaatggatggggagctggaagtgggatggagtgagaagatgatctcaccctggaatgtggccatccagcagctgattttcactctgactgtccccagccaaattcctctcaatgttcagacattccttctctctgc

SEQ ID NO: 767839 - DNA, 629 bp, Homo sapiens
gcaccatatcaatgggatgaaggatgaaaaccacatggtaatttcaattgctgctgtaaaagcccttgataaaattcaacatccctttatgagaaaaaccttccaaaaccagaggtagaaagaacatacctcaacacaataaaagctatacatgacagacacccagctagcatcatactgagtggggaaaaactgaaagcctttcctgtaagatctggaacaaggcaaagatgcccactttcgctactgttcttcgacatagtattggaactcttagcaagagcagttagacaagagaaataaataaagggtatccaaactggaaaagatttcaaattatccttgtttgctgcagatgatatgatcttatattttgaaaaacgtaaagactctatcaaaagactattakaactgataaacaaattcagtaaagttgcagtagacaaaatcaacatacaaaaatcacttgaatttctagatgccaacagtgaacaatctgaaaaagaaatcagtaaactaatcccatttataattgctacaaataaaataaaatacctaggaataacattaaccaaagaagtgaaagatctctgaaatggaagtataaaacattgatgaaaaaaattgaa

SEQ ID NO: 767840 - DNA, 616 bp, Homo sapiens
agtcatttgttcccctaggtctcagaactttgtccccttgaaatagtctttccttccaggtcctagcccatctgcttcttccaccaaaattgaaatgccccattccctaggctctacttgataatctgatacagtagtttatgagtagctcttaattgttaatgttaaacaaaaacttattataatgcccctctattccatttgcattctaatcagggacatccacaaccacaaaacacaaacacattatcattatcactaatgatagcattaccagtaccaaattgttgttrggaaaagtgtttgggggctgggtcaacagtcattccaacggtcagcataaggctgatgaagaaagtaaaactatagggtaatgcagaacactacagtattaatgacattcaaaatgccctccttagccctcacaggtgaaatctcctggagtagcaccttttaataggaagaccctaggtttcttctttgtgcgtgcacagtgcccatgttagatagttgtatcattagtaaaggtcttgacctgttttaggaaattctttgctggagttttggggatgaaggagaagcaaacattgtaggagtcactttataatgatgaaca

SEQ ID NO: 767841 - DNA, 572 bp, Homo sapiens
tgttaaacactagttaatattctttaccttatttaacattcaaactatagcatttgaccttcgttttcatgctgtgtaatattggtagttattaacagtcaccatttgatatgatagttttaaattacataagattgctaggcaaagggctctgattgcctttaatcaagaagtgaggagtattctctctgggcaaatgaggtacctttttaggactttaaagagggaaaatgaatcagactgcttttattgttttcttgttttgctttacttttaggtgttttyccccccttctttggcttatctgtttatcaatatataatgtccaataaaaggaaacatcaaatacaactgcattttatttaaaggaaaataccctctggacatgaaatcatttccagataaaggtcaaatactattatttctttgttcaaataagtattttctgttcatgctcagttcattctgtgcttttatctttctgtggaatgtgttctctattaccatctagtgaacacaggcttttatatgcattgtataattataaaagtgtgatactaagtttaataggc

SEQ ID NO: 767842 - DNA, 597 bp, Homo sapiens
gccctaatctaccaagttgtttctagcatcactggatctaccggggctgtgatgattaatattaagtgtcaacttgattggattgaaggatgcaaagcattggttttgtgtacatctgggtgtttctgggtgttgctggaagagattaccatttgaatcagtgcactggagagggaaagcccagtcttaggaagacccccactcccaatgtgggtgggcaccattcaatcagctgccagtacagctaagaaagcaggcagaagaaggtggaagaagctgacttactgagtcttctggctttcatcattctctcatgctggatgcttcttgccttcgaacatcagactccaagttctttggcccytggactcttggactacaccagtggtttgagagggtctcttggccttcagccactgactgaaagctacactgttagcttccctacttttgaggttttgggttttgaactgagacactgctggctccctgctcctcagcttgcagacagcctatcatgggactttgtgagtcaattctccttaataaactccttttcatatatacatatatcctattagttctttccctctagag

SEQ ID NO: 767843 - DNA, 620 bp, Homo sapiens
acatgatatctgggtgaggacacagatccaaaccatatcattctgtctctggcccctcccaaatctcatgtccttcttgcattgcaaaatccaatcatgctttcccaacagtcccccaaagtcttaactcttccagcattaactcagaatttattttggttttgtatcttgcaatgttactgaattactttatcagttataacagttttttagtggagtctttaggtttyctaggtgtaagatcatgtcatctgtgaacaaggatgtttttacttcttcctttccaatttgaatgtcctttattttattatcttgcctaattgctctggccaggatttccagtattatgttgaataataggggtgaaagtgggcatccgtgggttgttccagtccttagaggaaagtcttcaatttttcctcacttcagtatgaggttagttgtgattttatcatatagggcctttatgattttgagatatgttccttcattactcatgttgattagtgttttcttaataaaggcaagttctgatcaatttttctgagggtttagatgtagggttatattaattcacatgaaagcataaagtaaaatttcttgatcatatccccacaaat

SEQ ID NO: 767844 - DNA, 556 bp, Homo sapiens
gtgaagtgggaaatcaggggtctcacagccttcagagctgagagccctgaacagagatttgcccacgtatttattaacagcaagccagtcattagcattgtttctatagatatttgattaactaaaagcatcccttatgggaaatgaagggatgggccgaattaaaggaataggttgggctagttaactgcagsaggagcatgtccttaaggcacagattgctcatgctattgtttgtggcttaagaatgccttatttaagcagttttccaccctgggtgggacagttgttccttgccctcatttccataaacccacaaccttccagcttgggcgttagggccattatgaacatgttacagtgctgcagagattttgtttatggccagtttttggggccagattatggccagattttggggggcctgctcccagcacttggcttattcatctctccttttcctctaatccctgacaaccaccaatccttttactgtcttcatagatttgttttttccagaatgtcatatcattggaataatacagtataaagcctt

SEQ ID NO: 767845 - DNA, 556 bp, Homo sapiens
gtgaagtgggaaatcaggggtctcacagccttcagagctgagagccctgaacagagatttgcccacgtatttattaacagcaagccagtcattagcattgtttctatagatatttgattaactaaaagcatcccttatgggaaatgaagggatgggccgaattaaaggaataggttgggctagttaactgcagcaggagcatgtccttaaggcacagattgctcatgctattgtttgtggcttaagaatgccttatttaagcagttttccaccctgggtgggacagttgttccttgccctcatttccataaacccacaaccttccagmttgggcgttagggccattatgaacatgttacagtgctgcagagattttgtttatggccagtttttggggccagattatggccagattttggggggcctgctcccagcacttggcttattcatctctccttttcctctaatccctgacaaccaccaatccttttactgtcttcatagatttgttttttccagaatgtcatatcattggaataatacagtataaagcctt

SEQ ID NO: 767846 - DNA, 611 bp, Homo sapiens
agcaagtctcaaacactaagatgagtcccagatcagaagatgtcagacatttgaaggaaactgccactgaaggaagcattagattcaccaaacagaaccaagacccaaggaacaaatgaaaatattaaaatatgtgcaattgatgattcattcaatttatgttcaacaaatatttattgagcacttacatttatacacrgaagaaccaaagataaaactctaagaaggaaaatttggtatagataaaatcagaaaaacagttaataaaatttgtagatatctaaattattggtggatataattaaaaaagcatgaatctaaaattctaaattatctcaatattccacaggtgggaaagttagaggtggaagcatctaaggataatagataccaattagtttaggctttgatagaaaaatgtaaaagtatattaaaacttcagcaggatattagtataggtaatatatattaaagatgcagcacattaagtacttgaaataagtataaaatttgttgcttgaagacattttatggatgtctgcttacattttactgtataacattttctaaatttcactttttttatagttttctttgtaaattaggtatat

SEQ ID NO: 767847 - DNA, 618 bp, Homo sapiens
cttttcaacaaaggtgcgaagacacttcagtggtgaacggatagtcttttcaacagaaggtgtttgtagaactggatattcacatgcaaaagaatggcccctatcttataccatgtacaaaaattaactcaaaatggattatagacccaaatgtaagagctaaaactataaaagtcttagaagaaaaactaggagcaaatttctgtggccttggattaggcagtggcttcttagatatgtcaagaagcacaagtgaccaaagaaaaggtagataaattaaacttaataaaaataaaaattyttgtccttcaaaagacatcatcaagaaagtgaaaagatgactcacagaatgggagaaaacattaacaaatcaactctctgataaaaatatatattcgatcccaggttttagcaccaaaaaaaaaaaaaaaaaaaaaaaaaaagaatatataaagaactcttaaaacaacaaaaagataacctaacaaaaagacaaaaagacaactggcaaataatctgaatagatatttctccaagaaggtatgcaaatgaccaacaaacacctaaaaagatgttcaacatcattgaccatcaggaaatgcaatcaaaaccacagta

SEQ ID NO: 767848 - DNA, 530 bp, Homo sapiens
gttttcataagaccttgggcctgatttccagtgggaaaagggctgaaaaaaatttggcttcatttccaagtatctttgcatatttccccaattgcacagaactccaagcttccccagattacctcgtttcaatgacatcgaatctttcaaagggaatgtaataattccacagaggacttagcatttctgacagcttacctcccactgtcctcagagcttcataaattatgctgcctctgaatgtgagctgggcagcaccattttcctggccccttaygtgattcatggtttctcttaactatgtcagtgccttgtcagcaaagctgttccttttggacacagtatgatgtgatctgcttcttggaggacagcttgctaattatgtactgattttatatactgatgattttgttttacaatttcaaggtaactaataactattaactttagaaattacttccaaattcagaaaacattaccatttaattaacaatctgctctctgcaatacactgtgacctgagaaaccac

SEQ ID NO: 767849 - DNA, 463 bp, Homo sapiens
aaacaatatattaatttaataaaattaaagttaataaaaaatgagtaagtgtcttacttccaaattacctaagtgaaaagacccaatgttactaggagaaatgattactagcagtaattgatctaattgtgaccactttttctcctttaagatttgtaccttttaaaaaatgactattaggagagcttaatctggaagacaaaaatagtctgttctaatagcctgtttagaactttaattgaaaatgtggttgcrtcttcctccaattaagctaattgaagtggaattctgattgggccctgtgagagaggagttccccagccgaggctcatagaataacagctgactctaaaaagagaaaaatagaagcaaatgcttaggaagactggtgaatcaattctagagggatttcaatctacttattgactgatatatgcagggaaagtagccagaaaagttctga

SEQ ID NO: 767850 - DNA, 602 bp, Homo sapiens
taaagttccatatgctgtgtggagaagtgccttgtttaaaaggtgatttccaggttgcaaactcagccaaacacacgcaggctaaaatatcattaggcaaagaaattttactgcccctacttaaatctaaaaatgatcataagtgttcccctctgcaatgatatracaaaaatattactatgttccctatacttccatcgcattttagaagagtacggcattttgaagaaaaagaaatctgtttttttaaccactgaactaaccaaaaatattcagattttcaaaaaatataacaggaaaccaataagataaattagtcattcattcttacatccactccatagttaaaaatgtttattgagagcctagtatgtgctagaaaaacatttagaccatctacacactttgtatataaacagtaaactgcacccaagaaagccttctgttagagctagagaacaggtttgcatgatggtttatataaattttttagaacctttttaacaggcagccaaaccataaagcaaaaagacaacagtttatatgtatccttttaaagggggattaatttaggtagagacacagcagaagctttctgaatt

SEQ ID NO: 767851 - DNA, 660 bp, Homo sapiens
gatgttgggaggaaggaaaggaggaaagcagaatgagagggaaaaagagggaagtaagagggagcgatggaaagcagaaagaaggggagagggagatggaccaaagattctcatgtttaaagagtgttagaaattctgactataatctacccctacagtatctgatgaacactaatagaytaataaatagaaaataaatgaggccaacatgtcttatgggtgaaactaattcacatggcaaaggtgatgtagcttcatttccaaagtgaagatctatattcaatacagcctcttccgacattctgcccacatacccaggcccctaaaatcttcattatcatcaaatgccatggcaccagggggagaatgaagtccaggatcaagggtctctgatctccctttggtttaaagcaactgtatagtatctttttttttttaaaaaaaaaaaaaagcttcatgatagagtgaaaagaacaagggcttcagatgacagctttgtatcacctcagccccttacttgctgtgtgaccttggtcctcattacttaacatctctgaatctcaatcatcctatttacaaaatggggacaaaaaagctcctctgctagattgttgtgacagttatttaatcgtgaaaatacatggaaagcaactagcaatg

SEQ ID NO: 767852 - DNA, 511 bp, Homo sapiens
tcatgtgatcacaactaaagcacacaccaccatctggtggcaacatatataaattgcagtatcaagttttaagatacgggtaaactttatgaaatttctccctgctagtgtgaattttaaaatagtgactaggctgggcgcggtggctaacgcctgtaatcccaacactttgggaggccgaggtgggcagattacctgaggtcaggagttcaagaccagcttgaccaacatagtgaaaccctgtctctactaaaaatacaaaattagctgggcgtggtggtgggcacctgtaatcccagctactcaggaggytgaggcaggagaatatcttgaaaccaagaggcggaggttgcagtaagctgagattgccccattgctttccagcctggacaacaaaagcgaaacagtctcaaaaaaaaaaaaaaaaaaaaaaaaagcatagtgactacactaagagttaccattttatgatcattttggtaacagattcttgtattgatgattagcagat

SEQ ID NO: 767853 - DNA, 424 bp, Homo sapiens
tatcaggcatttgccataataattaagaatcctatgaaaggcacactgtaaaccatgcccacattccctggagccgcataaggacagggtgagagtttgttgccactgtcctgaaagacctcaagaccaaattattagaaaaaaaaatacaacacttgagcttaggaacactagacggcacatcagcgctgcacttcgggaccattttaaacagtgaaatcaacatcaaagagcatataaatgtgaaaaatgtgacactcaacaggcctcaawagcgacacttctttgcagtgcaaaagttaaaacaagaaagtaaattgtcaccttgctcagcctcacctggaaagatgcacatcagacaattcaaagttttcactgctctaagcatgtccacaaaagaccataaaagtgatgtgagcattgg

SEQ ID NO: 767854 - DNA, 675 bp, Homo sapiens
aacagctaaactgaactaacaggatcctagcgaagatagacctaggtaatcaaaaatcacttggggaatagttgagaatgaggatcagatattgagggggttcagatgtcaaggataggggattcttgctaacctgacttagcagtgtccttgctaacattggattttacagaagagtgcacaaatggacctaggagaaggatcaggagcctaattagtgtggtcaagcaaagagtctgtcacctccaaaccccgtgttctgttttccctttcttccaaactgtgaatctgtcatccataagaatgtcatccgtaagaatcttacatatacccttaaaccctttgcccttatcgtcttttttttttttttttttttttktgtgtgtgtgtgtagatggagtctcgctctgtcgcccaggttggagtgcagaggcccaacctcggctcaccgcaacctctgcctcccgggttcaagggattctcctgcctcaaacccctgagtagctgggactacaggtgcatgtcatcatgcccagctactttttgtatttttagtagagatagggtttcaccatattggccaggctggtctcgaactcccaacctcgtgatccgcctgcctcggcctcccaaagtgctgggattacaggtgtgagccaccatgcccagcctcgt

SEQ ID NO: 767855 - DNA, 593 bp, Homo sapiens
gtgacagagccaagatggagtctgtctggctgtcttagctaagggagagtcaattcaggtggaaacaaggctaggtgattaaaggaaaagggagagtctaaaaacagggttagtaaaaacaaggttgggcattacacttacctcttaccaatgtcatgttctatatacaacgtctgaaccatcctttctaacggcccctcccagtgttttcctatttctcttggagtaaaattcaaagtcttagttcaatatgtcatcaaatatacctcccaacctggaatattctcccaccagatatttgcatggcttccttcaggcatctgcctaaacatatctgatatgattaggcctactggccctgcacaaatctcatcttgaattatcatccccctaatccccatgatccccacgtgtcaagggagaraccaggtggagataattggatcatgggggcggtttcccccatgctgttctcatgatagggactgagttctcatgaggtctgacggttttgtaagtgtttggtagttcttcctgcattcattctccttcctgccgccttgtgaagaaggtgccttgcttccccttttcct

SEQ ID NO: 767856 - DNA, 634 bp, Homo sapiens
ttctaacggcccctcccagtgttttcctatttctcttggagtaaaattcaaagtcttagttcaatatgtcatcaaatatacctcccaacctggaatattctcccaccagatatttgcatggcttccttcaggcatctgcctaaacatatctgatatgattaggcctactggccctgcacaaatctcatcttgaattatcatccccctaatccccatgatccccacgtgtcaagggagagaccaggtggagataattggatcatgggkgcggtttcccccatgctgttctcatgatagggactgagttctcatgaggtctgacggttttgtaagtgtttggtagttcttcctgcattcattctccttcctgccgccttgtgaagaaggtgccttgcttccccttttccttccccaatgattgtaagtttcctgaggcctctgcagccatgctgagctgtgagtcaattaaacctctttcctttataaattacctagtctcaggcagttctttatagcagtgtgaaaatggactaatacaatatttgtgtcagagaggttaccactgatcaccctctataaaatgacggatcctcctactcactgatagcatttgccattcccttccttatttttt

SEQ ID NO: 767857 - DNA, 634 bp, Homo sapiens
ttctaacggcccctcccagtgttttcctatttctcttggagtaaaattcaaagtcttagttcaatatgtcatcaaatatacctcccaacctggaatattctcccaccagatatttgcatggcttccttcaggcatctgcctaaacatatctgatatgattaggcctactggccctgcacaaatctcatcttgaattatcatccccctaatccccatgatccccacgtgtcaagggagagaccaggtggagataattggatcatgggggcggtttcccccatgctgttctcatgatagggactgagttctcatgaggtctgacggttttgtaagtgtttggtagttcttcctgcattcattctccttcctgccgccttgtgaagaaggtgccttgcttccccttttccttccccartgattgtaagtttcctgaggcctctgcagccatgctgagctgtgagtcaattaaacctctttcctttataaattacctagtctcaggcagttctttatagcagtgtgaaaatggactaatacaatatttgtgtcagagaggttaccactgatcaccctctataaaatgacggatcctcctactcactgatagcatttgccattcccttccttatttttt

SEQ ID NO: 767858 - DNA, 542 bp, Homo sapiens
catatactatgttgtatgtatatttacagtttatatatatatatagtttatatatatagtttacatatatagtgtatgtgtttgtgtatatagtgtccattggcagcccctgccgagggactcggcactagattatttctcatagagagattactgggctttaactaaagcctggttattttgcctctctggatgtagctgataaggctacaaatgtgcacctggaccawcggcagcaaatatggccaggagcccaaggggaggatggacatgacaactgagactgactgttatttctttgcagatcattatttttccttttctttctaaattttatttcattgtgattagaacactcaacctgagatctaccttcttaacacatttttaattatagagtacagcattttattgactacaggtgcagtgttatacagcatatctttagaaagcattcatcttgtttaactgatattttatgacaattcattagtcactccccatttcctcatctccttcagcccctggtatcctactctttg

SEQ ID NO: 767859 - DNA, 632 bp, Homo sapiens
acttgattccatgttgctgagcaagtgccctaccagcacacgtgtagaatgctggaagcttattttctagaaatgattaaaaaaataaataaataaataaataaaagaggatactttcatttcctgtggttgtagtaaaagaagtcaccacaaatgggggtttcaaacttcaaaaatgtattctctctcagttctagaggtcagaactctaaaatcagtttcactgaatcaaatgcaaggtgttggcaggacctcatttcctccatgagagrgtccctccctgacttcttctagctttctcaaatggctgtggctctccaaactctgcctgtatagtcacaccgtctcctttcctgtgcatgtcaaatctccctctgcctctctttcacaagggtacaagagatctcacccaaataatgcaatacagtcctaccatgtcaagattcttagttagatctgcaaagacccttatttcttataaggtaatattttcaggttccagggattaggacttgatgtgttttggtggccattaaaaatagtgcccttgctctaatacaaagaatatgtaatttgcgaatgccaggcaccgttgagggcataggtaccataaatgactatatgaaaagaaa

SEQ ID NO: 767860 - DNA, 588 bp, Homo sapiens
agtcttttattcttccactcttaatcacaggcatacagggattgccagatatctgagagaagcttcaaacatggaagatagactctaaaataaacaaacaaaaagcaaatacctctttgggggtagcaggctattcaaggaaagaagcttactttttatagtagtgatagcctctgaacaataaaaacagatggaaacatttagagacctgaaagaacaataaaaaaatttaagaattgaaagacttaaactaaaattatctacccattcagtccatcaacatataaatagagaaaataagccattttcagatttgcaaaataccaaattttgattttcacgtaaccttcctcaaaaagttattgaggatgtttactytgaaccaaaatggagtaatagaaactagatttaatctcttccttgatacaaacaaaaaaagacaaaaataatgagaaagccatttgaaagacacaacatcaggcaacaaaggtaaatcctaatattaccccagtttaccaccttgagagtttacagatccaaaatgagtgatgaaaaactcagatggagcccagaggctccctgagttga

SEQ ID NO: 767861 - DNA, 588 bp, Homo sapiens
agtcttttattcttccactcttaatcacaggcatacagggattgccagatatctgagagaagcttcaaacatggaagatagactctaaaataaacaaacaaaaagcaaatacctctttgggggtagcaggctattcaaggaaagaagcttactttttatagtagtgatagcctctgaacaataaaaacagatggaaacatttagagacctgaaagaacaataaaaaaatttaagaattgaaagacttaaactaaaattatctacccattcagtccatcaacatataaatagagaaaataagccattttcagatttgcaaaataccaaattttgattttcacgtaaccttcctcaaaaagttattgaggatgtttactctgaaccaaaatggagtaatagaaactagatttaatytcttccttgatacaaacaaaaaaagacaaaaataatgagaaagccatttgaaagacacaacatcaggcaacaaaggtaaatcctaatattaccccagtttaccaccttgagagtttacagatccaaaatgagtgatgaaaaactcagatggagcccagaggctccctgagttga

SEQ ID NO: 767862 - DNA, 661 bp, Homo sapiens
  misc_feature 654, 655, 659: n = A,T,C or G
aaaagcagtgaggcaaaaggatccagtaacctataaaggaaaacctaccagacaaacagcagatttctcagcagaaaccctataaactagaaaggattggggtcctatttttaggcaccttaaacaaaataattatcagccaagaaatttgtatccagagaaactaagctgcataaatgaaggaaaaatggtcttttccagacaaacaagtgcttagagaattcaccactaccaagctagcactacaaaaactgctaaaaggagctcaaaatcttgaaacaaatcctcaaaatacaccaaaatagaacttccttaaagcmtaaatctcagaggacctatataaaaacaatacaatgaaaaatggacttaaactacacccttcaacaagtggatttaacagatatttacagaacattctactcaacagctgcagaatatacattctactcatcagcacatgaaacactttccaagatagaccatgtgataggccacaaaacaagtctcagtaaatttaagaaaattgaaattatatcaagtattctctcagaccacagtggaatataattggaaaccaactccaaagggaaccttcaaaaccatacaaatacatgaaattaatacctgggctcctgagtgaaatacttagggtcnnaacnaa

SEQ ID NO: 767863 - DNA, 706 bp, Homo sapiens
ataatgaattcagcaaagtttcaggatacaaaatcaaggtacacaaatcagtaggtctgctacaccaacagcgacaagatgagaatcaaatcaagaactcaacccctttcacaacagctgcaaaaaatatatatatatttaggaatatacctaaccaaggaggtgaaagaccactacaaggaaaactacaaaatactgctgaaagaaatcatagatgacataaacaaatggaaacatatcccatgmtcatggatgggtagaatcaatattgtgaaaatgaccatactgccaaaatcaatctagaaattcagcgcaattcccatcaaaataccaccatcattcttcacagaactaggaaaaacaattctagaagtcatatggaaccaaaaaagagcccatatatccaaagcaagactaagcaaaaagaacaaatctgtaggcatcacattacctgacttcaggcaatactataagaccatagtcaccaaaatagcatggtactggtataaaaataggcacacagaccaacggaaaagaatagaaaacccagaaataaacccaaatacttagcgccaactgatcttcaacaaagcaaacaaaaacttaaagtggggaaaggacaacctattcaacaaatggtgttgggataattggcaagccacatgtagaagattgaaactggatcctcatctctcaccttatacaa

SEQ ID NO: 767864 - DNA, 585 bp, Homo sapiens
cttacagatatcttaaagatatccaattcgggctgggcactgtggcttacacacgtaatcccaacactttgagaggcctaggtgggcggatcacctgaggtcgggagttcaagaccagcctgaccaacatggagaaaccctgcctctactaaaaatacaaaattagctgggtgtggtggtgcatgcctgtaatcccagctactcgagaggctgaggcaggagaatcactttaagccaggaagcagaggttgcggtgagccgagatcgtgccattgcactccagcctgggcaacaagagtgaaactctgtctcaaacaaacaaacaaagatatcccattcagtcatgtatatctttctttgttttacatgctratgacagtagtcttttactttcatggcaactcttctgcttactatatgataggaatggcctgggtaaaggatatgctttatagatctctggagttagctctttaatgcttccctcccctcttctgccctgcttttgagtggtgtgccttagcttgtgaaggattggttgaggatgacttaggttgagggggtctgggctgagaaggcttagac

SEQ ID NO: 767865 - DNA, 383 bp, Homo sapiens
atagggctaatagagactcaaaatatgaatgcataaatcattatattttcctctatttactacacattcctccagattttttaatatgtcattaaacatcaagtccgatgtcagcattagaaagtatctaattttgtttcctaacaaaagtgagttcataaactgtgatttatctttcactgacattactacattagtgtgagttgttgataagctaatttacaatgrtagacaagatcaaggcttaccctaagggtgatttatcatagttcctatatttgctaacaggctggcatgtgaagcctttgaaaatataatgaatttacaatgtttacccattatctcacaccaggtgattagttaacctattccttgcatattta

SEQ ID NO: 767866 - DNA, 635 bp, Homo sapiens
acatgtaggagaatgaaactggatcctcatctctcaccttatacaaaaatcaacttaagatggatcaaagacttaaatctaagacctgaaatcataaaaattctagaaaataacactggggaaatgcttctagaaactggcttaggcaaagacttcatgaccaagagcccaaaagcaaatgcaacaaaaacaaagataaatagatgggacttagttaaaccaaaaagcttctgcacagcaaaagaagcaatcagcacagtaacacagacaacccacagaatggaagacaatcttcacaatttatacatctgacaaatgactaataaccagaatctacaaggaactcaaataaatcaggaagtaaaaaacaaacaattccatcaaaaagtgggctaaggacatgaacagaattctcaagagaagatatataaatggccaacaaacatgaaaaaatgctcaacatcactaayaatcacggaaatgaaaatcaaaaccacaatgcaataccaccttactcctgcaagaatggccacaattaaaaaataaaaaaaaaaagaaatagatgttggcatggatgtggtgaagaaggagcacttttagactgctggtgagaatgtaaactagtataaccacta

SEQ ID NO: 767867 - DNA, 635 bp, Homo sapiens
acatgtaggagaatgaaactggatcctcatctctcaccttatacaaaaatcaacttaagatggatcaaagacttaaatctaagacctgaaatcataaaaattctagaaaataacactggggaaatgcttctagaaactggcttaggcaaagacttcatgaccaagagcccaaaagcaaatgcaacaaaaacaaagataaatagatgggacttagttaaaccaaaaagcttctgcacagcaaaagaagcaatcagcacagtaacacagacaacccacagaatggaagacaatcttcacaatttatacatctgacaaatgactaataaccagaatctacaaggaactcaaataaatcaggaagtaaaaaacaaacaattccatcaaaaagtgggctaaggacatgaacagaattctcaagagaagatatataaatggccaacaaacatgaaaaaatgctcaacatcactaataatcayggaaatgaaaatcaaaaccacaatgcaataccaccttactcctgcaagaatggccacaattaaaaaataaaaaaaaaaagaaatagatgttggcatggatgtggtgaagaaggagcacttttagactgctggtgagaatgtaaactagtataaccacta

SEQ ID NO: 767868 - DNA, 628 bp, Homo sapiens
aagccacggaggtaacttgggaggcggcttggagaccctgagaaggaaagactctaggaaaagctgcaggcatttcccccaacctaggacctagagcaggatggcatttttaatccagacacatacgcagccaggcrcaaagccaggcacaaagccattatttggtgacctggcagtgtgcccataccagcattgtaatctcaggccagagattggagcacttgctctggaaagtgcctgaggactaggcgctagaactgtgctgtcccccatcacaggcctggagcggaaggagagctgctacagctctggtttctcctagattataagacatgcagccagggccagcttgatgaccagtaaccggtctgggtgtgtccttgctgggtgctccattctgctccccggatatcctggtgcagcagagccctctccactcctcccctatgcagaatttcaggcatttggagtgccaccttgcctagatcagcagcctgagatacccactctttctgtgcatagattatggtgcattgcaaccctctctgctccacacccaggcagatttctaggcattcagagcacctgcctgcctgggcctgcagcatgagctcctatccttcctggg

SEQ ID NO: 767869 - DNA, 628 bp, Homo sapiens
aagccacggaggtaacttgggaggcggcttggagaccctgagaaggaaagactctaggaaaagctgcaggcatttcccccaacctaggacctagagcaggatggcatttttaatccagacacatacgcagccaggcgcaaagccaggcacaaagccattatttggtgacctggcagtgtgcccataccagcattgtaatctcaggccagagattggagcacttgctctggaaagtgcctgaggactaggcgctagaactgtgctgtcccccatcacaggcctggagyggaaggagagctgctacagctctggtttctcctagattataagacatgcagccagggccagcttgatgaccagtaaccggtctgggtgtgtccttgctgggtgctccattctgctccccggatatcctggtgcagcagagccctctccactcctcccctatgcagaatttcaggcatttggagtgccaccttgcctagatcagcagcctgagatacccactctttctgtgcatagattatggtgcattgcaaccctctctgctccacacccaggcagatttctaggcattcagagcacctgcctgcctgggcctgcagcatgagctcctatccttcctggg

SEQ ID NO: 767870 - DNA, 550 bp, Homo sapiens
agtctgagagacagtaaggcctggcaccactcccagtgtttcttagctcgtctcccatgttagagatgagattatttatttatttttcttttgagacggagtgttgctgtgttgcccaggctggagtgcagtggcatgatcttggctcactataacctccccctcccaggttcaggcgattctcgattctcgtgcctcagcctcccaagtagctgggattacaggtgtgtgctatcacccccagctaatttttgtatttttagtagagatggggtttcaccatgttggycaggctggtctcaaactcctgacctcatgtgatccacctgccctggccttccaaagtgctgggattacagtcgtgagccaccacgcccggcccaaatgacattatttagggcagaatagagagcttgctcagagttatggggaaataggaggaacagtggtcagaacccaaaatccattccttttctttcacctgcatctctaggagacaccatcccaccatctactaaattttcatagacagaaacttgtactttgagca

SEQ ID NO: 767871 - DNA, 445 bp, Homo sapiens
tgtagtcccagctacttgggaggctgaggcaggagaatcacttgaacctgggaggcagaggtttcagtgagctgagatcatgccactgcacaccagccgcctgggtgacagagcaagactccatctaaaaaacaaaaaaagtcatgattasagggttggaactttcagcctttcggcctctgcttcttgtccccacctctgggcagaggggaggggctagagattgaattatcccaatggccaatgatttatttaatcaatatgaaacctccataaaatcccctaagtgataaagttcagagagcttccaagttggtaaagctatctaggtgctgggagggtggtgtgcccagagaggacatggaagctgtgcccccctcaccatactttgccaagtgcatttctcctatttggctatttatgagttgtgacctttataataaac

SEQ ID NO: 767872 - DNA, 445 bp, Homo sapiens
tgtagtcccagctacttgggaggctgaggcaggagaatcacttgaacctgggaggcagaggtttcagtgagctgagatcatgccactgcacaccagccgcctgggtgacagagcaagactccatctaaaaaacaaaaaaagtcatgattagagggttggaactttcagcctttcggcctctgcttcttgtccccacctctgggcagaggggaggggctagagattgarttatcccaatggccaatgatttatttaatcaatatgaaacctccataaaatcccctaagtgataaagttcagagagcttccaagttggtaaagctatctaggtgctgggagggtggtgtgcccagagaggacatggaagctgtgcccccctcaccatactttgccaagtgcatttctcctatttggctatttatgagttgtgacctttataataaac

SEQ ID NO: 767873 - DNA, 566 bp, Homo sapiens
gaagagtcggctgagtgcagtggctcacgcctgtaatcccagcactttgggaggccgaggcgggtggatcacctgaggtcaggagtttgagaccagcctggccaatatggtgaaatcccatctctactaaaaatacaaaaattagttgggcatggtggcaggcacctgtaatcccagctactcgggaggctgaagcaggagaatctcttgaacccgggaggtggagattggagtgagccaagattgygccactgcactccagcctggtgacagagcaagactccgtctaaaagaaaaaagaagtagacgaaaagtcttcactggagaggattagtgggaaggaaagggagtattaccaagggaaagtatatttccagtttttaaattgagcattatatgataagcactgaactaagagctttactatattcttgttcagtcctcacaacaagatggtaatatattttcaatttacaaacgagaaaaccgatgctaaaggtcactcagctaacggggaataaatgaaaaggtcattcaaaaataacctaagcagtctactgctgtgg

SEQ ID NO: 767874 - DNA, 644 bp, Homo sapiens
gaaatggaagtatcttatgttcctacaactatatgtgaaatggtaaagcagttcccgcttacccacagggaatgcctagttccaagacccccagtggatgccgaaaacttaggatagtacttcctgcactgaagtcttaaatccctcaaagtcatccatgagggttaaaatcagtttttcccaaactcccattaatgttgacattttgacctcctcccataaaccacaaatgttcttaatggcgtctagaatggggagttatttccaaaaggttttcaatttactttgcccasagccatcagaagaatcactatctatggcagctacagccttacaaaatgtttcttaaataatgagacaggaaactcaaaattactcattgatttctaggctatggaatagatactaaatcaggaactaaatcagtaatttaaaaaaacctaccaatcagaaagagcccgggccagaaggattcacagtcaaattctaccagatgtataaacaagaggtggtaccaatcctactgaaactatttcaaataattaggaagagggactcctccctatctcattccataaggccagcatcgttctgataccaaaacctggcagaacacatggtctaatatccagaacttataatga

SEQ ID NO: 767875 - DNA, 644 bp, Homo sapiens
gaaatggaagtatcttatgttcctacaactatatgtgaaatggtaaagcagttcccgcttacccacagggaatgcctagttccaagacccccagtggatgccgaaaacttaggatagtacttcctgcactgaagtcttaaatccctcaaagtcatccatgagggttaaaatcagtttttcccaaactcccattaatgttgacattttgacctcctcccataaaccacaaatgttcttaatggcgtctagaatggggagttatttccaaaaggttttcaatttactttgcccacagccatcagaagaatcactatctatggcagctacagccttacaaaatgtttcttaaataatgagacakgaaactcaaaattactcattgatttctaggctatggaatagatactaaatcaggaactaaatcagtaatttaaaaaaacctaccaatcagaaagagcccgggccagaaggattcacagtcaaattctaccagatgtataaacaagaggtggtaccaatcctactgaaactatttcaaataattaggaagagggactcctccctatctcattccataaggccagcatcgttctgataccaaaacctggcagaacacatggtctaatatccagaacttataatga

SEQ ID NO: 767876 - DNA, 644 bp, Homo sapiens
gaaatggaagtatcttatgttcctacaactatatgtgaaatggtaaagcagttcccgcttacccacagggaatgcctagttccaagacccccagtggatgccgaaaacttaggatagtacttcctgcactgaagtcttaaatccctcaaagtcatccatgagggttaaaatcagtttttcccaaactcccattaatgttgacattttgacctcctcccataaaccacaaatgttcttaatggcgtctagaatggggagttatttccaaaaggttttcaatttactttgcccacagccatcagaagaatcactatctatggcagctacagccttacaaaatgtttcttaaataatgagacaggaaactcaaaattactcattgatttctaggctatggaatagatactaaatcaggaactaamtcagtaatttaaaaaaacctaccaatcagaaagagcccgggccagaaggattcacagtcaaattctaccagatgtataaacaagaggtggtaccaatcctactgaaactatttcaaataattaggaagagggactcctccctatctcattccataaggccagcatcgttctgataccaaaacctggcagaacacatggtctaatatccagaacttataatga

SEQ ID NO: 767877 - DNA, 602 bp, Homo sapiens
ctccaaagaactacttatctactgggtgcagctgaaccatttccataactgagatcatgtaagtcaggaatgtatacacattacacatgtgtgcagacaaaagttcatgacttcacctaccaggtccaagacgagtctccttaggaatgcctgcatacaagcctggcccttggctggtgtctgggaacttggctggtaaaatcattgcctacactaatataaattttttctaaatgagaaaagtagctcacttctcctaaaacatctgytttccttctaggtatctggaatttcagtgactgctatcagtcacactgacagtctgtgctcatgactaacccctgataaaaaccctaaactcttaagctcagacaagcttccctgatagacaacacttcacacaagtttccataccttgttattcagaaaattaagtgcatcctatgtgactccacaaggagaatattctggggagtttgtatctgatttcccttgttgattttgctttctaccttttcagtctaccatatcttagccatgaatgtgactacctgctgaaccccatgaatccttctatccaatcgttgaacctgggagagctc

SEQ ID NO: 767878 - DNA, 556 bp, Homo sapiens
ggctcaactgtggacatagggaaagggtgaatagggaataaagaggcaccagaagcctgtatgcctatttcacggaaagggcaagacttggaaatttggagaatttcattaagatagagacattctttcacagcaagcctcatgttttgcatgtggacatgatgggtaaagaggtggagttcttcacccagggttcaaggccggccagctcatggctaatgtagcaggactttcagcaagaccctgatgctgtcggagtacacggggctctctgctcaccccctgattctgtgtaatgatctcagcttcttcctgccctcactctctgcccaccaagctgtccaacagaaggaggcttttatagacagatgataactagaggagaatctggagatttcacktgggcttcctggccagccatgtctcccatacaaaccagcaggaccccagaaccagggtccccaccaagtcctgaaactcttcagtgggtatttttaagaggaatcccagttcagctctgaagtcagtgaaaccattctgaaggctctgcttgcta

SEQ ID NO: 767879 - DNA, 456 bp, Homo sapiens
ctcccatgccacataaaacatttattatgcttttctcctgttgatctttcttatgttagtttatttctcagacacagctggagcctgtgaggataaaggatggaagtagaagttttccttccttacagtttctggcaatgaggatgggaccctaagaggctggacaccccactcactccagcctatggatgagatgctgaraggcctgacaaaagcctgcaaaaggtggggggattctttccaaagccagctttcccaaatatctatggatagtgcctagctaagagaagaaggtaaaaattttttcttgtcccttcttttctaaatttgaattggcaggagaaaaacatttgtaaggttgttctctgaattgtgactcttgtgaatttggttctaggttctaacagaaatcgctctttttttttgttttttaatctctgtcttctgtgtgattta

SEQ ID NO: 767880 - DNA, 631 bp, Homo sapiens
ctctggggtctcatttcatttcctttaaagatataatcatcgtcatcagagggcgacaacacaacgtaacgtgatgtgtatgaaatgtagcccacggtaaacacaaaaatacgcaacacaaagtgtaccgtatacagrtgtaagcagagggttacaaaacagactccgtttctgctgtgaatggactttccactgatgttgatagcaataaattttaagaaagagacctaaaacttacctccagactaaccaaggagttgcgcgagagatccaaagatttcagacctgttaaactcatcagagaatgtcccaggtgggtgatcttctcttggtaagttccaggaatagacaatgactgaagctcagctaagaatagaaaaattgtaagattttaatcttttattttgaaaacaattataataacggtcaagttcttggtgttggatatagagtagaaactgacacagattcttggtttaattcaactttactcaggctcctgaatcttctcctcggccatctgtgcccttccttgtaaagtccagtttagtgcggccaaaacccccaccctcagtatctgctcaggttcctcatccccagatcccataggtggtgtctgctcaccctggcc

SEQ ID NO: 767881 - DNA, 631 bp, Homo sapiens
ctctggggtctcatttcatttcctttaaagatataatcatcgtcatcagagggcgacaacacaacgtaacgtgatgtgtatgaaatgtagcccacggtaaacacaaaaatacgcaacacaaagtgtaccgtatacaggtgtaagcagagggttacaaaacagactccgtttctgctgtgaatggactttccactgatgttgatagcaataaattttaagaaagagacctaaaacttacctccagactaaccaaggagttgcgcgagagatccaaagatttcagacctgttaaactcatcagagaatgtcccaggtgggtgatcttctcttggtaagttccaggaatagacaatgactgaagctcagctaagaatagaaaaattgtaagattttaatcttttattttgaaaacaattataataacggtcaagttcttggtgttggatatrgagtagaaactgacacagattcttggtttaattcaactttactcaggctcctgaatcttctcctcggccatctgtgcccttccttgtaaagtccagtttagtgcggccaaaacccccaccctcagtatctgctcaggttcctcatccccagatcccataggtggtgtctgctcaccctggcc

SEQ ID NO: 767882 - DNA, 638 bp, Homo sapiens
ccattgtacagggagctaattggtccgttttacagagcgttgattggtccattttgacagagtgctgattggtgcattgacaagcctttagctagacataaaagttctccaagcccccactccactcaggagtctagctagctttctctatcggatcctgagccccgcagcaggcggagctgcccgccagtactgcgccacgcgcccgcactcctcagcccttgggcggtccatgggacccggcgggggcggcgcccttccgggaggccccagcaccgmgggagcccggggcgggggagggggggcgtggcctcggcatggcggtcggcgggtcccgagccctgcccagcagggaggcggctgaggccccgcgagaatttgagcatggcgcaggcgggctggcagtgctgggggacccggcgcacctccgcagccaccgtaggacagaggggcaagggggctcccagactctgcaaaggacgctgcggcggagactgatacgggtctgagatggctgtccaaggcccaagtgagaattaaaccacatgcccagccagtgcccaccacccgggccaacaccatttctctaaagcacgacacaggacattccaccaacagagcatcccaaaagggaatag

SEQ ID NO: 767883 - DNA, 502 bp, Homo sapiens
tcggctttacagagctcattgcccactgcctctgaaagccacacccagggctgcccttgccagaggggtgtgtcctctccactgcagacacaagttcctcccttctctgcggccctccgctctgcaacgccatcctctctctggtcctccgtgtctctgccaggcatgggctcctgtccacatcttttctkcccagcacgctgtcctgttgccgtgtccccgcatctttcttccctaacatcggctgtggaactgaggtagcgatggctggcgtattaagaatgtgctccaagcagctcagcctagggctgaacaccccccatttggcttcccctcctcatcagcccctgacctgtggcaacagtgaagccgcaaggctcacctgccgttctctgggtcacaggtgtgtgataggggggccagagtcgctccctggcagcaagacccggaacctgcactttaattccatgttccacagcaattccacccccagaataaccag

SEQ ID NO: 767884 - DNA, 502 bp, Homo sapiens
tcggctttacagagctcattgcccactgcctctgaaagccacacccagggctgcccttgccagaggggtgtgtcctctccactgcagacacaagttcctcccttctctgcggccctccgctctgcaacgccatcctctctctggtcctccgtgtctctgccaggcatgggctcctgtccacatcttttcttcccagcacgctgtcctgttgccgtgtccccgcatctttcttccctaacatcggctgtggaactgaggtagcgatggctggcgtattaagaatgtgctccaagcagctcwgcctagggctgaacaccccccatttggcttcccctcctcatcagcccctgacctgtggcaacagtgaagccgcaaggctcacctgccgttctctgggtcacaggtgtgtgataggggggccagagtcgctccctggcagcaagacccggaacctgcactttaattccatgttccacagcaattccacccccagaataaccag

SEQ ID NO: 767885 - DNA, 502 bp, Homo sapiens
tcggctttacagagctcattgcccactgcctctgaaagccacacccagggctgcccttgccagaggggtgtgtcctctccactgcagacacaagttcctcccttctctgcggccctccgctctgcaacgccatcctctctctggtcctccgtgtctctgccaggcatgggctcctgtccacatcttttcttcccagcacgctgtcctgttgccgtgtccccgcatctttcttccctaacatcggctgtggaactgaggtagcgatggctggcgtattaagaatgtgctccaagcagctcagcctagggctgaacaccccccatttggcttcccstcctcatcagcccctgacctgtggcaacagtgaagccgcaaggctcacctgccgttctctgggtcacaggtgtgtgataggggggccagagtcgctccctggcagcaagacccggaacctgcactttaattccatgttccacagcaattccacccccagaataaccag

SEQ ID NO: 767886 - DNA, 599 bp, Homo sapiens
gcgtgagtgctcaggagtatactacacaacagacaccacctgggcatgacgcttacatggaaagcaccctggatgcttggcagggggatgatgcaaaggaacagctccaacctccagtggaaaattaatacaagccactgaatgaggcgctggggattagggtcttcacacgcgaaatcctgctccctgttcccactttcattccagctggtcagctacgtccacccattcccttcgacatcccacagcaaacacgcagaccagaatatcccccatcggtttgtctaatatccaccactagagacactataaatycctacacatttcccacaaaacagacctgtgattagcaacatcacacctcacaggctcttagtgaatggactttccccgtgtggcaaagcgtgacatgatttaaacaaagtccctgatcgctagaaacagatgtttgtaatgtgcgcagcaggcagagcctgaagtaaaaggctgtgagtgagtctataaggtggaccagctggatccaaactgttaggtgaccctggaagcatattctgtgacaaaaaaagggttaatggtaacttatcgcctgttgcatctag

SEQ ID NO: 767887 - DNA, 595 bp, Homo sapiens
cagagcctctgaccttagatggagctttaggctggggagggtgcgtggtggccctgggggcgcctcaggatgctcttcccaggagccctgggcctggccccggccaggggaggggactgccagtgtgcagggctgaggcagtggtgggggcaccggtgtcagggcgcagggacgccctctggactttgcaaggcgcccgcccccagagtaggcggctggsccatggggttgagaagactgaggggtgccacccaggcagggcttggggacgcagggctacgccacagggcagggctgccgaggccacctccctaccatgcatgggcttcggtaagacccagtcaggccctgaaggactcaaggctgaggtgctggactcagggcatgaaagctgcttcccaaagggggcctggacaccaggtgggccgtcagcacatgcactgagagctgaacatggcctctgcccacagacaacaagagcgcaggtgggagggtccgtgtctcgaggatcacaggtaaggatgtcccaaccgctgggatctcacgaagccactctcagatctggagttctcagcgccagtcatggccaaagtgt

SEQ ID NO: 767888 - DNA, 595 bp, Homo sapiens
cagagcctctgaccttagatggagctttaggctggggagggtgcgtggtggccctgggggcgcctcaggatgctcttcccaggagccctgggcctggccccggccaggggaggggactgccagtgtgcagggctgaggcagtggtgggggcaccggtgtcagggcgcagggacgccctctggactttgcaaggcgcccgcccccagagtaggcggctgggccatggggttgagaagactgaggsgtgccacccaggcagggcttggggacgcagggctacgccacagggcagggctgccgaggccacctccctaccatgcatgggcttcggtaagacccagtcaggccctgaaggactcaaggctgaggtgctggactcagggcatgaaagctgcttcccaaagggggcctggacaccaggtgggccgtcagcacatgcactgagagctgaacatggcctctgcccacagacaacaagagcgcaggtgggagggtccgtgtctcgaggatcacaggtaaggatgtcccaaccgctgggatctcacgaagccactctcagatctggagttctcagcgccagtcatggccaaagtgt

SEQ ID NO: 767889 - DNA, 464 bp, Homo sapiens
ctctccgggcagcccaaaccctcctggtccgaaaacgtctggaatcttccaacaggcattcttcgcttcctgcactttccgggggctggcaggggaccaggcaccatttctcctgacaaatccaacttctgagaagaggccgagtcctcggtatccatggagtctgagatatagagaggatggggcgcacgtcaggccaaattctctgggtgcagtgttcagcactgtaacttttaaaaggcatgtgtgtgcccatgtatatacacacatggacacacacrcacacttacatatgtacacgcacacctatccacgtgcatacatacatccatacacctgcacaaaggcacatgcagagggagggtgccgagggaagaaaggggcatactggggcacacgtgctaacacgcaaactctgggggagtctggatgaagcagacacggaccgcccagcttcgcgtgtt

SEQ ID NO: 767890 - DNA, 650 bp, Homo sapiens
tgttcactttaaatgaatacatgtataaaatacacaataaggaaaattaaaaggcagataataaattgggaaaatatgtttattaataatgttaattattaatatgtttgttataaacaaaaggttaatattcttaacatacaaattgttcttataaataattaatagatggctgccacaatagaaaaaaatgtaaatgacatgaacaaagtcagaagatgaaatgcaaatggacagtaagtgtaagaaaagatattcaacttaataataaagaaaagaaaaatgttttggcttgtcaaagctggaaaggattggyaacaatgacattgtgtgtgttagaaatggacattctcgggggcattcccctgttcgaacccattgcaaggaatctaaaaaccttgaaaaaagattagacaaatggctaactagaataaacagtgtagagaagatcttaaatgacctgatggagctgaaaaccatggcatgagaacttcatgatgcatgcacaagcttcaatagctgattcgatcaagtggaagaaagggtatcagtgattgaagatcaaagtaacgaaataaagcaagaaaacaaggttagagaaaaaagagtaaaaagaaatgattaaagcctccaagaaatatgggactacg

SEQ ID NO: 767891 - DNA, 520 bp, Homo sapiens
cttccttgcagtgttgtgaagagcatgccagtccttgtcctgtttgcgatgacagatgcatttcttgcattttctatgtcccagtggtatgggggtggtgagcagctgtgtttcccaggtgctagggactgaattgtgccccctccaaattcacatgttgaaaccctactctccagtgtgattgtttctagagatggggtcttcaggagataattaaggttaaatcaggtcataagcgtagggccgtagccttataagatgaggaagagaaagagatgtctctctctctctctctctctccaacatgtgaggacacagcaagaaggtggccatctacaagccaggaagaaacctacctttgccagaaacctaccatactgacckcttgattttgaacttcccagtctccagaactgtgagaaataaatgcctattttttaagccacccagtctgtgatattttgttattgcagcatgaactggctgagacaccaggttcctgtgtcatgccaatggcaag

SEQ ID NO: 767892 - DNA, 630 bp, Homo sapiens
ataatatactctagttttcttagctaatttttaagcgtctccccattcctccagatccaccaagaaaaattcatcctacaccacatttttacccctggacctaaagtgtattatatgttcttgaacaggaaaatttcatctcctgaaaaaaaaaaaatyactgatatttccatgagtacatattgattctggtttgactactattttgaaatagagtggatgtaaaaatctatgatgaaatcttaaaactagtaaaattatcattagaactagtattatacatggaactattagtctggtagcatagtctgttatactactcacactaaagcaaaataaaaagtactgtcttcacttggaactgttgtcttacaattctgtgcctgtcttcaccatttcatgaaaatattaattgttcttcttggcttactttttctttaatttatgttcttgccaggtcaaaatcaaaagtgatgatttaggacttgggcatttgtcgagataagttcatattgtcaccactttcccaattttgaagcttacaaaaaaaataggcaggattttagtttgccttcagttagggaaaggagaattcatttgccacaggagtaaaatcctacgttttataaa

SEQ ID NO: 767893 - DNA, 625 bp, Homo sapiens
aaaagtctgcagtgggctgcccttcccataatatttcaatttaagcaccgacttgctgctgcggagtcatatctcattcatgctgcagcctttgcaggagtcagggatcattatggagcaagcactgagaaaaaacagattacagcttggcaccgagcagccaggtaaggggacgcattggaaggagwcgcgtcccaacgaacaaccaggagaaggggggctctcgggagatgtcagggccaggggagtataggaaccccggccactccagattgtcaggctggagtcaagtgcatccctgctgacaccactggctccctaccttgctctcagaagccgcctctcagcttgtctctggttggtgcagtaagtgcaattcccttgtgctttcagggccaagatgatcctcttctctttagatttccctttatccattcttatttttagtcttttctacacacacacgatgggccttgccgcgcattatgcagaccgctcttctgcaggccctgcctttaaattgcattcattggtttagacagaccctccagtgaggaaatagaaatcatcttttgtttgtttgttttatttgctctccagcctctgcaattcacagcctaataat

SEQ ID NO: 767894 - DNA, 625 bp, Homo sapiens
aaaagtctgcagtgggctgcccttcccataatatttcaatttaagcaccgacttgctgctgcggagtcatatctcattcatgctgcagcctttgcaggagtcagggatcattatggagcaagcactgagaaaaaacagattacagcttggcaccgagcagccaggtaaggggacgcattggaaggagtcgcgtcccaacgaacaaccaggagaaggggggctctcgggagatgtcagggccaggggagtataggaaccccggccactccagattgtcaggctggagtcaagtgcatccctgctgacaccactggctccctaccttgctctcagaagccgcctctcagcttgtctctggttggtgcagtaartgcaattcccttgtgctttcagggccaagatgatcctcttctctttagatttccctttatccattcttatttttagtcttttctacacacacacgatgggccttgccgcgcattatgcagaccgctcttctgcaggccctgcctttaaattgcattcattggtttagacagaccctccagtgaggaaatagaaatcatcttttgtttgtttgttttatttgctctccagcctctgcaattcacagcctaataat

SEQ ID NO: 767895 - DNA, 625 bp, Homo sapiens
aaaagtctgcagtgggctgcccttcccataatatttcaatttaagcaccgacttgctgctgcggagtcatatctcattcatgctgcagcctttgcaggagtcagggatcattatggagcaagcactgagaaaaaacagattacagcttggcaccgagcagccaggtaaggggacgcattggaaggagtcgcgtcccaacgaacaaccaggagaaggggggctctcgggagatgtcagggccaggggagtataggaaccccggccactccagattgtcaggctggagtcaagtgcatccctgctgacaccactggctccctaccttgctctcagaagccgcctctcagcttgtctctggttggtgcagtaagtgcaattccsttgtgctttcagggccaagatgatcctcttctctttagatttccctttatccattcttatttttagtcttttctacacacacacgatgggccttgccgcgcattatgcagaccgctcttctgcaggccctgcctttaaattgcattcattggtttagacagaccctccagtgaggaaatagaaatcatcttttgtttgtttgttttatttgctctccagcctctgcaattcacagcctaataat

SEQ ID NO: 767896 - DNA, 625 bp, Homo sapiens
aaaagtctgcagtgggctgcccttcccataatatttcaatttaagcaccgacttgctgctgcggagtcatatctcattcatgctgcagcctttgcaggagtcagggatcattatggagcaagcactgagaaaaaacagattacagcttggcaccgagcagccaggtaaggggacgcattggaaggagtcgcgtcccaacgaacaaccaggagaaggggggctctcgggagatgtcagggccaggggagtataggaaccccggccactccagattgtcaggctggagtcaagtgcatccctgctgacaccactggctccctaccttgctctcagaagccgcctctcagcttgtctctggttggtgcagtaagtgcaattcccttgtgctttcagggccaagatgatcctcttctctttagatttccctttatccattcttrtttttagtcttttctacacacacacgatgggccttgccgcgcattatgcagaccgctcttctgcaggccctgcctttaaattgcattcattggtttagacagaccctccagtgaggaaatagaaatcatcttttgtttgtttgttttatttgctctccagcctctgcaattcacagcctaataat

SEQ ID NO: 767897 - DNA, 511 bp, Homo sapiens
ttcccatcaacccggtggtacttttcttctgctcaaattatagaaaataaagaaaaccaactccaggtgtcaataactttaagagcaagagattaagaagttcaagaggattttagattattgggaagtcagagttgaccagggtagagcccctccgtggccagggcgggacaaagcagaccaggcgaacattsagaatgaaaataaggagttgttggacaactctcctgaccatcccaggcttccctttacctgcctataaacagaattacaaaaacttgagggtaggaggacttaaatttcttggaaagattaatgagaaaaatccctggtgctcatgcagcatgcaggagggttggtagtagctgcaatgagctgtggtttggggttgtgggatgtgtagatgactcctcccaccaaggctgttcaggatactccctcccaaaactgctcaagctgctagggcaagagaaagataggcccaccctagcctccccagcctccccagcca

SEQ ID NO: 767898 - DNA, 659 bp, Homo sapiens
ggtgccgagcactttgtaaaactcattaaatgagacctatgaatattgaaagcaataacagcactacaaataatttacctacactgctgatagtataaagtagcagagtgatgacatcaagtctttggccaggcacatcagcaggctccacaggagaaaatcaaccaggcttagaaagttccagggacctggccgagagacggcttagygggggcttccctcagggcaatactgcaggacccaagactgtttctccgcacagttcttcagaaatatgaatttcttttggcctcactcaggagcaagcgaacaagtttgttactgaatgtggtgaaaaatgttcatcaatgtgtttctcaccatctcaagtctttaaagctaagctgcacagttaaatccctggagtgcagatctccacgttagttaagcgtcacgtgtccagggcctcactgggctctcagtgccatgggccgtctgtgttgactgcactcacgctgatgtgcacgtggtcacggctgcagcatcatgaacgccgctccttcctgtgcagcgggcttccaacgcgtctggagactctggaggagactccttccaatacagctggagagtgtgctcattacaagagagggctgtgcatgccttgtaggtttgtcctgggg

SEQ ID NO: 767899 - DNA, 639 bp, Homo sapiens
gactgtgggctggagagggaaggcatggtgatggctttgaaggtgacacctcgatagcgtctgcaacaacggaagacagaatgccacaggatactacactgggtagctggagagcagggatttatgtctttaaatcaataaattatatcttatatctctatacctgtttatttttctgccggggaatggagaggatggttatagtttcttgaagtgaaggattttacacaaaaaaatgtacacagtcacacaaacgatttgtgtaaaactccacaggctgccgtgatctcctgtcttcctgtggttgaggcagaggtgctggaggaacacgtgtctgtgtcctgagagagcctgagcatgcagccgtgggcaggctggtgggagctcgttctatgcctggttgctctgcagcaggagcacacaaaatgtgacctgggctgtccctgccatccatcctgggaatgrgactggcctggggcatctccatgactcagctctctcatggtaaagcatgctgtggttgcggtttttgggggtggtgagcatcagtgttgttcacaaatgttaagagctgagagtgactgacctctgcatacctcagtgttctcatctataaaatgggcacagtgatagtatcca

SEQ ID NO: 767900 - DNA, 580 bp, Homo sapiens
ccttggactttctagcccctagaactgtgagaaaaaaaaaatctgttgtttaaacacccagctaaactgttgttttaccacccagtgtgataatttttttttttctgacacaaagtcttgctctgtcactccagcctggagtgacactccagcctgagtgacaggctggaktgcagtggggcgatctcagctcactgcaacctccacctcctggattcaagcgattctcctgcctcagcctcctgagtagctggaactacaggcgcccaccacacccagctaattttttgtatttttagtacagacagggtttcatcatgttagccaggatggtctggatctcctgacctcttgatcagcctgcctcgacctcccaaagtgctggggttacaggcgtgagccacctctcccagcccgggtgtgatgagttgatatcacagcctgagcagactaagtcagtcttgtagaaggtatgatggagatagtagctgtgctagacacacctaggtatgcttcagcatagattcagccttacctaccaataaagtcacctgtacttcaggagctggcagaatttgtc

SEQ ID NO: 767901 - DNA, 597 bp, Homo sapiens
agacattggtgcacatttgtactagtttctcatggatatgaatctaggagtgggttctgtggtgggcgtatgtttgtttttggtggatacagccaaagcaaagacattgtgccaagttgcatttcaaccaagaatgcatgagtgacagttgctccccacatccatccacacttggtactttgggtcctaattttagccatcctggggggtgtgtatctggtagtatcacattgtggtttaacttgagtgtaactgatttgtattgacattgagcttttcatagcttgctcaccatttggatattcttttctgtaaagtgactgctcaatgctttttgctgataaaaaaattggtagttttttaaattgatttacaggtgctttttaaaatatattctaaacaagaatcttttgctgtattgcaaatgccttatcctagactgtggcttttttttttwattttttttaatggagtttttccatgaacagaagttcttcatattaataaagtataaatcgtctttttttattttattatcatatttgctttttctgtatatgtcctgtttaagaaatcttggcctaccccaaggacata

SEQ ID NO: 767902 - DNA, 513 bp, Homo sapiens
ggagagccttgctgcttgtcaggttaccaggagcggccactgctctgtagcccagggcaccgttgactcagggatgccctcaagtcccaattagaagaaaaacactgcctgagagaaaacgcaggataaatatgactggccttactttaattaagtttgattgaaagttattctgcacccagggaagccagagccaattttcacaatgtggcttgcagaccaaaggcaagtcttctaagactatgggagaacacagrcccttacatttggcctggagtgagctgaaccataccttgaggcagtgcacacagaaaggaaaggctctgtggttcctaaaggctcagactcttaactacagcgcactgtcctcttgtcaaatccttggtggctcaattctccttccttacttggataatcttcctggaaataggtttagttcaccaggggagcattccggggtgtgtggctcagacctgggtccaagtcttctcaggctttcccgaacccatcccc

SEQ ID NO: 767903 - DNA, 595 bp, Homo sapiens
ccatggggaaaggttttacatatattttcatctactgggagaagcatcagctgaagaagattgagaggcaaaactgctcagaaggtgctagagacagactgccagtttaaatcctacacctgcaacaggacatcctgggtcaaagttcttcaactctacatgcctccttttcctcctttgtcaaattaggatgataatatttacctcaaagggttgctgggaggattaaaagagttaatacttttaaaagtgcttagatgagcacctaacacatagtaaacactcactaaatataacccctggctgttgtttcaatcgctgttatttgtgtcttcctattcttcttcaccatcatcatcattatcaccacctttccctaagaaaatttacaaacttgaagcaatgtttatttaattcaaaataaaggccccakaagcttcacacaggagcacactccatgtctgtaggaactctcatcactcctgcgttctccctatatatttgcatctcttactggccagaagacctagctctggtatatataactgaattagtcaatggaatgcgactatggctgccatttttttttacaagc

SEQ ID NO: 767904 - DNA, 552 bp, Homo sapiens
acttggttgggctaaaggatgcccagatagctagtaaaacattatttctggttgtgtctgttagagtatttttggaagagattaatactttaattggtagactgagtaaagaagatcatcctcactaatatggccagtcatcacctaatcaatccattgagggctgaayagaacaaaaaggctgaggaagggagaagtcagtctcttctgcttgagctgggacatccatctttgccctcagacatcagccctcctggttctctagcctttgaatttggacggggatttacattagtgccacaccctcccttgcttctcagacctttgggtttggactggaactactgccccaactttcctggctctctagcttgcatacagcagattgtgggacttttcagcctccataattacgagagccaagttccataataaatctctttccatatatcctatgagttctatttctctgcagattcctgactaatacaatcccaaaccttgaattgagacattagcattagcttgttgccatgccaaatctttagtggc

SEQ ID NO: 767905 - DNA, 536 bp, Homo sapiens
ctgataaacagacttgaaagaaatgaggaagcaagcgttgtgtacatctggaggaagccgtttccaagcagagggggaacaaaagtaaaggcctgaagtaggagtggcatattcttggaacagcgagaaggccagggtgaccagagcagagtgagcgaggagacagtggaaggagatgttgtcttgaggcccagttgtgtggggctttgtaggacattgccggggcttcagctttttctcaaagtgaggtggaaaggcattaaaaactgtggaacccaggagtkacatgatctgatttccatttaaaagaatcaatttgcctgtgtattgagaaacaactgtagctatctattattggctactacaagactccagggataatggtggcttggaccagtggtggtagcagtggaggtggtgagaagtagtaagattcttggaggtagagctgacaggatttattgatggattggaagtatgaggaaaagagaaccaagaatgactttcaaggttttaggttggagcaatgatatggt

SEQ ID NO: 767906 - DNA, 609 bp, Homo sapiens
taatgaaaatgattcattctgtagtgttccttccagctcacagtcttacattcctgttatcaagaaaagctaacttaaagtccttcttactcagttatccacatttggaattagcttaacctgttggcctaacagtcatgacccagtgtaaccactcatgtctcagcacagatgacaaaacgcaacttggctaggaggaaataggctcagtggagggctggccttggagaactcatcttaacaaagtggagacaaagttattttgggaggtcatgtaagcagagtgattatcatcatggggtctgggatcaaaatcccagctccagccttcactagctgtgtgaccttgagaaarttacttaacctccctaaacctcagttcctaatctctaaacagaggcagtgatcataatagtatggacatctaggaacatggtgaggagtaaataaaataatccatgttaagaatttagtgtctggcatacagtaagcgcccaacaactgttagcccatattctgtagttacaggtcactgttccaaacccctcaatttacagaggaggctcagcaagttgaaggaacatttactcctgccttcacacgtagcca

SEQ ID NO: 767907 - DNA, 613 bp, Homo sapiens
ttgtgtcgggcacaggcaaaccactttccatgaagtgtttcaccgcatctctctgagcattagtctgtgcaactatgaaatagcctgactgtggaagttgagcgatttccccaaagccactgcactagcttcctggggctcccatcacaaaaagttccacaaactgagaggcttaaaacaacagcaagttattctcttacaactctggagaccagaagtccaaagtccagatgttggcagggccacacactccctctgaaggctgtgggagacaatcttcctttgcttcctcccgggattcctaagcttgtggctctgtcactccaatcttccctttggccatcacatggtctctgtccctgtgccttcttctcctgtctctcataaggacagcagtcgtcattctatgtgrggtccacctagataagccaggaggattacagctcaaaaaccttaattacacctgaaaagaccccttttttccaaatacactcatgtgtacagggcctgggtattaggatgtggacatatgtttttgaggatgcccatccaagctacttcagaacatgttaactgggactgtgtcattccagggtgtaagccctcaaccact

SEQ ID NO: 767908 - DNA, 685 bp, Homo sapiens
agtaaggtgccatcttggaagcagagagcagctctcgccagactgagtagccctcggtctactctttgcttctaaggtggaagcatgctggcaccttgaacttggacatcccagcctctagcactgtgagaaaatgaactttagttctttataaattaccctatctcaggtcttctgttatrggagccccttaaggactaagacactcagtgatgcattttaatgtagatttcttttttcactctgtgctaaaatgccggtagtgtctattatcaggacacttctcctttagttctgggaactttcatttctttgaaagttgggatatcaggagtcttttttatgactcctgtaagaaattaccacaatcttggtgacttaaaacaatagaaatttatgatcttacatttgaagaggccaaaaattcaagatcaaggcattagtagggctatactcctcctggaggctgtgggggatgctccgtctctcaactcttgtagtttgtgtggctcctggtgtccctcatggcgacactgcttcaatctctccccacatcttcacatggccttctaatctgtgtcttacaagtgtccctctgccttcctcttataaagtcagttatggtgccacatagcccaccacataatccagaataatctcctcacttcgggatccttaatcacat

SEQ ID NO: 767909 - DNA, 591 bp, Homo sapiens
aattgggcctggccaaaatgacttcaggcatccactgaggagaagaacttgcttctaagaacttctctccagccttccatgtttccttccatgacaggcatctgtggggtgacaattaggtgtggtgggtgggcatttctgtgggctggcagcctattttaacttccaactgtgggagtaagctttaactctgtgctaaaattaggggaatccagtaactcctgtggttatttcaatcagttcccacttattgagtagcagcggcacagttaagtaataacatggtaaccttgccaagacataaatgaaatgctgagtgttgcccagttggagctgaaatcgcttcaatgatctaagctgagagccaaaccaacaaaagggctgctggcctctgggggtgggggaaactggggacatggaacagaattcccaragcagctcctcggatgctgggggcagatttaagggaatgggcactgattggcctggcaatccaaacttcactacagaaatgccaacagccccaggggtcagaaaggctcagtttgctctccctccaagagaaggcacgtgggctctgccagaggagcc

SEQ ID NO: 767910 - DNA, 641 bp, Homo sapiens
gtgcctagtagaatacttaacatatatatatatatatatatattcctgtgtttctatgggtagaaattatatcactgactttgaaaatcctaattttattattattaaatcatttgctaatttttaaacaatttttattttaaattctcaaaatctcacaaatgtcattttttatttctttttttcattttaagacttttagcagataaatctcattttttgaaatttgtatctttttgggaaacttcacatgtctttattcggactttgacatcttgcatcatgaatgcctatggggcaaactttattttccactattargagttcagacctctgggggtaggaacatatggctgtagggagaaacagcaccaattactggaaatccttggaaatgccaagagtcctaatatcctgagaatttactttgccttctctgtgaaagttgtccagtgctacacgtaatagacttcccctttggaatcagtgttgcaatagagagaaaacaggctttaaaatcagggtggggacctggttttaaaagcaatttctgcttagtatttttgtgatcttaggaaagtacttaatctctctgaactttaatttgctcattaattgattaaagacattatatattattt

SEQ ID NO: 767911 - DNA, 589 bp, Homo sapiens
tcattaattattaatgattattaataattatgtaatccttaattattaatgattgataattatccatttccatgcatctccactattgtcatatttatccatcatctcctgtctagtctactacatatactcctgtctatgacttcacaatagtctcaggctaatctatttttcacagagcagccacacacttgtttgaaatgcttcaaggagcttttcaataaaatccagtgtactcaccagaacctgcrtcatctggccttgttttcccttcattttatcctactcttcctctgacctctggattcagtgtccctgttctccctttggtctcttgcatatcccaaatagtttctggtcccagggtcttcacacactcttttccctctttcttgaaactgagctaacatctgccagtattctcctatacaatggtattggttgtgaaaacagtgaaatacctctccatcccatttataagtaaatgcaatgccatgttcctacatgaccccacatacattcattttgcccatttccaaggatcccgtagacctccacaactactgagcaactaaaggaataatgcctc

SEQ ID NO: 767912 - DNA, 574 bp, Homo sapiens
agttgtctatttaggtcccaatgtagatgggaaaataataattaaaaaaataaaaatgattgttaaaaataatgatacaaaaataacgcccatattgttctatgttactaagggttttattaaattctaaggatggggtgtaacatttatcaaagggtccactttgaagcaggaggaaatataggcaaacaaatattaagctgagatgttaagactcagtaagtatgactatcaggacacatatcaggccamagaacattctccactttatccttctttcataatttctcacctaaagttcttgttaattcttcttaacacaaaactattttgaattgatgttgttaccaaacaggaagttaaggttaaagagtatctttctttctttttctctttctttatttctttcttcttctctctctctctttctctctccctctcttccttccttccttcctccttccccctcaccctctccctccctttctctcttccttttttttttattgaagcaaggtcctgcacaggctggagagcagtgtcaggatcctagctcactgcagcctcaacctcc

SEQ ID NO: 767913 - DNA, 634 bp, Homo sapiens
aagtaaagagacaggtcattttgaatcattgtaataaatgtacaactgagggaaacacaaaaaggaactagctaagccagcgggggtagtttgaagggaagaatctttaggaaagagaggcaaagcatctgtattagtctgtttgcatgctgctaataaagacatacctgagactgggtaatttataaagaaaaagaggtttaatggactcacagttccacatggctgggaaggcctcacaatcatggcggaaggcaaggaggagcaagtcacwtcttaacatggcagcagacaagagagaatgagagccaagcaaaacgagtttcccctaaaccatcagatcttgtgagacttattcactaccatgagagcattatgggggaaactgcccccatgattcaattatctcccaccaggtccctcccacaacatgtgggaagtatgggagctacaattcaagatgagatttgggtagggatgcaaccaaagcaggtcagcatcctagaagaaatactttgtgagttgaccctgcaaaggtgataggtcattaaccaggtaaagaagaggggaaaagttctgatggagagaagaaccagcaatgggacagcaatgaaaagctgcagagcatgtgcag

SEQ ID NO: 767914 - DNA, 634 bp, Homo sapiens
aagtaaagagacaggtcattttgaatcattgtaataaatgtacaactgagggaaacacaaaaaggaactagctaagccagcgggggtagtttgaagggaagaatctttaggaaagagaggcaaagcatctgtattagtctgtttgcatgctgctaataaagacatacctgagactgggtaatttataaagaaaaagaggtttaatggactcacagttccacatggctgggaaggcctcacaatcatggcggaaggcaaggaggagcaagtcacatcttaacatggcagcagacaagagagaatgagagccaagcaaaacgagtttcccctaaaccatcagatcttgtgagacttattcactaccatgagagcattatgggggaaactgcccccawgattcaattatctcccaccaggtccctcccacaacatgtgggaagtatgggagctacaattcaagatgagatttgggtagggatgcaaccaaagcaggtcagcatcctagaagaaatactttgtgagttgaccctgcaaaggtgataggtcattaaccaggtaaagaagaggggaaaagttctgatggagagaagaaccagcaatgggacagcaatgaaaagctgcagagcatgtgcag

SEQ ID NO: 767915 - DNA, 633 bp, Homo sapiens
aactttctagaaacgcaggtcctcaggtcccacctcagacctactgaacctgcgtctctaaggatggagcgaggtgatctgtgcctcctatgcatgtaaaggtttatgtaggtgactgtgatgccagctaaagtcggagaacaacaccagattgtgtggcctcctggggcagcagtttgcccatccagaccagcagcagaatctttcttactctgggccctactcaaaaccaaacgctttatgaagaacacaaaacaggccagagaagcatccccgagtgtcttgcacctcaccttgcaaaycggaagagcctcaccaggtatgatacttctttcttagtggtagtcttgcttgccagagacagcgtgttttctttcattttggatatatattttgaccaatcagaccaatggacccacagaaagttcaccaaggtggcaggttttgaaaatgtgttattttctctttcaatttttagcaagcacgtgtcttaccaaggcatcttggcatttttcattttttgctccccaggttgattcagcctgatgtcatcagtgtggcagaccactgtgacatgctgtgcagtggcaagaccatcaagatgtctgtgactaaaaccagcagtgagccgga

SEQ ID NO: 767916 - DNA, 480 bp, Homo sapiens
gtgaattaatctacatggcacaccaggagctcacacgcagacgctgtttcacacggtgctcatgtgcctgctctctaagcgctgccctctatgcgctgcataaacaatcttccaggggcctttcaccagtgacagtccagaggctcagcaggaccccgcagccagccaacggcaaacccagcacaccaccagggcccccctgtcacaaccctcgcacactcgaaggcagtgcttcccagcacgggtaaaagcwccgtgtcaaatgtcagcaatggcccggtccattagggtgcaggggctgcggggccagtcttggggtcagtgtctcgccagctgcacaaccagcgggcagaggtgtcactcaccatcaggtccttcacgcggttgctgagctggtcgatgaacaggatgggcaggtaatgcacggttttccccagctggatcctgggattaaagcacaactttccaaagtcagcacca

SEQ ID NO: 767917 - DNA, 544 bp, Homo sapiens
atgttagccaactagaatttttctagcctgaccttaagtaaaaactccttcccgtgtccccactgcctgtgatggtcatcatcatcatccctcctgtgaggttccctactttctcccactgagcaagacgcggatgtggaagcatccctctctcccatcatcccctcacgtgctgtatcgggaacacgtggctttgcacccttctgaggacaggtcagtcaatcccaagagcccattcyttctggcagttgctacagctatgcacaccttaagcaccgttccccagaaatgggagtcatttgctactttcacatattgcctgctttcggcaattcaccctggtgaaatggcattgtttttccttctaaattgggaatctgagagtgtgtcctgatggaattccatgtcattccatttggggtgtactgagtcatgcaaacattaggaacactcctagagaggccccatccagctcatgggacagctcacaagtgagcaggaaaccaccgtgaggacaggtcagccacgcctccagcctccctcc

SEQ ID NO: 767918 - DNA, 544 bp, Homo sapiens
atgttagccaactagaatttttctagcctgaccttaagtaaaaactccttcccgtgtccccactgcctgtgatggtcatcatcatcatccctcctgtgaggttccctactttctcccactgagcaagacgcggatgtggaagcatccctctctcccatcatcccctcacgtgctgtatcgggaacacgtggctttgcacccttctgaggacaggtcagtcaatcccaagagcccattctttctggcagttgctacagstatgcacaccttaagcaccgttccccagaaatgggagtcatttgctactttcacatattgcctgctttcggcaattcaccctggtgaaatggcattgtttttccttctaaattgggaatctgagagtgtgtcctgatggaattccatgtcattccatttggggtgtactgagtcatgcaaacattaggaacactcctagagaggccccatccagctcatgggacagctcacaagtgagcaggaaaccaccgtgaggacaggtcagccacgcctccagcctccctcc

SEQ ID NO: 767919 - DNA, 570 bp, Homo sapiens
caggtatgaaggggcagattatgaggtagatcttggatgtgttaagtgtaagctgcttttaagttttattagtggagaggacaagaagtcagtgaaatatatgggtctagaacttagaagtgaaatctaggctggagagagattatgtgtcatgagagagasagagagagagagagagagttattgaagtcatggatgtgggtagatgggcctgtggttaatccttgaggagctttcccgcttaatggcagggtagaagaaagtgtgtctccaaaggaaacagaatgaaaggcaatgtagagaatctgaacacacatagacctaaagcaagtccatgcatttccactttagaacccatgggagagagaactggacttgatttctcagcattctcctaattctgagatccttgcttctaagataattctaattgctccatattgtgatatcaataataaaaccattgaatagttttttgactcatgccaatcgcaaataatcccttttgcctttgaactcatattgcatattatctacattcgtcttatggcatattctaccttgtaatgt

SEQ ID NO: 767920 - DNA, 600 bp, Homo sapiens
tttttttaagaaccctctgtttaagagaccaatgactgggttcacatctttagtattctgcatacaattcttcaggaggaagccatattcctcttgaatgaatctcatggcaaaaaatagtagctcgtagctactatttggatggaatggcttggaattttgaagaaatttcccgatgatctttatgatatgggaactatagtatggctataatagaataaataattgatagcattatgtaaaacatacttagactttctaggccgatcaattagaaagaatagagaataatgccttcttcgggaaagaactaagctaaaggagagatatttctatttgagcatagtaaagagtctaagaaggcaaactcactragatgaagccataatttagttgaggacaggtttgttgaaaatgttttaaaagcactctgttccaaatctcttagcaataatcatcctggattatggttttgtgttgacttgttgatctgtcccctttgcttaaggcctctaagcttagtatctggaacagatataatcctttaaggcttagtgaatgaaagaatgaatgaaaggactcatttctgtatgttgtgag

SEQ ID NO: 767921 - DNA, 692 bp, Homo sapiens
cagtttgttataatttctgttcttttacattttctgaggaatgctttacttccaactatgtggtcaattttggaataggtgtggtgtggtgctgagaagaatgcatattctgttgatttggggtggagagttctgtagatgtctattaggtccgcttggtgcagagctgagttcaagtcctggatatccttgttaactttctgtctcgttgatctgtctaatgttgacagtggggtgttaaagtttcccattattattgtgtgggagtctaagtctctttgtagatctctaaggacttgctttatgaatctgggtgttcctgtattgagtgcatatatatttaagataattagctcttcttgttgaattgatccctttaccattatgtaatggccttttttttctcttttgatctttgttggtttaaagtctgttttatcagagactaggattgcaacccctgcctttttttgtttttcatttgcttgccagatcttcctccatccytttattttgagcgtatgtgtgtctctgcacatgagatgggtctcctgaatacagcacactgatgggtcttgactctttatccaatttgccagtctgtgtcttttaattggagtattcagcccatttacatttaaagttagtatagttatgtgtgaatttgattctgtcattattatgttagctgg

SEQ ID NO: 767922 - DNA, 645 bp, Homo sapiens
tattcagggcccgtctatttccttctaccattaaacctgcgaggacgaaagtaactcaagttcattgttctccaccacgtaatctttcttcctatcctggattgtagcgggggcagctcagagggcatgtcaagaaggaaggaaggggaagggctatacaggatatggtgctggggcacacagtcagtgctttgggtgatcaacatcaacgtggtggtcctgggttaggattttgaggatgggatggaaggaggaggacgagaaggggatgggtgatgcccggtggctggtgcttcacaatttaaacgaggcctgtcttaggaaccccaggaacaagtagcttgcagggcacaacccttgtacaataagaacagaatgcgggaagactgaggagagcaatgaatgctctttgggtcctcaaagtaagaagggratttgatcagagctttccgagggcacctggcatctcccataggccatgactctgtgattctctgacttccctctgtagctggctggcttctgtaaaattatcaaagagaagatagacctcaaacttaaaaaaaaaaagtgaactgagaatgaaattacaccgctacagttcacttattaaaattcatcagcatgaagactttctcaagccat

SEQ ID NO: 767923 - DNA, 601 bp, Homo sapiens; identical to SEQ ID NO: 767779

SEQ ID NO: 767924 - DNA, 543 bp, Homo sapiens
tgcaaaaccagtgacctttctgttgtgtctgcctctaatgtgtttaaatggttttgactgtgtcagcattacatacacatttaaggggcactctagacatggacaatgcattgtattgtcttttagcatatgcattaaatgaaccaatgagcccatccattttcaagaaaaaaaaaagtaatagaaaaacaaaaagaggccgggcacggtggctcatgcctataatcccagcactttaggaggcagaggcaggcggatcatgaggtcaagagatcgagaccatcctggccaacatggtgaaaccccaactactaaaaatacaaaaattagctgggcatggtggcgrgtgcctgtaatcccagctactcaggaggctgaagcaggagaatctcttgaacctgggaggcagaggttgcagtgagtcgagattgcaccactgtactccagcctggcaacaaagtgagacttcatctcaaaaaagtaaaaattaaaaaaaagagtacacattaaaaattagcatccataattactattgcagcatta

SEQ ID NO: 767925 - DNA, 634 bp, Homo sapiens
acatgggttttaaactttatgttttgaatgccttcatttctctaaagatctttcaaggattgctatgtaggaataagtgaagaataaatgagcccaatcaaacacatacaaatctcactttacaaagaataattctgtgttttttttccctattaggttggaatttgtaatggaatttagttgaaagaataattgccagaaagaaatacctgaaaaccactggtctgtaaaaataaagaagattctcagtatgctgattaaatagtacctgagctactgtgttataatctgaatgccatacttcatggaatgtatccagcggagagtcgtctcacctaattctaaggaaatctgaattgcattatataagagactatcatttgttcagcaaatatttatttaccagattttcactaatccactgggcactgctgatataagactgaggaagaggagacaaggttttttcrctgatgaagctgacattttagtgggtaagacaggaaaaaatatgtaataaaatggtaaatacagtactggcaacaataataatccatatttttcaagttgatgagttcataaaatgtcccagaaaaaggtatacaattttaactaataaatacaattgaaatat

SEQ ID NO: 767926 - DNA, 603 bp, Homo sapiens
taataatctctggggaaaaatattctcaaagagtcacttaagatgcagggtactttcctttagtttataaaaattaccacatctttgaaatcataccaccccacagatgtatccttgagcctttatattttcataaactttattaaattcaatgacttcaagatctattcaaccatacaaccttaaaacaaagaaagtgatttgttttttcttctttgatacacctaagcccaggtatagaaatattactagacgtaataactctggaaatcgtaagcaattttatagtctctatctttcacagccttaagaayagatcgttgttaaaagaggccaaattcaataacacatttttaaatctgaaaatatgcatttaagaaaactcagtgctgtttgaacccatacgattaatttaccatgggaaagaaaaaagtaaatgtaaagaggaaaccctgaataattcatttatattaattcataaaaggagtagttgtcctatcattgtactttcactgccttttttagaaactggttttgtattaccatataattgatcaaatattgctgttcttatttaaaagaatatattaaaattagctatgc

SEQ ID NO: 767927 - DNA, 576 bp, Homo sapiens
agttgtcctatcattgtactttcactgccttttttagaaactggttttgtattaccatataattgatcaaatattgctgttcttatttaaaagaatatattaaaattagctatgccttatttgaatcaattttatgttaaaagtagacagtaatttctttgaatttaaaaatactccttagtggtcactttgaaaggctgcctgatatatttacccgtttttgtgtttgaagaatccccctgccttttactgcctgggcaaaggacagaaaatatttctcytgtaagtgctgaaaataccaggtatctgttttcccagctttcacttgggatacaggcatgtggctttagatccttcaagcagatgtaacacacccaaccacaagtaaggagctaaagacgcaagtggaaggcactctctctatttccctatgacacatgtattctctctctctctctctctccccccttctctgtctccctctctctctcattctctgtctcccagagagatcatcagtctcctggagcaaaaaaaaaaaaaaaaaagatctttgaatgcatactcaggtgcact

SEQ ID NO: 767928 - DNA, 569 bp, Homo sapiens
tttaaaaactttcaaacaaaagaaaatttgaaaatgagccagagatgataaacagtaaccaagcagttgaagcttgaccaggacaagaaagccctaagtgccctcctcccaactgccaggctagcaaacagtgaggaacaaccaatagcaatctacatttggaggagagatgagaacatgaagagaccctgctgaagcacaagagcacagagaaggcctaaaactgagtggagcaggaacactgagaataatcttccagcaaactcaaggacawagtaacactaaacaaatttgaaaccactggtgcaccataacagcaagagaatccaaacctagctcaactccagtagaaatgtgttcatctctaggcttaaaagctatagccctataacctaatgcccaacattaaatccaaaattataactcacataaaaaaggaaaggtaaaacaaaacaaaaaacaaaaaccaagagacaaagcaatcaacagagcagtctacaagaattagagtggatccagatgctggaactaccagagagagaacttcaatcaactatgattaaacatgt

SEQ ID NO: 767929 - DNA, 618 bp, Homo sapiens
actactgggtatatatcttataaaagtgtgttcacatgtgcaccaaaagacattaaagaatgcttttagtggcattatttacaacagcaacaaaccggaataacctaaatatgaatctgcagtaaaatggcaaaaatactatgatacatgtattcaatagagtattatgtagcagtaaaaaatacactgcaatggtttgctatgccacaatgaatctcacaacataatggcaagtgaaagaaacctgagaaagaagacattctgtacaatttttttatataaaactcaaaaccaggcaactcgaatctctgttgttttggtttaataagttgttaatgttgggaaagactgcaartataataactgaaagagggcagaagtggagttaagaagtacagttaagatgtatacacttctatttgtatgtttaaatatatatatataaacagtaaaaataagtatattcctatgttagtaattctaatttgacaggatttgaaaatcagaaataatagtttaattttcactaaatgctttttgacatttattttctatatacagtatattatattttctttatcactaaaaacatttggaatcttgtaaaaatttcaattc

SEQ ID NO: 767930 - DNA, 601 bp, Homo sapiens
actaactgcagacttctcagcagaaatttgacaagccagaagagattggaggacaatattcaacattcttaaataaaagaatttccaaaccggaattttatatgtggccaaattaagcttcataagtgaagaagaaataagatccttttcagacaagcaaatgctaagggaattcatcaccacctgccttgcaagagttcctgaaggtagcactaagcatgaaaggaaaaactgataccagycactgcaaaaacacactgaagtacacagaccagtgacactatgaagcaatcacataaacaagtctacaaaataaccaactagcatcatgataacagaatcaaattcacacttaacaatactaacctttaagaaacccatctcatgtgcaaagacacatataggctcaaaattaaagggatggaggaaaatttaccaagcaaatggaaaacagaaaaaagcaggagttgcaatactggtttctaacaaaacagactttaaaccaacaaaggtcaaaaaacacaaaggacattacttaatggtaaaaggttcaattcaacaagaagagcgaactatcttaaatatacatgcacccaataca

SEQ ID NO: 767931 - DNA, 665 bp, Homo sapiens
actctaatattgatcacataattaggagtaaaatactcatcggcaaatgcaaaagaactgaaatcataacaaatagtctcttggattgcagcatcatcaaattgaaacccaagattgagaaattcagtcaaaaccatacaactacatggaaatggaataacctgcccctgaatgactcttgggtaaataatgaaattatttgaaactaataggaagaaagagacagtataccagaatctctgggacacagctaaagcagtgttaagagggaaatttatagcactaaatgcccacaccaaatagctagaaagatctcgagttaacagcctaacatcacaacaaaaaaaaaactagagagctaagagaaaacaaaccccagagctagcagaagacaagaaataaccaagattagaatgaaactgaaggagatagaaaaaagaaaaacccttaaaaaaatcaactaattcaggagcacrttttttgaacacattaataaaatagagtgctagctagattaataaagaagaacagagagaagattcaaataaacactattagatatgataagggggatatcaccattgaccccacagaaatacaaacaaccatcagggactactataaacacctctatgctcataaaatagaaaatctagaagaaatgg

SEQ ID NO: 767932 - DNA, 617 bp, Homo sapiens
tggaatagtttcagaagaagtgaatggtaacagcttttctttgtacatctggtatgattcaactgcgaattcatcaggtcctgggcctttttttattggtaggctatttaccactgattcaatttcggagcttgttattggtctgtttagagaatcagtttcttcccgactcagacctgggagggtgtatgtgtccagaaatttatgcatctcttctaggttttctagattgtgtgcatagaggtgtttgtaatcgtttctaatggttgttttcatttctgcattaccacaaatttactggcttaaacaacacaaatttattacctcatagttatggaggtcaggggtctggaataagtttcactgagctaaaatcaaggagtcaacaaggctgccagcttcctgaaggctcyaggagagaatccattttcccgttttttccagctgttagacaccacctgtgttccttggctcctgtcctgcatccctctgacctctgcttctgttgccatatcctcttctctgactctgaccctgctgcctccctcttataaggatactatgatttcactggacccacccacataatccagaatcatctccccatttctacatcc

SEQ ID NO: 767933 - DNA, 510 bp, Homo sapiens
gtccttttttcaaagaaatgtccacaaggacagttctattttaagaacatttaaagatcatgaagtaatgttcacatggaagcatagcaggtggcttacattggcacaacaatatcatacttattttttcgaagaaacaaagctttgcccttytaaattttcataattaagatccctttcatctagatttggccttatgaagtgatctgtctgactctgctttttctagacagactaaaaaatgcctggaaatgaaagtacttttccagctaagtgagttgctttcagaactaaaatccagggctcaaacttctagtactctctcgccccactataccataatgtcatccttctcaccaaataaatattataggaatctggaaggcatcacaatatttgaattcattgccaacagagtatagatcacacagattgctttatttaatcagtacatcttaactgagcaattcattttgaaggcagtagaaaataagttaacaatttttcaaa

SEQ ID NO: 767934 - DNA, 588 bp, Homo sapiens
cccaaaatttccatgtgctcctttggagtcaaccattcctcaactccccagcactgagaaatcactgatatgattccttacactatagttttgatttgtgcagaatgtcgtgtaaacggactcatgcagtatgtagtctttacatctgtctttttaaacttagttttatgcttttgagactcatccatgttgttgcatscaccaagagttggttgctttttatcactgagtaatatctccttgtatgagtgtaaagtaatatgtttatccactcatcagttgatagttatttcttggcagttctgaataaattttgcaggtaggcctttgtgtagccacatttttttgtgtgtggctaaatactcaggagtggcattgctgggttgtatgttgtacattaagtgtaggtttaactttacaataaactgttaaatcattttataaagttgctgtgacattttgcattctgaccagcaatgtgtgagagtttcagatgtgttgcatcttttctagtcttttctattgtcagcttttagtttttaaatcttagccattttattttattttattttttgagaaggagtctca

SEQ ID NO: 767935 - DNA, 642 bp, Homo sapiens
gactttagattacttgttccttgcctctcccagtagaatgtaggcttcatgagaacatatactgtgctttgtttaccactgcactccctaccttcaaaagtgcctgataagtagtaggcactcaatggctgtaaatcagatgaataaatgacccacacggtgggttaatctgccaaacgtagagtgcctacaatatataaacaatccaaggaatgaatggatgtgaccagggcattgataaagaaggaaatgtgacggatcgtactaatatattgtaaaagatcaatatcattagtgtccccataactgcatattaaaatacttagataacctttccayttagaagattagtaccaattaaaaattactgatactattcactgctgaaggagatatgaggaaatggtcattattttacactgctggagaaagtttaaattgctactaaaataatctggtaataaatattaatgtgaaaaatgcgaactcctacgaatgttctagagagaatctataatatagatttaaaatcacataaaaaaaactctattgcagaattgcttgtagtattcaaaagtaaacattcttttttaaattttattttttaattgacaaataataattgtttatgtttgtgaggta

SEQ ID NO: 767936 - DNA, 604 bp, Homo sapiens
gaaggataccagacgctgatgtctgaaaacacagagccctgaatttcatctctactagtagtttcatgtgttattcagcacgtcctttaattaattttattttatttattttattttatttttatttttggcgacagaatctcgctctgtcccccaggctggagtgcaktggcgcgatctcagctcactgtaacctccgcctctcgggttcaagtgattctcatgcctcagcctcccaagtagctgagattacaggcacatgccaccatgcccggctaatttttgtatttttagtagagacaagttttcgccatattggccaggctggtctcaaactcccaacctcaggtgatctgcccaccttggcctcccaaagtgctggaattacaggcatgagccactgcacccagcccccttaactcattttagagtcctttttcatctgtaaaatggtgatcataaaaatatttaccatacagtgttgctgagaagataaaatgcattaatttatggaaatagcataatttctagcaatagcaggatttcctcaaatagtatctacaccaacccttgtttgctttctgatttctatagttgcaggcat

SEQ ID NO: 767937 - DNA, 604 bp, Homo sapiens
gaaggataccagacgctgatgtctgaaaacacagagccctgaatttcatctctactagtagtttcatgtgttattcagcacgtcctttaattaattttattttatttattttattttatttttatttttggcgacagaatctcgctctgtcccccaggctggagtgcattggcgcgatctcagctcactgtaacctccgcctctcgggttcaagtgattctcatgcctcagcctcccaagtagctgagattacaggcrcatgccaccatgcccggctaatttttgtatttttagtagagacaagttttcgccatattggccaggctggtctcaaactcccaacctcaggtgatctgcccaccttggcctcccaaagtgctggaattacaggcatgagccactgcacccagcccccttaactcattttagagtcctttttcatctgtaaaatggtgatcataaaaatatttaccatacagtgttgctgagaagataaaatgcattaatttatggaaatagcataatttctagcaatagcaggatttcctcaaatagtatctacaccaacccttgtttgctttctgatttctatagttgcaggcat

SEQ ID NO: 767938 - DNA, 515 bp, Homo sapiens
aaaataacatgtacctcataaatatgtacaaatattatgtgtcaataaaaagttaaaacacaacaaacaaaactccagctcttattcttatagttgttcctgtaaatgcaaggtgttattttgtcccccctctaacttctttcactttcggtagtgttactaacaaaacccaggtattcttttctttgtatttatcctacttggggtttgtatagcttcttaaatcagtgccttgatgtatttgatctgatatatagaattctttgccagtatctcttcaagtattactactgtttctgttatctcttattctgctgtatctgctgttaaactatgtrttgagtcaacgatttcagttattacatttttagttctaaaattcctatttcattgtttcctatagattccagttcataagtgaaatttcccatcttgtcacctattttctgaatatatttggcatagtaattttaaacctatgtctaatagtgccaatatttatttttatctatggg

SEQ ID NO: 767939 - DNA, 616 bp, Homo sapiens
gtccttattaaattaagaaccagagaagggtcatgcctgatacggaagtcttttctgtagttcacaacgagtctaatacacaggttcaagtatttctccttattactactgcacagttacacatcattctgtgggttttatttctttttcttttaatatctgtgatcaggaaaagaaagaaacacttcagaaatgaaagattagtttcctaaatcataaagatgagctttgtaatcattttcctttaagcaaggaattaagggataataaaagccctaattaaggaccttgttagcttaactagattttcatatgcaaaacacagttatgaagtgctgctacagaatgaatggagatgcctcctgtccacarcaaacccaaagggaagcattcttgccagggcttttcttttgcttcttctgtctttctgtccatgaggggtcattctgtttctgcatgagcaccaattctcttcaccctggccatgattccttcttctcattttggttgtccagtcttttcgctttctttcatcgtcttttaaaatttgccatgattcactcatccatttattaattcaactagcatgtattgagacttcattgtgagccaggga

SEQ ID NO: 767940 - DNA, 613 bp, Homo sapiens
caagtattgatatttcatttaaaaaatcacacaaaaaaggatcttccaaatattgacatttcttcaaaaaaatcacactgtagcctgacatggtggtgcacacctgtagtcccagctactcaggaggctgagatgcgaggaccacttgagcctaggagtttgagaccagcctgggcaacatagggagactctgtctcaaaaaaaaaaaaaaaaaaaaaaaaaaggcccattkgttaatattactactaatctcactagaaaagtctaagtgttgggaagctatcaagctcactggttacatacaagtgttccaaaatgctaattttattggaaagttcaaatgttatgaatggcaacaaatgctgtcagttgtattccttgtattgacaggcttattttgttcatttttgagaaaatgtctgccaaatacctaaatctggaaacctgttctttcaagtaagatggtgaaaaaagtggctagttttgcttacttataactcaatagcaccagttcttctcatagagctgccattgtcactcagcatgcagcagcaaatgctataggtgtacttcctatcttatcacatacaattgtaaaaggactggtactaaa

SEQ ID NO: 767941 - DNA, 530 bp, Homo sapiens
gagtaacagtttggagtatgtttacttgctgctttttaaggagttttctttttctttctttctttttttttttttttgagacagagtctcgctgttgcccaggctggagtgcagtggtgcgatctcggctcactgaaagctctgcctcctgggtttacgccattctcctgcctcagcctcccgagtagctgggactacaggcgccygccaccacgcccggctaattttttttgtatttttagtagagacggggtttcaccatgttagccaggatggtcttgatctcctgacctcgtgatccgcccacctcggcctcccagagtgctgggattacaggcgtgagccaccgcgcccggtgtaggagttttctttttttaaaaacacttcctgtggcttgctgataagaagttagttgctcttttccctcctacactcggaactgtagaattcctttaggccccacccaatcctctgttcctcctgttttctaacctactaaaccagacaggtgttccctcctgccttcatct

SEQ ID NO: 767942 - DNA, 542 bp, Homo sapiens
gttgataacagttgagagctagataactgataatactgttcaaatttggcttttattaatgcactctagggacagttgtgtttgagtcaacctccagctaaaatgatagaaaacagatgtccttaaaacaggctatgtgaaaacaacagaaatgtccattcggaggagaatgttggaataaattacagtatgtacagcagtaatatctgcagccactaaaaattatgtgtaggtctatgtttactggcatcaaaaaatacacaatttattgttattggtaaaagmtagttgtgaacttgcttgtattatatgacctcttcttagaatatatgtcctctccccttccctcccctctcatcccctctcctctcctcccattcctgtccctctctggccctcccatttgctctccttccttcccctcctgtctcctgccttattcttggctcctctactttttctctcctgtatttcattctgtctctccacgtatttagaactactccccgtgtgtgtgtgtgtgtgtgtgtgtgtgtgtgtgc

SEQ ID NO: 767943 - DNA, 612 bp, Homo sapiens
ggtaatctatattatatagaccatgtaaattgtgtctataattaacaaatgtttaaaatgaaaacgaaatgttaactatatttcacttgtataaaaaattaactgatccacaaaagtacaagcaagcaaaggccacgcagactgaaatacgctagctctcctctgtgccttccttgagggctcaagactcctgtgaccgatcataaacaagaggtattttcatacaaaaacttaatttgaatgctattcaatacactagcctcgcgaacgtttaaaagaatggtcgtatttatgggcacaaaatccaatttcactaatttctcttaatatccaccctagaggattcatacccaactgttatttccagggagagagacaaaggcgagaaaaggtcgggggaaattgcacttaatgtttgatttgatttctttggatagagatrcaggtactgctgtacaaatttcgcacacacacacacacacacacacacacacacacacacacgacacacgaatcaacatccgtgccttacgttgctttctgtttaccttcacagcaaccttcgagatgtgtgagtttaagcagatgcaacaccctttgacaacaaagacg

SEQ ID NO: 767944 - DNA, 622 bp, Homo sapiens
ttccagggagagagacaaaggcgagaaaaggtcgggggaaattgcacttaatgtttgatttgatttctttggatagagatgcaggtactgctgtacaaatttcgcacacacacacacacacacacacacacacacacacacacgacacacgaatcaacatccgtgccttacgttgctttctgtttaccttcacagcaaccttcgagatgtgtgagtttaagcagatgcaacaccctttgacaacaaagacgcagcacactgggttaaagtggattgaaatcagacatgtcacattttaggagagaatgcatgcaagtagggcattagtccaattcttttgtactgagcatttcaaagttgagacccagtgggtggggcaaaaataaatcaagccctcctatggcgagaatgtacacggactccagcatctccaatctgaccctatcttttgctctccggattgtcagctgcttygggggttgtctgatatatgcctccttttctcacttctaagactttttagctgggagtgtgtttgaaaacacttcagaaaaaggatggaaaacacagtgtctactttgaaatgcgttcctttgttaaatccctctcccaggaggaccag

SEQ ID NO: 767945 - DNA, 601 bp, Homo sapiens
tagtatccattactaatgggtacagtactcattaggaattggtatgggtacaattacccaacagttagaaggaataagttctcatgtttgatagtacaatagggtaaccatagttggcagcaatgtattgtatatttcaggatacctagaagagaggacttttaacactcacagcactagaaatgataagtgctcaaggggatgtgcagcctaaaaccctgacgtgatcattacacattccgtgcatgtcgcaaactaccacaggtaccccatcagtatgtgcacatattatgtatccaaaaaaaagtcataactgttcctgctatccctccccgtcttaaaagctgcctagwgtgaacaccagcctgcggtcatgggcgggcctggctctggatcagacgcggagagccagcctggtgttgtaggaagagctgtgaactaggagcccggagacttggctctgtcaccagcggagggcgatcttggtaagaaggttcatttcccagggccacgtggattcatctctgaagcagagacaagtaggaaattctacacgcgccatccaaggtccaaagtgctacatcccttcctctttcctttt

SEQ ID NO: 767946 - DNA, 483 bp, Homo sapiens
tatagtttccatttcacaaatgaggatcctgaggcacagaaaggctacaccgcatactggaggtgatcctgttgtgagatgctggggctgggatttaaaccagatcatctggctctagctcttgtcctctattgatctctaagtcatcacacccaatccactgtattagataaggtacgcygcctgtgaaagcaaccatcatttccccagcaactgtgtcttcctcctcaggagaataataacacttctcaaacagcttgcgctccactcttgtaacatacatttacgttttgatgaataatggatatcctgcctggtcactatgaaatttgactttgcctttattgaggccatctcattctcaaatttccttgtgaactcgtagtgtttgccaagtcatgcttttgccatctttggactatttaagttgttgcctttaagatgcacttgactttaggccattttcagatgatcctctggctt

SEQ ID NO: 767947 - DNA, 557 bp, Homo sapiens
tattgttcacagcttaaataataccaataattgcagaaacaatggacttcctgggactctggcttcgggtgtctgtggtcatgtcaaggacagtccagcttaatgcccaatttagggctgggaggaaagggagatgggagttttcggggttttttttttgttgtttgtttgtttgttttgagacggagtcttgctctgtcacccasggtgaagtgcagtggggcaatctcagctcattacaactctgcctctgggtgcaagagattctcctgcctcagcctcccgagtagctgggattacaggcgtgcgccacctcacctggctaattttgtgtgtgtgtgtgtgtgtgtgtgtgtgtgtgtgtgtatttttagtagagatggggtttcaccatgttggccaggctggtctcgtactcctgacctccagtgatccacccacctcagcctcccaaaatgctgggattacaggcatgaaccaccccacccacccaggagttttcttctctctgtcacattgcctctgcatgtccctttcctttcccctctgcctagctc

SEQ ID NO: 767948 - DNA, 557 bp, Homo sapiens
tattgttcacagcttaaataataccaataattgcagaaacaatggacttcctgggactctggcttcgggtgtctgtggtcatgtcaaggacagtccagcttaatgcccaatttagggctgggaggaaagggagatgggagttttcggggttttttttttgttgtttgtttgtttgttttgagacggagtcttgctctgtcacccagggtgaagtgcagtggggcaatctcagctcattacaactctgcctctgggtgcaagagattctcctgcctcagcctcccgagtagctgggattacaggcgtgcgccacctcacctggctaattttgtgtgtgtgtgtgtgtgtgtgtgtgtgtgtgtgtgtatttttagtagagatggggtttcaccatgttggccaggctggtctygtactcctgacctccagtgatccacccacctcagcctcccaaaatgctgggattacaggcatgaaccaccccacccacccaggagttttcttctctctgtcacattgcctctgcatgtccctttcctttcccctctgcctagctc

SEQ ID NO: 767949 - DNA, 627 bp, Homo sapiens
atgtaacacattttttgtatccattcatctttcgatggacacttaggttgcatccaaatcttggcttttgtgaatactgctgcaacaaacatgaaagtgcagatatccctttgatatactgatttcctttctttggggtatatatacctagcagtgggattactggattgtatggtagctctatttttagttttttgaggggcctccaaacagttctgcatagtggttgtagtgatttttattcccaccaacagcgtatgagagttcccttttcttcacatccttgccagcattcattattgcccgtcttttggataaaagccattttaactggggtgagatgatatctcactgtagttttgatttgcattactttgatgatcagtgatgttgagcaccttttcatattcctgtttcataytcatatgtcttcttttgagaaaggtctattcagatcttttacccattttaaatcggattattagatgtttttcctatagagctgttagagcttgtaatattctggttattaatcccttgtcagatggctagtttgcgaatattttctcacattctgtgggttgtctcttcactttgttgattgtttcttttgctgtgcagaaggtt

SEQ ID NO: 767950 - DNA, 627 bp, Homo sapiens
gataaaagccattttaactggggtgagatgatatctcactgtagttttgatttgcattactttgatgatcagtgatgttgagcaccttttcatattcctgtttcatactcatatgtcttcttttgagaaaggtctattcagatcttttacccattttaaatcggattattagatgtttttcctatagagctgttagagcttgtaatattctggttattaatcccttgtcagatggctagtttgcgaatattttctcacattytgtgggttgtctcttcactttgttgattgtttcttttgctgtgcagaaggtttttaactggatgtggtcccatttatccagttttgctttggctgcctgtgcttctggagtgttactcaagaaatttttgcccactacaatgttctggagagcttccccagtgtttttgtttagtagtttcatagtttgaggtcttatatttaagtatctaatccattttgatttgatttttgtatatggtgagagacagaggtctagtttcattcttctgcatttggatatccaattttctcagcaccatttattgaagagacagtcttttctccaatgcatgttcttggcacctttgtcaaaaacaagttcac

SEQ ID NO: 767951 - DNA, 488 bp, Homo sapiens
agagcactttaacacgtggtggtgaggcttgcagaaactcaagttccgactgcttaggtgggtgattcccctcttgctagggctggtccaaatgctccctcctcctcagcgaatgccagctgagcccagcacagcttttctctctgctgtgacaggtcagcactgagttcagtgccaagtggcccagtcgctgtgctctccttccccaaaatgcacagattttctcttgcaccacacggccactgctggggggataggggaggggtggtatcagcgattcaaggctgtctttcctaccctcctcagtgcctctttgagcaatatgaaattagcaccgggtgctgtgaytgttcacctgatttttacttcttttgatggtgcttttttgtgtagttagttgttaaaatgtggtgttcctgcaggggggagccatcagtggaggcttctgttcagatatcttgctccaccctcagctataagctttctta

SEQ ID NO: 767952 - DNA, 641 bp, Homo sapiens
gcctccctcatcaaaaagctgtggatgtggagtgaggaaagcacaggtcatgtgcatgggatactctgccttgatctaaaaggaagtctgctctggcatgtctacaaagcccatccatatatccaaaataaatcactctccatgtgagatgtcagatatgttcatttgcctcactagagtagccagtttactgcccatatgtatcccacaacattatgttgtaaacctcaaatattacccaataatatttaaataaataaatcaggctaagcttgaatcattctgcgaagagytgatggaccatgctagacctctggtgtgcagggcagccacctgtccagcaaggttgatcattccctgccatcagaagatagtgttaagtgaaacaagggcctcacccatgtcatgtgcaaagggaaaacaaactaacaatagaaccatcagagttacatgaaattaaccatgttattaaacatgtcggggttcagcatatttttgataatgtaaaaatcagaatgatttcatcaaaatggagaaaatatgtagtgaccacatccaaaaaactatgtattcccaccaccacatgtacactcacacattttagtctgtgccacacaataactcactcttcactgggacat

SEQ ID NO: 767953 - DNA, 641 bp, Homo sapiens
gcctccctcatcaaaaagctgtggatgtggagtgaggaaagcacaggtcatgtgcatgggatactctgccttgatctaaaaggaagtctgctctggcatgtctacaaagcccatccatatatccaaaataaatcactctccatgtgagatgtcagatatgttcatttgcctcactagagtagccagtttactgcccatatgtatcccacaacattatgttgtaaacctcaaatattacccaataatatttaaataaataaatcaggctaagcttgaatcattctgcgaagagttgatggaccatgctagacctctggtgtgcagggcagccacctgtccagcaaggttgatcattccctgccatcagmagatagtgttaagtgaaacaagggcctcacccatgtcatgtgcaaagggaaaacaaactaacaatagaaccatcagagttacatgaaattaaccatgttattaaacatgtcggggttcagcatatttttgataatgtaaaaatcagaatgatttcatcaaaatggagaaaatatgtagtgaccacatccaaaaaactatgtattcccaccaccacatgtacactcacacattttagtctgtgccacacaataactcactcttcactgggacat

SEQ ID NO: 767954 - DNA, 619 bp, Homo sapiens
ttaaccaaaagtcattcaggaggtagtaggccattatcctacctgatttgacaccggaacagaaaaccaaataccttgtgttctcacttataagtaagagctaaatattgagtatacacaaacgtaaagatgggaacagtagacactgataaatactaaagggagaagggtgggaagtggaggaagcttgaaaaattatataycaagtactatgctcactacctgagtgaccaaatcttttgcactccaaacttcagcaacacaaaatttatccatgtaatgaacatgtacacgtaacccctgaaactaaaatgaaggttgaaaaataaatgaataaaaaatatttacattgctttaagcaatggataagaatgctagcttcattacattcttactagcattcacaattataaattttattatcattaaacattgcatttgtgtgatagtgatatcatagattatgtgattttgtgaactttatcctcaggtctatgaggaattattttttaatcctaacaaaacaaaggaaagatgcctatgtccaaatatatttatcttaagtttctaattgaggatgtatagaagtttggtacttttcatggctagtgattctata

SEQ ID NO: 767955 - DNA, 574 bp, Homo sapiens
gttttgtcatataggcttgtatgtaatttttctaacataccatcactatatacagtgcaacaactgctggcattgttcttatccatccatcatccattcctccatcaatccatccagcacttattgaatgtctactatgtgtcaagtggggattcttagaaccatgtagaaaagagcttagttccacactagttgggagagatagatgatagataagaaaacaaattagcaagatatttactgatcatgatgagagttatggagttaataaaatcaaataatggtatgcagyatgaggaaaggattgcgataagacctctctgaagaggtgatgttgagctcagataagaaagtgtcagccaagcaaagatgaagagatggacattttttcagaaagtcctgaggaaacaataaatgcaaagggcttagtgtggagatgaggtctctgcatttaaaaaacagaaggaaggtcagcatggctggaccatgatgagtgagaaagaagaaaacttgagaagaggtagaagattcacctcctctttgaagtttcatctaactgcagtggaagatcatc

SEQ ID NO: 767956 - DNA, 625 bp, Homo sapiens
aatacaggacagtacaaatatatttttataatttgttcttctatctgatttacaggacagctgtataaagcaattattataaaactatagatgattacagtatgtaaacatgtaatctgataataatcacacaaagaagtggggagaaaatgaagatayactaaagcaaagttttgtgtactattgaaattaagttggtaataatgcaaactagactatttttagttaagatattaattttaattcccaggacaatcactaagaaaacaactcaaaaaatatagtaaaagaaataacaagagaatttttccctagactcattcatacccagagtctcacccatacctgattaagataatttagaagatgagacttgtaactttgagtggatgacatttagatggggctgatgctatgagctgaggctttgagggatgttggaaggagctctatgtattttgcatgtgagatgttacgtgaatatcgggaagccagaggacaaactgcagtaggtttaatagtggtcccccaagaatttatgtctaggccctaattatcagaacctggacattatcttatttgggtggggggaaggtgtctgcaaatgtaattaaggatcttgagg

SEQ ID NO: 767957 - DNA, 535 bp, Homo sapiens
gtgaacaggtagatatatgaggtcaggaggaggtagctgcaaagttcagagcttttgcaattagaggcaaaagccaattgccaacatgcaccacacctcggtggataccagcgcaggatgttcagggaacaggtacaccacggaacatcactgcaggtaacagagtgacagactgatgcctaagtccaagcaggacaagaacagatgaataatacataagctgtcctgtgaaaatagactactcccragtggtagaaaaaggacacaagagaggcataaagaaaatacagaagactgagaatgtatgcaaaagtagctgagatagaaatcagactacgattgtaataatattttaatttcactgaaaaggcactgattggactgaaaatactggaattacaaaaaaagaataagttgtctggtcaagacagtgactgggagagtagaggacaaaatggaattataaaaaattacaattaaagaaaataaaattactttaaaaaaacacacatcaatcgttatgtgtaaattttga

SEQ ID NO: 767958 - DNA, 526 bp, Homo sapiens
tcctgttatgtcctttgccccctttttaatggggtgggttgtttgtttttttcttgtaaatttgtttaagttccttgtagattctggctattagacctctgtcagatggatagattgcaaaacttttcttccattctgtagattgtctgttcactctgatgatagtttcttttactgtgcagaagctctttagtttaattagatcccatttgtcaatttttgcttttgtggcaattgcttttkatgttttcatcatggaatctttgcccctgcctatatcctgaatggtattgcctagatttttttctagggttatagttttgtgttttacatttaagtctttaatccaccttgagttaatttttgtataaggtgtaaggaaggggtccagtttcaattttcagcgtatggctaaccagttttcccagcaccgtttattaaatagggaatcctttccccattgcttgttttcgtcaggtttgtcgaagatcagatggttttagatgtgtagtcttatttctgagat

SEQ ID NO: 767959 - DNA, 656 bp, Homo sapiens
gcccctcctctcgccgctgacacgctcagaggagtcaccactccgcgcgctgcaggcgagagtggcagacggaggcagcccggggaagcgagccggagcggcgcccgcactgaggcggctgcagtgctgacaccactcagggcaagggtstccgacggctggagcggtgagtgggggaggtgaagcgggcatccgcggggagactttcccccgctgctggatttctcttcccgactggtggccgggcgctgcagcctggggaagtttttgcagcctttcggaagcgcaactttgccccgcctgcccccggggaagcggctgcaggtgcccgctgctttgtaggcgcctttgttggagagggaccaggaaagtaggggtaaaatagatgcagtgaccccagggttcgctagggtaggtctggggactgggtcgcactttatctgggattcccagaggaggtgggtgggcagcagcggggatgcaggggccgcatctgcagcgaccgccacgctcttttttgcttgtgtggtttgaccggcagggataggcagattcaaatctagcagcctagagccccgggctgggtacctggacctataccttcatagctgccttaggctcaacttttcggcggggatccctctgcagacgtgcag

SEQ ID NO: 767960 - DNA, 618 bp, Homo sapiens
ctcaacttatttgatcagggaacaactgaagctaaattcaggggacaattcacagttctcatatttctatatttatcagcaacttttttaagagacaaggtcttgctatgttggccaggctggaatgcagtggctattcagaggcctgataatggcacacagcagcctcaaattcctgggctcaagtaatccttctgccttggtctcccaaggagctgggactacaggtgtgtgccactgtgcctggctgcaaaaacgtttcttcaatagatactagtgaatagagctttatcagcaacctctgacatagttaatcacttccttcttgtgctaattattaasatactctctagctcctaacctacctttctacattctgtttgcgatactagagatgggactctgcagactatattcctgagatggctccatggtaggctctgccaataggagacactagagggagatgagagagactggcaagctggaggaggaagaagggacctgctctttctcattctcttttcatgggcttttgtctacatgcggttgttgtgggtgtcatgccttagaaaaacttcttcaccccagaagaggcagtttcttcctatttcagca

SEQ ID NO: 767961 - DNA, 643 bp, Homo sapiens
cagtacagcttggtgacgtttagtatgttcatattgttgtgcaaccatcactaccatctatctcgagaacattttcatcctccccaactgaaattctccctatttccgtcacctctgccacctcggcaccaccattctactttctgtccttatgaatttgactattctaggtatctcacatgtcagtggaatcatataatatctgtccttttgtgatagacgtatttcacttagcaaaacgtcttcatgkttcttctatattgtagcagatgtcagagtgcccttcactgttaaggctaaataatgttccattgtatgtatacactgtattttgtttattcattcatccatcaatcgatatttgggtcgcttccactctcaggctattatgaataatgctgctatgaacatgggtgtacaaatttctattcaagttcctgcttttatttttttgggtatatacctggaagtgaaattgttggatcatatggaattctatgtttactttttgaggaatcacttcattcctttttatggctgaataatattccattgtatggttatgctgtgttctagctatccattcatcagttgatgggcatttaggttgcttctgcttttgggtattatgaataacggcgct

SEQ ID NO: 767962 - DNA, 643 bp, Homo sapiens
cagtacagcttggtgacgtttagtatgttcatattgttgtgcaaccatcactaccatctatctcgagaacattttcatcctccccaactgaaattctccctatttccgtcacctctgccacctcggcaccaccattctactttctgtccttatgaatttgactattctaggtatctcacatgtcagtggaatcatataatatctgtccttttgtgatagacgtatttcacttagcaaaacgtcttcatgtttcttctatattgtagcagatgtcagagtgcccttcaytgttaaggctaaataatgttccattgtatgtatacactgtattttgtttattcattcatccatcaatcgatatttgggtcgcttccactctcaggctattatgaataatgctgctatgaacatgggtgtacaaatttctattcaagttcctgcttttatttttttgggtatatacctggaagtgaaattgttggatcatatggaattctatgtttactttttgaggaatcacttcattcctttttatggctgaataatattccattgtatggttatgctgtgttctagctatccattcatcagttgatgggcatttaggttgcttctgcttttgggtattatgaataacggcgct

SEQ ID NO: 767963 - DNA, 599 bp, Homo sapiens
attttgatcaaaagtatctgtggatataatttgatttcctggactcattgccattttttggatttagtgttatcatagagcgggtgtctgttaggtgtctgcccagcatctgttcctgtttctctcctgcagaactccagttgttttttcttttgttattcatacctacaaatgaatccacatgccttgggaagccagtgaacccacagctccagatgggcctgactggtgaaaaacttcccattctcttttccagggattggcatgaagggatgtctgttgagcggcggttgtaggagacatttctttgccccaaggaaaagctagaaaatttgatctctttcttctccgggatctggtcatgtggacatgtgactctgggatctgtgaagccttgttgctgccasttggaggatgaagccaacactgaggaggccgagcaggatgagggatctatctccttgatcctgccattgagccatggacccactgccttgaagctgcatctctggactttacactgcgtgaaataatacatatctttaatgtttaagccattttagttgtgttttctattactttagctaaaagtaccatta

SEQ ID NO: 767964 - DNA, 619 bp, Homo sapiens
tactgtgaaaactgaaaaaacagcgccttgacttcatttccccctcaaagttgcaacatcagcccaggagtcagagcactgaaaaggctttagtctgtaggattaaaacctaaaatatgtgcaacaatgaaatacatgatctgcacacttaggtcagtttccctatgagcaaacattccacattgtttctaaagcactatcatcattaataaactctcataggctctttttatgtataagaattggtattaggaagataaatagatacttgcctatttctacaggaattctgccatcagagtaggggattatttcccatacattcttcatgtttcaagttttattcacctgcaatatttagggatattttcatgaacatagaattctatcttgctaattttaccccrgtattttatagatggcatttctttgtcttctggcttgcatttttttaaatgttactggtaattcttaccttgtctcttgtatataatgtgtcttttttcatgggttgtttgaattttttaaaaatcattgatgtggctttctttatgcttctgatgtttgaagtttgagtttcttggatctatggatttataattttcataaattttggaaa

SEQ ID NO: 767965 - DNA, 561 bp, Homo sapiens
ttgatgtgctgcttgtactatttctttgatacttttgcactgatattgagactgattataaaaggcagttagcagctttctctcttccagtgggctctggaacattttaaaatagtagcaatatttttgccataaatgtttagtagaattcctctaagagctttttggragataacatagtttctttacttaaagaaaaaaaggaaataaaattaatttcagttttacttgataaatttctaaatttttttttaaattttcttaaaataggtgcactcaaaggaattaacaaatgtttttgaggaaacaggtaagtgaaatacattttaacatgattgcattttgctaaatactcctgattatttgggatataccttgttcaaatatgagattgaaactgagtattccttttctccaagagtaatacttgtattatcagcacttctttcctgcaaaggccttggatttggcagtttggtaggcaaaagaaggtcttttcatcctgtcatcagttgaagactatgtggctacaaggattttctatgtaagctcaataactac

SEQ ID NO: 767966 - DNA, 585 bp, Homo sapiens
tttttaacagtagccattttaacggcagtaggatatctcagtgcagttttgatttgcgtttccgtgatgattaatgatgttgaacattttgtcagacacctgttggccatttgtatgtcttttgagaactgtctgttctcttttgcctattctttaatcagattatttgtttttttgctattgagttgtttttgttccttatatattctggttattaacttttgtgagatggatagttgggaattttttctcccattctgtaggttgtctcttcactttgttgattgttccctgtgctatgcattgaaaagtctttccatattgcttttattttaagattaaggccaatttttacttcacattaattttaggttcccttagccattttttcagtttttaaaactggatattttattgaaatgtttttyactaaaatgcattagacttatattacaaatgctatattggattaggttgatgattgatctcagagcaatttaactctgataatgtctaggaaacattacagatgaatttgtttacatcattcacttctcctaattactaattatgggattattttct

SEQ ID NO: 767967 - DNA, 599 bp, Homo sapiens
tttgttttttttaatctcttctagtccttctaacctgcttctagacccactgcattgtccagacaacgtctgttaacactggcttagttcagcttttcccaagcacctacagttatgagcatagagttagacaatctcaactgtgtcctcatgtggacctgctggagcttccccaaacaaaattaccttactttgtacaacctgtyccttccttctggaatatctttcccaagccagtgacatctgatgcttcccttaagacctagtttacctcttccaggaagccctcctagatgatgccatcatacttgctccagtaaaacctgtagaatccacccagaacagtagctcccttagcatttcccacattgcgataatttttaaaatgtgtcggactctcacctgaaattgcaaacctcatgagggcaggaacgctgcaccattctgatctgcatcccactgcctttgaattaagacacaaattaatatttcaagtttaacaatttgtcatcaaaattgaagatgctttcaaggctgttaaaaatcgtctctttaaaaatagagtttaaggttttaaatttccataaacattaaataga

SEQ ID NO: 767968 - DNA, 599 bp, Homo sapiens
tttgttttttttaatctcttctagtccttctaacctgcttctagacccactgcattgtccagacaacgtctgttaacactggcttagttcagcttttcccaagcacctacagttatgagcatagagttagacaatctcaactgtgtcctcatgtggacctgctggagcttccccaaacaaaattaccttactttgtacaacctgtcccttccttctggaatatctttcccaagccagtgacatctgatgcttcccttaagacctagtttacctcttccaggaagccctcctagatgatgccatcatacttgctccagtaaaacctgtagaatccacccagaacagtagctcccttagcatttcccacattgcgatawtttttaaaatgtgtcggactctcacctgaaattgcaaacctcatgagggcaggaacgctgcaccattctgatctgcatcccactgcctttgaattaagacacaaattaatatttcaagtttaacaatttgtcatcaaaattgaagatgctttcaaggctgttaaaaatcgtctctttaaaaatagagtttaaggttttaaatttccataaacattaaataga

SEQ ID NO: 767969 - DNA, 599 bp, Homo sapiens
tttgttttttttaatctcttctagtccttctaacctgcttctagacccactgcattgtccagacaacgtctgttaacactggcttagttcagcttttcccaagcacctacagttatgagcatagagttagacaatctcaactgtgtcctcatgtggacctgctggagcttccccaaacaaaattaccttactttgtacaacctgtcccttccttctggaatatctttcccaagccagtgacatctgatgcttcccttaagacctagtttacctcttccaggaagccctcctagatgatgccatcatacttgctccagtaaaacctgtagaatccacccagaacagtagctcccttagcatttcccacattgcgataatttttaaaatgtgtcggactctmacctgaaattgcaaacctcatgagggcaggaacgctgcaccattctgatctgcatcccactgcctttgaattaagacacaaattaatatttcaagtttaacaatttgtcatcaaaattgaagatgctttcaaggctgttaaaaatcgtctctttaaaaatagagtttaaggttttaaatttccataaacattaaataga

SEQ ID NO: 767970 - DNA, 599 bp, Homo sapiens
ggggtctaaaagacgtctgatgtgctgatgtctgttcagtcttctgcactcatgggcgtaaactctcaaagagcaccactgggtcttagtccgtggcataaagactattctcaatgtagatattgtcttctgcttggacttccttttcaactgcattttgcaaagctttaatttgaaggctgctaaatgaaacactgtagaaagagttgttgaagaataacatgagtaagaaaaaaagcagaccacttctcacatataagctgcacttttgtttatgatcaggcaatatcaggtattcsagactccaggagccccgttcacacaaagtataaaataaatagtgccttccagagttgtaaaaggtgtggctcttattattaagttgaagaaaagtctgtttaataagcatgtagacaatctaagaagtattcaaaaactcagactggtctctttgaaactcgcataatagaatacaaaaatggaaaatctaaaaatacagagctctgacatcaaactaagtggctgaatcaagatgcatattttcaaatgtggctaagcattggatgactggtgcttttccaactgtagcttgtgatcct

SEQ ID NO: 767971 - DNA, 470 bp, Homo sapiens
ttatgtaccatacacctgtttcccctattattaacatcttatattagtgtgatatatttattaaaattaatgaaccggcccggcgctgtggctcatgcctgtaatcctagcactttgagaggccaaggtgggtggattgcttgaggtcaggagttcaagaccagcctggccaatgtggtgaaaccctgtctctacttaaaatacaaacaattcgtcgggtgtggtggcaggkgcctgtaatcccagctacttgggaggctgaggcagaagaatcgcttgaacccaggaggcagaagttgcagtgagccgagatcatgccactgcactccagcctgggcaacagagcaagactctgtctcaaaaaataataataacaatcaaatcaaatcatataaatgaatcaggattggtacattattattatctaaaatccatactttatttatattttcttactttttagctaatgg

SEQ ID NO: 767972 - DNA, 561 bp, Homo sapiens
tatatgtacctatacggaaaagttacaggaaagaatctacgaaactagtcaggtcagagtatcctatctggtagcgaagccagctgagacaagaggaactttcagtttgaggctatatatttatgtatcacttgtttgtttgtttgtttgttttgagagggagtttcgctcctgttgcctagactggagtgcaatagcactatctcacctcaccgcaacctctgcctcccaggttcaagcgattctccagcctcagcctcccgagtagctgggattacaggcatgcaccgccacacctggctaattttgtatttttagtagagacggggtttctccatgtggtcaggctggtctcgaactcccgacctcaggtgatctgcccaccttggcttctcaaagtgctgggrttacaggtgtgagccactgtgcccagccatttatgtatcatttcagtattttacaagaatgtaccaatatactgtttatataacataatgcatgcaaagtgttttaacaacaacgacaaaaagcaaaacccaatcccaaaactgtacattcttg

SEQ ID NO: 767973 - DNA, 621 bp, Homo sapiens
  misc_feature 309, 342: n = A,T,C or G
taatgcatgcaaagtgttttaacaacaacgacaaaaagcaaaacccaatcccaaaactgtacattcttgcaaaagtaatgttcttttttttttttcttttgagacagggtgtttgtctgtcacccagggtggagtgcagtgacacaaacatgactcactgtagcctcgacctcctgggctcaatcaattctcccacctcaacctcctgagtaggtggaacgacaggcacatgccaccagccaccacacctgctaatatttttatatttgtggagcaaggtcccatatgtgccaggctgttctgaaactnctgggctcaagcagtcctcctgtcttggcttcntaaagtgctgggattacaggtgtgagctacctcacccagccataagtggaagttcttttacattcacataatgtacttcatttttcacagcctaattacartcatccttttctttaacccagaaagacagagagaaaagatagcagctgaagttgccaaaagctagactcggacatcaccaagcatctagaaagatggaagattatgaaataatgctttaataaacataaaagcgctataccacaaagcacatgttcttctacaaagaaaatacatccg

SEQ ID NO: 767974 - DNA, 592 bp, Homo sapiens
ttccagcagttacatgaaaaagtccgaagattaaaaaagaaatgtgggggaaaaaaaagtggcaagagatacaatttcacctaattcattagtagaccacatagagaaggggaagtagctccagtgaaaagtttaatgttttcacttcaaaaaagctaaagaataccacctcccctgactcccacccaatacagagtaggtaaaaaacaaaaacaaaaacaaaaaacaaaaacaaaaacggttacccttgaaaaagagagaagaaattccagcctgtgaacctgcaggagataaaaatawaagtccagagataaaaaatatggctcaaataaataaaatggaagataggagctgcagcagctttgaatgtctccaatactcccagtgactggaagaatgtcaacagctcaaagtagggagaacaagaggatggtaaaaaaccaatatatttaaagagcatgaacaatagttgaactatattagggcatgttgtggaatcagtaggaaatacattagtgggttcattaaatcaacactgtctagtcacggtgcaaaagaagagaaagtaggacaagaggataagctggggatc

SEQ ID NO: 767975 - DNA, 575 bp, Homo sapiens
ttttctttctgtatagcttcttttactttgttttctcttttttctttaaaatctttttcctttatatctttcttatcctctttttcttttatctcccttttaagttcttttttattctccttttcttttgcttccctcttttcttctggttccttctttatataaacatctggctcaggtttttcttcactgtctctttctgttttaatttttttatttggatgtttcacagaactgatctcatcctggaaagtgcaagtatggccaatgtattactaaccaaattttaacaamgactaatttttcttcatatgactacagattgcatgtatgtggattctgaaagagcccagaatccccctaataatgatacatgcaatgtttaccttcctataaactaaagtaagccagtcccattcaagttcataatacaattaaaagagacagaagctcatcaaattggcaaatgtttgaaaaggaaggacctttgctctatgcctctagtgctatataatatctactggacagttagaattctgttctataattgagactgttatgaactataagtgcgt

SEQ ID NO: 767976 - DNA, 662 bp, Homo sapiens
catgtcatgtattcctttaaacaacccatgagctggatatcattattctcgtttcatacatgagaaacaggctaaaaagttaagcgatgatcaagtacacgtagactgcatatggcaagccaataatcaaagacaggttgactaaaacttcttgcctctttctctgacctcgcgtggtgccatctgcgttttgaattgggagtattaagtttctctgctgagagagaagagggaattccatgctaggcagagggaacagtatgaacaaatagttatgcatgttatcaacgtttaggaaaatctgagttgttgaccattgttagaacacagttccaccatcccttccattggtgaatcgggtagaaagactggggaacctgcttgtggtctggagtgggacatgggacttggggcagagggtagaattacccaccagacagccatggtagtatgtatgttaccagggtattytggagcaaggtgaactatcccttttcttttcctcaaaggtaaccaatattctaacttctaaaatttcatttctgagtatacattaatagaatcatgcatttatattatttggtgtccggtatgtttgtgggacgcattcacattgtgtacatagctatagtgtcttcacttttactgctgaatggtatttt

SEQ ID NO: 767977 - DNA, 654 bp, Homo sapiens
atggtctcatctttcttgcacaactttccacctgcagccaccaccacccaacccaccacaaacacaagtgctccccactctttccctcaaggtgacagtaactagaccacaggttgctccaccactggttaccaattacttcattttcttacttctttctttttataatatcattatcataaggaggaatttcactgcccaggtcatcaggagggacccacacagagcaatgtcagttatagccagttcttctttggtcaaacaccagctgtggttttagcttatcctgtgcttatccctgtaagaatgtaaacattctgcagttgcctcatccttatctatttttttacwatgtcttggtgaccttacagttccccctgaatgcagtgacttcaaactttcagcttttaataagcgacatcaaataattctattcttcactgtaagatattttccctctgatcaaaacctacccaacaccaagaatttgaacattctgattcttcagatcctttccctaagcacggcccccacccctgcccatccccaaccctccccccagcagaagcagaattaacttctttttctgtctcactgaattctcccttttgaaaaatcctaggtggtatttttttaatgcacatcacagttcag

SEQ ID NO: 767978 - DNA, 549 bp, Homo sapiens
cttattccctttcagagctactatgttatgatatctcaaactaatatttgagactccttggcttgataactatgattccattgaagatgactattgaggtaatcaactctttaacaattctcaaactttagtatacatgtcagtcagctgggtacttactaaaaatatggattcacacctattctccatccctagttttgtttagtaagtctaggaaaaggccaacatatttgcattttaataaacacttgtacctgtgattacctgattacacattgagaaataatatttatttcttagtattaccctagaaattccaggagaagtgtagaataggatttcttaaaacctgagatccaaacatcccaaaggagcctgtgaataaaatttaaagtgttcacgaacttgrgtggggtaaaatacatctttattttcagtaactcctaattaaacctaacattaaaaaaattgtaaatgtagacaacaaagcacagtattaactttgtcatcagcagaaaacactgaaatttttatattgcattggagttg

SEQ ID NO: 767979 - DNA, 538 bp, Homo sapiens
tgcaacctttaccaaatggttatttttgcttgaaagttcagttatatgaatgtcaacaaatagatgttatttattttcatgaaaatgttttccaagtacctaagtgtgaataaccagcttgtcagtcaatagatcttttaattaaaatggtgtttcatgataaaatcagtgagttcagcctgcaactcattcccacaagtgcttagagaaaagcacttgtttgagagttctttggtatgcagcagaagtgctttataaatgcttctttttttcatacagaatattttaaaagatgtgtattcacrggtgaaaacaatccaatttgcaattttcattgcttcattaagaacattcttaaataaaactggaagttttttaaaactgcaagtgaatggcagtgaagaatataaggactattaatttgtatcagtggtattcaactggaggtgactttgtcctcgggacatttggcaatgatatttttggctatcacgacttaagaggagagagttactactgacatctaaggagtagaaac

SEQ ID NO: 767980 - DNA, 622 bp, Homo sapiens
ccactgtgatacatcatatgaacagaatgaaggacaaaaaccatattatcatttcgattggtgctgaaaaatcattttataaaattcaacattctttcatgatgaaattcttcaaaaaaaacggatgaggaagggacatakctcaacacaataaaagccatatatgacctagtatcattctgaaagggggaaaaaaaactgaaagcctttcctctaagacctggagtacaacaaggatgcccattttcaccactgttatccaacatagtacaggaagtcctagctagagcactcagacaagaaggaaataaagggcatccgcattggaatggaaaaagtcaaatcatccttgtttgcagataatatggtcttatatttggaaaaaaactaaagacttcaccaaaaaaattattagaaccaataagcaaattcagtaaagttgcaggatggaaaatcaatatagtatgcaaaaatcagtagcatttctacatgccataaatcagtagcatttctacattccaacagcaaacaatctgaaaaagaaatcaagaaagtaatcccatttacaatagctacaaataaaatacctatgaataaatttaaccaaagaagtgaaagatct

SEQ ID NO: 767981 - DNA, 622 bp, Homo sapiens
ccactgtgatacatcatatgaacagaatgaaggacaaaaaccatattatcatttcgattggtgctgaaaaatcattttataaaattcaacattctttcatgatgaaattcttcaaaaaaaacggatgaggaagggacatagctcaacacaataaaagccatatatgacctagtatcattctgaaagggggaaaaaaaactgaaagcctttcctctaagacctggagtacaacaaggatgcccattttcaccactgttatccaacatagtacaggaagtcctagctagagcactcagacaagaaggaaataaagggcatccrcattggaatggaaaaagtcaaatcatccttgtttgcagataatatggtcttatatttggaaaaaaactaaagacttcaccaaaaaaattattagaaccaataagcaaattcagtaaagttgcaggatggaaaatcaatatagtatgcaaaaatcagtagcatttctacatgccataaatcagtagcatttctacattccaacagcaaacaatctgaaaaagaaatcaagaaagtaatcccatttacaatagctacaaataaaatacctatgaataaatttaaccaaagaagtgaaagatct

SEQ ID NO: 767982 - DNA, 480 bp, Homo sapiens
tttcaaagagaagagaaaagtccaatttggggtgcagtcctatgcaaaagcagccaccctagtggggatgacgccaggtgggtttttatgattggcttaaacatagattgggatggcacgaaataaaggcagagaaaaggggatagaasatcctaaaccctctaattatgttctttcatcctccctcactacgcaccatttgcttttttataatgtgatacctgccagagagatcatatgggcaaagtatttctgcttctaaattagcccaaaagttaaaaaaaaaaaaagattccgggtttgctttcctgtgaaggtataagataaaatgtaaagaacaagcacagtgatgatagaaaggttggactcagattttatatttttacaaaaggaatttttaaaacacatattgtacgtgaagagatgtagcagggtactaatagcgtaggccttttaaaaatcaataattggtgttagtaa

SEQ ID NO: 767983 - DNA, 425 bp, Homo sapiens
cagatggtcagctgagacactggggtcctggaaaatgagaccacacagagatgtgggttgtatcccatttgttgctagcaaaatttttcttcctttatactaccattgggagttatctgaattttggaatggttacagcttttgctccttctttggaaaacttggctaaggccataaagggcttcttgattttagtctcatgtgtgcttatttgttttgattttgatcatttgtctaggtatatctggtttaaaatyggtttgtattcaggctgtgatacaagtggttctttaggttttttggtgttttggtttcatttgtctttccctctctattgagctggagagacacaccctgcagcaccactgacagacaaagtagtgagcaagtgcggtagaccccacttcaggcagtgcagggaaaca

SEQ ID NO: 767984 - DNA, 613 bp, Homo sapiens
acatccaggtcacactgatacaagaggtgggctcccacagccttgggcagctctgcccctgtggctttgcagggtacagttgctgctttcatgggctggcattgagtgtctgcagcttttccaggcacatggtgcaagctgttggcrgatctaccattctgggttctggaggatggtggccctcttctcacagctccgttaggcagtgccacagtggggactctgtgtgggggcttgtatcccacattttccttccttactaccttagcagagattctccatgagggctctgcccttgcagcaaacatctgcctggacatccaggagtttccatacatccttggaaatctaggcagagattccccaaccttaattcttgacttctgtgcatccccaggcccaacaccatgtgtaagccaccaaggcttggggcttgcactctctgaagcaatagcctgagctataatctggactcttttagccatagctggagctgaagcagctgggattcagggcaccatgttccaaggctgcatagcagccggtgaaacaatttttccctcctaggcctccaggcctgtgatgggagaggctgccatgaaggtctctcaca

SEQ ID NO: 767985 - DNA, 567 bp, Homo sapiens
tgtaaactgacatttccactgtggcagggtgtagaagtgctgaagcaattccctgctgagacagttcccatacctttctagatgcagcctggcatccaatttcatgcttgtctctttgtgggaagagggacaccccagctcatagaggtttccaaagcaaaatactatctagcccagactgaacattgagactattttttttttttttgagactggatctcactctgtcatccaggctggmgtgcagtggtgcgatcatggctcactgcaacctcaaccacctgggctcaagctatcctctcacttcagcctcctgagtagctaggtctacaggtgcacgtcaccgtgcctggctaatttttttattgtttttgtagagacaaggtctcactatgttgcccagtctggtctcaaacccctaagctcaagtgactcttctacctcagcttaacaaactgctgggattacaggttcagctatctcacctggcctaagatatatcgttgttattcaggtcaatggccgcctccagaaagctgccttccccggccattcaatctgaagttg

SEQ ID NO: 767986 - DNA, 597 bp, Homo sapiens
acaaataaaataaaatacctagtagtaaatttaatcaaggaagcaaaagatctctgcaatgataactaaaatattgatgccagtacctgaatagaacaaaaaaaatagaaggatactccatgttcatgagtgggaagaatcaatattgttaagatgtccatgctactcaaagtgatctacagatttgatgcaattcttatcaaaataccaatggtattcttcacagaaatagaaaaaaaatcctaaaatttgtatggacctgcaaaagactcagcatggtcaatactatcctaagaaaaaagaaaaataactgggggaatcacaataggtgactccaaattatactacaaaactgtagtaaacaaaacagtatgatactagcacaaaaatggacacatagaccaatgaagaagaacagagaactcagaaataaatccayacctctacagtaaactcattttcaattaagtttccaagaacataacactgaggaaagaacagtcttttcattaaatgttgctaggaaaactggatatccatatgcagaagaatgaaactagtcctctacctctctccatatacaaaagtcaaatcaaa

SEQ ID NO: 767987 - DNA, 631 bp, Homo sapiens
tagttcagtggaatagaagtgtattaaatttattggctgggaatatttgctgacacctgtaattccagcactttaggaggttcaggtgggtagatcacttaacgtcaggagtttgagaccagcctagccaaaatgcagaaacccaatctgtactaaaagatacaaaaattagctgggggtggtgggatgcacctgtcactccagctgctggggaggctgaggcaggataatcacttgaactcaagaggtggaggttgcagcaagccaagatcatcccactgcactccagtttgggtgacagagcaagactctacctcaaaccaataaatagataaataaatttcttatatcttgctgatacgacaaaagtatccctattacsaatacataaagacaataagaaagtgcaattaaaaccaatagaaagtgggaaaagtcaggaatttactttctgtagaaaggagtcacatagaggcaagcatcattgataatgaagacattaaaataaaggtcataagataaaattttatgaccatttgatggagaaaattaaaacatttgaaaacatcagatgttgaagtaaatgctgaggaatgtacaagtatccattgatacaaccacactggcaaag

SEQ ID NO: 767988 - DNA, 644 bp, Homo sapiens
tgatacatcaaatacttaacaactctccactctataccaaatatgactttagtccaaggggatgaaacagggagtgaactccctctgactacaaagttgcttctctttagcttataccctgtatggagagacagagagtgaaatagctaatctacagaagatcacttagagatagatgtgggaaaaattggagagtgtaaagggatttcaagagacagggtatgatgtgggggatctatgtttgttagattgactragggatgcctctctgattagatggcccactaacagtgtattaattccccagccctgccataacaaattacgacaactaagttgtttaaataaacagaaattcatcatcttccagtcctggaagctagaaattaaaaacagaggtttcagcagggtggtactccctttgaaactctgggtggaatgatcttttgcctcttcctagcttgctggtttgggatgtcagtccttggttggaagatgatacaccaattcagtcttttactttgttgtcacatcgtgttctctgtgtgtgtctctatctgctctcatagtattcccctcctgtgtcctcacaatatctttgtataaggaaaccagtcatattcgatcaagagcccaccctgctc

SEQ ID NO: 767989 - DNA, 544 bp, Homo sapiens
ttctgggtgttttgttgttccataaaaattttagaattaaaaaaaaaatctgggaataaatgtcattgtattttaatagggattatattgaatccgtagattctttgagtactatggaccttttgacaatattgattctttcaatccatgaacatggaatatctttccattttttgatgtcttcttcattttttattaatatttatagttttgattgtatagatcttatctgtttttggttaagtttattcctargtattttattttattcatattatagctatagatatgattactttagtgttttttaaaattctttgctgttggcaaatagaaacagtactgtttttatttttctaataatgacaaggccttgctctgtcacccaggctggattgcagtgttgtgatcttagctaactgcagccttgaactcctggtctcaagcaatcttcccacctcaatctcctgagtagctgggaatacagaagaacacccacggacctggctgaaaaatgctactgctttctgtatgttgattttgt

SEQ ID NO: 767990 - DNA, 612 bp, Homo sapiens
tggttagactgctttattgataaaatttgctgaaatgggtaagattttcccgttgctagggcaacctgcctacaggaataaccaatctatacatcattccagcaagcggtctttgcaatttaataaaagaaaaaataaatgtagctacagagccacattggagagaagacacaaaataaaatacagaagggaaaatgataatgcttgagatggtgggtgttgggtttgaagattggagtgaaacatggctactttcccgaaagaaggccaactctaggaaggatacagaagaaataagatataarcagcatatggtctttccccttctgtcatcttatttttttaccacttccccttgctctctcctttccatcctcattggacttctggccgtttctcaaatgtgctgtgcgacctcccacctcactccatatttcctcatttgtctgcttggaaacctctccccagaaacacacatggttccctctctctcatatcctaccctcctcttatcagagcattctttcctgaccattatttatgaagtagccccctgccacacccaccactgtccttgactatcactttataatactttctttttttctccag

SEQ ID NO: 767991 - DNA, 612 bp, Homo sapiens
tggttagactgctttattgataaaatttgctgaaatgggtaagattttcccgttgctagggcaacctgcctacaggaataaccaatctatacatcattccagcaagcggtctttgcaatttaataaaagaaaaaataaatgtagctacagagccacattggagagaagacacaaaataaaatacagaagggaaaatgataatgcttgagatggtgggtgttgggtttgaagattggagtgaaacatggctactttcccgaaagaaggccaactctaggaaggatacagaagaaataagatataagcagcatatggtctttccccttctgtcatcttatttttttaccacttccccttgctctctcctttccatcctcattggacttctggccgtttctcaaatgtgctgtgcgacctcccacctcactccrtatttcctcatttgtctgcttggaaacctctccccagaaacacacatggttccctctctctcatatcctaccctcctcttatcagagcattctttcctgaccattatttatgaagtagccccctgccacacccaccactgtccttgactatcactttataatactttctttttttctccag

SEQ ID NO: 767992 - DNA, 617 bp, Homo sapiens
cagggtgataataaggagaaggtcagcaaaaaacatgtgagcaaaagaatctatatcataattaggtttaagggaaggtactatgcctagatgtgcacgtaatccagatttatgtttctctccacccaaacatctcagcggagtaaagaataacaaggcagcattactgcaaacatatctcgcctcccaccatagggcggttttgctactatctcagaattgaacaaatgtacaatcgggttttataccgagacattcagttcccaggggcaggcaggagacagtggccttcctctatctcaactgcaagaggctttcctcttttactcatccatctcagcacagaccttttacaggtgtcgggctgggggacggtcaggtctttctcatcccacgaggccatatttcagactctcacatkgggagaaaccttggacaataccctgctttcaagggcagaggtctctgcggctttctgcagtgcactgtgccctggtttattgagactagagaatggcgatgacttttaccaagtatactgcttgtaaacattttgttaacaaggcacgtcctgcacagccctagatcccttaaacattgattttatacaacacatg

SEQ ID NO: 767993 - DNA, 622 bp, Homo sapiens
ttcatatgaatttgcatatatgtggctgcacaaccattggattggacacatggaagatgataatgtgtgctcttgaaacaagcagtgccatttctgccctggtccaaactcaaatggttctcttttgtcgtaggagtcaaatttatttttcctgcccttcaaagatacaatacttccttacaaattacctcgcaaggatagaactgggtatttcagattttcatatatagaagctgccctgggtcttgctgctgcctctccccttcaaagcagctgtctccagatacaggattgccagcttccagaagaccaaaattgttgtgccttgctttgattttccagaatgtgggaccagcctttgtggttacttagttcatgtgttttggggaaactgaagctatctcttgcacccaggaatagacataaatgtgtgggtaaagatagggatgctctagaaacagctgctgaactaacaatgaaaacmaatgaatacaatttctcatctttaggaagtcattgctagccaaactattactatgcaaactatgtaatatttgtcatagcgtataaaatattattccatctacccatatttgtggacatttgtagcaaataagtgggg

SEQ ID NO: 767994 - DNA, 580 bp, Homo sapiens
cattatataggtatgatttggaggctgctagaaaaaaatctccctcccactccacctcaatccacacgtcttgcttagagaactcccagcgactaaaagctcaccatgagactctgaatgtagaagtctcttcgccaaaggatctcccttaaaatgagagtttacaaaatgtaaaaattctagtttcagaaataataatacccaaattaaattataatatggatcaatttatcaggtcattttacttcttggtagcaagaacatggtaaaattcaagagcaatgagatttccagagtgttgaagcaggctctgtagccagaataaaatcagagcaagaggcaaataatgtgtggaaattgacaaagataagcactgtcactttaacatttgagtggattttattcaaatgactrcaaatattgaaagtgccattcttgttcttcccttgaagcaaaggtaactccaaaaaggtttgggtaaggaatcagtggcaaagcatgatttatgaaaaatttccttagaacactgcaggaggcaagcccaatgtagaatgtctttcctcagaaacagtgaaacaaa

SEQ ID NO: 767995 - DNA, 656 bp, Homo sapiens
cccaacaatttgatagtccaaggagggaggatcccttaaggccaggagttcaagaccatcctgggctacatagtgagaccctgtctctgccaacagtttttttaaaatattagccaggcacagtggcatgagtctgtagtaccagctactcagcaggctgaggcaggaggatttcttgagcccaggagttggawgctacagtgagctatgatctcacccctgcaccccagcctgggtgacagggtaagacactgtctcaaacaaacaaacaaacaaacaaacaaacagttctgacagcatttaagtgttatacgtagaatgcaaggaataaaattaatgctgttgagagaaaaggctactgagtttcaatgagggggtcaggaatggcttcctggagcaggtgaggttttgattaaagcttgaaagaagacaaagcttaaaaacatataaaagggatgatagagtagaggttaccctaagcaggaaggatgtctgaagttaagaaagaaattttgccctgagcacaaagttcctgtagggagaactaggcaacacagctggagcagattgggatcagactgctgaggactttagatagtatcccaggacttcagcattgtgactgcagccaccacaggaagaggaatcagggtgcc

SEQ ID NO: 767996 - DNA, 629 bp, Homo sapiens
atgaataaaaatgaaggcataacatatcaaaacatatgggatgccacgaaactaatgcataaaggcaaatttataaatgcctatattaaaaaagaaataagagctcatatcaacagccttaccattagaagcaccttaaaacactcaagagcagctaaatctaaaacaagcaggagaaaggtaataataaaaccaaaagttgtgtatttgaaaagattaacaraaataggcaaatctttagctggtcaagaaaaagaatacagaagactaaacttactaaaatcaggaataaaagaggagacattactactgaacctagagaaacaaatgaaaggctgcatcagactgtggttaccaacttttccaaagtgaaactgaacacaactttcctattctccagcatcagtctatttgaagcacagaatgaaaaactgcttacaaagctgttactgaaagctactcagtttggtagcttttaaattgcttgaacttctgccaatgtaggacaaaaggtgccacagtctacttactcaagctgttcccatctcccactggaaagaagaacttgatgataacaaagacttggagagggccaaaattaaaatcaaaatggtaacattgcagcaatt

SEQ ID NO: 767997 - DNA, 568 bp, Homo sapiens
gaacttatggggaactggagtaaaggttactcttgctgtgctttagcaaagagactggcaacattttgcccctgccctagagatctgtgaaactttgaacttgagagagatgatttagggtatgtgacagaagaagtttctcagcagcaaagcattcaagatgtgatctggctgtttctaaaagcatatagtcatatgcattcacaaggagataatcagaaattggaacttatgtttaaaagggaagcagagcacaaaagtttgggaaatttgcagcctaatcatgtggtagaacagaaaaacccattttctggggagaactgtaaacttttggctgcagaaatttgcgtaactaaaatgaaactgaatgttaatagccaarataatggggaaaaagtctccagggcatttcagagatcttcacagcaatccctcctatcaaagacctggaggcctaggagagaaaaatggttttgtgggccatgctcagggtcctgctgctctgtgcagcccggggacatggtgccctgtgtcccagctactccagctccagccatggctaaaaagg

SEQ ID NO: 767998 - DNA, 639 bp, Homo sapiens
aaggtggggggatcccttgagcccaggagttcaagatcagcctgggaaacatggcaaaaactgcaaaacctggtctctacaaaaaagacaaaaattagccgggtgtggtggcatgcgcctgtagtcccagctacttgggaggctgaggarggaggatctcttgagcctaggagttcaaggctgcagtgagccaaagtcacgtcactgcactccagcctgggtgacagactgagactatgtctcaaaaaaggaaaaaaaaaaaaaaagaattaaaaggaaaaaaagatcctttgtagttggtgcagtaaatctctctttctctccatacgtgtgtgtgtgtgtgtgtgtgtgtgtgtgtgtgtgtgtgtgtttacatatatacataaaatctcctgctagctctgttctctggtagaatcctaaccaaaacatctgttcactatgtgatgggcactaaatattcaatgataaacacaataaagatagaatttacagcttaatattgagagagcaataaatagacaagtactttgcaagttgtggtatgggctaagaaggaaaataaacaggtgttattgagaggatattataggaagggacttaatttagattgggtggccaagggtcctctctaggtag

SEQ ID NO: 767999 - DNA, 614 bp, Homo sapiens; identical to SEQ ID NO: 740371

SEQ ID NO: 768000 - DNA, 609 bp, Homo sapiens
tccctctcactgtggatgtaattggggttcaggtgaaagtcctcacctcacttcctggtgttgtagcttcaggagtctgcagggtggcaaagtcaagtgattcgagccaggattgtcttacgtggggcccagctttggagggttctgaaagctccttgaaagtgactgtaaagctatgacagagattcccagacttygagattttacaaagaagccaaggaataaagaaagcttttaatgggggattaaagaaagatgcccaatttaaaaaacaacaaacttttttccctgtaatagcgttaaaaataaactactaacgggctgggtgcagtggctcatgcctgtaatcctggcactttgggaggccgaggcgggtggatcacctgaggtcagtagtttgagactagcctggccaacatgccaaaaccccgcctctactaaaagtacaaaaattagctgggcgtggtggtgcacagctgtaattccagctattcaggaggctgaggcaggagaatcgcttgaacccaggaggcagaggttgcaatgagccgggattgcgccactgcactccagcctgggcgatggagcaagactccgtctgaaaaaaaa

SEQ ID NO: 768001 - DNA, 609 bp, Homo sapiens
tccctctcactgtggatgtaattggggttcaggtgaaagtcctcacctcacttcctggtgttgtagcttcaggagtctgcagggtggcaaagtcaagtgattcgagccaggattgtcttacgtggggcccagctttggagggttctgaaagctccttgaaagtgactgtaaagctatgacagagattcccagacttcgagattttacaaagaagccaaggaataaagaaagcttttaatgggggattaaaraaagatgcccaatttaaaaaacaacaaacttttttccctgtaatagcgttaaaaataaactactaacgggctgggtgcagtggctcatgcctgtaatcctggcactttgggaggccgaggcgggtggatcacctgaggtcagtagtttgagactagcctggccaacatgccaaaaccccgcctctactaaaagtacaaaaattagctgggcgtggtggtgcacagctgtaattccagctattcaggaggctgaggcaggagaatcgcttgaacccaggaggcagaggttgcaatgagccgggattgcgccactgcactccagcctgggcgatggagcaagactccgtctgaaaaaaaa

SEQ ID NO: 768002 - DNA, 609 bp, Homo sapiens
tccctctcactgtggatgtaattggggttcaggtgaaagtcctcacctcacttcctggtgttgtagcttcaggagtctgcagggtggcaaagtcaagtgattcgagccaggattgtcttacgtggggcccagctttggagggttctgaaagctccttgaaagtgactgtaaagctatgacagagattcccagacttcgagattttacaaagaagccaaggaataaagaaagcttttaatgggggattaaagaaagatgcccaatttaaaaaacaacaaacttttttccctgtaatagcgttaaaaataaactactaacgggctgggtgcagtggctcatgcctgtaatcctggcactttgggaggccgaggcgggtggatcacctgaggtcagtagtttgagactagcctggccaacatgccaaaaccccgcctctactaaaagtacaaaaattagctgggcgtggtggygcacagctgtaattccagctattcaggaggctgaggcaggagaatcgcttgaacccaggaggcagaggttgcaatgagccgggattgcgccactgcactccagcctgggcgatggagcaagactccgtctgaaaaaaaa

SEQ ID NO: 768003 - DNA, 570 bp, Homo sapiens
ttatccacagtggggggacagctcattccttctcgaagcatggtgtgtcaccgtcaatcaaggtttgctgaaagtcaaatgtcagcagtgtcgctgggttttggttcaaatgctccctacaatgggctcagtgcacmgttggaacttccagagaagagggggttctgggagaagtcagatcattacagacctggcccaaagacttcaatacaggcgagttcacctgtggctctggatcttaccccccttcctaactgagaagagacaaaagtgaccacccagggatcggaatcaataaacggagagtgggctgaggtgagaggagaagctctaacatctgggagctaaaaatagaacaacacctggaaggcaagcagagcactggtgtggctgccgacttctgccacgggctgggttcctgcaacctgagcagtgagctctggggctatctgcagagcaaaacacaacccgaagctcatcccagcctgagtgctgggcttcaacagcccagctccccacatctgcctttcacgtgtttacgcttcatcctggaagagggcgccatgcagg

SEQ ID NO: 768004 - DNA, 570 bp, Homo sapiens
ttatccacagtggggggacagctcattccttctcgaagcatggtgtgtcaccgtcaatcaaggtttgctgaaagtcaaatgtcagcagtgtcgctgggttttggttcaaatgctccctacaatgggctcagtgcacagttggaacttccagagaagagggggttctgggagaagtcagatcattacagacctggcccaaagacttcaatacaggcgagttcacctgtggctctggatcttaccccccttcctaactgagaagagacaaaagtgaccacccagggatcggaatcaataaacggagagtgggctgaggtgagaggagaagctctaacatctgggagctaaaaatagaacaacacctggaaggcaagcagagcactggtgtggctgccgacttctgccackggctgggttcctgcaacctgagcagtgagctctggggctatctgcagagcaaaacacaacccgaagctcatcccagcctgagtgctgggcttcaacagcccagctccccacatctgcctttcacgtgtttacgcttcatcctggaagagggcgccatgcagg

SEQ ID NO: 768005 - DNA, 530 bp, Homo sapiens
ggggccctcaccctgaactcagcgtctacacccagagaactaatctactaacaatggtgggtgcagctctgttctacatagagaaactcaaagtcccttctgctgtcagactgggagcctctctctatcaaacaagaagcatccccagtgaccyctgccaccatgatgcctctggtttatcatacgagagacctttaagacactcaggagttacatcttataataagtcctaagaatgatgtggttgtcaacacttattttcccccaattatccatccattcctctatctatctatctatctatctatctatctatctatctatctatcttttatctatccatccatttatccatccatctatgtatccatccatccatccatgcgaccatttatctatctatttacctgcctattcatccatccatccatccatccatccatccatccatccatccaccatcgatcctgtcattcatctgtctatctatccatccatctacccatccatacatacatacatcctccaat

SEQ ID NO: 768006 - DNA, 530 bp, Homo sapiens
ggggccctcaccctgaactcagcgtctacacccagagaactaatctactaacaatggtgggtgcagctctgttctacatagagaaactcaaagtcccttctgctgtcagactgggagcctctctctatcaaacaagaagcatccccagtgacctctgccaccatgatgcctctggtttatcatacsagagacctttaagacactcaggagttacatcttataataagtcctaagaatgatgtggttgtcaacacttattttcccccaattatccatccattcctctatctatctatctatctatctatctatctatctatctatctatcttttatctatccatccatttatccatccatctatgtatccatccatccatccatgcgaccatttatctatctatttacctgcctattcatccatccatccatccatccatccatccatccatccatccaccatcgatcctgtcattcatctgtctatctatccatccatctacccatccatacatacatacatcctccaat

SEQ ID NO: 768007 - DNA, 497 bp, Homo sapiens
ccactgccatccgagaaggctcagggttgagtgctgtccacgtgctctgggctgacattagtggggaccagccccaatcttggagggctctcagtctggctggggaaaagagcccctaaacaaagaaccagtaaccccgccgggggtgttggggcccagctacagtgggaagatgctgcaggggacacagggtgaggagccccgctgtcccagagctgggacagaggctgyggagttggccttgtaggaggggtgaggatggcacgtgtggctcccttcagggcaaggagccaagaggcccagaggcctgctctccccatggaacaggagctcccgagagcccacagtgcctgtgactctccctttaccccaacctcagtagcagttccaggcacaagtcacacagccgagcagcacgcgactgtctatgaagaagtgtgaagtttctccaaacagctcctttgatgtgcttcaaatacttgattcgttgaccttcc

SEQ ID NO: 768008 - DNA, 497 bp, Homo sapiens
ccactgccatccgagaaggctcagggttgagtgctgtccacgtgctctgggctgacattagtggggaccagccccaatcttggagggctctcagtctggctggggaaaagagcccctaaacaaagaaccagtaaccccgccgggggtgttggggcccagctacagtgggaagatgctgcaggggacacagggtgaggagccccgctgtcccagagctgggacagaggctgtggagttggccttgtaggaggggtgaggatggcacgtgtggctcccttcaggrcaaggagccaagaggcccagaggcctgctctccccatggaacaggagctcccgagagcccacagtgcctgtgactctccctttaccccaacctcagtagcagttccaggcacaagtcacacagccgagcagcacgcgactgtctatgaagaagtgtgaagtttctccaaacagctcctttgatgtgcttcaaatacttgattcgttgaccttcc

SEQ ID NO: 768009 - DNA, 638 bp, Homo sapiens
gcagcaaaagacagctgtccatgaggagaggaaggaaaagaagatggaccccaaaggaatagctactgggagtaatttggccagactaatagtgcctcaagccacctcttcaatataacaaaatggaataattatggttcacaatgatgaccttgagtcatcaaaaaactatttaatcatgttcaaataattttgtttccagagagttcatttcagttcaacaaatatttatcatcagctaattacatgctgggggctgtgagcacactggggtaagctttggggagtgcgtgctaatttgagcagtgaggctgcagccctgaagtaacctgtcggtgaggatgcatwtgatggcaagaaaatggcagctctgcctggatgtgctggcctcacaagtgcagacgcagtgtcaggcaaattcaggctcgattctggactcagggactctgtgatcccccacctgtctccacctggagctcagctctgccttccttagcagtgtggatcccgggggtcatgggatcactgctgtctgcaccgggcctccttctcctctcctttgagttaggcgaggacagagggtgatgtttatgggatctgttttaaaaaagaaaggtttcctagtcatgtcaacaaag

SEQ ID NO: 768010 - DNA, 528 bp, Homo sapiens
tgtgtgctatcaggacttcctctctcacctgagtgtctgcagatctctctctagcgcatgttggagaagatgcctaagcctcacagagcccaaactcagagctcccgatttccaaagaacagcctctctgacttgcattttcaattcccagtgaaggctctccagggtccaggtggggtcatctgacacaccagagggccagtcatctctgctggggctcaggacacacagtggctcccaagctactagagagaagggttcagttcacagaggaagcaggtgtgtgtgtgcgtctgtgtgtgtgtgtgtgtgtgtgtgtgtktgtgtaagatagggaggagttgaaaaaagcagagagagagaatatgggcatagaaataaattggcgccactacacaggttatttttataattacgtaaagaaattgtctttttaataaaagtgacatcttaggacagtgcttaaatctccatcgcatttcttaaactacgatttgttacatttagtaattcctagatttaatagat

SEQ ID NO: 768011 - DNA, 528 bp, Homo sapiens
agtgttctgtctcagagttgcacagaatccaaatcacatcatcgaaatatgtgtgagatagctaagtctcagaaaagcttaggctacatgacttcatataataaataaactagaaactcaaacaaatcagtgagaaaaaaacaatctcattaaagagtgggcaaacgacatcaacagacatttctcaaaagaagatacacaatagatgttggtgtggatgtgatgaaaagagaacatttatatgctgttggtggcaatgtaaattagtacaacctctagagaaaacagaacagagatttctcaaagaattaaaggtagatctactattttcttcagtaatcctactactgggtaacaactcaaagraagagaagtgattatatccaaaagacatctgcacatgtgtgtgatcatcacagcacaatttacaattgcaaagatatgaaatcaacctaagtgcccattaatcaatgaatggataaataaaatgctattataaatatgtatagaaatatttgtacatatata

SEQ ID NO: 768012 - DNA, 635 bp, Homo sapiens
ataaaatatgaaacagttgttttttttctgttggggcttattgaagtaacaattagtatgtcttagtggtaaaaatgtgcatttacaattttaaagaaaacataaaaacatactttaactcctggccatgtgatattaactcttatttcccagwatgcttttaatgtgatttttccatctaagaattattttgtatttacttttatatttaactcccaaataccaatcaaagagcaactgggccaacagcattgtaacaaacatcattatcaagacaaaggaatctacatgatggtctttaaaaaaattcacccccaaagaagttatgtttaaaaaaaatcagtttgattctttcaccaacatttgttacactttgggttttcaagttatttctgggctatacagttctttccagactaccctgtagcaatttgagggtctagtatcactttgtgttgggatccaaagatccagaagaagcttagcgctgtgagtagaccacctatgaaaccatcactaaaagcttaacccacccttgatcccagaatttttatgaatgcttactgaagaaaattctcaggatgattcagaggcctctcataacttctgctccaagatgtcgataaagaacctta

SEQ ID NO: 768013 - DNA, 635 bp, Homo sapiens
ataaaatatgaaacagttgttttttttctgttggggcttattgaagtaacaattagtatgtcttagtggtaaaaatgtgcatttacaattttaaagaaaacataaaaacatactttaactcctggccatgtgatattaactcttatttcccagaatgcttttaatgtgatttttccatctaagaattattttgtatttacttttatatttaactcccaaataccaatcaaagagcaactgggccaacagcattgtaacaaacatcattatcaagacaaaggaatctacatgatggtmtttaaaaaaattcacccccaaagaagttatgtttaaaaaaaatcagtttgattctttcaccaacatttgttacactttgggttttcaagttatttctgggctatacagttctttccagactaccctgtagcaatttgagggtctagtatcactttgtgttgggatccaaagatccagaagaagcttagcgctgtgagtagaccacctatgaaaccatcactaaaagcttaacccacccttgatcccagaatttttatgaatgcttactgaagaaaattctcaggatgattcagaggcctctcataacttctgctccaagatgtcgataaagaacctta

SEQ ID NO: 768014 - DNA, 612 bp, Homo sapiens
tattttacaatcatctattaaactgtaaatattctatgaaaatgtaaatactatagtgaataaaaatctaagctatattttatatttggcagaaattagtttaccatgtatttttgaatgatgatattgaagtaaaggaaacagttggggaatgcagcataaactgattaaagatatttgagatacactstctatttaaaattttactatatcttaaccctgatccttgtatctgttgtcaatacagtctatgtttatatatctatttggttggtttaatgatattctccctgcagaagactggagaaaacttatgcaatttccccaatgccttattaaataatccaacttgcatccatttaatgaactagctaagaaatatcagatctgtggctatctctgaagttatctagatgcttctgaataagtatgtatactaaatctaagttacaatagccataagctcatcaattttttaaaaagacatttagatagattattgacataaatataatagaaataaaaatagatggctatagatatgaaagatgtatatgtgtatatacacatatactatatgtacacatgcaaatacattcatgcatacataca

SEQ ID NO: 768015 - DNA, 572 bp, Homo sapiens
atctattaaactgtaaatattctatgaaaatgtaaatactatagtgaataaaaatctaagctatattttatatttggcagaaattagtttaccatgtatttttgaatgatgatattgaagtaaaggaaacagttggggaatgcagcataaactgattaaagatatttgagatacactctctatttaaaattttactatatcttaaccctgatccttgtatctgttgtcaatacagtctatgtttatatatmtatttggttggtttaatgatattctccctgcagaagactggagaaaacttatgcaatttccccaatgccttattaaataatccaacttgcatccatttaatgaactagctaagaaatatcagatctgtggctatctctgaagttatctagatgcttctgaataagtatgtatactaaatctaagttacaatagccataagctcatcaattttttaaaaagacatttagatagattattgacataaatataatagaaataaaaatagatggctatagatatgaaagatgtatatgtgtatatacacatatactatatgtaca

SEQ ID NO: 768016 - DNA, 612 bp, Homo sapiens
tattttacaatcatctattaaactgtaaatattctatgaaaatgtaaatactatagtgaataaaaatctaagctatattttatatttggcagaaattagtttaccatgtatttttgaatgatgatattgaagtaaaggaaacagttggggaatgcagcataaactgattaaagatatttgagatacactctctatttaaaattttactatatcttaaccctgatccttgtatctgttgtcaatacagtctatgtttatatatctatttggttggtttaatgatattctccctgcagaagactggagaaaacttatgcaatttccccaatgccttattaaataatccaacttgyatccatttaatgaactagctaagaaatatcagatctgtggctatctctgaagttatctagatgcttctgaataagtatgtatactaaatctaagttacaatagccataagctcatcaattttttaaaaagacatttagatagattattgacataaatataatagaaataaaaatagatggctatagatatgaaagatgtatatgtgtatatacacatatactatatgtacacatgcaaatacattcatgcatacataca

SEQ ID NO: 768017 - DNA, 505 bp, Homo sapiens
acttcaggttacacctttggttggataaatccaactctttgtcattagccaagactagaggaagggagataactttttaaaatttgatcttctactcatcataaagaatatttcatgcctgtatttcttccatcgtaattatatttgttacattcagtacttagagatgtttataagaaaacatattttctttttcagctgattattgcctaacwcagagttttcaatgaggcttgatattaggttaacaagcttttacagtaggaagcattacaagagacatttacctagtttctcagatttccagggataacatccagcagctgaaccattaaggtaattacagggaaagaaaagttaactgagatagtttgtcagaagaagaaatcatagatgtaattttaactctctgctctgaatcataattacaaaatgcatcagctaagacacagagagcaattttaagcaaagtcaggagccactgatgaaatgtctttaaaataga

SEQ ID NO: 768018 - DNA, 631 bp, Homo sapiens
ccgctctagcgaaggccccagccgggatgctaggcctaattgttcagcgtggagatggcaactcacgtggtgccctaggtgcagctgcgtggtctggtatacatgctgcaaaattcacccagttcccctcattttaatttttctaacctacagcttaattttaataactttaaaacacttctaaatatttattttgrcaccagcgtcaagacaaataatatcctctcccattattttcataagtaacacagattccctgatttttaaaaactaaaaatacagctaaacctttcttatgtataaagtatgcctatcatatacagggagaggtgggtaataaacttcctgtaatgacagtgtttggcatttctttatggatggaattggaacatgaacaagaccatgtccagcgtttttactgtgaatgtaaatggaacagcagcccaaagctgttgtctgtgccccagaggtgctacctgtagacagggaccaactccatgtgtgtgtgttaagtgtttgactccaattaagactcccaagcgaatcctgcatattccaaatgtaaagagtactcagtgggaaaaaggttgttacctcaaagtcattgcttctttcctggctgggtcacagg

SEQ ID NO: 768019 - DNA, 483 bp, Homo sapiens
gcttagtataccagtttaattgccctctatttagcaactggttaaaggtaggaaaaaatccttaaacatcagcttatcgggtttcctattcaatgattccaagagctaattcacagagagcttaaaataattgaagtaagcagtagtaaaagactgaatgtcaggtgttgattgagaatctcctttctagaggggaggtgtttcggggaggagtcaagctaggtctgtgtggtggagggagcaggacatgaggtgggcggcagggtgggtaggcagccagatggtctagagattctcagaagatctgcttgcttgmcactttgagaccatcagctatgtaaatattggagagttttatttacagccttcagaggaataatttgtgatactgaacaacgagcaagaaacaggaaggtgaactctacctttgagggtgtgtggtctggggaagaagtcattgatagtactgattttacttaccta

SEQ ID NO: 768020 - DNA, 624 bp, Homo sapiens
gagatataagggggaatattcaatatgtgggcagtcaattcacctctttctgttcagtccccttctgctgccgggtctccatggcatctgtggtctctgcatgcagagggaggggtgtctgaatgggtggatacagcccctctgtgagggttctgagctccacccaatctgctttaaccatgaatagtcacctttccactttctatctcctagaaacctgttgtaatcctttatcttcagatctcttctcttcttttctgtgctattgcaaaaaggaatatactttagaagttttcctagcaatgtctgtcatggcatcttggaaagacaggagatgatcctgagctgggaggccctggccctgtctctcagtactcatcctctacccttagctcttctcacttcctggaatgggtctccttttctcttacattgggaccttctcaaattctgttccttcatcttgaaatagttctcctttcccacstcccattccatacagactttgtgcctggttaacacctgctgcagtctgtgccccttcttcaaggggtctcctctgagcctccactagatcaagtccctccttatgtgtgcttccatcacattctctactttccacat

SEQ ID NO: 768021 - DNA, 564 bp, Homo sapiens
agagcacaagcacctcagggtcacagccatgtcctgccccagaacaagaacttaacctcattctttataaacatggtttattgctaagtttggcaaatgaaatttagttgggtcccgaaaaatgtcccaaagaatcattattgactttaccttaccccaaactaaaaacacttgcaagcattttgtatttcaaatcatctttycctggcacagtttcttatttgaaaaacaaatagacgctcagagattgacacttgcatggagttaagtcttcagaaaaagaaagttttttgttgttgtagacactctcatctaataaatgctgtgactaatttagtatttccaggaaatgtggtgtcaaggcttcttaaaccccaacacaaacacacacacacacacacacacacacacacacacacacacacacgctgcttagaataggtaagtgaaagaaagaagagaaagtgtgggtttttttttttaacagacaggagggaaaattatattatttcgggagatagcaaaaaaagtatgaacttactttttaagtcataaagcaataac

SEQ ID NO: 768022 - DNA, 583 bp, Homo sapiens
ccagtcttccccagctctaggggcattttggcccacacctggatgttctaaactcagatctatggtggaacagtttgatagaataatgactttttattacttttcttcttctgtcccccagctatggtcagaataccttatttccaaggaagagtcccagggccccaaaccaaagagcacagaaaawtactgaactccagaaagagcttttcccccatcccatatttaaataaaagttataataatcagctattctcaaagtcttccctggaatgtcacgaccctaaaaagaaaaacacaaatagtcaaaatagtatagacttctgtgtttattctttcaaatgtaaatggagtattttctgcattactatgatcttcaaaatacactagaaaactcttggataattttaataatttttttacattggatgtatatgcttagtaagatatctaaaatgtattttatcaaattatatcatgagctatatatcccaactatggtcaatttttgtcttatttcatctaatgttaaatattttctatctcatatttccaaaaaattaattatatgctagctgccaaa

SEQ ID NO: 768023 - DNA, 583 bp, Homo sapiens
ccagtcttccccagctctaggggcattttggcccacacctggatgttctaaactcagatctatggtggaacagtttgatagaataatgactttttattacttttcttcttctgtcccccagctatggtcagaataccttatttccaaggaagagtcccagggccccaaaccaaagagcacagaaaaatactgaactccagaaasagcttttcccccatcccatatttaaataaaagttataataatcagctattctcaaagtcttccctggaatgtcacgaccctaaaaagaaaaacacaaatagtcaaaatagtatagacttctgtgtttattctttcaaatgtaaatggagtattttctgcattactatgatcttcaaaatacactagaaaactcttggataattttaataatttttttacattggatgtatatgcttagtaagatatctaaaatgtattttatcaaattatatcatgagctatatatcccaactatggtcaatttttgtcttatttcatctaatgttaaatattttctatctcatatttccaaaaaattaattatatgctagctgccaaa

SEQ ID NO: 768024 - DNA, 564 bp, Homo sapiens
aaagcagtggagtttcagactgaggaggggaccaatggatcctaattttatggtccatgggggtaaatagccatgcacaggaccagagagctaaggtataagttatgtccagataagcaagctctgccttttacgttgggaaggagaataccttagacatctctggtatgacatgggaggtggtagggaaagaagtcagtgccaacagctgtggggcctggggagaaaatgagattccagtagaaacaagaataattgcctttcaaaaatgaagggcaagaacaggaaggtgggagtcaaaactcctacaggctggttcttttcttttctagaacatagcagctgattacatagaaatatttttgctatctatctttacttttaagctagtttggyaagtttcccacctaaggtttggtaagtttttcacttaaagtaaaaagtacagcagagccactttaaatgacatctactaattgcagatatagacaacatccaattacttcccctgcttctggcaatataacatcatccattttctgctggtttttctgtctaatcttc

SEQ ID NO: 768025 - DNA, 564 bp, Homo sapiens
aaagcagtggagtttcagactgaggaggggaccaatggatcctaattttatggtccatgggggtaaatagccatgcacaggaccagagagctaaggtataagttatgtccagataagcaagctctgccttttacgttgggaaggagaataccttagacatctctggtatgacatgggaggtggtagggaaagaagtcagtgccaacagctgtggggcctggggagaaaatgagattccagtagaaacaagaataattgcctttcaaaaatgaagggcaagaacaggaaggtgggagtcaaaactcctacaggctggttcttttcttttctagaacatagcagctgattacatagaaatatttttgctatctatctttacttttaagctagtttggcaagtttyccacctaaggtttggtaagtttttcacttaaagtaaaaagtacagcagagccactttaaatgacatctactaattgcagatatagacaacatccaattacttcccctgcttctggcaatataacatcatccattttctgctggtttttctgtctaatcttc

SEQ ID NO: 768026 - DNA, 537 bp, Homo sapiens
ccatgtaacagagtactttgtagtcattaaaatgatggcagaagtatatttgataaaatggaaataatattaacagtactgaagggaaaaaaagcagatttctatagaaaacacatggctaattccatttttaaagagtatatatacatttaaaaaccagttgagattcaataaaatagtaaaggccattatctgcatggagtggrattatagataattttattttctttatgcttatatcttctgggttatcaacaacattttcctgctgtatcgaaatgttgtaaaagtattgtacaaaggaaacactcttttcacatttctattaatcacttatgtaattcttatccaacttatttcagaaagagaaggaaaatcctggccagacactccagtttcatgtgtcctgataagctcacatctactctggaaattaatggatgcagatgtccaggttttcttaaatgcagagacttgtggtatcaaacccctacaatggcaagtcttggttctgagatccatagttcaacaaccacc

SEQ ID NO: 768027 - DNA, 610 bp, Homo sapiens
actggaaaatttgctttgagcaggattccagaattcatgcgagaatatgttccactctttgcttggggctcttgcctcaaacgcctgtcatcagcaccatcctactgtcctagagggcatctgggcccttcaccatcgatgtgcaggcatcccagtgccagcatcacagcctgctgagcattgtgttggttttaccattcagggtgaaacaattttagaatgaggcatccatgcccatgtagtggggcaacygtgcagtaacaaccttggggtagttgctccctgctcccccacactcacccccacctcagcaacaatttgaacacctgggaatttcgtctctatcacccccaggaagggatactgctacccaagcatggatgacaagagaatcaaactcttggcatctcccgtccagaagcctaggcctaagacaaataaaatatttgcataactatgtaattcgttagaattattttcccttccctctgacaccatcccttaccctggactagggaaagttatccagactgagggaaaggacagtcagaagggaaggaagatggtagtccagtgggtcactgtggcggggccttccccaccactgggc

SEQ ID NO: 768028 - DNA, 625 bp, Homo sapiens
ctgtaaaattccttataattacagtgccacccttgtagatattagacgacagtgaggttctgagctgtatcataaacttcttaccacccaataaacctcctctcttggctttttctccctgaagcatgttcttttaccccaaaactttctataccctggcctactaatttcaatgggagtctcagacagctaaagcaggatgaagaccaatagaacatcaagtgtaaccactttatcttacagaktaggatgtcaggttcggaggaatggcatcgtatagactctgagatgcaaataacactccccaaatcacctgaataactcttgggctcagcccttttcaagtgtttttcagaacagtggtgcttcatggcctgtgcttgccatgcagttaaagtacaataacatggacattttcccaatctgtgtctctctctcacttacgcatatacagtgttaattagttaatgagttgaatttcctcagtaaggagtttgtgtatttgtgggcatgtgcttaaactctgttttctgttaatattggtcaggataatcatttagcaaaaccatagtacttagttatttttagtttaaaacatcaatgactcatggctttccagagctca

SEQ ID NO: 768029 - DNA, 625 bp, Homo sapiens
ctgtaaaattccttataattacagtgccacccttgtagatattagacgacagtgaggttctgagctgtatcataaacttcttaccacccaataaacctcctctcttggctttttctccctgaagcatgttcttttaccccaaaactttctataccctggcctactaatttcaatgggagtctcagacagctaaagcaggatgaagaccaatagaacatcaagtgtaaccactttatcttacagattaggatgtcaggttcggaggaatggcatcgtatagactctgagatgcaaataacactccccaaatcacctgaataactcttgggctcagcccttttcaagtgtttttcagaacagtggtgcttcatggcctgtgcttgccatgcagttaaagtacaataacatggacattttcccaakctgtgtctctctctcacttacgcatatacagtgttaattagttaatgagttgaatttcctcagtaaggagtttgtgtatttgtgggcatgtgcttaaactctgttttctgttaatattggtcaggataatcatttagcaaaaccatagtacttagttatttttagtttaaaacatcaatgactcatggctttccagagctca

SEQ ID NO: 768030 - DNA, 625 bp, Homo sapiens
ctgtaaaattccttataattacagtgccacccttgtagatattagacgacagtgaggttctgagctgtatcataaacttcttaccacccaataaacctcctctcttggctttttctccctgaagcatgttcttttaccccaaaactttctataccctggcctactaatttcaatgggagtctcagacagctaaagcaggatgaagaccaatagaacatcaagtgtaaccactttatcttacagattaggatgtcaggttcggaggaatggcatcgtatagactctgagatgcaaataacactccccaaatcacctgaataactcttgggctcagcccttttcaagtgtttttcagaacagtggtgcttcatggcctgtgcttgccatgcagttaaagtacaataacatggacattttcccaatctgtgtctctctctcacttacgcatatacagtgttaatkagttaatgagttgaatttcctcagtaaggagtttgtgtatttgtgggcatgtgcttaaactctgttttctgttaatattggtcaggataatcatttagcaaaaccatagtacttagttatttttagtttaaaacatcaatgactcatggctttccagagctca

SEQ ID NO: 768031 - DNA, 668 bp, Homo sapiens
tttggaatttttttgcgtctatattcacaagttaaataggtctatgtttctttttccatgttgttcttatctgctgttggaaccaagattatattaggcttataaaacaagctggagtagggaaaatgtaagaaaagcctttagcatcttgtaatgccagaaaataaaagttctggagaaaggataggggcattgttgcagagggcacaggagccaaactgaaagagaycgcagtggccaaaactgaaacaacttgagcaacaaaatatttaacagcagtattggattataacccatggaataaaataaatgtccatgaggccatgctgatattaagtaattaattcatggaagaaaaaagatggcttttaaaaaaactagaattctaataaatattagaagaaatgagggaaatagaatatcaccattagaataccacagtaatcattactgcaggcaagatcaaccgatgaatgctaaaactagtgggcaaaactttaaggagaaacagtatttgcataacctcaaagtatcttcccccaatactttactaattacaaagggaaagatagcagctttacagtggagacatctgggagacatctccaaatgattaaggttaacatcagtaacaagacatataatgtcccccttaatctttaggttag

SEQ ID NO: 768032 - DNA, 618 bp, Homo sapiens
ggaatttttttgcgtctatattcacaagttaaataggtctatgtttctttttccatgttgttcttatctgctgttggaaccaagattatattaggcttataaaacaagctggagtagggaaaatgtaagaaaagcctttagcatcttgtaatgccagaaaataaaagttctggagaaaggataggggcattgttgcagagggcacaggagccaaactgaaagagacckcagtggccaaaactgaaacaacttgagcaacaaaatatttaacagcagtattggattataacccatggaataaaataaatgtccatgaggccatgctgatattaagtaattaattcatggaagaaaaaagatggcttttaaaaaaactagaattctaataaatattagaagaaatgagggaaatagaatatcaccattagaataccacagtaatcattactgcaggcaagatcaaccgatgaatgctaaaactagtgggcaaaactttaaggagaaacagtatttgcataacctcaaagtatcttcccccaatactttactaattacaaagggaaagatagcagctttacagtggagacatctgggagacatctccaaatgattaaggtt

SEQ ID NO: 768033 - DNA, 668 bp, Homo sapiens
tttggaatttttttgcgtctatattcacaagttaaataggtctatgtttctttttccatgttgttcttatctgctgttggaaccaagattatattaggcttataaaacaagctggagtagggaaaatgtaagaaaagcctttagcatcttgtaatgccagaaaataaaagttctggagaaaggataggggcattgttgcagagggcacaggagccaaactgaaagagaccgcagtggccaaaactgaaacaacttgagcaacaaaatatttaacagcagtattggattataacccatrgaataaaataaatgtccatgaggccatgctgatattaagtaattaattcatggaagaaaaaagatggcttttaaaaaaactagaattctaataaatattagaagaaatgagggaaatagaatatcaccattagaataccacagtaatcattactgcaggcaagatcaaccgatgaatgctaaaactagtgggcaaaactttaaggagaaacagtatttgcataacctcaaagtatcttcccccaatactttactaattacaaagggaaagatagcagctttacagtggagacatctgggagacatctccaaatgattaaggttaacatcagtaacaagacatataatgtcccccttaatctttaggttag

SEQ ID NO: 768034 - DNA, 574 bp, Homo sapiens
gaagacttactgtacctcctttaggctgagtctttaaatgaaaccctttcactatcattgacttaaacttaagcctcatagttgtgtactctaagacagactggagggctcaaatctttgctacgacattaccttgggcgagttactcaaagctataataacttccgtgtctggttatgagattgtggattaattcctataaaggrcttaagacagtacctgacatatagcagatatcactcaactatagttatggtggttagttattcagttcagaaaactacagaattacttgtgtgcaaccttttgcatttgcagaccagaatcttttttttttttttgagatggagtctccctctgtctcccaggcatcatcttggctcactgcaacctccgcctccctgattcaagtgattctcttgcctcagcctcccagtagctgggactacaggcatgtgccaccaagcctggctattttttttggtatttttagtagatacggggtttcaccgtgttagccaggatggtctccatctcctcaccttgtgatctgcctgcctcagcctcccgaagt

SEQ ID NO: 768035 - DNA, 545 bp, Homo sapiens
ctcatcaaggcagacctggctacagccactgctgagtgcccaacttgccagcagcagagaccaacactgagcccttgatatggcaccattccttggggtgatagctagctagctcatggcagtttgatwatattggacctcttccatcatggaaagagcagaggtttgtcctcactggaatagacacttactccagatacaggtttgcctaccctgcacacaatgcttctgccaagactatcatccatggactcacggagtgccttatccactgtcatggtattctacacagcattgtctctgaccaaggcattcactttatggctaaagaaatgcggcagtaggctcatgctcatggaattcactggtcttaccatgttctccatcatcctgaagcagctagactgatagaacggtggagttgccttttgaagttacaattacaacaccaactagatgacaatactttgcaaggctggggcaaagttctgcagaaggccgtgtatgctctgaatcagcatccaacatatggtactctttctcct

SEQ ID NO: 768036 - DNA, 621 bp, Homo sapiens
aaactagcctggccaacgtggtgaaactccatttctactaaaccaaaatacaaaaattagccaagcatggtggcacatgcctgtaatcccagcaacttaggaggctgaggcaggagaattgcttgaacccaggagatgraggttgcagtgacccgagattgcaccactgcactctagcctcggcaacagagtgagttaaattccatctcagaaaagaaagggacattattggtgtggagttctagcagctggacttagattgcagacctgaagttaaaattggcatgtccttgtttattggaggccggcaaaatttgacttacgaatgatttgtcggggcagcccttccagatgcctgaggcctttaccttttaatggggatttggctgtctaatgctagtaacagccattcatttgtaagagcaggttttatgactcagcttcagggattaatgtttatttttgtgtaactttgtgggggtgggggagcggatcttgagatttttattttcctttacatagcaaaacaaacaacaaaacgcttccataacgcgggctggatggaatgcctatatactgacttttggggtccctgtacagtccctaggtgggttccatgaa

SEQ ID NO: 768037 - DNA, 581 bp, Homo sapiens
ctgggagaagaccttctgaaatgaatactcaccccctcacctccccaaattagcctcctgcctctgctccggaagcttcctaatggtctgtgtgcaactgtgcaattacagcagcctgtgttaacaaagctgcgtgatcacyagctttgggcaaaggcttgtgattggagcggtgtgaggtgttgtctcacccctttcacaggcagtttctcgtttttcacatgcgcccacttataaatgtctgtcacagggtttcaggccattcaccacttacacatttgctaattgttccccattcttctgtgtttcttagcctcagacttttcgtatccatctgttctaactaaaatctctctcatcaaattgaaagcccctccaaatgatttcttaccattttctcctaattgccactctagagacctggctatccatttgaaatacctttttgaagtcttgattatctgtaggaaatatttttttctgacatgatagaagtaaccagttttggtgctatttgggttgcttaagtaactacaggctggaaataggagattctctttccttttttccttctatttttc

SEQ ID NO: 768038 - DNA, 605 bp, Homo sapiens
tggaatgaaaaaactctgcaaaaccaggagatattttttaaaaacctgtgatttttttcaagaccagaaaacatgagtcggatggaatctctccctgcatagagacctcagcaggtttttctaacgaaagaaagcttttgcacccagagcctgggagcagtgtgttacatgggcactcctgtgagctggacaagcagctcattaacccactcaccatgcctgccggcaagtaggtaggargcatcgttatctgcttttcacagatggacaaggcagaacccagaaacatcacacaggtgactctgcaagtggccctggtgctctgctgtccaaggtcaaaatgctttctagatcctccgagcaggcaagtaggataagcagaaagagggaactgagagatagcttgggggaagccagagtctcgaagcccctgagagctggggccttgttggaacccactacagccccaaaatgccacagtgggaactgccccttggaaattagtgtctggtcttcctaattagatttatctcttaaaatgcaaaactttagaagtggaagtttggatgaaatgtaaagtatgaatgattttattttacttttta

SEQ ID NO: 768039 - DNA, 605 bp, Homo sapiens
tggaatgaaaaaactctgcaaaaccaggagatattttttaaaaacctgtgatttttttcaagaccagaaaacatgagtcggatggaatctctccctgcatagagacctcagcaggtttttctaacgaaagaaagcttttgcacccagagcctgggagcagtgtgttacatgggcactcctgtgagctggacaagcagctcattaacccactcaccatgcctgccggcaagtaggtaggaggcatcgttatctgcttttcacagatggacaaggcagaacccagaaacatcacacaggtgactctgcaagtggccctggtgctctgctgtccaaggtcaaaatgctttctagatcctcygagcaggcaagtaggataagcagaaagagggaactgagagatagcttgggggaagccagagtctcgaagcccctgagagctggggccttgttggaacccactacagccccaaaatgccacagtgggaactgccccttggaaattagtgtctggtcttcctaattagatttatctcttaaaatgcaaaactttagaagtggaagtttggatgaaatgtaaagtatgaatgattttattttacttttta

SEQ ID NO: 768040 - DNA, 605 bp, Homo sapiens
tggaatgaaaaaactctgcaaaaccaggagatattttttaaaaacctgtgatttttttcaagaccagaaaacatgagtcggatggaatctctccctgcatagagacctcagcaggtttttctaacgaaagaaagcttttgcacccagagcctgggagcagtgtgttacatgggcactcctgtgagctggacaagcagctcattaacccactcaccatgcctgccggcaagtaggtaggaggcatcgttatctgcttttcacagatggacaaggcagaacccagaaacatcacacaggtgactctgcaagtggccctggtgctctgctgtccaaggtcaaaatgctttctagatcctccgagcaggcaagtaggwtaagcagaaagagggaactgagagatagcttgggggaagccagagtctcgaagcccctgagagctggggccttgttggaacccactacagccccaaaatgccacagtgggaactgccccttggaaattagtgtctggtcttcctaattagatttatctcttaaaatgcaaaactttagaagtggaagtttggatgaaatgtaaagtatgaatgattttattttacttttta

SEQ ID NO: 768041 - DNA, 621 bp, Homo sapiens
agacatttttggttgccatttgtcctagaggaggctgctagtggcataagctggtagaggccaggttgccactgaacatcctatggggcacagggctcccccaataacaaagatagacacagctctaaatgtgaatagtgccaccgtggraaacctgaataaagcggcctgagcatgaggtccacctgatttccgggcagtgtttgcaatcatgtcctcgtgtggattgaaacaccaagtccacaaagtatgagatgagctcttcccttagtctttccatttaggagagctcagattcactttgcatcattttgcaaataatgagaaatacttcgtaaaatgcaaaataataaagggaattaaataagacactctttctagacactaactggggtggtgatgtcgtgggcagaagcctctgtggctggggtagagaggcagccaaggagggactgaaatatggtggatgactgagacattattcactcagacttcatttattgagcactggtatctatgcataacctgagccgtgtggatgaacaaaacctggttggtgcctgttttgcagagcgtgcaggttagttgggacagagaatcctcaatgcctgcgtgaggaag

SEQ ID NO: 768042 - DNA, 621 bp, Homo sapiens
agacatttttggttgccatttgtcctagaggaggctgctagtggcataagctggtagaggccaggttgccactgaacatcctatggggcacagggctcccccaataacaaagatagacacagctctaaatgtgaatagtgccaccgtggaaaacctgaataaagcggcctgagcatgaggtccacctgatttccgggcagtgtttgcaatcatgtcctcrtgtggattgaaacaccaagtccacaaagtatgagatgagctcttcccttagtctttccatttaggagagctcagattcactttgcatcattttgcaaataatgagaaatacttcgtaaaatgcaaaataataaagggaattaaataagacactctttctagacactaactggggtggtgatgtcgtgggcagaagcctctgtggctggggtagagaggcagccaaggagggactgaaatatggtggatgactgagacattattcactcagacttcatttattgagcactggtatctatgcataacctgagccgtgtggatgaacaaaacctggttggtgcctgttttgcagagcgtgcaggttagttgggacagagaatcctcaatgcctgcgtgaggaag

SEQ ID NO: 768043 - DNA, 519 bp, Homo sapiens
gagctgttcctaatcggccatcttggctcctcctgtctaccgagtatatctttaaactgtaagattatgtcttagaattcacataagtctcttttacttgcctcacctccattttaatgtgattaaaatagaggtgatatgtatacagggaaaaattggacaattaagaatagattatgccatgtaatatttctttagaatagttcagaacaatacagactcataaaacgtgccatttaagtttttcctarataaattactttgcataatctagctaataaaaaacaaataaagttaaaacttaagaagacagtgtagaaaagaacatataggtcagtatgtttaagggtagaatcaggggaggtgatggtaatggttggatttctgttcattcatgacactaattcaaaaacataggtccaagataagataaggtaaagatagtcattagtcgaaaagaaataatatacgtaacttctacattgttagagaataaggagaataaagaaatcgcgttgt

SEQ ID NO: 768044 - DNA, 633 bp, Homo sapiens
tgaaaagcaaccaggagaaagtcaaaggcaagtttagttgaaacagaagaggcaaaggaagcaggtgaggcatagaaagggaggtgtaactgtgtaatcctaaaagcagaaaggtctgtcctggcagatctgtatcttgtaacaagccaacatcttctggaatagttttaaatcaactgagagttggggaagtccagtcctggaactgtagatgttgtacagtctgtagtccaaaaatacttctggccagtacttcctctttgcagttcattactgttttaagtcattgcccttcctttcccgacttcccatgctagcctaacatatagatctcactcagtgttstcaatgttttctccctttatgttcagctaactgtttgcctgggactgtttgcctggaactgcaagggtttctgagatgtaggccttccagtttttaaaataggacagttccagtcaaacagagatgaattgataaccttaacgccaggccaaattatcttgcacctcacctctgatttcatgatggattagtgataggggccagctcatgctcagagtactaaatttccaacccaatacaccattcattacagtttgttcttattatgatggtcaatcccctttctta

SEQ ID NO: 768045 - DNA, 593 bp, Homo sapiens
taacctggaggacattaggctcagtgaaataagccaggcagcgaaaggcaagtactatgtgatctcacttatatgtgggatctaaaacagctaaactcatagaaagagagtgtaggacagtggtcaccagagcctcagtggcaggaaagtgaatggggagatgttggtgaaagggtgcaaagtttggaatragttttccagatctatcgcccagcaaggtgactattgtcaataagaatgtactgtgtatttcaaaatagctaagagtaaatttcaaacatcttaccataaaaatgataagtgagatgttgaatatgtttattagtttgaccgaatcattccatgatatatgtaaatcaaaacatcatattgcaccccacaaatgtatataattatgatttttctcattaaaaaactaataaaaagcattaaatcagtagactgagagaagtaaattacccgctataataggggtggggcttatccaatcagtggaggccttagttggaaaagactgacctctctcagaaaaagagggaattctacctctctattgcctttggacttgagctgcaacatcacctcctccctgg

SEQ ID NO: 768046 - DNA, 549 bp, Homo sapiens
tgcagcaaaccaccgtggcacacattttcctatgtaacaaacctgcacgtcctgcacatgtatcctggaacttaaattaaattaaaaaaaagaatctgaactggcctactggcaacagtagaaatataaaaaggcgcaagccctttggaaacaaatgtggaagtttcttgaaaggtttatacaacttccatgtgattcagcccttccactcctaatatttacccacgagagctgaaagcatataaagattaatgcactattattratgctagcctcatttgtaatgaacaaaacttggaaataactcaaatgcccgccaacaggagaagggacaaataaacaggtgtattcatgcaataaaacactagtcagccataaagaagaatgacctagtaatgcatgccacaacttgcaataatcttgaaataattatactgtgtgaaagaacataggcaaaagaagcacaatactatatggttccatttacataaaattgtagacaatgcaaactagactccagtgacagagcagcaggaagcagatcaggga

SEQ ID NO: 768047 - DNA, 610 bp, Homo sapiens
aatcattttcccaaggacacctgcccctttaaatgtacccctttaagttttcaaagtctgtgttttcactgtgaaggactttgctctctttagacaggctcacaatcagctaagaagaaatatgaagatggttccacagagtccataagggaatcaatgaaatcaatgatccccaggagaagcaaaggcttttgccaaataagtcagcttcctgtggagtgattattgggacaggcaacactatagtctccattcatagttgtgtttctatttttattcctttcagcacattcctcctccaaatgaggaagggrcaaatttccaaaataaagactactttttaaaggagcaatataaatcaatcattttgtgacaatgatattggaccttttactcttcccaaacccatacgcccaaccatcagtcagagcccttgcaacacatgtagatttaaacagactgatttcttctgaagtgatgcccccagaatggagtgaaatcatatcgcataacacttctttcaccaaagagctacacttctgagatttattagctctcttcccttattcctaaaaaatggggtacagcctggactacttatggaaaaaat

SEQ ID NO: 768048 - DNA, 527 bp, Homo sapiens
tacaagtctgtttcactgacactgaaaatctgttgtttagtgtatttatctttatcagtgatcttagctagaccttctggataacttgctgcagcttctacgtcagcacttcttgcttcaccctgcccttatgtgttatggagatggtttctttcccctaagcctcatgaacggacctctgttagcttcaacttttggtctgcagctttctcacctctctcagccttcacagaactaaagagagttagggacttgctctggattaggctttggcttaaaggaakgttgtagctggtttgatcttctacccagaccactcaaactttctctctcctagcaataagactctttcactttttaaatcactcatgtgttcactggagtagcacgtttaatttctttcaaggactttcctttgcattcccaacttggctaactgtttggcacaagaggcctagctttcagcctattttggctttcaacacaccttcctcactaagcttaatcatttctagcttttaatttaa

SEQ ID NO: 768049 - DNA, 636 bp, Homo sapiens
tgtgtactttttaagtctaataactttgttccccaaattgggactaaattatccatcagatgtggcttcttcccctcctatactttttttttttttttttgcagatatggatggtagagttcccacagacagcaattaaggttgctattaatgttctaataaatagccataggggattaaatcatccagaggagaaaaagcttgttaatctaataatagtcttttattctatgatggcttatgagaaactgttagccaaatgccctccatcttcacggaaaataaatgaraagaattggatttaaaccacagcaaaaaaacacttcagatgggcacaaggaggcacattttatatgacagtcgatattatcaagttaatttgcaatattataaaaacaaagttcatgtaattttctctgagagaagcttatatgaatgggtttaaatctgtctaaagccagatggccccttgtgattccctaaaaggaagagagttcttttgtgatacttttgctgagtagttaaagaagacatttggtttttggtgttcacagaggccatttcattgtgcctatgagaaataaaatcagttgttggaaagttttacacaaaccactcagtgtggcaaaaaacagg

SEQ ID NO: 768050 - DNA, 480 bp, Homo sapiens
gctgccccaacctggacccccaagtcttcccagcctcctcatcaaaacctatctttcgtgcacctccttccttcagagtgatgccagggcaatgttcaactatctgctctgagaaatgttccaaagagaggacgtargtgtgggaagaccctgggaccacgtgtcggagccggttctgatctcttgctctgctactaccctgtgtaattttgggagtggaagtgaggcagggaggtacaaagtggggcaaagaagtggagggttcttctgccagctacctgggaggaagggcaaacctcatgacacacagcattgaggggagactggcagtggatgctgaagacctggaagatgcgcaggacaaaggcaaagggggcagagaagaaaaatagaagagaaacaaaatgggccttggggcagatcccagaactggtgggaggggtggatctaagggcttgaggtgggaggtgagccttgaag

SEQ ID NO: 768051 - DNA, 440 bp, Homo sapiens
cttcctttctacccagtctccagtgcctcctcctcgcaaggctcttcacgctgagaacatcatcatgggcatagcaaacgctaaggattcatgttctccacctcactcccatcaccctcaagcctggactgttcaagcactccgcgtaccyatggggcagcccttgtatctcagcttcatctcagttaactctttcatggtgaagtaaacttctctgtgcatgaatgattgtctcgagaagcacacatgcctgtgatggtgtctcttcctcaaatgcctcctttatgcctctgcatccccaaatcctatccaccctgcagagcccagcctaaaacccaccctcttcaggatgccttcaatcaatggactaacactgtctgagaacttactatgtgccagggactctgctaatacccgaggatgagagtaggtacaattcc

SEQ ID NO: 768052 - DNA, 631 bp, Homo sapiens
aatcttggctcactgcaacctccacctcctgggttcaagtggttctcctgcctcagcctccgaagtagctgtgattacaggtgcccacaaccaagcctggctaagttttgtatttttagtagaaacggagtttcaccttgttggccaggctggtcatgtactcctggccttgagtaatccgcctgcctcggcctcccaaagtgttgggattacaggcgtgagccacctcgcccaaccaggatttttttttwaagatgggatctcattctgtcgcccaggctggactgcagtggtgtgatcatggctcactgcagcctcgaattcttgggctcaagcaatcctcctgcttcagcttcctgagtagctgggaccgcaggctcgtgccatcatgcctggctaatttttggttgtttgtttattgtggagatggaacctcactttgctgccaagtctggtcttaaactcctggcttaaaatgatcctccagtctcagtattccaaaacgccaggattacaggagtgaggcaccgcacccagccctaatatgattatatatataatgcacttagacaccaggcactgttctaagtgccacatatatatggactcaatcctaatatcaaaaagtaaa

SEQ ID NO: 768053 - DNA, 603 bp, Homo sapiens
cccccactgcttcccaaatctgtgcctgggatagtgtggacgttcaggagccagggtagcatcccagggattaggggcacttacacagctatagacatgttggccgcggacagaggactcacttctgccacctccttggctttctgtagggcaagtttctggttcgctgcttcttcttcctcttgctcgtcctaaaaggcacrtggaatctttgttcacaaaacatgaactaggccttggggactcacttctgaccctgttgctgaccaggggcaacatttgaaatatttcgaccaatcagaaccaaggctccccaattggaatgggtacctgctattggttaagtgtattgctatcccctctgtgtataagtttgacatctaactcattatgaagcctattttaacacacagccagataacaaaaaataaaaatgtcccttctcttcctacaatgaagactttcctgcagcctatttttttttcttttgtttgttttcagagacagagtctcccttggttgcccagcctggagtgcagtggcacaatcatagctcactgtaaccttgaactcctgggctcaagcaatcctcccacctcagcc

SEQ ID NO: 768054 - DNA, 568 bp, Homo sapiens
gccattgataaagaaacggacacctgagaaaatgtaattctctaggttagggcagaaaggaacaaagaacactgatatatttgttatgaagagtgatgatttacgagaaattcagaccttttcatttaccacaccggtggcataatcaaagtgacccttttcctttcctgacagtttgaactttaaaattatagtgttttcctcctcaaactttttctttattggctaagatttaaaacacacacacacacacacacacaaagcatttgactygggaggaaaaagataacaatttcaatttgtataatgaaaggctagataacaaaaggggtgcaacctatgatttttccaccgtgacccagacctacccacaacatttccatttcctgagaatgggaagcacagagccaaaatagataggtcacaggagcagtaaaaccagctttaccaaaacacgtaccagatggagcctatttctatcacctcaaggtactttacactgtcaagatgagacacagggattcatttatttacgtcaatgtctttacacaggacataccaagatttg

SEQ ID NO: 768055 - DNA, 568 bp, Homo sapiens
gccattgataaagaaacggacacctgagaaaatgtaattctctaggttagggcagaaaggaacaaagaacactgatatatttgttatgaagagtgatgatttacgagaaattcagaccttttcatttaccacaccggtggcataatcaaagtgacccttttcctttcctgacagtttgaactttaaaattatagtgttttcctcctcaaactttttctttattggctaagatttaaaacacacacacacacacacacacaaagcatttgactcgggaggaaaaagataacaatttcaatttgtataatgaaaggctagataacaaaaggggtgcaacctatgatttttccaccgtgacccagacctacccacaacatttccatttcctgagaatgggaagcacagagccaaaatagataggtcacaggagcagtaaaaccagcttyaccaaaacacgtaccagatggagcctatttctatcacctcaaggtactttacactgtcaagatgagacacagggattcatttatttacgtcaatgtctttacacaggacataccaagatttg

SEQ ID NO: 768056 - DNA, 595 bp, Homo sapiens
aaatcacagtgggtggccaggatggacacactggatgtttcagtggacacaaccagccttcaagaagcatgtggacctagagaaagctctgccacctacatgccagcgcatgttcatgctgagaactgcaggtagctctgttatttgttggyttgacttcgctttcgggaaagccttaaatacgtgtatgaggaaagtcctccctccccaaaatagaaaacctctaagaagacacttagaacaaagtctcccagactaggtacgtcgaacaaaaccttccatccatcccattggctgttttctctacaccctggtttgaatctcccccaggaaatgctccactgttagtcaacaaggatatgttgtcattggaagatcagggtgaaaatatacctggtataggcaggcattacggtacggcagaggcccttcctggggcaaaactacttgagtctttgttgccccagtgttcccctctatcaaatgctttcataatattatctgtatcgttgtgttattaagaagattggatttcattcacagaagttaagcagttacaacagtgcctagcacaaagtgaacaagacatcagagt

SEQ ID NO: 768057 - DNA, 595 bp, Homo sapiens
aaatcacagtgggtggccaggatggacacactggatgtttcagtggacacaaccagccttcaagaagcatgtggacctagagaaagctctgccacctacatgccagcgcatgttcatgctgagaactgcaggtagctctgttatttgttggcttgacttcgctttcgggaaagccttaaatacrtgtatgaggaaagtcctccctccccaaaatagaaaacctctaagaagacacttagaacaaagtctcccagactaggtacgtcgaacaaaaccttccatccatcccattggctgttttctctacaccctggtttgaatctcccccaggaaatgctccactgttagtcaacaaggatatgttgtcattggaagatcagggtgaaaatatacctggtataggcaggcattacggtacggcagaggcccttcctggggcaaaactacttgagtctttgttgccccagtgttcccctctatcaaatgctttcataatattatctgtatcgttgtgttattaagaagattggatttcattcacagaagttaagcagttacaacagtgcctagcacaaagtgaacaagacatcagagt

SEQ ID NO: 768058 - DNA, 647 bp, Homo sapiens
ttaggattgcctcttctatttctgtaagaaatgccatcaggattttggtagggactacattgaatttttagatcactttggatattatgaacattttaacaatattaattcttctaatccatgaacatgggatgacattgtatttatcagtattttctttaattccctttatcagtgttttataattttcacagtacaagtcttcacctatttagttaaatttattcctaagtgttttattctttctgttgttattgtgaatgagattgttttattaacttcctttttggagtttgttatttgcgcatagaatcacattgactcttgcatgttaattttatatcctgcaacttactgaatttgcttattagttccacatgttttgttgttgtcattgttgttgagtctttaacattttctacagatgcattcatggcactctcaaacggacaatttcacttcttctcttatttggataccttttatttmattgtcttgtgtaatggctctagctaggacttccactactatgttgaataaaagtgacaagaatgggcatcttcgacttgtaccatatcttaaaaggaacgctttcagtttttccccattgattatgaggttagcttttcataatggcctttattgtt

SEQ ID NO: 768059 - DNA, 734 bp, Homo sapiens
ttggatcctaggtcataaaaagactatggcttccatcttgattgttcattctctctctctctctatctctctctctccctccccactcacttgggacaaactatctgccatgtcctggggacacttaggcagaagtcctgtggaaaggcccgctttgtgaagaactgaaatctccagcccatagccatgaagtctgctaacaactgcaggagccatcttggaggctgattccccagcaccaggagaaacagggatgacagcagcctctgttggcagctcagttgcaacctcatgctggaccctgaggcagagccaaccagctgagccactctgggattcctgattcttaggaactatgtgagataatgaatatttgttttcgttagctgggaagctttgggtagcttgttacacagcaatagagaacgaatacaggcaagtactattattatcctcattacagatgagcagataaagcagaggaaggtagagtcacttgtcctggacacgtggctgggaagtggtggagggcagacccacactgtctgacttctgagctcacattctgaacccctgtggtttataarcatgatgtgatggtcttctgtgcttctgcttcgtttatttgaagtcctcaagtcttattggaagtctctagcatatttgtagtctttcctttttaattgccccattttcaagattggtggataatttcagagggattgagattaata

SEQ ID NO: 768060 - DNA, 633 bp, Homo sapiens
cacatgaaaaaacacatcactgatcattagggaaatggaaatcaaagccacagtgacatgccacctgatatgattcagctgtgtccccacccaagtctcatcttgaattgtaactcccacaattcccatgtgtcatgagaggaacccaatgggaggtgattgaattatgggggcaggtctttcctgtcctgttcttgtgatagtgaatcagtctcaagagatctgaaaatgggagtttccctgcacaagttctctctttacctgctgccatccatgtaagatgtgacttgctcctccttgccttctgccatgattgtgaggcctccccagccacgtggaactgttagtccattataactctttttctttcagtcttggttgtgtytttatcagcagtgtgaaagcagactaatatactgcctcatgaccattgggatgccacaatcaaaaaaataataacaagtgtcagccaggatgtggagaaattgggacctttgtgcattgtttgtgggaatgtaaaatggtgccactgctaagaaaaacagtataacagttcctcaaaatattaaaaaaatagaactgccttgtgatctacaattctacatttgaatacatatctgaaagaattgaaag

SEQ ID NO: 768061 - DNA, 527 bp, Homo sapiens
gccattgataaagaaacggacaacctgagaaaatgtaattctctaggttagggcagaaaggaacaaaagaacactgatatatttgttatgaagagtgatgatttacgagaaattcagaccttttcatttaccacacacggtggcataatcaaagtgacccttttcctttcctgacagtttgaactttaaaattatagtgttttcctcctcaaactttttctttattggctaagatttaaaacacacacacacacacacacacaaagcatttgactygggaggaaaaagataacaatttcaatttgtataatgaaaggctagataacaaaaggggtgcaacctatgatttttccaccgtgacccagacctacccacaacatttccatttcctgagaatgggaagcacagagccaaaatagataggtcacaggagcagtaaaaccagctttaccaaaacacgtaccagatggagcctatttctatcacctcaaggtactttacactgtcaagatgagacacagggattc

SEQ ID NO: 768062 - DNA, 587 bp, Homo sapiens
aattctctaggttagggcagaaaggaacaaaagaacactgatatatttgttatgaagagtgatgatttacgagaaattcagaccttttcatttaccacacacggtggcataatcaaagtgacccttttcctttcctgacagtttgaactttaaaattatagtgttttcctcctcaaactttttctttattggctaagatttaaaacacacacacacacacacacacaaagcatttgactcgggaggaaaaagataacaatttcaatttgtataatgaaaggctagataacaaaaggggtgcaacctatgatttttccaccgtgacccagacctacccacaacatttccatttcctgagaatgggaagcacagagccaaaatagataggtcacaggagcagtaaaaccagcttyaccaaaacacgtaccagatggagcctatttctatcacctcaaggtactttacactgtcaagatgagacacagggattcatttatttacgtcaatgtctttacacaggacataccaagatttgtcttcacataccaagattctgacctcagagaatgtagctaagggccaggtcc

SEQ ID NO: 768063 - DNA, 591 bp, Homo sapiens
cacagtgggtggccaggatggacacactggatgtttcagtggacacaaccagccttcaagaagcatgtggacctagagaaagctctgccacctacatgccagcgcatgttcatgctgagaactgcaggtagctctgttatttgttggyttgacttcgctttcgggaaagccttaaatacgtgtatgaggaaagtcctccctccccaaaatagaaaacctctaagaagacacttagaacaaagtctcccagactaggtacgtcgaacaaaaccttccatccatcccattggctgttttctctacaccctggtttgaatctcccccaggaaatgctccactgttagtcaacaaggatatgttgtcattggaagatcagggtgaaaatatacctggtataggcaggcattacggtacggcagaggcccttcctggggcaaaactacttgagtctttgttgccccagtgttcccctctatcaaatgctttcataatattatctgtatcgttgtgttattaagaagattggatttcattcacagaagttaagcagttacaacagtgcctagcacaaagtgaacaagacatcagagt

SEQ ID NO: 768064 - DNA, 591 bp, Homo sapiens
cacagtgggtggccaggatggacacactggatgtttcagtggacacaaccagccttcaagaagcatgtggacctagagaaagctctgccacctacatgccagcgcatgttcatgctgagaactgcaggtagctctgttatttgttggcttgacttcgctttcgggaaagccttaaatacrtgtatgaggaaagtcctccctccccaaaatagaaaacctctaagaagacacttagaacaaagtctcccagactaggtacgtcgaacaaaaccttccatccatcccattggctgttttctctacaccctggtttgaatctcccccaggaaatgctccactgttagtcaacaaggatatgttgtcattggaagatcagggtgaaaatatacctggtataggcaggcattacggtacggcagaggcccttcctggggcaaaactacttgagtctttgttgccccagtgttcccctctatcaaatgctttcataatattatctgtatcgttgtgttattaagaagattggatttcattcacagaagttaagcagttacaacagtgcctagcacaaagtgaacaagacatcagagt

SEQ ID NO: 768065 - DNA, 737 bp, Homo sapiens; identical to SEQ ID NO: 748899

SEQ ID NO: 768066 - DNA, 653 bp, Homo sapiens
ctcagaacaataaaggccattatgaaaagctaacctcataatcaaggggaaaaactgaaagcgttccttttaagatatggtacaagtcgaagatgcccattcttgtcacttttattcaacatagtagtggaagtcctagctagagccattacacaagacaatkaaataaaaggtatccaaataagagaagaagtgaaatgtccgtttgagagtgccatgaatgcatctgtagaaaatgttaaagactcaacaacaatgacaacaacaaaacatgtggaactaataagcaaattcagtaagttgcaggatataaaattaacatgcaagagtcaatgtgattctatgcgcaaataacaaactccaaaaaggaagttaataaaacaatctcattcacaataacaacagaaagaataaaacacttaggaataaatttaactaaataggtgaagactgtactgtgaaaattataaaacactgataaagggaattaaagaaaatactgataaatacaatgtcatcccatgttcatggattagaagaattaatatgttaaaatgttcataatatccaaagtgatctaaaaattcaatgtagtccctaccaaaatcctgatggcatttcttacagaaatagaagaggcaatcctaaaatcc

SEQ ID NO: 768067 - DNA, 610 bp, Homo sapiens
gaaaaactggaagcagcaaaaccagctttagaagaggcagaagctgcattgcaggtgcatctatgtgatataacagatgtcagctttagggcttaagaggcagactaatgctaaaaagatgaataacagcaaggaaatgctctactggttcagatgaaagctctatccacttgagtgatttcaagtaatattttctgcttgagactttattagctctttataggttttgcctgttctgcttaacatctcacactcttcactcatcaatgttgggcaatgccatatactggtggccaagagtcctgggtcctcatttcaactctgtcatcaataagctatgtaatgttggaaaagttacatcaactttctaaggcaacattctctcattcattcattgaggccaatggagtaggtgatctgtaagatacgacgttttctgtctatgaattacccaaatagagagctgctgrtctgatgtagcacattaatgagagagtttgagcaggcttccaacgcaattaaacagtacaattgtgtattagtctgtgttcacactgtataaagatgttacctgagacggggtaatttataaacaaaagacgtttaattg

SEQ ID NO: 768068 - DNA, 569 bp, Homo sapiens
atgaaagtccaggggtttgtgggcctcccagaaagcagaagggttccaatctgcagttcaccatggcccaggcctgcatggcccattgaaggagagtgtgtcctggctgtgccccatgcagaatccagtgcctttgcctagggttcagcttgcctaggcctgctggagagccagtcacctctctgggacctatgagagagtgggcctgaggaggggggtactactcagggaacccagtaagtccygtgtgctcccctcaacaggctggggggaactcacggaacttacggctttctttctcttgcattgtcaacatttactcctttctcttctcccaaattgtaatcccccaaagaagcctgggcttccagaaaacaaaagccagaaagggagaggactggtcattttctgatttggctgatggaattgggattgcagaatttagagaaagcaaatcaatattaaaagtatgttacaaataaaaagttttttttttctaataaacaatgtaggattgtccttcccagctggcaccttccctcttgagggaaacaaacagatgtgagtag

SEQ ID NO: 768069 - DNA, 569 bp, Homo sapiens
atgaaagtccaggggtttgtgggcctcccagaaagcagaagggttccaatctgcagttcaccatggcccaggcctgcatggcccattgaaggagagtgtgtcctggctgtgccccatgcagaatccagtgcctttgcctagggttcagcttgcctaggcctgctggagagccagtcacctctctgggacctatgagagagtgggcctgaggaggggggtactactcagggaacccagtaagtcccgtgtgctcccctcaacaggctggggggaactcacggaacttacggctttctttctcttgcattgtcaacatttactcctttctcttctcccaaattgtaatcccccaaagaagcctgggcttccagaaaacaaaagccagaaagggagaggacyggtcattttctgatttggctgatggaattgggattgcagaatttagagaaagcaaatcaatattaaaagtatgttacaaataaaaagttttttttttctaataaacaatgtaggattgtccttcccagctggcaccttccctcttgagggaaacaaacagatgtgagtag

SEQ ID NO: 768070 - DNA, 569 bp, Homo sapiens
atgaaagtccaggggtttgtgggcctcccagaaagcagaagggttccaatctgcagttcaccatggcccaggcctgcatggcccattgaaggagagtgtgtcctggctgtgccccatgcagaatccagtgcctttgcctagggttcagcttgcctaggcctgctggagagccagtcacctctctgggacctatgagagagtgggcctgaggaggggggtactactcagggaacccagtaagtcccgtgtgctcccctcaacaggctggggggaactcacggaacttacggctttctttctcttgcattgtcaacatttactcctttctcttctcccaaattgtaatcccccaaagaagcctgggcttccagaaaacaaaagccagaaagggagaggactggtcattttctgatttggctgatrgaattgggattgcagaatttagagaaagcaaatcaatattaaaagtatgttacaaataaaaagttttttttttctaataaacaatgtaggattgtccttcccagctggcaccttccctcttgagggaaacaaacagatgtgagtag

SEQ ID NO: 768071 - DNA, 572 bp, Homo sapiens
gctccatacttaaagtagtacagtagtctcttccaagaggagagtctgaattaaagtcatgcctgcctgcctttcattagggccatatgtcagaaggtagctaagttaaaaatccagtggcagcaaactcaggcccaaatgcccccatcatgactggggctgaggtcgctctcttggccattgcttcctctgcttcatagctttatgtatggggcttgtggtcatgaaaagaacatggaactttcagtcagaaatcctgattctggcccttgctgttgacaattactttgttcttttgggtgtgagtcattcaatctgagtttcaattttctcatatataaaatagggacaagagaatctctcyaggagaattgaaataaattgtaactaaaatcatgtatttgataaccataataaatataattattgtatttcaatctggaaaacctgcaaagagacttttggggagttgctaacaaggcccaaattcctgccaatctataagataatgtggggataaaagagaggtggaaggataatggcagtaaaaaataaataaataaatctaatta

SEQ ID NO: 768072 - DNA, 502 bp, Homo sapiens
tcaaggaatggcttccgtgtttaatcatcatgataattcagacttcagctggcaaccatgaaagtcagcacataaacaccatagttgtccaaacatagaataccttacataattagagaaattcaaatggaaaagtggtgtattctcaattggtcaaggtgatctgccagaaacaaaagtgaattctttccmgcaagagaaaaatatgataatttacaaattatttctgaaatgtaatggtttttttgaagaaagcatgctcttatttatgcaatacacttggtaaagaagaagcctgcacattataaatctatgtaaaattgggcaaaatatataaacacaggcaactgtgattaggtatttgatcttaatccctgatcctgaatacaggaatgcaaaaacgtgagccacattctttagatcctcccatctgactgggataattccacaactgtggcaaagcaagctggagttcaagcagaatgtgatctttccagtgagg

SEQ ID NO: 768073 - DNA, 502 bp, Homo sapiens
tcaaggaatggcttccgtgtttaatcatcatgataattcagacttcagctggcaaccatgaaagtcagcacataaacaccatagttgtccaaacatagaataccttacataattagagaaattcaaatggaaaagtggtgtattctcaattggtcaaggtgatctgccagaaacaaaagtgaattctttccagcaagagaaaaatatgataatttacaaattatttctgaaatgtaatggtttttttgaagaaagcatgctcttatttatgcaatacacttggtaaagaagaagcctgcrcattataaatctatgtaaaattgggcaaaatatataaacacaggcaactgtgattaggtatttgatcttaatccctgatcctgaatacaggaatgcaaaaacgtgagccacattctttagatcctcccatctgactgggataattccacaactgtggcaaagcaagctggagttcaagcagaatgtgatctttccagtgagg

SEQ ID NO: 768074 - DNA, 502 bp, Homo sapiens
tcaaggaatggcttccgtgtttaatcatcatgataattcagacttcagctggcaaccatgaaagtcagcacataaacaccatagttgtccaaacatagaataccttacataattagagaaattcaaatggaaaagtggtgtattctcaattggtcaaggtgatctgccagaaacaaaagtgaattctttccagcaagagaaaaatatgataatttacaaattatttctgaaatgtaatggtttttttgaagaaagcatgctcttatttatgcaatacacttggtaaagaagaagcctgcacattataaatctatgtaaaattgggcaaaatrtataaacacaggcaactgtgattaggtatttgatcttaatccctgatcctgaatacaggaatgcaaaaacgtgagccacattctttagatcctcccatctgactgggataattccacaactgtggcaaagcaagctggagttcaagcagaatgtgatctttccagtgagg

SEQ ID NO: 768075 - DNA, 619 bp, Homo sapiens
ggctgaagtggttttagatggagatgaggaacttgttgggaactggagtaaaagtcacttttgctatgcaaagagactggtggcattttacccctgccctagagagctgcagaactttgaacttgagagagatgatttgaggtatcttgcagaagaaatttataaccagcaaagrattcaagaggaagcggagcataaacatttggaaaatttgcaggctgacaatgtgatagaaaaaaaaacaaaccccattttctggggagaaattcaagccagctgcacaaatttgcatcagtaacaaggagctgaatgttaattgccaagacaatggggaaaatgtcttccagacatttcagagaccctcccatgagaggcttggaagcccatgagggaaacatggtttcctgggcctggcccagggtctcccagctgtgtgcagcctagtgacttggtgccctgtgtcccagctgcttcagccatggctaaggctcaggctgtggcttcagagggtgcaagtgccaagacttgtcaccttccaagtggtgttgagcctgcgggtacacaaagtgtagaactgaggtttagaaacctctgcctggatctcagacgatgtatggaa

SEQ ID NO: 768076 - DNA, 597 bp, Homo sapiens
caaaatgcctttctaaacagccctcacattatgtctaaatgagaactatcttattcacacttcttcaagtggccaaagaagaaaatctgaaataaggggtgagaagcagaaaatctagaggttctgacctaagtgggtcctgcttctgacttataaggtgccattaagggaactatggggcacgttgttaaatccaaaggctatactgtgagccttggagagcaactaagactccttcccccataatctctgatagtggtggtggtggtgatgatgatgatgatgatatcacctgagcactgattttgtgccaggcaccgtgctaggcacycttcacatggattatctaatttgatctttccaacatccctatgaggtagatagtaatattatccccattttacacatgaggaaactgaggcacagagatagttaagtaccattcctaagttctcagaaatggtaacttgcagaaccaagctataaacctaagtctggctgaagctgaagacctttcatccttatgaatataatatatctagatcttccaacaagattttttttaaattttgaaaacaaaactccctaatggacatt

SEQ ID NO: 768077 - DNA, 472 bp, Homo sapiens
cacacataaatgggatccgaaagtgttaaaaaccatcataatttggggtaaggttagtccccccttagcttcacaaggatgggtactatcttctgtggtggtctttggagcacaaatggcaagttgaggaccacagcagttaactttttttttgagatggagcctcactctgtcatccaggctggagtgcagttgtgtgatcttggcttaccgcaacctccacctcctgggttcaagcgattctcctacctcagcctcctgagtagctggtattttaagtgcacaccaccatgcctggctgatttttgtaactttagtaaagacrgggttttgctgtgttggccacgctggtctcattcaaactcctgacctcaagcgatccacctgccttagcctcccaaagtggtgggattacaggcgtgagccaccatgcctggccgagcggttaacttatggaacaagacctaggcgc

SEQ ID NO: 768078 - DNA, 623 bp, Homo sapiens
attaatcatacttttacagtatcaatacatgctgttagtttctttttcatctttaaactgtctcaagagatttaggaaaagaaatgtgcataagtgagcataaagtgtgatttcctccatttaacactttttcttatacaaggatgagggctgggtgcagtggcacatgcctataatccaagcactttgggaggccgaggcaggaggcttgcttgagctcaggagttagagaccagcctaggcagcatagggagacctcatctctacaaaaaaaaaaataagaaaattggctgggtatggtggctcatgcctgtattcccagcactttgggaggccgaggcaggcggatcacctgagatcaggagtttgagaccagcctggtcaacatggtgaaaccccgtctctacaaaaatacaaaaaaagttagcagggcatgatggtgggcrcctgtaatcccagctacttgggaggctgaggcgggagaatcgcttgaacccaggagatggaagttgcagtgagccgagattgcgccattgcactccagcctgggtgacagagtgagactccatctgtaagtaaataaataaacaaataaataaataaaaataaatacaatttaaaaa

SEQ ID NO: 768079 - DNA, 548 bp, Homo sapiens
ctaaaggcaagcgacggccacttcagttccactctgtcacatgccccacttgcccagcacacaccttccttcctccccggttaagacgctggctggtgtttccagtggagctggtcctcatgccctgtcttaacactggactgtgctgttgaagaatatggatactcactcaccttctggctctctcctctctggcttccccggattccagcctccaggaaccagatcctgaccatggcttgcttggttggctcctgtacctcccattgggggttgtgggcagatatttagattctcatctgcaatctgggaagcataaactaacactacccccattttatagtcaatgatatgaatgcccagaaaggttaactgattcaggccgggagyggtggctcaggcctgtaatctgagcactttgggaggccgaggtgggaggatcacttgagcccaggagtttaaaaccagccagggcagcatagcagaccccatctctattttaaggaaaaaagaaagaaaggttaagtgattcatatatgaccacccag

SEQ ID NO: 768080 - DNA, 384 bp, Homo sapiens
ccccaaccctcttctcatgctatgaaaactctattcctgcaaaatattctcaagtaacagttctaacacmcacaggagagctgatgtccagagctgggtgaagacaggcagacctagactcgagctggcctgaggccagcagctccctgctcatccacttcaggatctatggttcttttcagattcagttattggattcaattcaaaaatatactgctaaatttttctttgtcctcaaagactagacttatttacctctaaaacaatatctaaacctatttccctccagcttttctcagtggatccaaacaatctcgctgctgttgccaagagaacctcctccctgacttgctgcctgcagaacagctggtgaagctcttcatt

SEQ ID NO: 768081 - DNA, 586 bp, Homo sapiens
cctggagcaggagggggccagattagtgcagggtcctgtttaccacacaaggagctggatgctataaaggaaccagtgctggagaagcctcatggtgacgtttccagggaaagacaattgaaaccatgtaatatggtttggctgtgtccccacccgaatctcatctcgaattgcaatccgaattgtaacctccatgtgttgggggaaggaactggtgggaggtgatcggatcaccgggcagtttcccccatgctgttctcgtgatagtgagttttcacgagagctgatggtttcataagtgacagtttccacactctctcrcctcatgtaagaggtgcctgcttcctcttccaccatggttataagtttcctgaggtctccccagccatgcggaactctgagtcaattaaacctcttttccttataaattacccagtcttgggcatttctttatagcactgtgaaaatggactaatacaccatgctaggtgttctcctgcatggaagggctagtgatccataaatggaggattaaggagaattaactgggtcccttgcttaggcctaagtgagacgatcttagagg

SEQ ID NO: 768082 - DNA, 635 bp, Homo sapiens
gtcctgagaggcagtgtatcatagtgaaggaaaaaggaggcttcaggatgccggctttgccacttactaggtgtccaagcttgagtgagttatttagcctctttggacctgtttctcacatgtagggcagagatggttacatccatatgcgagagccctggtgaaggttaaacaataacgtgcgcacaaggggaggacagtaccgggcacatttcattcacagggagcgggatactaactttgaggtggggttctgaggttgaaatatttgttgctaaataataatgagcccaaacactcagaaacagcaagatctctctgctccttcacccttgaataattaaacaattgccagtaggacaagggtttactggtttttccagctgggaaagagggtggtagtgatcccctgaaagtccatccagtgttctggcatcctgggaaagtgcccagcctgcctgggggaagctgcctttccggaayagatgggactctccacacctgcggcccagcaggcctagatctgcctgttacaatcaggactacttgcagaaagaagacttggtgcctcgtcaggatctcctgtatctgatttatgcagtttaatctcatgagaaaaggaagcaagaagagat

SEQ ID NO: 768083 - DNA, 613 bp, Homo sapiens
aaaaagcaagtgtggcgccaggcatgaccttatgtttgggtcaaccccaaatcttgcagagttctgatttggaaatgtcctcacgccatcagacaataaaattcttttttttttttttttttttgtgagatggagtctcactttrtcacccaggctggagtgcagtggtgcgatcttggctcactgcaagctctgcctcccgggttcacgccattctcctgcctcagcctcccgagtagctgggactacaggtgcccaccaccatgccccgctaattttttgtatttttagcagagacggggtttcaccatgttagccaggatggtctcgatctcctgacctcatgatgcacccacctcagcctcccaaagtgctggattacaggtgtgagccaccacgcccagcccaaacaataaaattcttgaagacagcacagtgtcttgttttcttttgtatctttaactcttatcagtgtttggcctttaaattgcaggataaacggaggaaaaggacaaaacttccctgggctgtaagtgcactcctctggcctccgtgcccaggtccacaggccttaggtcacagagcaatgttgaattcttaggatgtgagctca

SEQ ID NO: 768084 - DNA, 658 bp, Homo sapiens
caaaaaatctcaaacatgcatatgaagtacctctatgttggctgagggggtccctagcaggggtccagataggagaattggttagtggtgcctctagttaggactataagccaaagcaggtgatgggtcacaggagcacatacccctgcaaacctctggtcattcccacccaaagaaaaacctttcattccctttaaaaccatataaaacctgggcaaggcctcccagtacttctcccttccatttggcttggaatcgcctcagaggagaaggaatgtgtagattggtgtgagaaagagagaaaagaatgaaattcctttttctgcccctatgttcaaagaggcacaagcagctagtccctgcgcacattaaaaagaaataaaaagagaaacactcccatgtgtaagttgctccttagcaatgacgcagccattgctgggaatgtccctagctctttcagacattggagtaacccttcaggagtgattgcttctccrcactaatgttgccccagtggcagcttcagaaactgctcccttacccaggggctcttaggcgaattgtgtctcaactcaagttacacacaggcacatttagggccagtcttgggtttttgtgtagctgccacaaaggtttagatcaaacaaacatgatccca

SEQ ID NO: 768085 - DNA, 570 bp, Homo sapiens
ttggtgtggggctggaggtgggtgattggagcagggttaggggagaagaatgctgtttttgtcatcttgtgttcttgacatttttgaagcatggctgtttctctcctttctctaacgctgcaggtattaatgaggttttactggtggcccgccttcatctataactgccgtccttttcctgctgattccaacagaatggcatttcagggctactggataccagatacggttaagtagttaggggaactggtggcgattggcagagatgcaggcctctagcggatgcagaaggaaaataaaacacagaggggcaccrgcaacaggaggggtctgaagaggcagagggcagcttggccaagtcaaataaagttaatgaaagatcatgtgattgccaacttcttaggctagccagttgatgctgtgtatgtcatcttttgacatattcatcggttagtctttaaggtgtcatggggtgagtgcattctctataataacacttagctaaatatcctgagactggcctgggccaaaattaaaataagaatgcttacattattaggtagtaagatt

SEQ ID NO: 768086 - DNA, 621 bp, Homo sapiens
gaaaaggactgtcttgagctgaggttattgtattcaacttgcaatggtcctagtaaaattacgatgaaccaggtctctatacagaaaactctttaaagtagagaggcaggagcccactgagggtcccagggggaatctcctgcccgaaatctgtttgccttaaatgycacgatgcctgcaattttttttctttgagctaagcatttcttctctgagttcttttatttatttatttatttatttatttatttatttatttatttatttattttttgagacagagtctcactctgtcgcccaggctggagtgcagtggcgtgatctcagctcactgcaacctctacctcccgggttcaagcaattctcctgcctcagcctcccaagttcttgaaaggcaaatcaatgtagatacattgatatctgtgtgggttcgccattagactgattttcactgagtgtagaaggcagacattgaccactgttgcaagaggaaaaaaagcaaataacaataataataaataaaataatttgggttaagtgtagggtttggtggagaatccaagaatcttcgttctgacaggggtccttatgcctccacacagcttttacttctctatctat

SEQ ID NO: 768087 - DNA, 536 bp, Homo sapiens
gtgaagaagcctcaccaacttagagaaattcacattcttcctggttactcagcatcggcattggagatggtgaataatgcagtggaatccttccacgcagaggctgcactcctggcatagggtcggccatgccactaacagctgggagtgaatctctgcagccactgaaaataggsatttgtaatggaaatgctgacagacccttaaccatggcagtgctagcaagagctgcgataatacagtaaataaggtgaatgggctcggcttatctcatttcacagctgagctgtgtattgccagataaatcaaatcagggtaaacggcttcatctaataaactgggtcaacatataatgtatttgttcaggttcgcgctttcattgattctcatttgatttaagaagagatatttcagctcatgtttgaacatttttactattcatccttccttctggtaaggagagactgagaggcagggacacacagctgggatttttttttcctttaaattaattaagttttctgattcttgtaagt

SEQ ID NO: 768088 - DNA, 532 bp, Homo sapiens
aaattttaggcttttctcatttaatgtgtgtggatgttttgtcaaaaattaggcgaccacgttttctgcattcagatatgatatcaaactataagctaataataaaacttaagcccctcaaccatatcaatggacccctcttcttggtcaattgcattccaaagtcaacctgaaaaaccagttcaggccatgatgagtagggagagtcagacatgcctcagtgtgccctcctcccttttggaattcagtacatctgaccagcattaacatcaacacagagactgatagaacagactctttaagtctggtaacaaacatttactatttattatkactgatgtctactatctggaggcttcatctgcatgataaaaccttggtccccataatggcttatcataacccagacactcttttctattgattccaggtctttagaaaatatctccttcaaccaattgccaagcagaaaatatttgaatccacctatgacctgaaagcccctgcttccagttgtcccacctttccagac

SEQ ID NO: 768089 - DNA, 561 bp, Homo sapiens
catggtggtgcatgcctgcaatcccagctacctgggaggctgaggcaggagaatcatttgaacctgggaggcggaggttgtggtgagccgagattgagccattgcactccagcctgggcaacaagagcgaaactccgcctaaaaaaaaaaaaaacaaaaaactagaaaaagaaaaaagaaaggggaattaggagacaaaagattcgccgmaatctcagagggaatgctttggctttccacaggccctggatttgggaggcttccaagcaaagaccctgtcccctgtctgacatcaagattacactaacatttcagtagccttgacatactgatgaaaggatctacccaaacacagtaaaggagagagaatctggttccctcataatcgtcgttattgtagcccatgaacattcaaggctgtagttacccagtgtccttggatatagaatttactttcctaatatgggagcaaggcctttcctaggatgcatttatttcatcaaaaatttatatcaaaatatctggagaaaacatttggttctcatagtaaagagcaatttt

SEQ ID NO: 768090 - DNA, 545 bp, Homo sapiens
tgttaatcagctcaatgaggcccttgccttattgcaaggacagaggctttctgtatcttgggtttcttgccttagtgtacccgaagaatcagatcacacgtgggcttgattgaagaatgaatgcaaggttttattgagtggaaatagctctcagcagatgggggagccagaagggagatggttttcccctggagtcgggcacttggcagccagtctctcctcccacygtcccagccaaacccccaaactccgcgtggttccgctgatcaatggcctgccggctgtgctctccagcccatgtgcttctctcggtgtccagccgcctgtgtgttctttcgctaatgtgtgttcctctcgacgtccagccgcttgttgtctctgcccactagggtcttggggtttttataggcacaggatggggtcgtggcaggccaggctgttcttgggaaatacaacatttgggtgtgaaggcaggagtgcctatcctcacctaggtccgtgggcacaggcctgagggcggatccctagccagggacctgcctttc

SEQ ID NO: 768091 - DNA, 545 bp, Homo sapiens
tgttaatcagctcaatgaggcccttgccttattgcaaggacagaggctttctgtatcttgggtttcttgccttagtgtacccgaagaatcagatcacacgtgggcttgattgaagaatgaatgcaaggttttattgagtggaaatagctctcagcagatgggggagccagaagggagatggttttcccctggagtcgggcacttggcagccagtctctcctcccactgtcccrgccaaacccccaaactccgcgtggttccgctgatcaatggcctgccggctgtgctctccagcccatgtgcttctctcggtgtccagccgcctgtgtgttctttcgctaatgtgtgttcctctcgacgtccagccgcttgttgtctctgcccactagggtcttggggtttttataggcacaggatggggtcgtggcaggccaggctgttcttgggaaatacaacatttgggtgtgaaggcaggagtgcctatcctcacctaggtccgtgggcacaggcctgagggcggatccctagccagggacctgcctttc

SEQ ID NO: 768092 - DNA, 396 bp, Homo sapiens
tggtgccttttgtggacggctaggccagagccttttctgtcgaagtcaagtgcagagttcgggcaatgcaccgtgtgagtgtgtcagcaatctccaagttctcgaggtgtgcactgaagaggtcctcccaccctgaggttgttgggcagaaaatgcaggtgattcaaataaactggggctgagccctcaatggctaggataagtgrtatgctccagtctctgctttgttcaaaagggacttgggccaaaggctgcatttatcttggcaaatgttttatttaagaaagcccaacacatttatttcagtcaacacattccttattgaacactcaacagtcaacacagcctcagaaaaaaatatgagtaagtaattaatgttgtatctgaaaggaaaga

SEQ ID NO: 768093 - DNA, 606 bp, Homo sapiens
tataattctctaacaaatcaagctacctttctctttcaaaatccaacttaagactttcagttttcagttctgcatgtaagtatcctggaagttgccactcctttctaacaactagtgaaaagctgaacagactgaaaaaaccaagaactcttcttgaattcataaaagaggtaaggacacagggcaaacttctacacctaaaattgggagaaagacaggtgactacagggagtcacagcttaccaraacagaaactcatgagtggaaatcacttcaggagccagttctggattaggaaaacttgaactgtaattgatgagttgctggaggcttggtgtggagagtatgagaattaaaaactccatgaaaactcagttattgtgggggtccctgcacatttgtgagttttacctacagaagtcaaccaggttctcaaagtaaatagagaaaaattcccttgtgctttcagcaggagaggggcaaaggaactattttgaaatatgccagagcacccaacttcttaacaaggcctgccctcaggagaatgtatttaaccagggcctaatctcctggtggttttatcagagcctaacagactcagaggaa

SEQ ID NO: 768094 - DNA, 610 bp, Homo sapiens
atatgaaagatgagatagatataatttttaatacaacttctggaattaagagaatcactaaaataatttgaaaatgcaattgaaagctataataataaactagaccaagcagaagaaagaatttcaaagcctgcagactggtctttcaaattaacccagtcagacaaaaattttaaaaaataatttctttttttattattattatactttaagttctagagtacatgtgcacagtgtgcaggtttgttacataggtatacatgtgccatgttggtttgctgcacccatcaacttgtcatttacattaggtatttctcctaatgctatccctcccccagctccccaygcccagacaggccctggtgtgtgatgttcccctccttgtgtccatgtgttcttattgttcagctcccacctatgagtgacaacatgcagtgtttggttttctgtccttgtggatagtttgcttagaatgatggtttccagccttatccatgtccctgcaaaggacatgaactcatccttttttatggctgcatagtattccatggtgtacatgtgccacattttctttattcagtctatcactgatggacatttgggttggttc

SEQ ID NO: 768095 - DNA, 543 bp, Homo sapiens
tttaggatcctttctttatccatgacctcttggagtctgattaccaaatttcttgaggtagtcttatttgggttaaatttctttggtgttctataaccctcttgtactgaatattaacatctttctctagatttggaaagttctctktttttatccctttgagttaagtttctaccccaatgtctctctctgattcctctttaagatcaataactcctagatttgtccttttgagtctatttcccagatctttgaagagtgcctcattcttttttactcttttttttttggtctcctctgactatgtattttcaaataacccgttttcaagctcacttattctttatactgcttgatgaattctgatgttgggagatacacattcttcaatatgctgatcaaatttttcaactccagaattactgcttgatttttagaaattatttcaatctctttgttaggtttatctgataggattctgaattccttctccatgttatcttgaatttctttgagcttcctcaaaacagctattttgaattg

SEQ ID NO: 768096 - DNA, 543 bp, Homo sapiens
tttaggatcctttctttatccatgacctcttggagtctgattaccaaatttcttgaggtagtcttatttgggttaaatttctttggtgttctataaccctcttgtactgaatattaacatctttctctagatttggaaagttctctttttttatccctttgagttaagtttctaccccaatgtctctctctgattcctctttaagatcartaactcctagatttgtccttttgagtctatttcccagatctttgaagagtgcctcattcttttttactcttttttttttggtctcctctgactatgtattttcaaataacccgttttcaagctcacttattctttatactgcttgatgaattctgatgttgggagatacacattcttcaatatgctgatcaaatttttcaactccagaattactgcttgatttttagaaattatttcaatctctttgttaggtttatctgataggattctgaattccttctccatgttatcttgaatttctttgagcttcctcaaaacagctattttgaattg

SEQ ID NO: 768097 - DNA, 639 bp, Homo sapiens
gttaactttttattttttgtagagatggagtgtccctatgttgcccaggctggtcttgaactcctaggctcaagtgatcctctggcctcagcctcccaaagtgctggcgttacagacatgagccatttgttaggcacttttcaccctcacattaaccctctggcacagttggggaaacgcgtttcttgagttaaagtggtttggcaagaagggctgagctgggattaagattccgctcttcccaactctgaagcccctgttaccatcactgctgcatcctgctcatcttccaggcccgggttaacaacaatgggaaagagttgagaaatatttttctaacagggtaaaccctcctcccagcccaactccaccatcctgggccactcctctagttacatgatcctttgtaccatttggcccaattgatattgatctcatacacatgggtcagagacagggtragagttttctcatttctcatgggagaaaggcaagctctgccaagcccagaatttccagcccctcctgtcccagcacaaaccattcacggtcttcatacaattattcctggtgcggcgttttatttctaggaagccttctgtccctcaacctcaccagcccttggttcttcagctcaga

SEQ ID NO: 768098 - DNA, 504 bp, Homo sapiens
aaccatatggaaacctgaagcaaaccaaaatgtgatatcctacaatggaactgggttaaactcctctaaaatattatggtcatgcaatggaacagaacagagagcctgggaataaaactgcacacctacaaccatctgatctttgacaaagtcaacaaaaataagcaatgaggaaaggattccctgtttaataaatggtgctcggataactggctagtcatatgcagaagaatgaaacaaccactgcctttcaccataaacaaaaattaactcaagatggatcaaagatttaaatgtaagacttaaaactataagaatcctagaagaaaatctaggaaatactattctgsacattggccttggcaaagaatttatggctgagatctcaaaggcaatcgcaacaaaatcagaaatcgacaagtgggacctaattaaattaaagagcttctgcacagcaaaagaaaatatcaacagagtaaacaggcactctatggaatgggagaa

SEQ ID NO: 768099 - DNA, 526 bp, Homo sapiens
gaatgcattccggggggggggggctctaaaatggccgctctgggggtgtccgccttatgcagttgcaggtaagggatgaaacacgtcctggcctcctgcagcgcccccaggcttgctaggattaggaaattccagcctggcgaattctagtcagactggttctctcctcttgaaccctgttaagatgtttatcaatgacaatgagtgcacagcgggacacggaatttcattagtaattctagtttcaccctgaccttgtgatctcaccctgaccttctgccttgtgatcttttgttgcccttgaaccatgtgatctctgtgacccacaccctattcatacactccctcccctttgaaaattgctaataaaracttgctggttttacagctcagggggcatcacagaacctgccaacatgtgatgtctcccccagacacccagctttaatatttctctcttttgtagcctttctctttatttctaagaccagccaacacttagggaaaatagaaaagaacctacgtt

SEQ ID NO: 768100 - DNA, 413 bp, Homo sapiens
atatattttttaattatgatgaaaaaatttcaaaacctagtaaacaaaatggcatataaatttaaatgtatgcaaactggacaagatgcaagtatgttaagaaattacagataacctccatattgtacaaattgttacagaagtcttttcagatatgtctaaaactaaatgtgttcaatgaattttcaaacaaattctcaacatgtgattggtacaccattttatttgagattttagagagagaaaacggaaaacaaatwtaataaatattttcaaatggaaaattaaacttgaaggtcttattttattataattaaaaagttaaaaatacttcaccaacctatgtaagttatatgattacattataccaaaaacgacctcatgacttacagccagccttaaaatttacgaat

SEQ ID NO: 768101 - DNA, 375 bp, Homo sapiens
aaagataaggaactaaatttatactctgcaattgtactatttttatgatagtggccaaagtttattgagattttcctacatgcaaagtctgtgctaaatcctttatgtacattgtctcatttaatcatctggaaaaccctgtgtagtgggtacrataaggaagaagcttaagaagatatgtgatgaggacatcaggaagatggcagactaggaagttttaggtccttgttttcccaaggaaatgttaaataagagactgattaaacaattttatagaagctctgggaatcagtcaaaaatttataagaacgaagcaaatacccaactaagaaaaatccacattaaacatggcaggaaattttattgcatttttac

SEQ ID NO: 768102 - DNA, 536 bp, Homo sapiens
tccggaattgtatgcccagtgcctaacgtaactatatactatagtataattgtgcacagtgagtgtccaaagaatgcatattgggtgtcgttaaaatctcagctgggaggtggggagctgggatccattcaaactgacaaygggccaggtgcggtggctcacacctgtaatcccagcactttgggaggccgaggcgggcggatcatgaggtcaggaaattgagaccatcttggctaacacggtgaaaccccgtctctactaaaaatacaaaaaattagccaggcgtggtggtgggcgcctgtagtcccagctactcgggaggctgaggcaggagaatggcatgaaccctgggaggtggagcttgcagtgaaccgagattgtaccactgcactccagcctgggtgacagagcgagactctgtctcaaaaacaaacaaacaaacaaaacaaaacctgacaaagaacaggggaaagaatgtaaattggggattgggagagtatcaaagaagaaaagaccatgagaaaaccagtccaaag

SEQ ID NO: 768103 - DNA, 490 bp, Homo sapiens
gttattatgctaattacgctgctaattatcactaaaaagcataatgtggccaaacgagcataggatgaaaagtttctgccttgctgccaaatattttggtgtgctatgaagaaaggtggaagacagaatcccttgcaatacactttgacggcagcgtataggacaaaggcagcagccttcaggcaatcaagcatgagcctctcaagtggcattcgctttgagaaggtgtgaaatgaaagcacatattggaaaagcatgcckgggtgaccgttggggcaccctgacttccatctgggccattaccagagcagacccaatacaaagcagcttcataagtcccctgtccagaggattccacattcatgataaccatgaggactgtccttcacttgaaatgttcagcctccttaacgatggcaacctttcagacagtggaaatgaaaggtagaataatataaagtttactctagggaaactaccaaattatact

SEQ ID NO: 768104 - DNA, 638 bp, Homo sapiens
ctccaaggacagcgccctctaacctgatggccctcggttggccagacccaaggctgggctcccatttcaaatgggcaagtccgtggttttatggggctaacaaatcaaagctgacacagatatactactcatacatggattttagccaggaaatttcaaacaactcaatgatgggatttttttccccccttaaatgtcatgtccattcataacastgagatttcagatgtgtgtaacagctttgggaaaaggtattgataaaaatattcaaagaaaatgttagtcacttttcaaaaaaagcacagcataccaagatgatgtagtaagttaaatattcccttgtgctatttatagacataaccatatactgtatcatttctaattggaaaaggtctaccagagatactatacacctgatcctaaaactatacattatcttctgctacgcctctaggaaacaagactataataacttgaattttaagaactacacattcaagataaatatttgattggtttttccatctcactattaaaatgaagcataagaccctcaaattaggtttaaatgttttaacagtgaagttttatgggagagtacatccaaaaatacagagaaaatacatttatgtatttca

SEQ ID NO: 768105 - DNA, 561 bp, Homo sapiens
agggaaccacaactttgtttttctgctgcttttatgatatgtttaaagaatataggatgctctgaaaatgttaaaccattttccttattaagattactgactaagggccgggcgcgggtggctcacgcctgtaatsccagcactttgggaggccgaggcgggtggatcacgaggtcaggagatcgagaccatcctggctaacgcggtgaaatcccgtctctactaaaaatacaaaaaattacctgggcgtggtggcgggcgcctgtagtcccagctactggggaggctgaggcaggagaatggcgtgaacccgggaggcggagcttgcagcgagccgagatcgcgccactgcactccagcctgggcgacagagcgagactctgtctcaaaaaaaaaaaaaaaaaaattactgactaagccttcagaaatgcagttttaagagtttgtgaatgtgtagggtcttccacatgctggtttggaggttttaggaagttgttgagccaaaaaaaaaaaaaaaaaaggaataaaagcattttttggaatgaacttgaggaatcagaa

SEQ ID NO: 768106 - DNA, 620 bp, Homo sapiens
ttttatcttttgtcctttgtctatatttgtggcagaattttaaggttaaaaaatgatgacccccggatacaggtgaccattgtaagggtacaaggaaaatatcccctttgtcctctgaagatttgcttaaaaatcaactcataaaagtcagattaattggagtaaatgtatataaattttattaacgtgtacatgagagcctttagaataaagacccaaagatatagagaaaattatctttttttgtttgtttttgtttgagacagggtctttctgtcacccaggctggagtgcagtggtgcaatcacaactcactgcagcctcgacctcctggactcaagggrttttcccacctcagcctcccaagtagctgggaccacaggaatgaacaacctactaattattttatttttagtagagacagggtctagctatgttgcccaggctggtcttgagttcctgggctcaaaggattcccccacctcagcctcctgaagtgctgggattataggcatgagtcctcgaacccagcctggaaattatttttatgtttaggttcaataaagtatggacaaccatgtagaaatgtaactggacaaaaagggtaccatctaatgtta

SEQ ID NO: 768107 - DNA, 507 bp, Homo sapiens
tgaagtcctttagtgtttgtcaaaactactgtaaagatactacctgagactaggtaatttataaaggaaagaggtttaattgactcacagttctgcatggctgctgaggcctcaggaaacttacaatcactgtggaaggggaagcaggcatgtcttacatggcggcaggcaagagagaagtaagtgcaaccaggggaaatgccatcatatctcatgagagctcactcactctcatgagaacagcttkgaggaaaccacctccatgagccgatcacctcccaccaggttcttcccttaacacctggggatgacaattcaagatgagatttaggtggggacacaaaagcctaaccacatcaatattcatcatggattcaaagatttcttgattaaaattacgagatattaagattaattatgatgattataaaaataataccaaaccttgattatgtaccatgcacgattttagtcattttacactttacatgtattaattgtttaaat

SEQ ID NO: 768108 - DNA, 606 bp, Homo sapiens
ggacacaaaagcctaaccacatcaatattcatcatggattcaaagatttcttgattaaaattacgagatattaagattaattatgatgattataaaaataataccaaaccttgattatgtaccatgcacgattttagtcattttacactttacatgtattaattgtttaaatattcataacaattctattaggtagatattattattgcattcttcttctttttcttttttaagagacaggtattgctatgttgcccaggctgctgctggcctcaaagccctggactcatgtgatcctcccaccttggccttctgagtagctgggactayagtcatgtgccatggtgcccagcaagtagatactattatattcattttataagtgatgaagttgaaacccagtctagttataaatatgcccagtgtcacgaagctaataaataacaggattaggattgaaatccaggtcagtctgaccttgaaccaccaaatacactgccttcttataactcagctctttggagttctacatttgatttacttttgtgtttcaaccccagatgtatagttcaaaaataatacataactttaaaaataaagataatt

SEQ ID NO: 768109 - DNA, 606 bp, Homo sapiens
ggacacaaaagcctaaccacatcaatattcatcatggattcaaagatttcttgattaaaattacgagatattaagattaattatgatgattataaaaataataccaaaccttgattatgtaccatgcacgattttagtcattttacactttacatgtattaattgtttaaatattcataacaattctattaggtagatattattattgcattcttcttctttttcttttttaagagacaggtattgctatgttgcccaggctgctgctggcctcaaagccctggactcatgtgatcctcccaccttggccttctgagtagctgggactacagtcatgtgccatggtgcccagcargtagatactattatattcattttataagtgatgaagttgaaacccagtctagttataaatatgcccagtgtcacgaagctaataaataacaggattaggattgaaatccaggtcagtctgaccttgaaccaccaaatacactgccttcttataactcagctctttggagttctacatttgatttacttttgtgtttcaaccccagatgtatagttcaaaaataatacataactttaaaaataaagataatt

SEQ ID NO: 768110 - DNA, 560 bp, Homo sapiens; identical to SEQ ID NO: 741297

SEQ ID NO: 768111 - DNA, 620 bp, Homo sapiens; identical to SEQ ID NO: 741298

SEQ ID NO: 768112 - DNA, 657 bp, Homo sapiens
atcatatcaacaatgttgagttttccactattttcccacttatttagacctttaatttccttcaagattgttttgtagttttcaactacaaatcttgcacttcttttgttcctaggtatcttactctttttgatgtcattataagtggaactgttttcttaatttcactttcagattgttcattgctagtgtatagaaatataatagatttttgtatctcagtcttgtaccctgccatattgctgaactcattggttcttttttttttttttttttttttttttcagacagagtctcactctatcgcccaggctggaraacagtggtgcaatctcagctcactgcaacctctgcctcctgggctctagcaattctcatgcctcagcctctctagtagctgggattataggcatgtgccaccatgcagggctaatttttgtatttttagtagagatggggttccaccatattggccaggctggtcttgaactcctgacctcaggtgatccgcctgcctccacctcccgaagtgctgggattataggtatgagccactgcgttcagcctgaaatcatttgttctaataatttgtgtgtgtgtgcgtgtgtgtgtgttggtggattccttaggattttctagatatagaatcatgcaaat

SEQ ID NO: 768113 - DNA, 592 bp, Homo sapiens
ataatctttttattcagaggtaggatgctagttctacaattgcctaggtcttctttaatttgtatatgttaagaaattttaatgggcaatttaataagtgttgaaatttctaagaattatttctgtatgttagagttgtgataacgcagacattttccctgaagtacttctctgagtctgatttgttttcctccatgggtgccacataggtttattttaagaaggtaaaaaataaaagctgactaaggtacatattgattattccagacaacatgcagacatcacycaatgagtgcagttctcatcaactcaccatttgtttcaattagaaaaaattctcatcaaaactaatttttctgcatgaaataccttttcaaatcacactgaatgtgatttattaattgtgatttatcaaattcagttttctgctggatactaaaggcacacctcattaagactagtgattatggaaatagtacaatattttagaaacttttgattgtaaaaatttcttttaaaatgaatacatacagatatgttattgttcagatatttagcacttacgtagaaactcactgatctactaacaagt

SEQ ID NO: 768114 - DNA, 586 bp, Homo sapiens
atattccagagatatatatctggttcaatatctgaaaatcaattaatataataattatatcaataggctaaagaaaaatcatataatcatatagatatcctcagaaaaatatgacacaatccaacactcattcaaaagacacgcctatcactygggaaattgcagttctgtgccaggaaccagggacaaaaaccaaatatatttcatcttgtgtatccataggttctgcatctgtggatccaacctatcatgaatcaaaaatattttaaaaaaatggagttcgtattgaacatatacagacttttatcattattgcaaataatactgtataagtataataattatttacatagtgtttacatggtactaggcaatataactaataatagagatgatttaaagtatatgggaggaggcgcataagttatatgctaatactatgccattttatatcagagacttgaacacctggggattctgattgtcagtgggaggttctggaactctgccccattgatatcgagggataactgtacatgaagttgacgcttgaacaatgtgagcatcaggagctcccctccccgac

SEQ ID NO: 768115 - DNA, 564 bp, Homo sapiens
tgaccaagtgggatatattccagagatatatatctggttcaatatctgaaaatcaattaatataataattatatcaataggctaaagaaaaatcatataatcatatagatatcctcagaaaaatatgacacaatccaacactcattcaaaagacacgcctatcacttgggaaattgcagttctgtgccaggaaccagggacaaaaaccaaatatatttcatcttgtgtatccataggttctgcatctgtggatccaayctatcatgaatcaaaaatattttaaaaaaatggagttcgtattgaacatatacagacttttatcattattgcaaataatactgtataagtataataattatttacatagtgtttacatggtactaggcaatataactaataatagagatgatttaaagtatatgggaggaggcgcataagttatatgctaatactatgccattttatatcagagacttgaacacctggggattctgattgtcagtgggaggttctggaactctgccccattgatatcgagggataactgtacatgaagttgacgct

SEQ ID NO: 768116 - DNA, 611 bp, Homo sapiens
tacatggtactaggcaatataactaataatagagatgatttaaagtatatgggaggaggcgcataagttatatgctaatactatgccattttatatcagagacttgaacacctggggattctgattgtcagtgggaggttctggaactctgccccattgatatcgagggataactgtacatgaagttgacgcttgaacaatgtgagcatcaggagctcccctccccgacatatatgtggatttttgtgcagtcaaaaatccacatatgacttttkactccccaaagcttaactactaataccctgttgagtggaagacctactgatcacacaaacaggtgagtgaaaaaatctttgtatgttatatgtattatgtactgtattcttacaataaaataagctagagaaaagaaaatgttattaggaaaatcgtaaggaagataaaatatatttactattcattaagtggaagtgagtcatcataaaggccttcattctcattgtctccatgttgagtgagctgaggaggaagaggaagggaagggtttggtcttgctgtctcggggtggcagaagaaaatccacatataaatagatttgcacagttcaaacc

SEQ ID NO: 768117 - DNA, 585 bp, Homo sapiens
ggcaatataactaataatagagatgatttaaagtatatgggaggaggcgcataagttatatgctaatactatgccattttatatcagagacttgaacacctggggattctgattgtcagtgggaggttctggaactctgccccattgatatcgagggataactgtacatgaagttgacgcttgaacaatgtgagcatcaggagctcccctccccgacatatatgtggatttttgtgcagtcaaaaatccacatatgacttttgactccccaaagcttaactactaataccctgttgagtggaagacctactgatcacacaaacaggtgagtgaaaaaatctttgtatgttatatgtattatgtactgtattcttacaataaaataagctagagaaaagaaaatgttattaggaaaatcgtaagkaagataaaatatatttactattcattaagtggaagtgagtcatcataaaggccttcattctcattgtctccatgttgagtgagctgaggaggaagaggaagggaagggtttggtcttgctgtctcggggtggcagaagaaaatccacatataaatagattt

SEQ ID NO: 768118 - DNA, 574 bp, Homo sapiens
ggtgattgattttattatgtatcatctctaatgaggcttaataaataattgaggtttaacacttaggtaaccggtctgtatttaagtctgaaaatttttgtatgttacagtttcaacttcacattgaatattctgtaaagcagaaataaattgatcagcattctatgaatgaaaaataaagccatgggtcgggtgcagtggctcacacctataatcccagcactttgggaggccgaggcaggtggatcacctgaggccaggagttcgagaccagcctggccaacatggtgaaaccttgtcccagctactggagaggctgaggcaggagaatgactttaacccaggagacagmggttgtggtgagctgagatcgcgccactgcactctagcctggtgacagagcaagactctgtctcaaaaaaaaaaaaaaaaaaaaattagctgggcatggtggtgcacacccgtaattccactacttgggaggctgaggcaggagaatcacttgaacccaggaggcagaggttgcagtgagccagggttgcaccactgccctgcagcctatgtgacagactga

SEQ ID NO: 768119 - DNA, 428 bp, Homo sapiens
tgaaatctttgaaatgccagataaagaattcaaaatgttaactatttagttactcaagaagaagaaaggtgaaaagtaaaaactaacataaagaaatttaaaaaacaattcagagcatgaatggaaaaaattttaaagagatagatatcaaagaaaaatcaatcagaacttctagaaatgaaagatatacttagggaaatacaaaatgcagtggaaactttsaacagcagactagaacaattacaatgaagcatttcagagctcagagacaaggctttcaaattaatctaatcagacaaaaatgaagcaaaaaataattaagagaaatgaacacagcttctaagattatgtaaaacaatccaagtctgggattaggtaaaatagccaaacctaagaataaatggtgtttatgagtgggaagagaaagc

SEQ ID NO: 768120 - DNA, 726 bp, Homo sapiens
acactaacggtccagcaatggatccagatcaagatgaaatctttgaaatgccagataaagaattcaaaatgttaactatttagttactcaagaagaagaaaggtgaaaagtaaaaactaacataaagaaatttaaaaaacaattcagagcatgaatggaaaaaattttaaagagatagatatcaaagaaaaatcaatcagaacttctagaaatgaaagatatacttagggaaatacaaaatgcagtggaaactttcaacagcagactagaacaattamaatgaagcatttcagagctcagagacaaggctttcaaattaatctaatcagacaaaaatgaagcaaaaaataattaagagaaatgaacacagcttctaagattatgtaaaacaatccaagtctgggattaggtaaaatagccaaacctaagaataaatggtgtttatgagtgggaagagaaagcaaaaacttttgaaattttgtttaagaaaataattgaggaaaacttcccaggccttactagagatttagatgtcaaaatacaagaagctcaaagcactcctgggagacttattgcaaaaaggtcatcatcagtgcatatagtcatcaggctgtctaaagtaaacataaaagaaagaattctaagagctatgagacaaaagcatctgggaacctataaaggaaatcctatcagactaacagtagacttctcagcagaaaccttgca

SEQ ID NO: 768121 - DNA, 621 bp, Homo sapiens
ctggttctttgaaaagataaacaaaattaatagaccattagtgagattatccaagaaaagaagagagaagaatcaaataagctcaattagaaatgaaactaaggacattacaactgatgccacagaaatacaaagatcattcaatattactatgaatacctgtatgcacacaaactagaaagcccagagaaaacagataaattcctggaaccatacaaccatcgtagagtaaatcaggaagaaatagaaaccctacacagaccaataacatgcagtaaaactgaatcagtaattttaacaattgcaaacaacgacaagcccagggccagatagattcacagttgaattctaccacacrtctattcacagaagaattggtaccaatcctaataaaacaatttcaaaaattgagaaacagggaatcctccataaatatcctatgaagtcagcatcactctgataccaaaaccaggaaatgacataacaaaaaaagaaaacacagaccaatatccctgataaaaatgaaacaaaaatcctcaacaaagtactggctaaccaaatccaaaaagacatcaaaaagataatacaccataatcaagagtgtttcatccaaggatccag

SEQ ID NO: 768122 - DNA, 620 bp, Homo sapiens
ccttgatggctaaacatttcccttcactagtctttctttagttgtacaattgttcagtctttcaaagttattgctttgactctgctctccactcccacttttatttgaattctttaatgattaaatgaacccttctyagaatctcaatgcacctaaaatattaataaaaatacaaaataaagcatttatattgaaatatagttatcaagatattaaaaaaagttatgtatcttttattagcaccttaaataatatgatctaatggcagactaatagctaccttaattttgaagtgttgataagcataaacaatatttttagatatttcaaacatcatcatgtgatgaacatatctgtgctttctgttgacaaccttactggaatttgtagcctactttcaaatttagcatttctttcatgaaggagtttataggttaattataattaggttaatgataataaggatgtaattttttttctcacccaagtttatggactcctctgacaaaaatccctgcaagcaagagtctttatattctaggtctagcctaagttttcaaatttatgccctacttttgcttaacataaactgagcttgcaaaggtaggaaataatagctt

SEQ ID NO: 768123 - DNA, 624 bp, Homo sapiens
ctcgtccccgcgacctgcatgtcccactcgggccccgcgcccccacttagccgctgaaggcgtctcgcggtgactttaccttgcctggggtggaagtcaacttcccaagacctggtgatgaagagcgagagatggtagagcagcccagtcagccacttggccacccacatggttccaccctggggaccccgatcggggaggcccaccagagccgccggcagccaagccggcttccctcgcgctccgatccctctcctccctctcgcccgccgctctccgcgcctcagcagcctagggaacagcagcgcgggccctgggccggctggtccagccacaccgcctgtctccgctcgctgagccgctgcttcatcgcactgcagcctcacyccccttcctgcgcccgcgctgccctcagaaactctctgctcaggttcagctcggcgcggggaagcaactcgacctagcaggaatggtgccaatatagccaccccggaccggcgagcgccgcggagagcccgcccctatgggctgttcccggccaatcagcgggaggcgcggcccctgctcgcttttccccgcgcagccccctcccttctccactcagccgcaaggggactgcggtac

SEQ ID NO: 768124 - DNA, 457 bp, Homo sapiens
cctgctccttagtgcaggcatttactttgctctttgcaaacatattagagagtcttatatttaaaccattcaatcattatcatgttagcctgatggatttccaggcaccttcccagccagaacagagttgtaattttagctcctcccattgcttccagagttttgtaacttaagctggatagggagagagtatctcctttcttcttctatccttgraaccatgtcttcccttccttcattggcttgctaaagtctccttgcctttttttctccctgtgttggtggtgttccacattatttgtcattcagtcaggtcactggggcaaactccaagactggctcctgtgttctctaatcttctgccattttttttccctagcaaaaccatctagtagttaaatgccacataatgtctattttttgtttaacacttccttaaaatacaattatttttact

SEQ ID NO: 768125 - DNA, 580 bp, Homo sapiens
gatggtatgtatctcattgtggtcttgatttgcatttctctaatgaccagtgatgataagcttttttttttttttgtatgtttgttggccacataaatgtcttcttttaagaagtgtctgttcatatccttggcccactttttgatggggttgtttttttcttgwaaatttgtttaagttccttgtagattctggatattagccctttatcagatgggtagattgcaaaaattttctcccactctgtaggtttcccattcactctgatgatagatttttttttgctgcacagaagctctttagattaattagatcccatttgtcaatttcggcttttgttgccattgcttttggtgttttagtcatgaagtatttgcccatgcctatatcctgaatggtattgcctaggttttcttctagggtttttatggttttaagtcctacaattaagtctttagtccatcttgagttaatttttgtataaggtgtaaggaaggggtccagtttcagttttctgcctatggctagccagttttcccaacaccattcattaaatagggtatcctttccctattgcttg

SEQ ID NO: 768126 - DNA, 649 bp, Homo sapiens
ggaagaaattcttaattcttaatactcttcattattccccaatattataatatgaaaggaataaagagcaaacaccaccacacacgtagaacttcaaagaatactacacacagaaaaagtaatggttgctaaatattactacgtgacaagcaatcacctaagattctttggagagaagttcyttctaagggaatttgcaggatgcatctccagtgatagagaacaaaggggaatctttggatagattggttggaacattcagatggcatctcattctctagctggatgctttctaagctacataaactatttggatcatccaaggctatttcaagaatgaagcatgatagtctttgagagaacctaataaatccatggagtttggagagcagagggtctaggtgtgtggctctcacgtggagcagtctgagggtggcatatgattgcagttgcctttggttgccaagtgaatagagaggaaagggaaggagtgggaatggccagcttgcatttccagagtttcacaggactagtctgcatgagttctgggggaccaaatgaatgtcattgaaataagcctgactccagttggagagagttgtctgcctaacacctgcctaggagagttgtctcatgggaaacgggggac

SEQ ID NO: 768127 - DNA, 548 bp, Homo sapiens
aggcctaaatttaaaacctaaaactataaacttctagaataaaacacaggagaaaatctttgtgatcttgggtgaggcaatgatttcttatatatgacacaaaaatcccaatccataagaaaatcataaatttgtatttcatcaaaattaaaactcttattcttcaaaggatactgttaagagaatcaaaagacaagatacagactgggagaaaatctttacaaagcatatatctgataaaggacttgtctccaaaatatgtaaagaactctcaaaactctgtaataagaaaacagcccagtttgtttttacatgagcwaaaggtttgaaaagctatttcaataaagaagatacacagatggcaagtaaaaggtgctcaacatcatttgtctttagagaaatgtatatctaaattacaattagacactctcacatacctactagaatggctaaagttagaaacactgaccatagcaagtattgatgaggatgagcaagtattgaaaaggatgcaaagccaatgaaactctcatatactgcaggtgaga

SEQ ID NO: 768128 - DNA, 548 bp, Homo sapiens
aggcctaaatttaaaacctaaaactataaacttctagaataaaacacaggagaaaatctttgtgatcttgggtgaggcaatgatttcttatatatgacacaaaaatcccaatccataagaaaatcataaatttgtatttcatcaaaattaaaactcttattcttcaaaggatactgttaagagaatcaaaagacaagatacagactgggagaaaatctttacaaagcatatatctgataaaggacttgtctccaaaatatgtaaagaactctcaaaactctgtaataagaaaacagcccagtttgtttttacatgagctaaaggtttgaaaagctatttcaayaaagaagatacacagatggcaagtaaaaggtgctcaacatcatttgtctttagagaaatgtatatctaaattacaattagacactctcacatacctactagaatggctaaagttagaaacactgaccatagcaagtattgatgaggatgagcaagtattgaaaaggatgcaaagccaatgaaactctcatatactgcaggtgaga

SEQ ID NO: 768129 - DNA, 634 bp, Homo sapiens
taaggctgcaccccttgatgagtttgcaggggctgagactctggctcctccttttctttttcctagaaatgttgaaagaggactgtggtcctactgcctgtctatggattgactgatagactctcctagttcttcttggctgacccagaaggattcatctctcctaggagccaggactgggagcgacaagtgggtgaggagggagagaagtgcagggaaacctaatgctgggccagagactagasggtaacagtcagggtcaatgtcaggccatcaagattagatccagacctaggaaccagaaaacaagtattgagatgacccctgtgatagcaggccctgagactgtagccatagcaggacaagggatgggaaagccacttaatttctctgagcctcagtttccttgtatgtaagatgagactaataacttctgcttcacaaagtagttgttggaatgaaaaatgaacgtaaatcacttaacacatttgtggcacaaagaagcaactttcattaacagtagctcattatcactatgtctcagctacttagcaaggtccttggataggttgggagagtgatggttacgaaaatgagtaagatatcctctcagttctcaatttgctcatagctt

SEQ ID NO: 768130 - DNA, 536 bp, Homo sapiens
atccaaaatctacaaagaagtcaaacaaatttacaagaaaaaaacaaacaaccccatcaaaaagtgggctaaggatatgaacagacacttctcaaaagaagacatttatgcagccaaaagacacaggaaaaaatgctcatcatcactggccatcagagaaatgcaaatcaaaaccacaatgagataccatctcacaccagttagaatggtgatcatttaaaagtcaggaaacaacaggtgctggaggagatgtggagaaataggaacacttttacactgttggtgggactgtaaactagttcaaccattgtggaagacagtgtggcaattcctcaaggatctacaactagaaataccatttgacycagccatgtcattactgggtatatacccaaaggaatataaatcatgctgctataaagacacatgcacacgtatgtttattgtggcactactcacaatagcaaagacttggaaccaaccaaaatgtccatcaatgatagactggattaagaaaaagtggcacatatatacca

SEQ ID NO: 768131 - DNA, 571 bp, Homo sapiens
agttttaaaaagtaatcttaggctagaagttcctaagttcctttgagcacaattttggaactctgatttgcaaattttgtaacagaaattagagctaattcctttataaaaatccaggaagaaataattattttaattcaccatttcacatatgctgaattgtttattttgaagatgtattaacatatagggagaccataccagcatttactaccaggcattctatggctcatgaggtgcaccaaatattttgttaaatgaatgttttattttattcagaatctcttttcaatgaagcatctcacagaactagttccatggcaaacactttgggaaatactgaaccacagtcttcccattcatactcctgtttgttctgaaaacatcttatgttgcactttcaagtagacagaaggaagtagcaggggcttttctagagccagtggtggccgtcaacagttcaggcarctttacttagcttgtccttgcccacttcttcctcatttggaaactgctctttatccttcaaaactcagctcgaatatccccgctgctgagacattttctccaa

SEQ ID NO: 768132 - DNA, 553 bp, Homo sapiens
aaatgcaaatacgccattttctctcagggactcgagcatctgaggattttggtatccacggaggtcctagagccaatcacctgtgaggatactgaggggcaactgtatttcacctttccctcagccttccaggcctctcactttcacaaggtggcatcactgagtttgaggatgcagctccaccttacctcttcagtggctcttctcccacttgcttacaataattgctgtttgccygcccctctgcctttctctcccttgcttttgtgtctttgtattcccgtcttctgggagaggcttgttgaatgaatggatgataggtacatacacgtgttcaggaaggctcctttttgtctcttctcctcagggccgcccaataactccagtatacacggtggctccaaacgttcagagaattcctactgccgggatctacggggccagttacgtgccatttgctgctccagctacagccacgatcgccacactacagaagaacgcggcagccgcggccgccgtgtatggaggatacgcaggctacatacctcaggcc

SEQ ID NO: 768133 - DNA, 607 bp, Homo sapiens
tatttgtcaatgaaataaaataaaatttaaaaaagaaattaaccaaaagagaatataagaaggatgttaaaattctttgttaaaaataaacaggctgggcacagtggctcacccctgtaatcccagcactttgggaggccgaggtgggaggatcacctgaggtcaggagttcaagaccagcctgaccaacatggagaaaccccgtctctactaaaaatacaaaattagccaggcatggtggcrcatgcctgtaatcccagctactcaagaggctgaggcaggagaattgcttgaagccaggaggcggaggttgcagtgagtcaagatcacgccattgactccagcctaggtaacaggagtgaaactctgtctcaaaaaaaaaaaaaaaaaaaaataataataataataaatggggaataatggggaaaaaaccctactatttttttccttatagaactatataggtttttttctccttcagttgggttttttaatttatatattttatttatttatttatttatttggtttttttaatcagctaactttaagattcattatttacattttgccaggaatttttccatataacctaaatgtcaagctt

SEQ ID NO: 768134 - DNA, 613 bp, Homo sapiens
gcttaggttttcttgttttagactcttaactccttacagttcttcatcagcccactcattactctgttaatgtattatttaatatcttctgtgactactaaagtagccctgtggggacagcaatcctttctgtcctaattacttcttaattatgctacatctagcacagagcctagcacagagcctggcacatagcaggtgctcaaaaaatgtttgttaatggatttacttgtawccctacagatcatgtactatcacctatagggtctcataacatggaggttttgcaaatgttaaagtctgtctcaatcaggcaaatgtggcttagggaatcatgcccattctgtggcattaactctcaagatgctatttttctgcacatttaacatgaacatggatttggactctgctttcacggataaatgaacgagtcactctgggacatagcatggagtgttttcattgcaaactcctacccgctgattgcaggaggggaaccttggataagtgtctgattctggcatcttatgtctggaaggctgcttcattatctcacatgggctgttctgagtgccagcgcccactatttacaaggtccttggggtgctcatct

SEQ ID NO: 768135 - DNA, 626 bp, Homo sapiens
tcatcctaccaaagtgctgggattacaggcatgagacactgtgcctggcctcctgagttatgtggttttcattgaacaaatcccttgtcaacgaagctaaggaagaaagccctaactttggaagttaaggccatagccagtcaaataaagagaataacttcaagagtcaggaggttctccaccagctccaggacactgtaccacaaaagcagcccaatctagggaggctagcccaagccttctgagttgccgaggggccaaataattagaccctctggacagttcaatgaataattttaacaactagtgtctcaaataaaagatatacgatataaaatgctggaaagacatgccartcaaggataatcagctaatccttgaatagcatttcactggccacagaagcctttctaaaactctatctccctgatcttcatgacaatcctgtaagatagttacagatgacattctccccttcccattcatttaacaaatgttttgtttttcgagcatttatgtgccaggctttgtgatggggcctaaagacaaaatggtgaacatgatctccattttatcaagggagaaattgaggcctaaaaaggataagttacttgctcaagatacaa

SEQ ID NO: 768136 - DNA, 585 bp, Homo sapiens
attcatttgtcgattgattccttaagctatttttaaaattttctttatttttagagatgggagtctcactatgttgcctaggctagtctcgaattccccagctcaagcgatcctcctgcctcagcctcctgagcagctgggactacaggcacgccccaccatgcccagcccktaaactattttggattaggtttctattacttgcagccaaaagttctgaattaacaaagggcctcaccctggctcttccttggtatatattactatggggatgggatgaccgaggtcccatagaaatctcaactgatccattcttcccatctatttttccaggtctcatgaaaagttgccattttccctcctcaatttgttccctaaaattttactcagccaggcatggtggctcacatctgtaatccccttgggagcctgaggcaggtggatcacttgaggccaggagttggagaacagcttggccaacatggtgaaaccccatctctgttaaaaatacaaaaattagccaggtgtggtggcaggtgtctgtggtcccagctacttgggaggcagatgcaggagaatctcttg

SEQ ID NO: 768137 - DNA, 598 bp, Homo sapiens
gccacagtggcttctatcatttaacactagcttgaattcatacagtgttttgcaatttataaaattctttcaggctgggcaaggtggctaacgcctataattccagcactttgggaggctgaggcggcctgatcaccygagttgaggagtttgagaccagcctggccaacatagtgaaactctgtctctactgaaaaaaaaaatatataaaacttagccaggcgtggtggcatgcacctgtagtcccagctatttgggaggctgaggcagaagaattgcttgaacctgggaggcggaggttgcagtgagccaagatcgcaccaatgcactccagcctgggtgacacacaagactctgtctcaaaaaagaaaaaaaaaaattatttcacatatattatctaatttcataaaatcccagaatttgagctgctcagggaatataggtgttctctaacccagggtttttgaacctcagccctattgatatttgtgataattctatgttatgaggggctgtcttgtgtgttttcagatgtttcataacatccctgtcctttacccactagatgcaaaagccccctacctccccaatgttgtga

SEQ ID NO: 768138 - DNA, 598 bp, Homo sapiens
gccacagtggcttctatcatttaacactagcttgaattcatacagtgttttgcaatttataaaattctttcaggctgggcaaggtggctaacgcctataattccagcactttgggaggctgaggcggcctgatcacccgagttgaggagtttgagaccagcctggccaacatagtgaaactctgtctctactgaaaaaaaaaawatataaaacttagccaggcgtggtggcatgcacctgtagtcccagctatttgggaggctgaggcagaagaattgcttgaacctgggaggcggaggttgcagtgagccaagatcgcaccaatgcactccagcctgggtgacacacaagactctgtctcaaaaaagaaaaaaaaaaattatttcacatatattatctaatttcataaaatcccagaatttgagctgctcagggaatataggtgttctctaacccagggtttttgaacctcagccctattgatatttgtgataattctatgttatgaggggctgtcttgtgtgttttcagatgtttcataacatccctgtcctttacccactagatgcaaaagccccctacctccccaatgttgtga

SEQ ID NO: 768139 - DNA, 539 bp, Homo sapiens
tggtgtcttatgcctgtaatcccagcactttgggaggctgaggcgagaggatggcttgagcccaggggttcaagaccagcctggggagcatggtgagaccctgtctcaaaaaaaaaaaaaaaaaaatatatatatatatatatatataaaatacatatatatatatatataaaatacatatatatatatataaaatacatatatatatatataatacatatatatatactattaaataattttttttaaagttaaatttggaaggggatttgctggtccaccttcctcatttcatgcttgaraaaacaggccaggggagattaaagtgactaactaaagtcacagacccagttaatcagagaacaggacccagaacctatgtatcttattttccaggttatgctgggtgtcattatatcctaatcagtgataacaaaaaacaaaattaaaaatcacggactccaccaacatcttaagatttaatatcacaagcaggttttaacgtaagcaccaagagaatggtggactagcccctaacc

SEQ ID NO: 768140 - DNA, 606 bp, Homo sapiens
attttctttttttttctttttttttttgagacggagtctcgctctgttgcccgggctggagtgcagtggcgcgatctcggctcactgcaagctctgcctccagggttcacgccacgccattctcctgcctcagcctcccgagtagctgggactacaggtgcccgccaccatgcccagctaattttttttttttgkatttttagaaaacatggggtttcaccgcgttagccaggatggtctggatatcctgacctcgtgatccacctgccttggcctcccaaagtgctgggataacaggcgtgagccaccgcgcccagccaaaaaatatattttcaagaaaggcattcaaatttattatcatacacagggataaaccacagagtgattaccctaaccaaggcatataaacttttttttcttttttcctaaacaaagtattgccctgtcacccaggctggagtgcagtggctcgatctcggctcactgcagcctctgcctcctgggctcaagcaattctctgcctcagcctcccgagtagctgggattacaggcgcccgccaccatgcctggctaattttgttttgtatttttagtagagacagggtt

SEQ ID NO: 768141 - DNA, 545 bp, Homo sapiens
cctggccctaaatttttcttacgcatttctcatcttccattatttccatccagtgtgttttttcttttctttcttttcttttttttttttttggaggcggagtctcgctctgttgcccaggccggagtgcagtggcgcgatcttggctcactgcaagctctgcctcccgggttcatgccattctcctgcctcagcctcccgagtagctgggactacaggcgcctgccaccacgtctggctaattttttgtatttttagtagagatggggtttcaccrtgttagccaggatggtctcgatctcctgacctcatgatctgcccgccttggcctcccacagtgctgggattccaggcgtgagccacggcgcctggccagtgtgttttttcatttcagacattgtagtttttatctctagaagttcacctggggactcttaaatatcctccacaattctacttaattttttgaacataatgggatatggctataatatctgttttaccatccttgcctgctaattctagcatccgtgtcagttctggat

SEQ ID NO: 768142 - DNA, 542 bp, Homo sapiens
acctgagatcgggaattggagaccagcctgaccaacacggagaaacctcatctccactaaaaatacaaaattagccaggcgtgttggcgcatgcctgtaatcccagctacttgggaggctgaggcaggagaatcgcttgaacctgggaggcggaggttgtagtgagccaagatcgtgccattgcactccagcctggtcaaaaagagcaaaactctgtcttaaaaaaaaaaaaaaaaaaaaaagccaggcgtagtggctcatgccygtaatcctagcactttgggaaggccaggcgggaggatcacctgaggtcaggagttcaagaccagcctggccaacatggtgaaaccttgtctctactaaaaatataaatattagccaggcatggtggcaggcacctgtaatcctagctactcgggagactgaggcaggagaattgcttgaaccgggaggcagagcttgcaatgagtcgagatcgtgtcactgcactccagcctgggcgaaagagcaagtctccatttcaaaaaataaaaataaacaaa

SEQ ID NO: 768143 - DNA, 623 bp, Homo sapiens
aaacctccgtctcccgtccctatggtgaccacagcagcagagggggatcctccatgccccaggcaggctggcatcagggccacacaggggccaggagcaggggtctcggagtccacagctcccggccccagtggtgggctcagggctcctgggcgccatgggtctcaccacagcctcgccagggaacaggaccatagggagtccttctccccatctctagccacccacaggccagcagagcacacagccccaccctcgcacaggcacctgtggtctccmagtaaccaagcccaggccccaggggccactgcagacagcagctgggatctgcagagggatctcagcagcgagcaggcagctggcgaggagaggtgcgtgtgagggaggggtggccctctcctcagtaggaggaagtaagagggtatctaggccaatttattcagctggaaatcaatctgtccagggctggaccaggcgcctccccctcgatacagctcctggctgaagaggtcatcagagcagcagctgtccccaggccagtgtcacgtcactgcgtacagttcctcccgatcgttcttgcagatctgatagtggcaggggaatttctgcgagcaggcccaggg

SEQ ID NO: 768144 - DNA, 500 bp, Homo sapiens
ccacacacacaccctgctactaagttctcagtgagttcccgagttccttccagtgaccgcatgggtctcagggccgctctctggtgccagggaacctgggaaacctcaaaggcagctgggaggtgccagactgcacctgacaggtgtttgtccaagcaagaatgagaaatattcgccagaaataagaagaattacctttcagctcttcgaccatcrcgtgtaacttggaaaactgttacacagggaagaggagagtgatgagaactagcccttcgctgctgctttggaaaatgtagaggggctgagaaacgaagctctgcatagcctctcctgctggctcctcagggcccctctgcaggctgcggtttggcctcagggagcactgagggtgcagaacgggggctctggagggctccaggcctggtgggagccagggcagccaggccatcccaggaagacagagcaggcaccgtagcctcatagtgaggtgttaaaataag

SEQ ID NO: 768145 - DNA, 570 bp, Homo sapiens
attgattttgtatcctgagactttgctgaagttgcttattagcttaagaagcctttgggctcagtcaatggtgttccctagatataggatcgtatcatctgccaacacagatagtttgacttcctatttgaatacactttatttccttctcttgcccaattgctctggccaaaacttccaatactatgttgaataggagtgctaagaaagggcaaccttgtcttgtgtcactttgcacattaatyttatatcctgagactttgctgaagttgcttatcagcttaagatgcttttgggctaaaacaatggggttttctagatacaggatcatgtcttctacaaagataatttgacttcctcttttcctatctgaataccctttatttcgttcccttgcctgatttccctggccagaaattccaatagtatgttgaataggagtggtgagaaagggcatccttatcttgtgctggtgttcaaggggaatgcctccagcttttgcacattcagtataatattggttgtggatttgtcatagacggctcttattattttgaggtatgttccttc

SEQ ID NO: 768146 - DNA, 587 bp, Homo sapiens
ggtacatgtgaaggtttgttacgtaggtaaacatgtgtcatggggatttgttgtacatattatttcatcacccaggtattaagcccagtacccaagagttatcttttctgctcctctccctcctcctccctcccccatcagggagaccccagtgtctgttgtttccttctttaacactctgcctttaaaaccattatgttgatttggattaagaattgaaccattaggcttcttttatttgatgccttacaaagactatagtgaatactgctacacatttttcagaatttattttttatgttttgctttttccccaaatttatatattttttaaattgatataaaaattatatgtatttaccatatgcaagatgatgttttgaaatacacacacacacacacacacacamactgtggaatggttaaatctagctaatttacacacacataacctcacatagttatcatttttgtggtgagaacactttgcattcactctctcagcatttttcaagaatgtaatatatcatcattaactatagtcaccatgttgtacaatacatctcctgaattttttcttcctatct

SEQ ID NO: 768147 - DNA, 582 bp, Homo sapiens
caggttttctgactaaagtcagaaacaagacaagtatgtctgctacaaccattttcattcaatgttgaacagaactgattcttttcagggcaaacaggcaagagataatattaacaataataaaaaataaaaggcatgacgatcacaaaataagaggtaaactatttctacttgtaggttatgtgatattttatayagaaaatcctaacgaattattttgcaaaaaaatacattagaacaaataaatgagttcagctagttttcaggatgaaagattaatatatatacaaaaatcaatttcatttttatacattagcaaataaaaatttaaaatgaaattaacaaaaaataatttaaatagcatcaaaattaatcaaatacctagaagtagatttaataaaagaagcttaataagagacttcatccaggcttgattgcttatgcctgtaatctcaacacttttgggagactgaggcgggaggatcacatgaggccaggagatcaagaccagcatagtcaacgtggtgaaaccatgtttctactaaaaacacaaaaatgagccaggcatggtggtgcagtgca

SEQ ID NO: 768148 - DNA, 548 bp, Homo sapiens
taagaccatgacacatcaattaaatcagaacttctaggaagaggcatgggtatcaatgactctaaaagtttctcaggtgattataatgggcagacagagttgaaagctgctaaatcaatgctactcaaagcttggcctccagatcagcagtgtcagtatcatgtggaagatgttaaaaatgcaaattctcaccccaccagaccagttaaattagaaactctggaagtggaacccagaaagctgtctttaacaagccccctgggtgattttgatgaggactaatgtttaagaaccatagcgctgggccaactgcagtatggctggtgcctggacactccaccccatagtcccattaatttttggcagtttcctyccacagctcatgtttgtcaggaccttgaggtgggttttatattcttcttgattcccttttctgcttccaaaatgtgtcttcttattgatgcttcaaaataccccaaatcattgaggagaatgtcattaaacttggttagctattatttttccttattatctacttcatttactgt

SEQ ID NO: 768149 - DNA, 616 bp, Homo sapiens
agtttaactgctcttaatacatcagacaattttgttagatgacattctatttataactgacaaaaaaagagctctccaaacattgatgtgttacaaacataaggaaggcattttaataatacatttatttgttttttcattygacagatatttagcaagcaccaattttgtgctaggtattaaacaataaaatgtgtgaatatgaagatgaattagatacattacatccttatcatgaagtaattcacaagctgttggaggagggaagatttgtacttgaaagcctaagcatataaggcagtattgtgtgtaataaatgctatatcgtgctacaagaacatgttattcaaacatataaaagggagtcattatttctagatggagtaatcagaaaagcatttgtaagagcatcaatatctactctggtctttggaggatacataaaacttcttaggttgagctatccactgagtcatttcaaaaggaaagaaatatgtaaagggaaaaaacaaatgaaggacagtgcatatttgtggatcagcaatgagtctaccttagcatgagtctgggtacatataaggatagagtaacagaaatctagattccaatatgatat

SEQ ID NO: 768150 - DNA, 655 bp, Homo sapiens
actgaatcagaaacttggttgcagggggcagtctgtcttttaacactctccaggtgaatctgtctaaaatttaagaagcactatcatagtgaattatttggttttgtttgtattttaaagctagtttttctatttgacatagagtatttcatgtttggcccctctgcaaataccaaatrtatcttttccctcaggcaccagtcatccttctgcttctaaaatagccctagaataggagggtctccttctaccccaggtattcttgataaaggcaaacaaagaaccctcccaggctctctgttttctccttctcagatcatggcaaaactttgacagcatggtcaggtgctggtgctctattttttgttttgtttgtttacttatttaatttctgcccacagtgccttcaaaatcctaacttgcaaatgacttattctttaagtctcctttcaagactctctccttcagggaaccttcctgaccatctcaggtcactgtaatcttagagaatctaaatcatttccctcatctctctctgtaccactcaccttggcattgatcaccgtgtgtcttattgagctgtccagctgctccctttgtgataattcagttccttcagtgaaagtggagcaaactctgtttcctttacttcttc

SEQ ID NO: 768151 - DNA, 604 bp, Homo sapiens
tgaagacaggtcacatcactggatccttggcagacattctccagcaccagcccagaaactggtagccttactgggtggctagacccagaagagcaataaaaatcactgcagtcaggctctcaggaagccccgttcccaggggaagggggagagcaccacatcaagggataacctcatggaataaaagattctgaacagcaggccttgagtcccagatatttccacaactgcagtgctgggcacagtagggaaagtctgcacctctaccccaataggcaggtaacctctgtgatcatgaagggctttggagaagggatcattgttccctcaggcacaccactgcagacacagctggggctttttgcctcaggaargcagcatggatgcacctatagacagccttcgtgaaacaatgcagggtaattacagcccacaggaggagtactccccagattcaggcctgcatgagacacagagtcagaattcctccctagttggaacattaaattcctatagatgaaaaaaagatgcctgtctgaactgaatagccagaacactgggacaggagtgaagctaagctgtgaggtgtatacctttccttctt

SEQ ID NO: 768152 - DNA, 610 bp, Homo sapiens
agttttgagcaaatggacaaataacaaaatattagtatttcatctatgttttttttactcccaatcaggtgcaatttctgtgtttaacacacccatatccaatgctgctttgtctttttttttttgagatggagtcttgttctgtcagccaggctggagtgcagtggtgtgatctcggctcactgcaacctccacytcccaggttcaagcaattctcctacctcaaccacccaagtagctgggattacaggcacccaccaccacgtccagctaatttttgtatttttagtagagatgaggtttcaccatgttggccaggctggtctccaactcctgacctcaaaaaatccacctgcctcagcctcccaaagtgctgggattacaggcgtgagccaccactcccagctgtcattatttaattaattctgcttatctcattatcttatccctttcagctggaagatcatatggtaggagtactgaaagaaattcaagcagcagatagaaagttacgttaaataatcttttaatattcattagattgcatgtctttaaaagtagaagaaaaaataacttcaaataaatgtccctttaaaagggggaactggct

SEQ ID NO: 768153 - DNA, 634 bp, Homo sapiens
aaagaaacttttaaaactatacaaatatatggaaattaaataatcttctcttgaatggtttttgggttaacaatgaaatcaagatggaaacttaaaattctttgaaatgaatgataatagtgacacaacttatcaaaacctctgggatacagcaaaagtgatgctaagaggaaagttcataacattaaatgtctacatcaaaaagtctgaaagagcagaaatagacaacctaatgtcacacctcaaggaactagagaaacaagaacaaacaaaacccaaactcaggagaagaagtaacaaagatcaaagcagaattaaatgaaagtgaaaaaaaacaaaaaagataaatgaaacaaaaagctggttctttgaaaagataaacaaaatggatagaccagtagcaagattaaccaagaagagagaagatccaaataagctcaattagaaaggaaactggagatattacaaccactaccacagaaatataaragatcattcaaggctactatgaacacctttatgcaaacaaactagaaaatatagaggagatggataaattcctgaaaatatacaaccctcctagattaaattaggaagacatagaaatgctgaacagaccaataacaagcagcaa

SEQ ID NO: 768154 - DNA, 550 bp, Homo sapiens
tcaactcagcaatcccactactgagtatctatccaaaggaaaagaagtcatatgaagaagacacatacacacacgtttatagcagcacaattcgtaattgcaaaaatatggaaccaacctaagtgtccataaactaacaagtggataaagaaaatctggtatatatataccatggaatactgctcagctgtaaaaatgaataaaataatgtctagctggaggccattattctaagtgaagtaactcagaaatggaaaaccaaatattgtatgttctcacttataagtggcagttaagctatgaggatacaaaggcataggagtgataaaatggagtttggggactcaggaaggagggtgggaagggggtgagggataaaagacaacataytgtgtacagtgtacactgcttgggtgatgggtgcaacaaaatctcagaaatcaccactaaaaaacatccatgtaaccaaaaacaacctgtatcccaaaaactattgaaataaaactttttaaaagtacacagttctttgaacttccctagaaatgaacaa

SEQ ID NO: 768155 - DNA, 670 bp, Homo sapiens
aaacagaaccagatgtggacctaaatactccacagtattatttgcattctgccacttagaagtggcatgctgcttagtttgggatactggctattaattttctaaagactggagaatgttatccccagaatatactcttctaggatgttaagttagggtcttcattgctttatctagagcatcttaacaaactagtaagtccattttgaaagagataaagtagtggaaaaagggagccagggtgtttgtctcatgttggaggagggaaaagccatatccctgtaaaggtggattargaaaaagtgggagccggccagtggggaagtagggaagtgggtttctttaagtggtagaaatcagaaccactcaaatgcagtgcactgagaatataaaggtactcaccttgagacagggcagcaccctcagtgccagggtttggggatttaaggcaaaggtccttggagctgagtggccacaactgagccatctgccttctgtgtaatgaggtctcatgagctattgtcctgtggcaaaactcctggactaaatgatgttcagccttgagcatatctttagcaatgatctcaacagactgaatgccagataactctcccttattcatccggaacatgaagaagctccagaatgctggtgaggcccaaagcaagag

SEQ ID NO: 768156 - DNA, 685 bp, Homo sapiens
gtcatgatattccacccttgaatatttcagaatgcatataaaactgacaactacaattctattttcttgcctgagaatataaaaagataattcttaatgtcatgtagttcccagttcaaattcaaatttctgcaattacagcaagaattttcgagccccattcggtgaacatgarggtggtgagctgagagttaggagtatggcttgtgggccccttgaaactaattgatttgccttgtgagtatcagaagcattcttcctgcttcccaggcctcagtttatctgtacttcgaggtggctcatggaggtggtctctcaagccccagccatatcaccaggctactgcatctcttcctttgggcttgtgtgaccaccacagggagcactgagagagatctcttggttgggaggctccttttctgggggtccggaaggcatagtggcatcaagcgagggtcactgtggcccagtggctggtctgggcccttgcaggatgcagaatttgtaggcacaaataaatctgtctcattctaacatgcactgaccagaggtcacccaacagtggtccgtgactggattcagccctggatgggctgggtttgtgctgtgtgggacatggggagaaaattgggggattccatacacaaaaatctagatttccaacttcttctgaaaaatgggaaga

SEQ ID NO: 768157 - DNA, 441 bp, Homo sapiens
ttatctttctgtggctggcttatttcacataacataatgtcctccaggctcatccatatcttgtttatcatattataatccacatcatcagttaaaaaccacacaattttcgttaagatagtcctctctctactcaggcatcccaaggacacttatatctccatcttcagtttaacctttagcayaaagccatttattactgttagaactgtttactggtttgaaagactaagtaagaaacagttctattttctaacccagcaagttctaggcagtctatatttttttcaaaattccatttgtgaactggaacaatttcttctttgttcatttcaacaatctgcttgccaatatccttagccaaatctacaacttcattaggtacacattctatcttccaaatttgtatagtttacagcttgacaattgtttgtctatttc

SEQ ID NO: 768158 - DNA, 511 bp, Homo sapiens
taactgattacttgtgtctcagaaatgtatataaacttaaagagcttctaaaaaatacagaaaatatcagaaaaatctgatagacatagatgccttagaacttccaaagccattgtagagtcatttcggacaaaatatctaatttttcattcagatgacgaatttgttaaaataattattttttaaaaaattaaacatacataactttattgtgcaaataatcgttttaaatattatcatrttattacttttattatatgttattatactattatatagtaatatattatatatataacaatatattattattactatatatcaaagaactaatatatatattactttttctatatatatagtaaaaggaataacatgatttatatatacattacttttactacatatatataatatatatatgtacgttacttttactacatataataattactacatataatgattttgcttatcagggccccatcctcatatttaagatcagatgact

SEQ ID NO: 768159 - DNA, 511 bp, Homo sapiens
taactgattacttgtgtctcagaaatgtatataaacttaaagagcttctaaaaaatacagaaaatatcagaaaaatctgatagacatagatgccttagaacttccaaagccattgtagagtcatttcggacaaaatatctaatttttcattcagatgacgaatttgttaaaataattattttttaaaaaattaaacatacataactttattgtgcaaataatcgttttaaatattatcatattattacttttattatatgttattatactattatatagtaatatattatatatataacaatatattattattactatatatcaaagaacyaatatatatattactttttctatatatatagtaaaaggaataacatgatttatatatacattacttttactacatatatataatatatatatgtacgttacttttactacatataataattactacatataatgattttgcttatcagggccccatcctcatatttaagatcagatgact

SEQ ID NO: 768160 - DNA, 506 bp, Homo sapiens
cttccctgaataaaattaattgtctgttactaagaaagaatgggaggatgaatattatatgaacaattagcatttctactgcagttaagaaggatttctctatgctctctctctctctctgtctcacacacacacacttgaatatataaacatgagcagagtaattagagctgcagagcttcctttgtgattgtcctttacagctaaagaactatcagtttgtaagtaaagttttatacttatgaacaaccagggcaagaggagggacagtgttagattmttttccttactcctgctatttttctgttcacatagtaaatgtttaaataagtatttccagtactgatctagccattgaaaaaatgtttattgaatttagacacagtaaagcaattgttactttaatttagtcatatatagtctaatatatgactatattagacatatagtctaatatgatcagagctttaacttgtccttagctacctggcatgatcatatttaca

SEQ ID NO: 768161 - DNA, 598 bp, Homo sapiens
gtcagacctctggtaggtctagcaggttgatggttgctgactgatcagggtgatggctgctgaagtttggagtggatgcaacaatttcttaaaacaagaaaaaaatagagtttgctacattgattgactcttcctttcaaaaaatatattcatgtagcatgtgatgctgtttgatagcattttgcccacmgtagaacttcttgcaaatatggagtcaatcctctcaaaccctactggtactttattagataagtttatagaatattctaagtactttgttgtcagttcaacagtgttgacagcatcttcaccagaaataagtttcatctcaagaaactattttctttgctcatccataagatgcaacccctcattcgttcaaattttattatgggattgaataatttgtttccatcttcagggtctacttgtactccagttctggtgcaatttcccccacatctgcagtaactttctccactgaagtcttgaaccccctcaaagtcatccatgtggtttggattcaccttcttccacactctatgaatgttgatattttggccacctcccatgaaaattaatgttcttaattgtatct

SEQ ID NO: 768162 - DNA, 586 bp, Homo sapiens
tgttcacattttgtgtctacatatttaaatagtaattcctacatgttgtgagaaaactcatttgtaccttctatttcaagcatcatgtgtgtgtgtttgtgtgtattgtgtgtctgcattggtgtggtgttttccttggtaggtggaggaggggataatactccaagatctataatatggggagtatgaatgaatgacaactactcttgaagatatgttcatgtgtggtagtgtgcacatccatgccctacatctactctttaaatatatatctatatatacacacacacacgtatagatagatgattgayagattacttttagataaatactgaaaactaaaattcaaataaatctaaagattaaaaattcaaacaagatatagataaaataaaaagctattatatatgatcaggagccaacaggcaatacttaactgatagagtcaaggtgggcatgatcaagatactggacagcatggctggaagagtaatcaaaatggattgacagtgaccgcctgcacatgccacagaggtgttatttatgtaacatctggaaggttctggaaaaagagaaatgatttatt

SEQ ID NO: 768163 - DNA, 586 bp, Homo sapiens
tgttcacattttgtgtctacatatttaaatagtaattcctacatgttgtgagaaaactcatttgtaccttctatttcaagcatcatgtgtgtgtgtttgtgtgtattgtgtgtctgcattggtgtggtgttttccttggtaggtggaggaggggataatactccaagatctataatatggggagtatgaatgaatgacaactactcttgaagatatgttcatgtgtggtagtgtgcacatccatgccctacatctactctttaaatatatatctatatatacacacacacacgtatagatagatgattgacagattacttttagataaatactgaaaactaaaattcaaayaaatctaaagattaaaaattcaaacaagatatagataaaataaaaagctattatatatgatcaggagccaacaggcaatacttaactgatagagtcaaggtgggcatgatcaagatactggacagcatggctggaagagtaatcaaaatggattgacagtgaccgcctgcacatgccacagaggtgttatttatgtaacatctggaaggttctggaaaaagagaaatgatttatt

SEQ ID NO: 768164 - DNA, 522 bp, Homo sapiens
aaactgcaaagcctcagatgacctttccatagtctgttctccagcttatcctcctttctctttcctagccaagttttgagttcttcttcaagatatcatctatctttaataatttctgttcaatctgcatgtctgtaatgtacttgtcatctgatcctgagccaagttattttattttattttattttattttattttttagacagagtctcgctctgttgcctaggctggcgtgcagtggtgcaatttcggctcactgcaagctctgcctcctgggttcaagcaattcttctgcctcagcctcctgagtagaagggtttacaggtgctcgccaccatgccgggctaatttttgtattttyaatagagacaaagtttcaccatagtgaccaggctggtctcaaactcctgacctggtgatctacccgtcttggtctcccaaaatgctgggattacaggtgtgagccactgtacctggcccaagttatttttgtttataatagtaacacataatgagcactac

SEQ ID NO: 768165 - DNA, 564 bp, Homo sapiens
agaccaatcaggatcttttatctattttacagaatattccattttttttaattcccaaatattctactcagaatggcaaataggtacttacttctaaaagtatacactaaacatcagtaattaatgcaacaggacagggttaactttcagcactctttctgttttggttttaaacaccatagtactaaatctccctcakgctctccttcctcttatgaaactaagcagtgccttcagtttcaatttcaattaactgcttttaggcttcactaactagaataattttaaacaaaaaataaagcctaaagtgttttcaaaaatcacaaaacacagaacaaaaattggaggtttctagaataaactacaatgttgatgttttaaaaatacttgcagacatatttctccttagtatgaaaaatatgttgaaatcaagtgcttcagatatggcataacatttgtttttttaaaataataaaatgtgcaaatatattgtcaaaattataatggcaggatagattgctacaaatccaacattagcacatatagcatgtccaaaatgaatag

SEQ ID NO: 768166 - DNA, 611 bp, Homo sapiens
cattcctggacccaaagtgctccatggcctccacaatattcacgccttctttcaccttgccaaagaccacatgcttgccatccaaccactcagtcttggcagtgcagatgaaaaactgggaaccatttgtgttgggtccagcatttgccatgggcaagacgccaggacctgtatgctttaggatgaagttctcatcttcaaatttctccccgtagatggacttgccaccagtgccawtatggcgtgtgaagtcactaccctgacacataaaccctggaatatttctgtgaaagcaggaagccttataaccaaatcttttctctccagtgctcggagcatgaaagttttcttctgtctttggaaacttgtctgcaaacagcttgaaggagatgcaccccaagggctagccgtcaaaggcgatgtcgaagaacacagtggggttgaccatgactgatagtacagggctcccagcagcggcatctgcaaagccaaagcagttattttaaaaacaaagacctgctagtttttgcaaagcaagtttatgctgattgctatcaactagagcttacaacttgtttctttattgttttgtttggtaagtgggtcttgcc

SEQ ID NO: 768167 - DNA, 433 bp, Homo sapiens
gatccagtttcattcttctacatgtggcttgccatttatcccagcaccatttgttgaacagcatgtcctttcttcactataggtttttgtttaattttttgaagatcacttgactgtaagtatttggctttatttctgggttctctattctgttccattagtctgtctatttatataccggtaccatgcagttttggtgactatagccttatattaatagtctagtttgaagttgggtagtgtgatgcctccaggtttgtactttttgcttaatctcgytatggtttttttggttccatgtaaattttactatttttttttctagttctgtgaagaatgatggtggtattttgataggaattgcaatgaatttgtagattgcttttggcagtatgatcattttcacaatattgattctacctatccatgagca

SEQ ID NO: 768168 - DNA, 433 bp, Homo sapiens
gatccagtttcattcttctacatgtggcttgccatttatcccagcaccatttgttgaacagcatgtcctttcttcactataggtttttgtttaattttttgaagatcacttgactgtaagtatttggctttatttctgggttctctattctgttccattagtctgtctatttatataccggtaccatgcagttttggtgactatagccttatattaatagtctagtttgaagttgggtagtgtgatgcctccaggtttgtactttttgcttaatctcgttatggyttttttggttccatgtaaattttactatttttttttctagttctgtgaagaatgatggtggtattttgataggaattgcaatgaatttgtagattgcttttggcagtatgatcattttcacaatattgattctacctatccatgagca

SEQ ID NO: 768169 - DNA, 677 bp, Homo sapiens
ggtttggctctgtgtctccacccaaatctcatattgaattgtaattgtaatcctcatgtgttgaaggagggatctggtgggaggtaattggatcattggagcggtttcccccatgcttttctcatgatagtgactgagttctcaggagagctgatggttgtaaagtttgtggcagttcctcttcctccttcttcctcttcctctttctcttcctcctcctcctcttctccttctccttctycttcttcttcttcttcttcttcctctctctctctctctctctctcctgctgccatgtaagatgtgccttgcttccccttcgccttctgccatgattgaaagtttcctggaggcctcactagttatgcagaactgtgagtcaattaaatctcttttatttataaattatccaatcccatgtattctttatagcagtctgaaaatggactaatacaacaactctctggaaaacaatttgtcattattcgtatagtcttcaataaagcaaattcattcttctaaggaaatcaacctgtcttagaaaaatatccaccagtagcagagaatatagacacaagaatgtttaatgcagcattctttttattggcaacaatctacaaaaatgggaatgtccaaagcatgtgaaaagttgaaaaaatcatggcatagctgcaaat

SEQ ID NO: 768170 - DNA, 622 bp, Homo sapiens
tttcatttccaacatataacgatggtcagtcactatgttcacctggctgtatgacttgtgagttcaaactaactcagcctgtgatgggcagtttcaagtgcactgtcatttggtatgctatagtcaggtattttgtgagtcaaaccccaaaagctgtcttttaaagttgttatttctctgctgcatatcaaatgaccttatccggaatctcaagagccgatgttgtacttccaattgcacttactccaagttgcatactgcatctttttcacccctgaaacttccaggtattrtagggtctgtcgaattgtatgacccaaatgacagaactctttgttctgcagactggacctgtactttgctgtttcagccttccatgtcatccaatataaagaccaaaacatgtgcccaagtatggaatatattatctccagaacctaaagagtctactagattggtatttcattttctgtgatagggaatccaagggacagcaatttgtcttttactttggaggagctgttctggcatgtccctgatcactgaacccctaacactgaagtgacagagccaaatctttgcaggatttatttctcacctttcggatcacatatgtctcact

SEQ ID NO: 768171 - DNA, 619 bp, Homo sapiens
aataatatgcttattggtcatttgatgtagtagttcaaaataagcaaaatgtatcatgagaaaggagaatcataaaaaaatgaatgtcttacatcaattccttggcaatccaaatacaagaatgcagtaattatttaggtgaaaaagaaaaaaataacaaaaatgttaactcatttgtttatatttcartggaaagtattttacgttgaagaaaatacgtattgacttctagccatttcacttctttaccataactgtacctgaacctcatcagatgagtagatatcttacaaaatatatacatataaggaattattatgtggccaattcttacaaagctattttatttctccagaaatccagatgtcttatgatatcaaattttcatatatagagataggtatgtagtattattactttgttaccaaggtcatcagatcattgaacttccaaagaaaagaagactattgcataatttaaagatgtaaaagggtaactcatttaaatattatgtctgtattttcccagtgctaagatttacctatttgttgcctatttgtttttcataaaacttcgtttctttttagaaaaaaaaaggtaacagactaaaattaaatta

SEQ ID NO: 768172 - DNA, 619 bp, Homo sapiens
aataatatgcttattggtcatttgatgtagtagttcaaaataagcaaaatgtatcatgagaaaggagaatcataaaaaaatgaatgtcttacatcaattccttggcaatccaaatacaagaatgcagtaattatttaggtgaaaaagaaaaaaataacaaaaatgttaactcatttgtttatatttcaatggaaagtattttacgttgaagaaaatacgtattgacttctagccatttcacttctttaccataactgtacctgaacctcatcagatgagtagatatcttacaaaatatatacatataaggaattattatgtggccaattcttacaaagctattttatttctccagaaatccagatgtcttatgatatcaaattttcwtatatagagataggtatgtagtattattactttgttaccaaggtcatcagatcattgaacttccaaagaaaagaagactattgcataatttaaagatgtaaaagggtaactcatttaaatattatgtctgtattttcccagtgctaagatttacctatttgttgcctatttgtttttcataaaacttcgtttctttttagaaaaaaaaaggtaacagactaaaattaaatta

SEQ ID NO: 768173 - DNA, 549 bp, Homo sapiens
tcttgagatcaggtatcttagtcaccttggccttctataacacaatacaataaaccgggtggcttaaagaataagtgcttacttctcatagttctggagactgagaactttgagatcagggtgccagcagggttggtctcttggtgagggtcttcttgctttatcctcacatcatgtagaaagagagctagrtctctggcctgttcttatgaagtcgctatacccattcaagaggactccatccccatgacctaattagctcccaaaggccctaccttcagacatcatcacatggagattatggtttcaacatatgaattctgaggagacacaattattcattccattgcaatagggtttatttcttaactattttttcacacccagtacctcacgcagacactaactcctaaatacatatttatatacagtcatgcacaccctaaccatgattcagtcagtgatggaccatatacatgatatatacacactggtggacccacgagattataatgaagctaaaaaataactatcgcttaatgaagttat

SEQ ID NO: 768174 - DNA, 626 bp, Homo sapiens
ctaaatggatagtattagaggacagaagaagtactaaccctgaggttagacagaaaaattgtgatgagatgaaaaagccctcgaatgagctgatgaaatagcaaaaaacaagataaccatctgccttaaatgaagactgccaccaacctacgacagctggcccaatgctctstaagggaattcccaaccactgggttctcagaacccccgaaattgctcagtctgctccttttctctggatagaagggctttctcctatctttctctttgaggagggggtgggcaaccaatggcatgctgctcctaggtggagatgagtcctacctctagccatgtggcttagcttgtgcatagccttgtgaaggcatttactggggccggaggagaagaatgctaccttgaagtttctaacagaggtaaagggatgttaagaggcctggccctagctgatgtccaagagcttccatcatagtgcctggttcttcagccctgctgtgggtgaaaaaattagagaagagagctgataaccaagacttaccctttgcccgacactttcttagctccctgtcttggatgaagccagcaaacatctgagactccataaaaacctcaagaaagcggcggat

SEQ ID NO: 768175 - DNA, 608 bp, Homo sapiens
aaattatctttatttttaaagttatgtattatttttgaactatacatctggggttgaaacacaaaagtaaatcaaatgtagaactccaaagagctgagttataagaaggcagtgtatttggtggttcaaggtcagactgacctggatttcaatcctaatcctgttatttattagcttcgtgacactgggcatatttataactagactgggtttcaacttcatcacttataaaatgaatataatagtatctacytgctgggcaccatggcacatgactgtagtcccagctactcagaaggccaaggtgggaggatcacatgagtccagggctttgaggccagcagcagcctgggcaacatagcaatacctgtctcttaaaaaagaaaaagaagaagaatgcaataataatatctacctaatagaattgttatgaatatttaaacaattaatacatgtaaagtgtaaaatgactaaaatcgtgcatggtacataatcaaggtttggtattatttttataatcatcataattaatcttaatatctcgtaattttaatcaagaaatctttgaatccatgatgaatattgatgtggttaggcttttgtgtccc

SEQ ID NO: 768176 - DNA, 608 bp, Homo sapiens
aaattatctttatttttaaagttatgtattatttttgaactatacatctggggttgaaacacaaaagtaaatcaaatgtagaactccaaagagctgagttataagaaggcagtgtatttggtggttcaaggtcagactgacctggatttcaatcctaatcctgttatttattagcttcgtgacactgggcatatttataactagactgggtttcaacttcatcacttataaaatgaatataatagtatctacttgctgggcaccatggcacatgactrtagtcccagctactcagaaggccaaggtgggaggatcacatgagtccagggctttgaggccagcagcagcctgggcaacatagcaatacctgtctcttaaaaaagaaaaagaagaagaatgcaataataatatctacctaatagaattgttatgaatatttaaacaattaatacatgtaaagtgtaaaatgactaaaatcgtgcatggtacataatcaaggtttggtattatttttataatcatcataattaatcttaatatctcgtaattttaatcaagaaatctttgaatccatgatgaatattgatgtggttaggcttttgtgtccc

SEQ ID NO: 768177 - DNA, 509 bp, Homo sapiens
atttaaacaattaatacatgtaaagtgtaaaatgactaaaatcgtgcatggtacataatcaaggtttggtattatttttataatcatcataattaatcttaatatctcgtaattttaatcaagaaatctttgaatccatgatgaatattgatgtggttaggcttttgtgtccccacctaaatctcatcttgaattgtcatccccaggtgttaagggaagaacctggtgggaggtgatcggctcatggaggtggtttcctcmaagctgttctcatgagagtgagtgagctctcatgagatatgatggcatttcccctggttgcacttacttctctcttgcctgccgccatgtaagacatgcctgcttccccttccacagtgattgtaagtttcctgaggcctcagcagccatgcagaactgtgagtcaattaaacctctttcctttataaattacctagtctcaggtagtatctttacagtagttttgacaaacactaaaggacttcaca

SEQ ID NO: 768178 - DNA, 618 bp, Homo sapiens
aacattagatggtaccctttttgtccagttacatttctacatggttgtccatactttattgaacctaaacataaaaataatttccaggctgggttcgaggactcatgcctataatcccagcacttcaggaggctgaggtgggggaatcctttgagcccaggaactcaagaccagcctgggcaacatagctagaccctgtctctactaaaaataaaataattagtaggttgttcattcctgtggtcccagctacttgggaggctgaggtgggaaaaycccttgagtccaggaggtcgaggctgcagtgagttgtgattgcaccactgcactccagcctgggtgacagaaagaccctgtctcaaacaaaaacaaacaaaaaaagataattttctctatatctttgggtctttattctaaaggctctcatgtacacgttaataaaatttatatacatttactccaattaatctgacttttatgagttgatttttaagcaaatcttcagaggacaaaggggatattttccttgtacccttacaatggtcacctgtatccgggggtcatcattttttaaccttaaaattctgccacaaatatagacaaaggacaaaagataaa

SEQ ID NO: 768179 - DNA, 574 bp, Homo sapiens
ctggtctcgaactcttgacctcaagtgatccacctgccttggcctcccgaagtgctgggattataggagtaagccactgtgccaggccaagtcatgcagtagttatgatatgtaaaatttcaaatgacatagctgagaattacggtttattttcacattttctaatcacagaacgtaaagccgaatgttaaatgttgtaagccattcagattagtagcacaagtgaaaaattgacagttagagatcattacaatcatgaattccacttacataggactttatagctttcagactgctttttgcaataagtcctaatagaactgtatagaaacaatcatttgaataattagattttttgtatctcacttcatagattagcagtctgtgstcttatatgctggatagcaactactattttttttcctgaaactttttttttttttttgaaagggaatcttgctctgtcacccaggctggagtgcaatggcttcatctcggctcatggcaacctctgcctcccgggttcaagcagttctcctacctcagcctcccgagtagctgggactacaggtgt

SEQ ID NO: 768180 - DNA, 624 bp, Homo sapiens
ggcaaccatgaagagcctctaattcaaatatttttttataagtttcgactcctccaggattttcaggcaggaaggaaagacaaacgataaagataggatatgcaagggaaggatccaaggcaacaagctgattaatgcgggtcaggataaaaacaactcaatcaaaggagtggacaggaagcagaaactggggactgtcagacagcggaggaggagaagactctggttccagaggtcacgccagaaacagatgtccgctgaatgctcctgactcccgtggaaggacacagttgctggcagccatcaacacagaaacagtgaccatcaccctcagtgagtctgccattttcccacccatccccccttayctcattcacttctagactcatttttttctctagtcctccttgtttcccacgcgggtttagacagaaccattcattcgatggcttgcatcctgctttttccagcccaaccacttccctttcatctactcgacagatttagctcagcatgtcattttttttcctctttagcccttgagttgttcatctataaaacagaactgccctcttgctacattcccttccagttctacagttctctgaatcctccagtgcccca

SEQ ID NO: 768181 - DNA, 624 bp, Homo sapiens
ggcaaccatgaagagcctctaattcaaatatttttttataagtttcgactcctccaggattttcaggcaggaaggaaagacaaacgataaagataggatatgcaagggaaggatccaaggcaacaagctgattaatgcgggtcaggataaaaacaactcaatcaaaggagtggacaggaagcagaaactggggactgtcagacagcggaggaggagaagactctggttccagaggtcacgccagaaacagatgtccgctgaatgctcctgactcccgtggaaggacacagttgctggcagccatcaacacagaaacagtgaccatcaccctcagtgagtctgccattttcccacccatccccccttatctcattcacttctagactcatttttttctctagtcctccttgtttcccacgcggktttagacagaaccattcattcgatggcttgcatcctgctttttccagcccaaccacttccctttcatctactcgacagatttagctcagcatgtcattttttttcctctttagcccttgagttgttcatctataaaacagaactgccctcttgctacattcccttccagttctacagttctctgaatcctccagtgcccca

SEQ ID NO: 768182 - DNA, 448 bp, Homo sapiens
atctaatataaatatctctaattttaaacaaatattaacattctagtgttgacttgatttacattaatcaagactgtctggcaagaagccccatcacatctgttgtctcattccagcacttactctttctaactaagtactccatcattataactgtaacactaagccccaagcattaaatgtgtggaagggatccacttattttttgttttaattctaaagtgagtaggtcttaagagaaaaggactcttttttgaaatgtgttcatgaaaaaatgtasacattgcttgagatgtactgaaatctaaaaattagctttaatctccacagagacaagctagaaatttatacttatgaaccaaatggtctttattgtaccccaatattacttcttcttattatttgaattggaataatctgtaatcttttgacacattggtaatttaca

SEQ ID NO: 768183 - DNA, 517 bp, Homo sapiens
gaattccctgacctcttgcacttcctgggtgaggcgatgcctcgcacctgctttggcttatggtccatgggctgcacccactgtctgacaagccccagtgaaatgaacccggtacctcagttggaaatgcagaaatcacccrtcttctgcattgctcaccctgggagctgtagactggagctgttcctattcggccatcttggaacctcctctcccaatttttgtatttttagtagaggtggcatttcactatgttggccaggctggtctccaactcctgacctcaggtgattgcccgcctcagcctcctcccatagtgctgggattacaggcgtgagccaccatgcccagctttaatctttattctttatttagcctataagttatcagtttatgatatctgttgtacataactgggagccataaaatctttttaataacaagtatggtgacatggcttgccagatttaattttcatatggatcatactggtctcagtgtagagattggatggtga

SEQ ID NO: 768184 - DNA, 548 bp, Homo sapiens
ttttatggatgaccaaactgaagtatagagctgtctagtgacttcttacaattagtagctaacaagtgatataaaagttatatacaattatacaatgtatggagagaacataaagattggagtgaccagtttatatgctggggcagggcagctgacacaaagtctcactgaataactgaaacttgacggatactaaggagttgatcaggtattctaagcagaaagatcaaaaaattttagaattttataataataaatkatataataatatataattttacaaacattttataattttataataatttcactatgtatatatgtaattgaatatcactatatatttatatatgtacttgtatatgaaaacatcatgttgtatacattaaatttatacaacaaaaaataagaaaaaaacatgcaaatttcactgatgtgcggtgagaagatgctactcaaagagatgtcatttataatagcttccctggctctcaattttctccctcataaaataagcagttaaaactattttatctctgaagtccctt

SEQ ID NO: 768185 - DNA, 661 bp, Homo sapiens
catcagtgccatcctagctagacatgttggaactcagttctatgtcttcttcttattcagtcctcactcatccaatacacttggatcttcagtccagtccattttatctctgtgatgtctcctctttttgtatcattgcttataccagtactggttacagaaatagatcaggaaagrgcctgtagaatactatggaacctgttgtagaaagctaatataagtatgggataaacatgtatacagaagtagtagttcctggggaaggctgagaatcacatctcaagttgattgtggcagcctaatttcagacaaaaattaagatatgggaatgggaagtgtaatgaggaatgtaggtttcttcagcacagtagtaatgagggaagagggttgttttggtgacagttgtggtgaaaaagacaggccaatacaggtcctgaaccaaggcagccaattcaagaagaggcaagagagcttggaaataattctgggggaaaagatagtgggaatgaggcacaaaagcaggccatagcccagctgtcagggtacagagctattcttctctctggtgctacaggcctgggggatgggggcagaactcaggtctcaaaaaggaggtcagcgtagaacagcctctctgtgtgggataagaagagatatggag

SEQ ID NO: 768186 - DNA, 541 bp, Homo sapiens
acccatttcaaatgggagaaattggctaaaactaaggggctaggggccccatgcaagttagaaattcagtgaggcagtcaaatattaaagctccagaatgatctcctttgactctatgtctcacatccaggttatggtgatgcaagaggtggatttccactgtcttgggaagctctgcccctcttgctttgtggggtacaggcttcctcccagttgctttcacaggctggcatcagygtctgcggcttttccagacacatggtgcgagccgttggtggatctaccattctggggtctggaggatgatggccctcttctcacagctccactaagtggtgccccagtagggactctgtgtgggggctccaaccccacattttcctcccgcacttccctagcagaggttctctatgagggcaccacccctgcagcaaacttctgcctgggcatccaggcattgccatacatcctatgaaatctagacagaagttcccaaaccccacttcttcacttctgtgcactcgcaggctcaacaccacgt

SEQ ID NO: 768187 - DNA, 541 bp, Homo sapiens
acccatttcaaatgggagaaattggctaaaactaaggggctaggggccccatgcaagttagaaattcagtgaggcagtcaaatattaaagctccagaatgatctcctttgactctatgtctcacatccaggttatggtgatgcaagaggtggatttccactgtcttgggaagctctgcccctcttgctttgtggggtacaggcttcctcccagttgctttcacaggctggcatcagcgtctgcggcttttccagacacatggtgcgagccgttggtggatctaccattctggggtctggaggatgatggccctcttctcacagctccactaagtggtgccccagtagggactctgtgtgggggctccaaccccacattttcctccygcacttccctagcagaggttctctatgagggcaccacccctgcagcaaacttctgcctgggcatccaggcattgccatacatcctatgaaatctagacagaagttcccaaaccccacttcttcacttctgtgcactcgcaggctcaacaccacgt

SEQ ID NO: 768188 - DNA, 553 bp, Homo sapiens
atctcttgcttagaagaaaatattttgttctaaatattactggttttgacaatgcacctagtcacccaacagctctgacagatgtgtacaaagagattaatgttgttttatgcctattaacacaacatccatcctgcagaccatggatcaaggggtaattttaactttcaagtcatattacttaagaaatatatttcataaggctttagctgccatagatagtgattcctctgatggatgtggtcaaagtaagtggaaaaacatctggaaaggattaactattttagatgccattaagaacatttgtgattcatgggaacttgtcaaaatatcaacatcaacaaaagtttggaagaagctgattccaactctcrtgggtgcctttgaaaggttcaagagttcagtagagaaaataaatgcagatgcggtggaactagcaagagaagaagaaaaaaatggagcctgaagatatgactgaattgctgcagtctcatgatgaaacttgaatagatgaggtgttgcttcttattgatgagcaaagatgttttcttga

SEQ ID NO: 768189 - DNA, 613 bp, Homo sapiens
gattatttcggccgggcgcggtggctcacgcctgtaatcccagcactttgggaggccgaggtgggcggatcacaaggtcaggagattgcgaccatcctggctaacatggtgaaaccccgtctctactaaaaatacaaaaaattagccaggcatggtggcaggcatctgtagtcccagctactcaggaggctgaggcaggagaatggtgtgaacccgggaggcggagcttgcagtgagctgagatcktgccactacactccagcctgggcgacacagcaagactccgtctcaaaacaaaacaaaacaaaagactcatggattatttctagaatttcacatttaatatatatttcttttcttttctttaagacgaggtctcactccattgcccaggctggagggcagtggtaccatcagagctcactgcagcctccatctcctgggcataagccatcctcccacctaagccccccaagcagctgagatgacaagcgcatgccaccacacccggctaattttcgtattttttgcagagacgaggttttgccatgttacccaggccactcttgaactcttggactcaagggatccacttacctcaaccttccaaagt

SEQ ID NO: 768190 - DNA, 658 bp, Homo sapiens
aaataaataaattagccatctatgattgtgcatgcctgtagtcccagctacttgggaggcagaggcaagaggattgcttgagcccaggagtttgaggctgtagtgagctatgatcgcaccactgctctccagccagggcaacagagctggagcccatctctaaaataaaattwaaaaaaaattttaataggaattttaagacagcaaatcattaagccaagtacagggtcctctgtgacttctcggctgtctgcttgtggaactggcccgccccctgcataatattcagaaatcacaccctatgcattccccaccaggcccacaggcaccccctacccagcccaccccctactcccagccatgcttttagctgcaaattacaaaagcccaaaactggcttaaacaataaggacatttattggatcaaatgactggaggccaagagaaagggtgggctttgggacctagctattccactggctctgcctcagtttccctgccatgctctgagtcctgccctcttgagctggtgatgtcatccttggagcagaagtaagaatggctgccgcagcttggggctctcccatttatttgtgcacagcaatgtccaaaggaagagagaccacttctccctatggccgttccttaaaaacaagga

SEQ ID NO: 768191 - DNA, 658 bp, Homo sapiens
aaataaataaattagccatctatgattgtgcatgcctgtagtcccagctacttgggaggcagaggcaagaggattgcttgagcccaggagtttgaggctgtagtgagctatgatcgcaccactgctctccagccagggcaacagagctggagcccatctctaaaataaaatttaaaaaaaattttaataggaattttaagacagcaaatcattaagccaagtacagggtcctctgtgacttctcggctgtctgcttgtggaactggcccgccccctgcataatattcagaaatcacaccctatgcattccccaccaggcccacaggcaccycctacccagcccaccccctactcccagccatgcttttagctgcaaattacaaaagcccaaaactggcttaaacaataaggacatttattggatcaaatgactggaggccaagagaaagggtgggctttgggacctagctattccactggctctgcctcagtttccctgccatgctctgagtcctgccctcttgagctggtgatgtcatccttggagcagaagtaagaatggctgccgcagcttggggctctcccatttatttgtgcacagcaatgtccaaaggaagagagaccacttctccctatggccgttccttaaaaacaagga

SEQ ID NO: 768192 - DNA, 658 bp, Homo sapiens
aaataaataaattagccatctatgattgtgcatgcctgtagtcccagctacttgggaggcagaggcaagaggattgcttgagcccaggagtttgaggctgtagtgagctatgatcgcaccactgctctccagccagggcaacagagctggagcccatctctaaaataaaatttaaaaaaaattttaataggaattttaagacagcaaatcattaagccaagtacagggtcctctgtgacttctcggctgtctgcttgtggaactggcccgccccctgcataatattcagaaatcacaccctatgcattccccaccaggcccacaggcaccccctacccagcccaccccctactcccagccatgcttttagctgcaaattacaaaagcccaaaactggcttaaacaataaggacatttattggatcaaatgactggaggccaagagaaagrgtgggctttgggacctagctattccactggctctgcctcagtttccctgccatgctctgagtcctgccctcttgagctggtgatgtcatccttggagcagaagtaagaatggctgccgcagcttggggctctcccatttatttgtgcacagcaatgtccaaaggaagagagaccacttctccctatggccgttccttaaaaacaagga

SEQ ID NO: 768193 - DNA, 625 bp, Homo sapiens
tcctgttccttttgactctgtggccacacctccgtgtaaagtgtaatgtttagaaactagattgagagagtgcttacacagccctgccctttggtcacatttaccactgcctgatttggtatcagagtggaagactgaagccttttctatagcagttaattgtgctgttgagaagagtacctttattacataaataccacacacacacacacacacacacacacacacaaacacacacacacgcacactctttatataccgcacagtagctgggttcctcgaagaggctaaaagaacagaaaattaacatcagattgtgatcacaaacrtagaagctggggtttaaaactctgctcgtaagtgttcagaattgtacttcaaactgatagctttctcagagatatggctattcatatacaattcagagcaagcccatccattgagcaaccagtatagtgccgttttcataaaaggtacctgtaaatgttgaatatttgaattgagtatagattttagaatttcacctctattttcagaattgtacatatcatgggggattttaaaaaatggaaataaaagtactttaggggaagagagaagggaggtaaaggctcacgtgatctgg

SEQ ID NO: 768194 - DNA, 554 bp, Homo sapiens
agatacaagaatcacaagtagaaaaatgggacagttgttgagtcaactgaaattcagtccaaaaaagtaaaatttgaatcaaacttcatactctatgcaaaaatcaattccagaaaaattggatacctaaatgttaaaagtcaaaagacaaagctcccacagggaaaaaaataaacattttgatgctaatgttatgatgatgggggaagcaatgatttcttmaactgatacaaaaatccacaaccacactgaaataattacaaataaaatattaaaacaaataaattatcttcattaaaagacatcagtgggggaggagccaagatggccgaataggaacagctccagtctacagctcccagcgtgagcgacgcagaagacgggtgatttctgcatttccatctgaggtaccgggttcatctcactagggagtgccagacagtgggcgcaggccagtgtgtgcgcgcactgtgcgcgagccgaagcagggcgaggcattgcctcacctgggaagcgcaaggggtcagggagttccctttccgagtcaaagaaag

SEQ ID NO: 768195 - DNA, 554 bp, Homo sapiens
agatacaagaatcacaagtagaaaaatgggacagttgttgagtcaactgaaattcagtccaaaaaagtaaaatttgaatcaaacttcatactctatgcaaaaatcaattccagaaaaattggatacctaaatgttaaaagtcaaaagacaaagctcccacagggaaaaaaataaacattttgatgctaatgttatgatgatgggggaagcaatgatttcttcaactgatacaaaaatccacaaccacactgaaataattacaaataaaatattaaaacaaataaattatcttcattaaaagacatcagtgggggaggagccaagatggccgaataggaacagctccagtctacagctcccagcgtgagcgacgcagaagacgggtgatttctgcatttccatctgaggtaccsggttcatctcactagggagtgccagacagtgggcgcaggccagtgtgtgcgcgcactgtgcgcgagccgaagcagggcgaggcattgcctcacctgggaagcgcaaggggtcagggagttccctttccgagtcaaagaaag

SEQ ID NO: 768196 - DNA, 607 bp, Homo sapiens
aaatattttctcccaacatgaatttgaatattggcagctgtttagaaggatgagctatttcagaccaagaagcatggaaagtaaatttacccctgtggctgctggccatagagaataggagttcaaatggattttctaaactgtgcaaggaataaaaatttcttgtttttgtttcgtgtctgaatgttttccatgaaactaaaatygaacacagagcagttaaaaagaaatctgaacattttcctacaggggatttttgaaatggattactgcttttcctaaggaaaaagaaaaagtaaagtgtagagctaaaggtgggaattttacaaggtgataaattcaagtccaagaagactaagtcgtgaaaattatatcttctttcacgtttaataatgcatggatctttctattataaatattgatgaagatatttattttcagattacaatgttactaaagatatatatatatatactaatttatttattaaatatagcaaacactaggttgccacaaaagcaaaatgaaacagaggaagtggctttttatctagctaattgagacaaaaaccatcctattcaaggaaagagagatttgcattctccaa

SEQ ID NO: 768197 - DNA, 629 bp, Homo sapiens
attactcagaggaaagaggggagtgtcagggcttcagaaggcggtttctgaagatagtattctacatgaaatttctgctggccatggtacacagtaaaatcattgaagtctatcagtgagcactgacattcgaagaaggtgagtggaagaactcagttttaaagtactttgcatgcttcttcacataatgaaaatcagaaaactcarggttcaccaagtccttttgatttatgcctcttcagttcactgccatgcataaatatttctcatcatcaattttgaacaaaagctaaagaatccaaaacctcacggaacgatgatacattttcacagcatcatcaaactattgctcttttgctcaaatctccttgtcattcaggtcatagtttacttttattgtcctcaaccatgactctaagtaagattatcagttatgagaattcacagaaacgaattcatggattcctaaacatctgaactagaagaaatctcagatgttatgtacctctccttttctttatagaataggtattgatagctgaaatgagtttttaccctaacgtttttgtgaatccatctcactagaagtaaggttggcactggatgagtcccttttcctcagtaattaa

SEQ ID NO: 768198 - DNA, 625 bp, Homo sapiens
atgagtttatgtcctcatttttacagttaaaaaaaaaaaaagagagacctaagaatcttatttacctgatctgtccgtaaagccagacaatctcaaatacacaggaatacaggaaatatagcattcatgaatctttcttgaaaaactacttggaaatgaaaatatagtaaaaaacaaaagtaataatcaaaaatgaaaaaaccgtgaagaaattaaaagatttgtgacaataatgaattcatttaaatataaaattaagattagacaactggaaattatggttacagaagaggatgttttattaaccttcatgatacaaaatactaatataaacaacaaaaatcattgaattgatagaggaaaagaagcaacaactaaaggttaggtactaatttcctcatctttaaaaattagggattcaacacatacaatctaaaaataatatacagggattraaaacctcttcttgtgtgacataatctattttaaaatttagaggaagctttcagtagtacctcatatcatttgtttgacagaaatgaatgaaattcaacaagtccttcacttttaattatgtttcatgctttagatataatataatacaacacaatctagtagtttctta

SEQ ID NO: 768199 - DNA, 581 bp, Homo sapiens
agctgtaatgtattaactttgctctaagttgtttcctttttacaattttttatttaattaattaatttatttttagagacagcgtcttactctgtcacgtaggctagagtacaatggtgtgatcatagctcactgcagcctcaaactcctgggctcaagggatcctcccctgacacctgtctcagcctcttaaatagcttagactacaggtgtgcaccaccatgcctagcttttttttttttttttttttttttttggtagagatggggtcttgctgtggtactcaggctgttctcaaacacctgcgctcagcttcccaaagaactgggattataggcataagccattgtgctcagtctggkgtttcctttttttttttttttttttctgtcaagtactgttttccaaaagttatctgtcttttggcacctccccaaacaattggcactgtcatttcccttttaaggatcctctctctaggtgcccttaggaataaaggttgattaagacctacaagggcatactggtggcacaaatgagtaaaatagactgggcataatgcaataggggtgatggaaacc

SEQ ID NO: 768200 - DNA, 581 bp, Homo sapiens
agctgtaatgtattaactttgctctaagttgtttcctttttacaattttttatttaattaattaatttatttttagagacagcgtcttactctgtcacgtaggctagagtacaatggtgtgatcatagctcactgcagcctcaaactcctgggctcaagggatcctcccctgacacctgtctcagcctcttaaatagcttagactacaggtgtgcaccaccatgcctagcttttttttttttttttttttttttttggtagagatggggtcttgctgtggtactcaggctgttctcaaacacctgcgctcagcttcccaaagaactgggattataggcataagccattgtgctcagtctggtgtttcctttttttttttttttttttcygtcaagtactgttttccaaaagttatctgtcttttggcacctccccaaacaattggcactgtcatttcccttttaaggatcctctctctaggtgcccttaggaataaaggttgattaagacctacaagggcatactggtggcacaaatgagtaaaatagactgggcataatgcaataggggtgatggaaacc

SEQ ID NO: 768201 - DNA, 640 bp, Homo sapiens
atctttatctcaatttttggatcctgattctactctctcctcttctgggcattcccttggacagataagtcagtagagagcccaagtggcccccatttcttctaactcctgcattttttcttgtgcattctgattataactcaatcccacagttgggaactagattttaccccatcagcccatcatccttgaggcacatgaaaataatggaatgtaaaagcatgtgagtgtgctgaatgttctagttctcaggaatgcgatgagaacttttcattcattgatgagagatgacctcttcgtagtgaaaacagatccctctcgagacacctggggaacaccttggtgaggttgactgctgtaagtacacatgacttaaccttgccaacaaggtacagtgccacatctggccatacctccaataagtacacctaaacaatttttagaaaacyaggatgggctgcctcaatttctaatttatttggccagtttcacaagctgctcagttcctagttaagtcaagataagaagtatttctgatcttctgaacatgccctaaatgtaatgaagtgcttgatgcatgcctggcactccaaagaatcaaccttccacagtggctccaaggggctgggcttaatgaagc

SEQ ID NO: 768202 - DNA, 629 bp, Homo sapiens
actcttcactgtggctctttcaaatgtttgagggtatatggaaaattggcctcatttcagtcttctcaaatcggtgtgctagataatagggaggcaggaggtgctggatttgtccctcatgactcaggcaaattcctcaacaaaatgtttttagatgtttaacttgttttcagggatcatcttattggacaatgctctccactgcatgccaactatgaactggaaagataaataaattgttcctatggcatcatgatggtaacctggtagtgctttttaagyttcaaaacattatcacatatttatattgactcctctcctggtttatggctataaaccagtacatatataggaaggtaaatcagaatttttttaaaaagtaacctttagaaaaaaatttgaaagagccacttaatgagttaaatatatgtagataagtttaacagcaaggacatattaaaccaaaaactataagactgttcttaaaacaactgtctctttgctatgatggtttttttaaatccccctcattttacttatatgctattctaaaggtacacataatttttgatattataaatacgatacaatgatttcagtacctaagagaatatacccctcattgttgt

SEQ ID NO: 768203 - DNA, 623 bp, Homo sapiens
cttgctgtgtaacctcagtcaaatcacatcacctctctgggactctgtggcatcatctataaaataaggagcttggactaaatttccagatacagcctaaagtgtcctaaaagagaagcatgaagtattttggtaattctattgagaaagtaatcaccacttgctggaacaattgataagtactacccagtagctcctccacaaagatagccggtgsgattgaggcttgattggatttttgcaatctatgattccagatgaagcaaaggtcagggcaggaaaagcctgaggtacattataggtacattgagtaacacagatttccggaggctaatggatgaagacagatgggggtgtgaagtggagaggacaaatggagggcctggaacactgacgctgtgcagagcccctgatggtttctgaagggctctagtgatctcttccctacactattaagggagtccactagcacaggaattgtatccattcatggcccttggcaagctgtgtcattcatatcagtatccccagttcccaggcacaataatcaccatttaatagtttgctgacaacatatgtgttgggtgactgaatgaagaacttgcaattagcctttcccatct

SEQ ID NO: 768204 - DNA, 623 bp, Homo sapiens
cttgctgtgtaacctcagtcaaatcacatcacctctctgggactctgtggcatcatctataaaataaggagcttggactaaatttccagatacagcctaaagtgtcctaaaagagaagcatgaagtattttggtaattctattgagaaagtaatcaccacttgctggaacaattgataagtactacccagtagctcctccacaaagatagccggtgcsattgaggcttgattggatttttgcaatctatgattccagatgaagcaaaggtcagggcaggaaaagcctgaggtacattataggtacattgagtaacacagatttccggaggctaatggatgaagacagatgggggtgtgaagtggagaggacaaatggagggcctggaacactgacgctgtgcagagcccctgatggtttctgaagggctctagtgatctcttccctacactattaagggagtccactagcacaggaattgtatccattcatggcccttggcaagctgtgtcattcatatcagtatccccagttcccaggcacaataatcaccatttaatagtttgctgacaacatatgtgttgggtgactgaatgaagaacttgcaattagcctttcccatct

SEQ ID NO: 768205 - DNA, 623 bp, Homo sapiens
cttgctgtgtaacctcagtcaaatcacatcacctctctgggactctgtggcatcatctataaaataaggagcttggactaaatttccagatacagcctaaagtgtcctaaaagagaagcatgaagtattttggtaattctattgagaaagtaatcaccacttgctggaacaattgataagtactacccagtagctcctccacaaagatagccggtgcgattgaggcttgaytggatttttgcaatctatgattccagatgaagcaaaggtcagggcaggaaaagcctgaggtacattataggtacattgagtaacacagatttccggaggctaatggatgaagacagatgggggtgtgaagtggagaggacaaatggagggcctggaacactgacgctgtgcagagcccctgatggtttctgaagggctctagtgatctcttccctacactattaagggagtccactagcacaggaattgtatccattcatggcccttggcaagctgtgtcattcatatcagtatccccagttcccaggcacaataatcaccatttaatagtttgctgacaacatatgtgttgggtgactgaatgaagaacttgcaattagcctttcccatct

SEQ ID NO: 768206 - DNA, 566 bp, Homo sapiens
tatttgatgttcttcctgtttatgtatactggtgcttcagtacagatttattctgggtcctttgacatgatacaggaaatgtgccattctctgtccctgccattccactttcctgtgctccacctgggctatacagtagaacttgacaaccaaccaggttttctaattaatgcttacactttctgttgcctttcccccctacctgtcagtttatctagctaagcatttttctccatggcacctatcactgcattgtttgtattctcagagattttggtctggcarataccatcagtaattccatctaattaaaatttttttatataataagcaatatttaataataataattagaaatagattttgattacatcttaaaatcactgcaaagacttgtcatatccagagaacttccgaggtttataagcctaattagacagttgcctaaaaataaaaaaaattgtgaataaagatagcctattttagagaactgttatctctaggcagagctctacaaaagataaatgcattgataacaacccatcctctctcttattagtttttta

SEQ ID NO: 768207 - DNA, 505 bp, Homo sapiens
tcagaaatgtgatttgcaaatattttattccagtctgtgactcttctttacatcttcttaacagtatgacccaaagaacagacactgttaattttgatcaagtccaagatatcaatttttttcttttgtggactatgcttctgttgtagtaactagtaaatttttacccaatccaatctcacagagattttcttttacttttttaaataaaagttttaragttttaggttttacatttagttctctgatccactttcagttaatatttgtatattgtagaaggtatggattacagttatttttgtatatgaagatctatttgttgaagacattcttctctctccagtaagttagctttacacttttgtcaaaagtcggttgttcatgcatgtattgatgtattttgtattctctaacctgttccatttgatttcatttgatgtattcgtttatttctataccaacatcacacaacctgtattactgtagctttaggaacaatctt

SEQ ID NO: 768208 - DNA, 603 bp, Homo sapiens
gaactttccgtgttgctatctaaggctgaactctccgcctgttcactagatcccaatccttttaaatattcaagaacattgttccagaaattcctcccctttccttctcctgcatcaccattttccccctcttagccagatmattccatcagcatatgaacatgatgctatttctcccatctatgttgccttccagctacaaattcatatttccattcttcttcacagcaattcctctgaagacttatctacactcgtgtctctaaaatctgttctcccattccctctagaatgctgtttaatcaggcgtttgcctcttccatgttccaaaactgctctccagcaatgatgtccacattgctaaatctaatggtcagttctctcatttgacgcctcagtaacgtttaacatcatcgttcgctctgtccttctggaagtattttattaacttctctctcaggacaccacactttcttggtttttctcctacttcccagccacctaacatttcgtaccctaggatttgatattccctcccatctttcccagctgtctccatgactcactctctcgcctccttcagatgtttgcacagatgtcacc

SEQ ID NO: 768209 - DNA, 603 bp, Homo sapiens
gaactttccgtgttgctatctaaggctgaactctccgcctgttcactagatcccaatccttttaaatattcaagaacattgttccagaaattcctcccctttccttctcctgcatcaccattttccccctcttagccagatcattccatcagcatatgaacatgatgctatttctcccatctatgttgccttccagctacaaattcatatttccattcttcttcacagcaattcctctgaagacttatctacactcgtgtctctaaaayctgttctcccattccctctagaatgctgtttaatcaggcgtttgcctcttccatgttccaaaactgctctccagcaatgatgtccacattgctaaatctaatggtcagttctctcatttgacgcctcagtaacgtttaacatcatcgttcgctctgtccttctggaagtattttattaacttctctctcaggacaccacactttcttggtttttctcctacttcccagccacctaacatttcgtaccctaggatttgatattccctcccatctttcccagctgtctccatgactcactctctcgcctccttcagatgtttgcacagatgtcacc

SEQ ID NO: 768210 - DNA, 435 bp, Homo sapiens
ctaacgtgtaaacaatgttgagaaccactacttaaaataggaaaatattatatctaaatttatcaacaaggaaagtcaaaggagagttataacaatctgtgtgttttatatatccctgttggaaagtgaagaacagctgctaaaattgaaccttaagtcactagcacaccaaccactaaagatggcctcattgactctctgcttcacatacagatgactctcttcagcacctgatttgcttttatgaggcaatcttttacrtctatggctgtgtgtgctgggctaagaaagaagatgtacatgaaagttagcaaaatatcttttccctcagaaaatttgaagtccatttggaaagacaggactaacaacaacaaaataataaaatgaatacagttcaaggtactagttaagacaacagaagttcaagaaatgggg

SEQ ID NO: 768211 - DNA, 623 bp, Homo sapiens
catctgagccctggaggtcaaggctgccgtgagccatgatcacaccctggacaatagagcaagatcctgttaacacccccaacccacaaaaaaacgatgttaatctcatccggtaatacccttatggacacaccaaggttaaccaaatatcatttctagcagcaacatcaacatctgtgcagtttcccaaagtgtgttctacagaatacaagtccaaagggatgctaataggtaattwtcagtaaaaaggtctgtgaaaaaaaatactgggttaaacctcaaacccaaatgaagaatgttttattatgaaggagagggagagctaaattcttcaaaaatgtcaatgtcataaaagacaaagaaaggtcatcataacagtatgcttctcagatctcctgtcaagaaagaacctgctgcaaggaatgcaattgacctctggatgccacatctttgaattggtcacagaatttctgctgagaccacacccctgcagcctgctcctaaccaataactgagcatggagagggaattacatttgtcattcctgcccaatgaagggctcctctaaggagaaatctttgctttggagctcctggtggacctggctgagactgtctcatggc

SEQ ID NO: 768212 - DNA, 614 bp, Homo sapiens
gttctcccttttccctgaactcccagctagcttctgtggaaattgtgacatacttttctgcaactaaccacttaatttattttcttttaaaaaataataatagtaattgtatatttatttcttcagacccctcttttgagaccttttgcctctctgtgccttcatgaagtctaatcgatgccctctatcrgagctttgcagagtgctggagcagcatcaatccttttgaacagaggtttggctgccatcgcgcagggccaggactcaggccaggaaagtgaggtgcttaggctgcgcacttcacagcatcacagggttgttcaagtgctgatgttgagccacaaatagtctaatattactgaaaacttagggataaggatgtggaatagtgagaggtcagactggacaggcaggtgagggcctgatcatggacagccttctatgtcctggaatgcaatcagactctatcctcaaagcaaagtggagccaagtgcagtgtggatcaggagagaaacgtgatttcagatgggcatgttagaatgactgacttcatatcagcctagagaatcagctggaaagagcaagaaaccaaagacagaaaagagtttagactg

SEQ ID NO: 768213 - DNA, 614 bp, Homo sapiens
gttctcccttttccctgaactcccagctagcttctgtggaaattgtgacatacttttctgcaactaaccacttaatttattttcttttaaaaaataataatagtaattgtatatttatttcttcagacccctcttttgagaccttttgcctctctgtgccttcatgaagtctaatcgatgccctctatcagagctttgcagagtgctggagcagcatcaatccttttgaacagaggtttggctgccatcgcgcagggccaggactcaggccaggaaagtgaggtgcttaggctgcgcacttcacagcatcacagggttgttcaagtgctgatgttgagccrcaaatagtctaatattactgaaaacttagggataaggatgtggaatagtgagaggtcagactggacaggcaggtgagggcctgatcatggacagccttctatgtcctggaatgcaatcagactctatcctcaaagcaaagtggagccaagtgcagtgtggatcaggagagaaacgtgatttcagatgggcatgttagaatgactgacttcatatcagcctagagaatcagctggaaagagcaagaaaccaaagacagaaaagagtttagactg

SEQ ID NO: 768214 - DNA, 614 bp, Homo sapiens
catgcttattccaccttacctagagcaacaactatgggtctattaataaagtacttaagactatatacaattaaacatgaaattcctcagttacagaacacacaattcaagtgctcaatggctacatgtctagcggtgattgtgttgcacagcacagatacaggacatgtccatcatcacacagaacgctatttgtcagaaatattccaaattaacaaacaaacccaagtggaaaaattactcttaaatacgtccaaatagttgcaaacaggctttgttttccaggcagaagaatttggaaaatgctagraatcgtatctcacacctatctgcaaaattgcaatgttatttagagtaaggatgttctgacttcctcttcgtgacaagcagacagacatctcaggaagcactcaggtagccggctgcttctgggaaggagtggggcagggctcctctcacatttacaggactgttcattcacatcatctcttatggatcatggtgcctcaactccacctgccaacattaatagaaaatgacagttgccctttgctccaggagtctctggtcttatggctaactgatgctatttttagaaacattatctacctgta

SEQ ID NO: 768215 - DNA, 614 bp, Homo sapiens
catgcttattccaccttacctagagcaacaactatgggtctattaataaagtacttaagactatatacaattaaacatgaaattcctcagttacagaacacacaattcaagtgctcaatggctacatgtctagcggtgattgtgttgcacagcacagatacaggacatgtccatcatcacacagaacgctatttgtcagaaatattccaaattaacaaacaaacccaagtggaaaaattactcttaaatacgtccaaatagttgcaaacaggctttgttttccaggcagaagaatttggaaaatgctagaaatcgtatctcacacctatctgcaaaattgcaatgttatttagagtaaggatgttctgacttcctcttcgtgacaagcagacrgacatctcaggaagcactcaggtagccggctgcttctgggaaggagtggggcagggctcctctcacatttacaggactgttcattcacatcatctcttatggatcatggtgcctcaactccacctgccaacattaatagaaaatgacagttgccctttgctccaggagtctctggtcttatggctaactgatgctatttttagaaacattatctacctgta

SEQ ID NO: 768216 - DNA, 614 bp, Homo sapiens
catgcttattccaccttacctagagcaacaactatgggtctattaataaagtacttaagactatatacaattaaacatgaaattcctcagttacagaacacacaattcaagtgctcaatggctacatgtctagcggtgattgtgttgcacagcacagatacaggacatgtccatcatcacacagaacgctatttgtcagaaatattccaaattaacaaacaaacccaagtggaaaaattactcttaaatacgtccaaatagttgcaaacaggctttgttttccaggcagaagaatttggaaaatgctagaaatcgtatctcacacctatctgcaaaattgcaatgttatttagagtaaggatgttctgacttcctcttcgtgacaagcagacagacrtctcaggaagcactcaggtagccggctgcttctgggaaggagtggggcagggctcctctcacatttacaggactgttcattcacatcatctcttatggatcatggtgcctcaactccacctgccaacattaatagaaaatgacagttgccctttgctccaggagtctctggtcttatggctaactgatgctatttttagaaacattatctacctgta

SEQ ID NO: 768217 - DNA, 628 bp, Homo sapiens
ggagaaattcatgctattgggctcatgcaaaggcttattcttgctaccaagaccatttcatatatgggacaattgaacaagcacccgggtagccacagaaagagcacaccttatggccaaagaagtaggccatctgttcctctgattattgagggtagcctcagaaaaacttgtagaagatagtgctaacctcataatgaaatatttataacccttttgaaagtcatatcctgtcccttgcagggtacagtgaggggtggctgagcagtttgcatatattaggtcaattccccaagctgcwggcctcattcattcacaatttaccttggaaatttcatattttaacctttattgtggatgtccattgataaaaaaattaaatatcaatcatggtggctgctaacagcttttccaggtgcttgagtcaacttattaagtaccaaatcccaagaaagcacatgcagataaataaatgtagctcaaatttaatattctattccttcatttgcttctgatggtgaaagagggatttgaactttctgagcactcaacctcaaaagtatgctttacctaattcagtatcccgagtgtcaggattctacttcttttaactaaggctttaccttcg

SEQ ID NO: 768218 - DNA, 628 bp, Homo sapiens
ggagaaattcatgctattgggctcatgcaaaggcttattcttgctaccaagaccatttcatatatgggacaattgaacaagcacccgggtagccacagaaagagcacaccttatggccaaagaagtaggccatctgttcctctgattattgagggtagcctcagaaaaacttgtagaagatagtgctaacctcataatgaaatatttataacccttttgaaagtcatatcctgtcccttgcagggtacagtgaggggtggctgagcagtttgcatatattaggtcaattccccaagctgctggcctcattcattcacaatttaccttggaaatttcatattttaacctttattgtggatgtccattgataaaaaaattaaatatcaatcatggtggctgctaacagcttttccaggtgcttgagtcaacttattaagtaccaaatcccaagaaagcacatgcagataaataaatgtagctcaaatttaataktctattccttcatttgcttctgatggtgaaagagggatttgaactttctgagcactcaacctcaaaagtatgctttacctaattcagtatcccgagtgtcaggattctacttcttttaactaaggctttaccttcg

SEQ ID NO: 768219 - DNA, 707 bp, Homo sapiens
gttgggctaggtatagaattctgtataaaaccaaaatctgtttttctcacaatttttaagttcttgatcttttaacttctaaaattaatattcaatattcctgctgagaacttcaaaaacattccaattcctaattctctgtgcgtaacctttctcctctatggaaccttatataattgtctctttggcctcagtgttctataatatcataggaatgtatcttgatgtggttctatgtttayttatattactggatgctcagtgaaccctttcaacctgtatagtcttgtctttcggttcagaaaaattttcttgaataattcttgaatgttttagctgatttattccttttttgtctttctggaattcctatttttcagttattggacttcctgggctgatcctctaatgtccttatcttcctctttttttgataatctatatatttttgctctgggagaattcttcaagttattttctggaccttcaccccacttctttaggtcactgtgtgccccagttctaagattttctgggatttcgtagtataaatattattgttcttgggttttccccagaactggtttagcattcagttttttctggttttctaagtctattattacatagatctgtctgcttggcacattccaacattttgatgctgttgttttgtgctatctttgttctatgagtgttcttactgt

SEQ ID NO: 768220 - DNA, 703 bp, Homo sapiens
gttgggctaggtatagaattctgtataaaaccaaaatctgtttttctcacaatttttaagttcttgatcttttaacttctaaaattaatattcaatattcctgctgagaacttcaaaaacattccaattcctaattctctgtgcgtaacctttctcctctatggaaccttatataattgtctctttggcctcagtgttctataatatcataggaatgtatcttgatgtggttctatgtttacttatattactggatgctcagtgaaccctttcaacctgtatagtcttgtctttcggttcagaaaaattttcttgaataattcttgaatgttttagctgatttattccttttttgtctttctggaattcctatttttcagttattggacttcctgggctgatcctctaatgtccttakcttcctctttttttgataatctatatatttttgctctgggagaattcttcaagttattttctggaccttcaccccacttctttaggtcactgtgtgccccagttctaagattttctgggatttcgtagtataaatattattgttcttgggttttccccagaactggtttagcattcagttttttctggttttctaagtctattattacatagatctgtctgcttggcacattccaacattttgatgctgttgttttgtgctatctttgttctatgagtgttctta

SEQ ID NO: 768221 - DNA, 703 bp, Homo sapiens
gttgggctaggtatagaattctgtataaaaccaaaatctgtttttctcacaatttttaagttcttgatcttttaacttctaaaattaatattcaatattcctgctgagaacttcaaaaacattccaattcctaattctctgtgcgtaacctttctcctctatggaaccttatataattgtctctttggcctcagtgttctataatatcataggaatgtatcttgatgtggttctatgtttacttatattactggatgctcagtgaaccctttcaacctgtatagtcttgtctttcggttcagaaaaattttcttgaataattcttgaatgttttagctgatttattccttttttgtctttctggaattcctatttttcagttattggacttcctgggctgatcctctaatgtccttatcttcctctttttttgataatctatatatttttgctctgggagaattcttcaagttattttctggaccttcaccccacttctttaggtcackgtgtgccccagttctaagattttctgggatttcgtagtataaatattattgttcttgggttttccccagaactggtttagcattcagttttttctggttttctaagtctattattacatagatctgtctgcttggcacattccaacattttgatgctgttgttttgtgctatctttgttctatgagtgttctta

SEQ ID NO: 768222 - DNA, 703 bp, Homo sapiens
gttgggctaggtatagaattctgtataaaaccaaaatctgtttttctcacaatttttaagttcttgatcttttaacttctaaaattaatattcaatattcctgctgagaacttcaaaaacattccaattcctaattctctgtgcgtaacctttctcctctatggaaccttatataattgtctctttggcctcagtgttctataatatcataggaatgtatcttgatgtggttctatgtttacttatattactggatgctcagtgaaccctttcaacctgtatagtcttgtctttcggttcagaaaaattttcttgaataattcttgaatgttttagctgatttattccttttttgtctttctggaattcctatttttcagttattggacttcctgggctgatcctctaatgtccttatcttcctctttttttgataatctatatatttttgctctgggagaattcttcaagttattttctggaccttcaccccacttctttaggtcactgtgtgccccagttctaagattttctkggatttcgtagtataaatattattgttcttgggttttccccagaactggtttagcattcagttttttctggttttctaagtctattattacatagatctgtctgcttggcacattccaacattttgatgctgttgttttgtgctatctttgttctatgagtgttctta

SEQ ID NO: 768223 - DNA, 618 bp, Homo sapiens
aaacatatgagctaaaacgataagctttttagaagacaatatagacgaaaatcttagaaactttgagtttggcaaagatttcataaataaaacaaaaaatgagtgcagaagaaaatttaaattagactatataaaaagaaaaaactcttggttttcaaaaggcaccattaaaaaataaaaatgcaagactcagacagggaaaaaaatttgcaaacacctgtaagatgaagcatttctacctagaatatataaaagtactcttttaacttaaaaataagacagacaacccaataacaaatggacaaatgatctgagcaaacacttcaccaagtaagatgtgcagattgcaaataagctcatgaaaagatgttcaacatcgctactcattagggaaatgcaaattaaaactgcaatgggataatacyatatacccactaaaatgactaaaattataaagactgacaattccaagtgcttgtgagaatgtggaacacctggaattctcatatcatgctgatattgactacaaaacgatatggccactttgggaaacaatttcttactaagttaggcattcacttatcacatgatccagcaatgccacttttaattattcat

SEQ ID NO: 768224 - DNA, 624 bp, Homo sapiens
gtggtgtcaaccatcagccactgtcttgaaaaacatcgtcatccacggcaatgccctgtgtggtactggagttcccagcaccgtacacggacaccatctgcagcttgcagctgtcagacatgctgtgattacagatatgtacatcctcaaaaggacatatttagcctttactgcaaaatgtcaaagacagatgaaaatgtctattttagctgaatatggtcctacttcccttatagccaggtttacttttttctttttgttaactttatttttgttyaattgatacataggagatctccctagtttcccacgcatgtgtaatttagtacgcctatcatttgtaaaggccaaatcagatagttgggatatccgtcactttatatatttgtctttttttaggctagaaacattcaaataattctctccgagctatttggaaatatacaaaagatgattgtaaactagagtcagcctactgatctagcaaacactaggttttatttcttctgtcacactgtatatttgtattcattattatttttattactcttgagatggagactcactatgttacctggactggacccaaactcttgggctccagtgatcctcccgcctcagtct

SEQ ID NO: 768225 - DNA, 682 bp, Homo sapiens
gtcgagactccagcaagcatttccgcttgtcagattgagtaaaacatccataatttgctctaattggccccaaactttggtagtgcctgccttggactatacgtggtctctgagcaccctccttgccactccaaaaaatacccaaatgtttttttgcaactggaattggccaagaccctcctgaaggtactcgactgaaggaggtctggggctttctggcacaggatgggaccatctcacttgcagctggaggttcttctgccatctggctctgtggcctctgatagggcrtgcacattcctgagcctgcctccctgtattaagtgttcctggtgggtagtgggaattaagtgttcctggtgggtagtgggaattaagtgttcccagtgggtagtgggaattaagtgagacaatgtattcagagtgaccagtgcagagttcacccactctctggagttaataatcactccctcccaataaacaggaagctggaggtccccagccatcagtccatgagtgctgagccttgtgggggtgagaggcagtgggaaccaggaaggacctgctgacgagaaggagaattcctaattcctgagcacctaccgtgtgcctgccctgagccaagcactgagtccactttctcctgccatcctcactggggcctctgaaatgcagctgatct

SEQ ID NO: 768226 - DNA, 492 bp, Homo sapiens
agcgcacctgtcatcggatgaattgattgggcatcttgtcgaacaccagcacgggttgtgctaatgattcttagctccattgcagcatagctgcaaatcaatcactgtcttccagaattcctggatatttctttttttctaatcagaaagacagtagcaacacctggtgccgaagaagtgtagagatgctgatttgtgtttagagcatgctcagagttgaccttctcaaatcaagaggaaaataaagagaaraagagagaattcctcggccctggccagaaatggagggtggacttacagccaggtgctcaggtaccagattggtggttactcttctggcctcgagggcatcagcgttgctgacatgaacacagcagcccctttcagtcaggttttgctttcagttacccacgatcaaccaccgtctgaaaatatgcagtggatcactccagaaataaatcatttataagttctaaactgtgtgccattctg

SEQ ID NO: 768227 - DNA, 605 bp, Homo sapiens
acagggatccctcctgtgcccaggctcgccctagccacaggattgccagagaaaatataaaaatacagttaaatttgaaatccagataaacaatgaaacaatttttagtataagtatgcctcaaatattttataggacatacttatactaaaatatcatttattgcttatctgaaattcatattaacatgaagtcctgaattattattattattattattattattattattattattttgagacagagtctcactctatcccccaggctggagtgcaatggtgtgatcttggctcactgcaacctccacctcccaggtccaagagattctcccacctcagcctcctgagtagctgggawtacaggcacccaccaccacgctcgtctaatttttgtatttttagtagagatggggtttcaccacgttggccaggctggtttcgaactcctgatcccaggtgatccacccacctctgcctcccaaagtgctgggattacaggcatgagccaccatgcccggccctgaatttttatttgctatggcaagcccgccttgtcccatgaatgggggaagggtgttggagcccattgcctgggtttgaatc

SEQ ID NO: 768228 - DNA, 627 bp, Homo sapiens
tgggctggcgaaagtgcaggtagctccttggtcgcctgacccagtgccttggatgctgcccgtgtgctgggccggaggacaccattccctcgcgcacaacaagccctgtgaggcatcacggaggggacgggagctcacacctcaacctagagaccccgtctactcacaaccacttttaaggaatgcagctaaacagggggctcagatccctgttcagggcccttctcacgatcccaccgtaacagcccagccctgygggtgcctggctgcagtctccttctccccagcacttccagacctggcagcccggcccaataccagcggccgtggggcctgacctggactgaaccccggagcccggacaggctggtcactgcagggcggggcctgaattctgcagctgctcctgaggccaaaagctgttctgagggtggggtgggctgccaggctccaccgacgccctcccgcactgcaggcgcctctctggagcctcacatatgtccaccatcagattccatggtctgcggtctgtggagacggtggggaccgactctctcaacacctctgtgtgaactggatcccctgggggactggggggagtaacagaaaagctcacagagtgcccct

SEQ ID NO: 768229 - DNA, 627 bp, Homo sapiens
tgggctggcgaaagtgcaggtagctccttggtcgcctgacccagtgccttggatgctgcccgtgtgctgggccggaggacaccattccctcgcgcacaacaagccctgtgaggcatcacggaggggacgggagctcacacctcaacctagagaccccgtctactcacaaccacttttaaggaatgcagctaaacagggggctcagatccctgttcagggcccttctcacgatcccaccgtaacagcccagccctgcgggtgcctggctgcagtctccttctccccagcacttccagacctggcagcccggcccaataccagcggccgtggggcctgacctggactgaaccccggagcccggacaggctggtcactgcagggyggggcctgaattctgcagctgctcctgaggccaaaagctgttctgagggtggggtgggctgccaggctccaccgacgccctcccgcactgcaggcgcctctctggagcctcacatatgtccaccatcagattccatggtctgcggtctgtggagacggtggggaccgactctctcaacacctctgtgtgaactggatcccctgggggactggggggagtaacagaaaagctcacagagtgcccct

SEQ ID NO: 768230 - DNA, 586 bp, Homo sapiens
atatgtccaccatcagattccatggtctgcggtctgtggagacggtggggaccgactctctcaacacctctgtgtgaactggatcccctgggggactggggggagtaacagaaaagctcacagagtgcccctgagcccagagctgtttctgatctctccttaaaagcgatctccgtggaaacagcccagatgaccatcagtggacgaatagatacacaactgtggtccatccacacaacagaatatcatccagtcacagaaagggaggaagcgctgatcccatgctacaacatgggtgaaccccaaaaacatgataagagacgccggatacaaaaggccacgkagcatgtgattttacctccactgaatgcccagtagaggccaaatcttgagagacagacagcagcggagccagggggaggagctgagtgttcgggagaggggagtgagcagtgaccgatcacaggttcaggctttcctttggggcgatgacaatgttaggaagtcgagagaggtgtttacacaaccttgtgaagatattaagtgccactgaactgtgtgctttaaagtcgttcattttatgtta

SEQ ID NO: 768231 - DNA, 632 bp, Homo sapiens
tttcctttataaattacccagtctctggtatttcctcatagcagtgtgagaacagactaatacagtgaattgctaccagtagagtgaggcgttgctgaagagacacctgaaaatgtggaagtgactttggagctggatgacaggcagattggaacagtttagagtgttcagaagaaaataggaaaatgtgggaaagtttggaacttcctagagacttgttgaatggttttcaccaaaatgctgatagtgatatgaacaatgaagtccagactgaggtggtctcagatggagaagaggaacttcttgggaactgaagcaaaggtgactcttgctatgcttcagcaatgagactggcatttttcccctgccctatagatctgtggaactttgaacttgagagagatgatttagggtatgtagtggaaaaaattcctaagctacaaagcattcaagaggaaacagaacacaaaagtttggaaaatttgcagcrtgatcatgcaatagaaaagaaaacccactggggggagaaattcaagcccgctacagaaatttgcataagtaatgaggagcctaatgttaatcccaaagacaatggggaaaatgtctccagggcatgtcagagaccttcatgg

SEQ ID NO: 768232 - DNA, 617 bp, Homo sapiens
gttgataccttgcaaattccgaagaacttctctagtactgaactatctcaaaaagggttttccagatgtgaaaaataaatataaatgttgtttttaaggtgctttcatagatttttacttaatcttgagtcatttatttatttctaatttttgtcttgttatcttggggtaaacggaactaactaaaactttctgcaaattttacaaacctctgaaatttgaacatgctagaatatacccaagaatctagtccaaaactaaacgacctgtagtaaaactggtgctaacctaaaatagacgggtatttgaagctagaataataaaaaaaaaaaatcattctgttgattgctttaaatctacaggagtaaatttacyggagtaaataagaaattagtcctcccctttctcttctcttcccttgttttcttctgccttttccctccctcccttcctcttcttccctttttcatttccttctctttcttccttccttccttttcttccttgcttcttttctttctctctttctttctttcctatttttactcagtttccttgccattccatatttccatggcttaggaaaaaattcataatgctcagatttattaaaaagt

SEQ ID NO: 768233 - DNA, 624 bp, Homo sapiens
ggtggttttttttcagaagttctataagtagctctgtttaaaaatttcaaaatggacaaagggcatgaagctattttgggaacaaaatgtcagtactgaaggtatactttttcatatattgaactaatgcgtggttcagaaagttctttgctaatttatcaaaatgtcatcttcaggtactgggttggaaaattagtaactgctagagtgtgtgaccattgaaaggtgcaggagcctatcaatttttagcttctagcataaaacgatgtttatcattartgttgagatttaaaatgtcagaagttcttaaagttcttagcataaaaaataaaggctaaaagttaagcatctattatactataaatccagatatacaaaaggaaaacacagtactcaaaaagcattaaatgtactcaaataaattacctaaaaagtgcataggtaacaacttttaaccgtgtaatggcaaatgtcttaattttatccttataaaaatgattcctgttggcttttaattactctaaattgaggaatggtgtattattagtacactcttcacatatatactattcactcttaaatacttatgtggccaatcatatgttgggcaaataatactttttg

SEQ ID NO: 768234 - DNA, 624 bp, Homo sapiens
ggtggttttttttcagaagttctataagtagctctgtttaaaaatttcaaaatggacaaagggcatgaagctattttgggaacaaaatgtcagtactgaaggtatactttttcatatattgaactaatgcgtggttcagaaagttctttgctaatttatcaaaatgtcatcttcaggtactgggttggaaaattagtaactgctagagtgtgtgaccattgaaaggtgcaggagcctatcaatttttagcttctagcataaaacgatgtttatcattagtgttgagatttaaaatgtcagaagttcttaaagttcttagcataaaaaataaaggctaaaagttaagcatctattatactataaatccagatatacaaaaggaaaacacagtactcaaaaagcattaaatgtactcaaataaattacctaaraagtgcataggtaacaacttttaaccgtgtaatggcaaatgtcttaattttatccttataaaaatgattcctgttggcttttaattactctaaattgaggaatggtgtattattagtacactcttcacatatatactattcactcttaaatacttatgtggccaatcatatgttgggcaaataatactttttg

SEQ ID NO: 768235 - DNA, 551 bp, Homo sapiens
taaaagtaacagaatggaaaataaatgccaggttaacattactcaaaagaaagccagaatggctatgttaatatcagttataccaatttcagaacaaagaatattacttgaattatatgacaaagttcasttcaaaatgataaaggggttaatccatcaagaagacataacaagcctaaatgcttatgcttctaataatagagcttcaaaatacataaatcaaaacctgatcaaacttcaaggagaaacagacaaatacaaaattttaatcagaaattgaaatacccttttttctgtaattgatagaatcagtagacagaagatcaataagaatatagaagatttgagcaatactaataaccaatttgacataattgacatatatataaaacatcccacccaacaggagcaaaatactcattcttttcaagcatgcacagaacttttaccaagataagcaatattctggatcacaaaacaagttgcagtacatttaaatggatccaagtcatgcaaaatgtgttttctgatcttaatggaattgaaatgga

SEQ ID NO: 768236 - DNA, 611 bp, Homo sapiens
tcatcaaaaagtgggctaaggacatgcatagacaattctcaaaagaagatacacaaatggccaacaagcatatgaaaaaatgctcaacatcactaattatcagggaagtgcaaatcaaaaccacaatgcgataccacctcactcctccaagaatggccataatcaaaaaattataacataataaatgttgatgtggatatggtgaaaagggaacacttttacactgcttgagggaaggtacactagtacaaccactatggaaaacaatgtggagatttcytaaagaaataaaagtagatctaccatttgatccagcaatcccatactaggtatatagccagagaaaaagaagtaattatatgaaaaagatacttgcacatgcatgtttatagtagcacaatttgcaattgcaaaaatatggagccagcccaaatgcccatcaatcaataagtggttaaaggaaatgtggtctgtgtatatcatggaacactacccagccataaaaatgaatgaaataatggtattcacagcaacctggatggaattggacactactacgctaagagaagtaactcaggaatggaaaaccaaacaccacaggttcacactca

SEQ ID NO: 768237 - DNA, 611 bp, Homo sapiens
gaatggactaatacattgatgactaatattccattgtatgaatgtaccacagttcaattatttgtttacctattaaaggacatcttaaatgcttccactttttaacattcaaatgcagggtttttttttgtggacatgtttccaattaatttaggtaaatatctgggagcatgattgcttaatcatacagtaaatctatcttttgcttttaaaaaactttgactctgtcttccaacatggctgtaccattttatattacctccagcaatgaaagaaaattcctgttatctcattcttgccagcatttggtggtgtttttgttaatttttaagagctttttatatacataggacatttgcctatgtctgtgtctgacttaraaattcttctaatttatcttttgctgttgaatttcacttaaaataagttctggtgatgcagtttttaaaatattttattatttgttccttttctttatcttctttgttttaacatttattttaggttcacgggtacatgtgcaggtttgttatgtaggtaaattgtatgctatgcaggtttggtgtacagacttattgtcacccaggtaataatcatagtcacttataggt

SEQ ID NO: 768238 - DNA, 635 bp, Homo sapiens
atctaccattctggagttggaggagagtagccctcttctcacagctccaccaggcagtgcccactggggactctaagtgggggctccaaccccacatttcccttgtgcactttcctagtagaagttcctcatgagggttccattcctgyagcaggcttctgctgatcatccatgtgtttctatacatcctctgaaattgagatggaggctcccaaatctcaactcttgccttctgcacacccacaggtctaacatcatatggaagccaccagggcttggggcttgcaccctctgaagccatggcctgagctatattttggccccatttagacacagctggatctggagctgctaggatgcagggcacgatgtcttgaagctgcacagagcagcggggcattgggtctgacccatgaaaccatgtttccttcttagacctctgggactgtgatgggaatgtcttccatgaaggtatctgaaatgccttggaggcattttcctcattgtcttgtcaataatagattatgacattattccattgatatgatatgactattaatattcgaatcctctttaattatgtaaatttttcagctggttgaattcctcctcagaaaatgggtttttcttttcta

SEQ ID NO: 768239 - DNA, 530 bp, Homo sapiens
attcagtggtattgggaattgtgatttaatgggaggtttttgagtcatggaacatcacctttataagtgtcttggtgccattatcatgagagtgaatttcttataaaaggacaaatttggccttctcctgtgtgcactcatgctctctctctctctctctctcacaccctcttttgcctttctaccttctgctatgagacgatggggctctaatgtcttcaccagattycagtccctcaattctggacttcccagcctgtagaatcacaagccaataaaggtctgtttattgtaaattacccaatatgtaatattgtgttatagaaacagaaaatagattatggtactgcatttaccattcttctaataggaaacagtatactcaaattaagtaacttaagaaaactatttgcaaagctgtatgcagagtgtagggaatccacaatgtataatacagtattccaggaccagaaatagtggaacatcataaacacctggtggcttgaaggaacaaaggcaagggccagtta

SEQ ID NO: 768240 - DNA, 610 bp, Homo sapiens
atcccatcacccaggtacggagcacagaacccaatacttttcaacccttgcccccttcctcctccttccctctagtactccccaattcctatttttcctgtccttatgtccatgagtacccaatttttagctcccacttataagtgagaacatggagtatttggttttctgttcctgcattagttcgcttagagtgatggcctccagctacattgatgtaactgcaaaggatatgaatttgttctttttcatggctggatagtattctatggtgtatatatgtaacattttctttattcaatccaccattgataggcacytaggttgaatccatgtctttgctattgcaaatactgttacaaagaacatgcaaatgtgtgtgtcttgattgaatagtttgttttcttttggatatatatacctagtaatggaattgctggatcaaatagcagttctgtataaagttctctgagaaatcttcaactattttccacagtggctgaactaatttacattcctgccaacagtgtataaatgttctcttttctctgcagcctcaccagcatctgttgtttgttgactgtttagtaatagccattctgaatggtgt

SEQ ID NO: 768241 - DNA, 629 bp, Homo sapiens
taaaataaaagcattctctgcttattatttccaattgtttctaagaagatggctgactacatataaggaatctagaaaataatcagtccagaattaattaatcatgaatactgttagtgacatactaatggcaggtgtctggcattgttctttgtgtattagaggtatcatctcttgtatccattacacaaaccttagaagtaggtatagattcattttctgcagtgggtttctagtctactaatgaagcagtcatgtacttatactcatcacatacacagcaagtattttatttttcttttatcarttgtgcataactttttaaaatttttatttccataggtttttggggaacaggaggtatttggttacatgaataatctcttctgtggtgatttgtgagatttcggtgcacccgtcacccaagtagtatacactgaacccaatttgtagccttttgtctctcacccacttcccacctctttttcccagagtccccaaagtccattcttatgcctttgcatcctgatagcttagctcccacttatgagtgagaaaatatgatgtttggttttccattcctgagttacttcacataaaataatagtctccaatcccatccaagttgc

SEQ ID NO: 768242 - DNA, 582 bp, Homo sapiens
aatcaaaaatgacaaaagtgacataacaactaatcccacagaaatagaaaagattctcagagactattatgaacacctctatgtacataaattagaaaatctagaagaaatgaaataattttttaaaatacacaatatctcaagaatgaatcaggaatatattgaaaccatgaacagatcaatatcaagttytgaatttgaatcagtaacaaaaaacctacccaccaaaaaaaagccttggaccagatgagttcacagctaaatctgccagtcgtacaaagagaagctggtaccacttctactgaaactattccaaaaaaatcatgaagcagggattttttttgcttaactcattctatgaagccagcagcactctgataccaaaacttggcaaaggtacaatgaaaaaagaaaactacagaccaatataccttatgaacatagataaaaaaaatcctcaacaaaatgccagcaaactaaatccaacagcacatcaaaaagttaattaccatcatcaagaggcttcattcctggaatacaaggttagttcaacatatacaactcaataaatcggactcatca

SEQ ID NO: 768243 - DNA, 582 bp, Homo sapiens
aatcaaaaatgacaaaagtgacataacaactaatcccacagaaatagaaaagattctcagagactattatgaacacctctatgtacataaattagaaaatctagaagaaatgaaataattttttaaaatacacaatatctcaagaatgaatcaggaatatattgaaaccatgaacagatcaatatcaagttctgaatttgaatcagtaacaaaaaacctacccaccaaaaaaaagccttggaccagatgagttcacagctaaatctgccagtcgtacaaagagaagctggtaccacttytactgaaactattccaaaaaaatcatgaagcagggattttttttgcttaactcattctatgaagccagcagcactctgataccaaaacttggcaaaggtacaatgaaaaaagaaaactacagaccaatataccttatgaacatagataaaaaaaatcctcaacaaaatgccagcaaactaaatccaacagcacatcaaaaagttaattaccatcatcaagaggcttcattcctggaatacaaggttagttcaacatatacaactcaataaatcggactcatca

SEQ ID NO: 768244 - DNA, 647 bp, Homo sapiens
tttgatagaatgatcagagcatgaataatttgctatttgctattaatgggagtagaaagaaacaaggggaaatgatgaaatacttttaagaacctcatcatggcttatatgacaaattagaattccatggaacttcatacataaaacaattctagactcattcactgattattccatgagtcttcaccaattgcattggggtaatattacacaggctgggatgcagaacaggaaagctaaaaaagatatctccaggttttcatggcctcccacaactacaaagaaactgcctttctgaagatgtggacagagctgrattcctgagataataaatccaaccacactgaaataggcacactgaaattaacctggcaaggactagagctaaaactactttttcctagtttggaaagtttgaaggaggctttgagaccaaataaaatttcccagaaactgaaaaacccatttgtcttggtagaaggcagagagaagtattccacaaattggaaagctgatagctcagctataaagcacaaaggtgtctctagaacctcacaagttctcagaggtgaagcttcacagaacagagatacctgagctcaatctctaaatatataaaaccagtaatgaactgagagaaattaaag

SEQ ID NO: 768245 - DNA, 606 bp, Homo sapiens
attagaagtgccagttagaactttattaaaagaaacagaggcttttactttaaaatgttggctatatatatttttcattgacattaaaatttaatattgcaattctgtgagaaattacaaaaaatgatcagaaatttrcacctttgggaagctcgtctgtgcttggtaatcaggtccagtttatatgtcaggaattccctagtgttgtcagagcttaaatgacctaacagtctgcgaatgtcacatttaaaattctgtcttcatgcctgactctcagcataaatgaattaaacagcaagagaggcagcaagtcaaaatgtacttaacagtaagagtgagcgatgaaacagtttgtggtttgctcactattggatattagaatctgtccagaaaagttcacctagaatgaaatctgaaagaggaaacaagaattaacctttaagatggttgaccagatgaaatgtcagtaatatttttatagcatggatgaaccaataaactacctggtttatgtaacagctgcatttgactgttatacactgtgtgaattccaagataaaaaatttttgaccctggtgaaaattttagattgtgatttttttggca

SEQ ID NO: 768246 - DNA, 559 bp, Homo sapiens
ataaagattactatccacaaccataataaagcacactttttttttttttttttttttttttgagatggagtctcgctctgtcgccgaggctggagtgcagtgcacgatctcggctcactgcaagctccgcctcccgggttcacsccattctcctgcctcagcctcgtgagtagctgggaccacaggcgcccgccaccacgcccggctaatttttttttgtatttttagtagagacggggtttcaccatgttagccaggatggtctcgatcttctgacctcgtgatccgcccgcctcggcctcctaaagtgctgggattacaggcgtgagcctacgtgcccggcctaaagtacacatttttaagtccacgtggaatattcatcaaaatagacaacattatggaccattaagaaaagtctaaataaatttcaaaaaaagaatggaaataatacagagtattatttgccagagtattattgtgatgtttgaccacaatggaacagagttaaaaattaactaaaacgtttctagaaaatgccaaaatatttggaaattaagca

SEQ ID NO: 768247 - DNA, 552 bp, Homo sapiens
actttcaaagaaatagcagaaaaacaaaacaaaaaaaaccactacatttgacactaaaaccatacaagattaattttaatcattttctatgatttagaagatacgtatcagtgtttttacatgcaaaagagaaatcattgtgaatatcacttattttttaaagcataagttagagctttccctttagttagatataagcttttaaaataccttgcttatgcatagcaattacagtagttacaactgtatgtcacactgtatagttccttatcacctgtttcagtaccttaaaggaaaagyaccaaagattgctataaagcatgcaatctttaaatcacctaagagaaatataaaatactattttcttgctccatctctcaatatacatgctctaaatatacacatctttgctataaagaaataaacattataaaaattagatatattaattttaataaaacccagtttaaactgcttaccaagtatctctgaatctctggctggcaatatagttcaggccaagcaaactaagtccattactacttgcagtgt

SEQ ID NO: 768248 - DNA, 689 bp, Homo sapiens
ttatcctttaatattacatgaaaatcttgttcagggagagccaaatttcaccctttcataagtctactattaatgtcaacctcaatttttaataaaactttatagaaaaatttatcaatcttaatcagtttggccataaggtgagattcttacaaaccttttataactctttagaatttttgttaaagagcagatcagtgctctaagaaaaacctattgtgcttttttttaaatgttcactttatgtaaaaactgaataatatccctttaactgtagccaatatgtttacacacagaatctcttttacaattaatttttacaaaccttccacaacttgctcaacatttagctttgtcttatctaatttaaaacaatctgttaaccctctacactaggcaaaaatttacattytcatgctttcttataatttttttttaccaaaaacaaattttactttccttatacaccttgcatgtaaaactgttatttcagtagtctcaattacatgttataatagtaactcttagcagcgtttacttttggtgcataaatttcctttcatgaatcctttcatgacttacacagaccacctacgtcatgcttggactttctgacttgtcctaagcatccctgtttttaaccaaccagttattttacttcaggacaagaatttaccatacaggatcct

SEQ ID NO: 768249 - DNA, 683 bp, Homo sapiens
tttattcaaaaggcaaacaaaatttttttattatcctttaatattacatgaaaatcttgttcagggagagccaaatttcaccctttcataagtctactattaatgtcaacctcaatttttaataaaactttatagaaaaatttatcaatcttaatcagtttggccataaggtgagattcttacaaaccttttataactctttagaatttttgttaaagagcagatcagtgctctaagaaaaacctattgtgcttttttttaaatgttcactttatgtaaaaactgaataatatccctttaactgtagccaatatgtttacacacagaatctcttttacaattaatttttacaaaccttccacaacttgctcaacatttagctttgtcttatctaatttaaaacaatctgttaaccctctacactaggcaaaaatttacattctcatgctttcttataatttttttttaccaaaaacaaattttactttccttatacaccttgcatgtaaaactgttatttcagyagtctcaattacatgttataatagtaactcttagcagcgtttacttttggtgcataaatttcctttcatgaatcctttcatgacttacacagaccacctacgtcatgcttggactttctgacttgtcctaagcatccctgtttttaaccaaccagttat

SEQ ID NO: 768250 - DNA, 551 bp, Homo sapiens
ggcttggcttgcccaacctctactccacattacttcatgggtgccttcctgggctgcagaaggtagaaagctatctttcccaacttttgcgcaagggttccagatgcacaaaatagatgcattcttctaagacacagaaattgaaaatggggttgaggccatctacctgcctttttctagttgttttttttctactggtaagcaattttgcacagactgttttctataacagagtttctgtgtccattktctagcctgagtgttaagaggcagttgcagtggcagcatctaggatggcttcctgattcttcattggtggatggcaagatattcttgggctgaataattccaggacagtactatggtcttctgggaatcattcctggtgggccagtctatagccgattcttttggccctttcatgatttttttcctaattacttatggcttttagcctattctttctgtcttaagatgactacattggtttctgttttctgcactgaaccttgactgatacgggccttggaaaatattgctgggacatggaa

SEQ ID NO: 768251 - DNA, 551 bp, Homo sapiens
ggcttggcttgcccaacctctactccacattacttcatgggtgccttcctgggctgcagaaggtagaaagctatctttcccaacttttgcgcaagggttccagatgcacaaaatagatgcattcttctaagacacagaaattgaaaatggggttgaggccatctacctgcctttttctagttgttttttttctactggtaagcaattttgcacagactgttttctataacagagtttctgtgtccattgtctagcctgagtgttaagaggcagttgcagtggcagcatctaggatggcttcctgattcttcattggtggatggcaagatattcttgggctgaataattccaggacagtactatggtcttctgggaatcattcctggtgggccagtctatagccsattcttttggccctttcatgatttttttcctaattacttatggcttttagcctattctttctgtcttaagatgactacattggtttctgttttctgcactgaaccttgactgatacgggccttggaaaatattgctgggacatggaa

SEQ ID NO: 768252 - DNA, 543 bp, Homo sapiens
  misc_feature 444, 458: n = A,T,C or G
aacttcttgtttaaatacatatttttcagttgaacaattttacaggactacattgagacatttctcgttgcatattcaaagctgtctagtatgtggcttataatatcgattacttcttttcttttaatattccaaattatcctgcctttattctagctacagcatctctttgatgtattactaaaacaatgtcttcatttgttaatgtctgctccatggtcagtgcttcctatttctgtccccaccaccctccatcattaagcacagtctaagcaatgctgatattatgatctttcattactctggtggaarccataaataactcctcactattgcctagataatatagtgagaaatctttcagctgtgcatagcaaagaggccatgatttagttctcttcagaagcgtttgctgcaaggtctttcgaatttttttgctccagncaccaactgcgtanaggggtcctaaacgtgtcaagcattttcatgactctggcatttccatattctgggccctagttttttgaaaaaacctctaccatt

SEQ ID NO: 768253 - DNA, 543 bp, Homo sapiens
  misc_feature 444, 458: n = A,T,C or G
aacttcttgtttaaatacatatttttcagttgaacaattttacaggactacattgagacatttctcgttgcatattcaaagctgtctagtatgtggcttataatatcgattacttcttttcttttaatattccaaattatcctgcctttattctagctacagcatctctttgatgtattactaaaacaatgtcttcatttgttaatgtctgctccatggtcagtgcttcctatttctgtccccaccaccctccatcattaagcacagtctaagcaatgctgatattatgatctttcattactctggtggaagccataaataactcctcacwattgcctagataatatagtgagaaatctttcagctgtgcatagcaaagaggccatgatttagttctcttcagaagcgtttgctgcaaggtctttcgaatttttttgctccagncaccaactgcgtanaggggtcctaaacgtgtcaagcattttcatgactctggcatttccatattctgggccctagttttttgaaaaaacctctaccatt

SEQ ID NO: 768254 - DNA, 600 bp, Homo sapiens
ggtcaaagctgaaacaatttgagcagcaaaataaatagcttaatattggagtataatccaaggtataagtaaatattttgagcccacgtggatataaaccgatgattgaatatgtacataaataagtggggagaatagacaagtctcccaattacagtaattccgaataatttacgtaaatatttccccctcaaggagttggaatatcactccccttcccttaattgtgagttgcatataataactttcttctagagagtgcagtataaaaaagaagaaagggtaccttacagtgaagaaatctgacaaacaccacctcagctaagtaggtgatcaaggtcaacatcaacaataatgtcatgtaaatgtcatttattcctgatgtgaggtgataagaatggcactttttctctgcagtcttcctcctaaaaacctgtaacctcartctaatcatgagaaaagacatcaggcaaatcccaactgagggagattttacatagtacctgagcagtactcctcaaaactgtcaaggtcatcaaaaacaaagaagtatgaaaaactgtcacagccaagaggaacttaaggaaacataataattaa

SEQ ID NO: 768255 - DNA, 614 bp, Homo sapiens
ccactgaaaatgactctctggttcaccacaataaatccattaagcaggcatatttcaggccacaaggttctgataaagtgagtccatgatgaaaatgtaattagacctgaattgttccgactcccgaaccatccataaatataaaatacctgcttttcacagctccttgtcctctacctttccatattgaaattgacagctgctatacaatctgcaaatgaaagaacctatatttgataacatttattctttggggctttgagaaaaaaaaaaaggctccattaagcagcatttttggtttggcacttacataggctagtttgattcttmtttccaggtcactctgcatcatctcatctcaaccttgacttgggaattactaaaggaatcaaactacaaggctcttattcctctcataggttattgtagaaatagtggttgacaggactgatgtcagtccagctaactcatgatttattgcctcctatggagagagtaatgcaataaaaccttagtattaaagatcctgctgcattttattctgttgtcactatttagtcattgcttgtgctttccctctaagttctctgcctgccacttccctgttttcttca

SEQ ID NO: 768256 - DNA, 560 bp, Homo sapiens
gaaggctgattataaaaatagacaccattatttctgccttcttgtatccatgctgtgttcagtatgagtcttcacttctctcattgagaagtggagcctttttttccatctattaaatctgggctggcctcacagcttgtggcttgattcagccaacagagtatcacagaagtgatatcagctggttccaagcctaaacattaaaagagcttgcctgcttcctcctgctctcttcaagctcttcctgctgccaggtgaataagctcagggaagtttgctggagagcaagggactctgtggracaagggtattcatctgaagctgtccagcccatccttagctgatcacatattcatgactaaatctaaccaagaccagcaggacttcttattccaaattgctgactgatagaattgtatacttaataaatgatactgatttgggctactaaatgtggagaatgtttattacgtgtcaatagccaacagctacaactccatttatagggaatagcggttgttcagaatttagattgtgtgttagaaggctagatcctgacc

SEQ ID NO: 768257 - DNA, 638 bp, Homo sapiens
ttctgtttactttggttattctaagtttctgagttgattagattattgatataaaactttctctcttttataacatatgcatttagtgttataaatagtgttccaaaaactatcttttaattgttatatttaaaccatttttatttaatataattatttatatgttagagataaatttcatcatttattttttgttccctgttttttattattattattattttcagacagagtctcgctcygttgcccaggctggagtgcagtggcgtgatctcggctcactgcaacctccgcctcctgggttcaagcgattcttctgcctcagcctcccgagtagctgggactacaggcacgtgccaccacgccgggctaattttttgtatttttagtagagacagggtttctccatgttggtcaggctggtctcgaattcctgacctcaggtgatccacctgctttggcctcccaaagtgctgggattacaggcgtgtgccatcacgcctggcctattatgcttttttttttttaatttctctgttttctgtttcctgctatttctatttccttagtatttcagtggtttctgtaggtatttgtatcgcaaaaaaattaaccttgcccgaagagaggtctggcct

SEQ ID NO: 768258 - DNA, 605 bp, Homo sapiens
gaaatgcaaatcaaaaccacagtgagttaccatctcacaccagtcgaatggcttttgttaaaaagccaaaaataacagatgttgatgaggctgcagagaaaaggaaatagttacaaacttttggttggaatataaaatagtttagccactggagaaagcagtttggagatttcttgaggaacagagttgaaccactatctgacccagcaatactgttactgggtatatactcaaaggaaaacaaattgctctaccataaagacacatgcactctcatatgttcactgcagcactcttcataatagcgaagacatggaataaatccaaatgcccatcaatggtggatgggataaatatatatgamgttttcatatatatacaccgtggactactatgcagccatagaaattgaaatcatgtcctttgcagcaacatagatgcagctggaggccattagcctaagctaactaaagaaaaaatagaaaacccaatgccgcatatgggacttagatattgagagggagagggacggggctgaaaaactacctattgggtactgtgctcactgcatgggtgacagattaatttgtactgtaaacctcagc

SEQ ID NO: 768259 - DNA, 557 bp, Homo sapiens
ttcagtatttattcttctctctgccactgggttatgtaacaaatgatgattcaaacctgacaattaaattgcattagatcagtgctcctcacacctaaggtgcaaaaggaatcccctgggattcttgttaaaatgcaaagtctggttcagcagacgaagggtggagcttgagggtctgcatttctaataaacccctgatagataccaaagccgcccatgcccagccatactttggacactaggagtagaaagggtttagaattcagtgtatgtttccagcaaaatacatccagaggaaaaagacggcgagaaaaaggagtgggggaagtatgatctwctgatttaaaaaaatatggtatttacaaatcaagtataagttgagacttatagatttaaaaacaaaactatcctttgataaaagcatacattcaaacgaaaacaccgataagatttagttaaatgtattgttgatatcctcacagcagtttgttgtttaagctgatgaggagaagcacaggggccggttctcctttgattggcacaatcctttcgagaaa

SEQ ID NO: 768260 - DNA, 607 bp, Homo sapiens
ttgagggtagtgactacatcctattcttttttctgtttcctgtagcacctagcagaaactctactgtatagaaggtattcagctagctgttcaatgactagatggacagatgaatgagtgaatattttatttcctgttctgattttggtaggattcttaagtccayaattccctaatctgcccactttgctcagagatacaaatttcaaaattccccttaaccttggagagaccctagggaagggcagcattagcttaagcagtgggagacattttttcagtgtaggatcttttttcctgtgtgttttaacctcttagagagaacgtgggttctttattcctgctgtggcacggtcctgtttttattagcgtacccaactagactgcagcacatatgttacaatgagccatgccacatgcaaagataaacaaatgtgatgttaatgagatttgagtgtagaatctgtttttctcttctatagcctccagagttttagagaattttgtcactgtcccatttaactggcatctttcttaaagggctggctttattcataccaattattttctcattctctccctgattcctttcactcaaattcagtaa

SEQ ID NO: 768261 - DNA, 625 bp, Homo sapiens
tcacttttgcaaaactgaaaagtggagatgtttgtatcaaaagcaccttttcaatgtgccctatcccattctcctccataaaggaagataattttgcttcaaaacttattctttgcatttacctacatacacgtacatataaaaaagaagtacattttttcaatgcatttatgaaatgaaaataatcacaatatgcatattgttctatatgctgcttttctcacggacacacacatctcttcataacagaatataytggcctatcttatttttaatggggttataatattctagtacaggtgcggcccataccttttagaacctttcctctactgatagaatattagattattcatgattttttcatattacaaacaaagctacaatgaatatctctgaatacacttcattatatacttgtttaaagtttttaaatgatagagtcttagaccacaaaaaggctaggtgaatatttttttttcttgaagtgtaccacatactggatgcaatgctccatttatttcacaagatgatcaagtctaaagggtggatatgtgagacacttagcattatgattcaattctaattttcatcaggaacttggaagacccatgagctgtttaga

SEQ ID NO: 768262 - DNA, 625 bp, Homo sapiens
tcacttttgcaaaactgaaaagtggagatgtttgtatcaaaagcaccttttcaatgtgccctatcccattctcctccataaaggaagataattttgcttcaaaacttattctttgcatttacctacatacacgtacatataaaaaagaagtacattttttcaatgcatttatgaaatgaaaataatcacaatatgcatattgttctatatgctgcttttctcacggacacacacatctcttcataacagaatatactggcctatcttatttttaatggggttataatattctagtacaggtgcggcccataccttttagaacctttcctctactgatagaatattagattattcatgattttttcatattacaaacaaagctacaatgaatatctctgaatayacttcattatatacttgtttaaagtttttaaatgatagagtcttagaccacaaaaaggctaggtgaatatttttttttcttgaagtgtaccacatactggatgcaatgctccatttatttcacaagatgatcaagtctaaagggtggatatgtgagacacttagcattatgattcaattctaattttcatcaggaacttggaagacccatgagctgtttaga

SEQ ID NO: 768263 - DNA, 617 bp, Homo sapiens
agttagctttctgtagccaattcatgaaatctctgtccacccagccttgacaatgagccatatctaaaatattacattattagaacacctaccaaaatctcgaaagcacaggttgatgtccttagtattgctatgtatgaagttactaaaactggagaaaattctacttcagaaataagtactgtttaggttttatattaaaagttcagaccagcatatcaaagggtgctycttagtgaaatgatttagaattgttgcattccaaaagcaggttttctctttaatttttacatctctctctcaaaatattatacttcatgaaaaagacaattgatgtggatgacaacaacaaagtcttgaaattaagggcacactaattgtccttactggggttaggggaagagagatattattttcaaggaacaaaatattttcctttacaatctttcattcatgagaaaattggaatataaatttattacattgtgaaagtatcataaaccatatacctttgtatctaaatgcagcttcaaaaaagtaaataattgaagttttatttctcctctaaataacttgaatttttttctttaaaaatttatgtatttatatgtccccat

SEQ ID NO: 768264 - DNA, 558 bp, Homo sapiens
gttttttaacagctttattacataatacacaataaattgcacatatataaaatgtacgatctgataattttgatatatgcatatacccttgaaaccatcaggaaaatgaacatattgatcaattgtaaaaatttccttatgcccattggtaatcctgcttgcaggccctcctcatcatccctccttcctgtctccattcccaagcaaatacttacctgctttcaagtacatacaatgatttgaatttttgttatttctatacttttgatttattgatttacttggtatggcttcttgctctcagaataattgttttaaaatttattctcatagtttcatgtatcaatagttcatttctttttaattactaaatagtattcatatatatatatatakagagagagagagagagcacaattttcttgtctgttgacctgttgatagaaatttagattatttctggtgtttggctattatcataataaagctactacaaacttttgtgtacaaatctttgtatgaacatatgctttgctttttcttggataaatacgtaga

SEQ ID NO: 768265 - DNA, 592 bp, Homo sapiens
cacctggttctttctagccttgtttactcttccctataaaagaaaagctctttctgcctgattgttgagacaattgtagataatacagtcaatgcattctcccattgcaatagttcctttcccccattgcagtagtccaccatcctcaattgtaatagtctctccttactaagtctcaatttgttttttattttatttatttatttatttattttatttttgagacagagtctcactctatctcccaggctgcagtacagtggctcaatctcacctgactgcaacctccacctgccaggctcaaccagttctactgcctcaacctcctgagtagctgggaccacaggctcaggccaccatatctggctgattttkgggggtttttttgcttgtttgtttgttttagtagagacagggtttcaccatgttggccaggctggtctcaaactcctggcctcgtgatctgccaaccttggccccccagagtgctgggattacaggcatgagtccatttattttatgacactgtgtaaatagtttctaatagtttttagaagtatatttttcctgtgtcatatttgcttttatttat

SEQ ID NO: 768266 - DNA, 534 bp, Homo sapiens
tttcacccacagaagcctgtggccatccatccccttcccccaacaagtagtttctgtgtaaggggaaaaggtgatggtctgtgctgacttgggagagggaggtccctgggaattatttacagtcagcagctatgaagtagtttatgggaaattaatagtttatagaacttaattatggcagggggtgagcagtgagaggatatttggggattgcaagaaaggtgatcaactttcctggacttagatctgcagagatgccataacccttcagaagatgtagctgggggaaataattraaaccatttatttatcaacaaagccagagtggtatataaatatacaatggacaagaacttcatctgaagagatcgatgaaaaattaaattagaaggtaactataagaccaagtgagaaagactgaaataaataggtttttgcttttgtttgagagagaggggtatgtctgtgttccccgaatggagtgcagtggctagtcacaggcatgaccatggctcactgcagcctcagctcctg

SEQ ID NO: 768267 - DNA, 510 bp, Homo sapiens
actacggtaaaaaggcaccctgttaattgtctgtcgttatcaaggggctgcaaactgcatcaaagataggcctgcaatcctggctttcattacggaggtcagaacatttttattgactgtctattattaaaattttagagggctgtcaatcatttggctgccctagatataggaatctggatggaaagcccccagtaatcaatcttatttataaaaacaacaaatgactagagagtcgttgatataatcatttgttgatatagatgccaatcaggatttctcagccccttcattctatagcggtcatgcacagcgaaggtgggtaggtaacctaagaartaacagagacacttcagagcaggcggttccaacgttaacaccaaagacagaaagctaacaagtctgatcatcattcttggttctcttcccctgcttcttgtctttgccctcggaaccaaccccaaattctgacaatagcacggtcaaaaggagaggcgtgcttcctgactt

SEQ ID NO: 768268 - DNA, 463 bp, Homo sapiens
  misc_feature 1, 2, 3, 4: n = A,T,C or G
nnnnaccttccagccccgggtgaagatctatccattcatcatccatccattatcacccatccatccattatccacccactcactcacccatcatctactcacccatccatctatctacccatcatccatccatccaaccatccagtaattactgagtggccatgatgggctagaccmtgtgcaacacactgaggataaagtagaaaacatgatagtctgtgtacccgagcagattgctggatatcagagcagggagatgtcagggagtggggaagaaatcccaccagttcatcagtttcttgaaataggcccagattcagaatgaaatcctccctgaagtctttgattcgatggggatggtagagaagcacaggaaagcaaagcacagcccagctgagaagctgcaagagatgtcatcccttccagcctgtccctctcctagtccttgtgtgctgacccatga

SEQ ID NO: 768269 - DNA, 511 bp, Homo sapiens
acaccagaggtgaggcagggcctcacgtttcttggaacacaagctccactggtgacaccagggataacagcagcaatcaccaccacctcccgaaggcagcgcaggctggtcagcaagagctcaggtcctgctctcacatgacccgggctgaaagctggctctgcctcacttactggcagcctgttacctggagcaagctcgttacctgtttgcaccttggggttttcaagtgtaaagtrcgactgaagtagaactcacctcttgaggattaagagattaaatgggtcaacacatagaaagctcaaacaatgcctagtgcagagttaagctcaaaaaagaagctctcagactaataactgcaataatactgtcctaaacgacaatgacagcagaagcaagaacaaagcgcgtgccaggcaagctcctcagtgccttacccgtgctctgctactagggttcctaacacatccacgtggtgtgggcattgtgactctcctacatgttacagagg

SEQ ID NO: 768270 - DNA, 601 bp, Homo sapiens
ctgtccaaatttaccttcctttatttttacaatttttattttaagttcaggggtacaggtgcagtatgttcagatttgttacctaggtaaacgtgtgccatggtggtttactgcacaaaccatcccatcatccagatattaagcctggcatccattagctcttctttctgatgctctccctctgcctccccttttgctgtgcagaagctctttagcttaattagatcccatttgtcaatttytgctttggttgcaattgcttttggcgtttttgtcatgaaatttttgcccacgcctaattcctgaatggtattgcctagattttcttctagagtttttatagtttgggattttacattttttaacccatcttgagttaatttttgtatgtggtgtaaagaagaggcccagtttcagttttctgcatatggctagctagttctcccagcacaatttattaattagggaatcctttccccattgcttgtttttgtcagatttgtcaaagatcacatggttgtaggtgtgcggtcttatgtctgagttctctgtgcttttccattgatctatttgtctgttcttataccagtaccatgctgtt

SEQ ID NO: 768271 - DNA, 576 bp, Homo sapiens
tggctttgatattctttaatttctttgttatatcagccctttttttatgtcatgttgaaaatgtgccttcctggttaaaaggatggatatttggaaacaaggcagtttgaatcacagcacaactatttaattttaaaagacacttttttctaacctatataattcttaattgttctggacatgtaggctatttcagtgaaatttagaaagcaaggccatttcctacagctaagccctttaatgataattatgacaccaacccccaaagacatggtttcatggctaacagatcactctcagattttgtggggatagagtgttggtagcaggaagcggcagaggaattcaactccttcttgagcttcttgtgttttataatcctccctatktcccacctgttttgtctcagaggggataagtcaatagagctgctgctgttcacaaagccatgcaggtaagagacatgtaccccttgcttcaaagtcttagtaaacttatagagaaaatatgatttgattgcctaacaatatatttataatttacataccaaataagtgaaacgtaaggaaaaaactg

SEQ ID NO: 768272 - DNA, 635 bp, Homo sapiens
cactgtaaaacacaaaccacaacaatggaaaactatagagccttgcttccaaagcttagtcatccatacttttctgaaatgccaggaattgggatatggaaaagagctcagaaaactacaggaggcatccatggaacaaccacagaattctcattctggaaagctttggcagggctatgttctcatcatttcactttaatcaccttttaccccttggggccatttgaggaccatgaaattctaagaatgggtagaaaatactcccccaaccaaataagaaataagattcttttgtttctatatgtcctggattctgcatgctgcctgctcggagaggagagccttacactggagtttgcaggcatttgctgctgtctcaataggtagatcttcarttaggtcccagcttcatgccatctgttatttctaaagtattttggccttcagctggaggaaggtgacaggagagtgttctgttcctgcagaaaatttgcttgtcatcagagtaactgtgtactgttgaaacagctactgcctacatttcactgcctcttgaaagctagcattttggtgtgaatcaattatgaaaagtgatgcacactgccccaacacgcacacatacacatacaccccgc

SEQ ID NO: 768273 - DNA, 635 bp, Homo sapiens
tttccctctgactcttggatttctcaattttctagaaacaatgcagattgcttttataacatttaattctaaaccttttaacatttaagataagttttgaaatattccgtatacattctaattctgaaagcatttcttgtgattttgcatagagtttaggaacattaaaattctacttaaaaatttatcatgttttgtgataattttccattctttttttttaatcttgaaattttacaagcacagccacatcagagagggtgaaaattaaaactgaagatgaaaaagaatttttggaattggatcattgaagaacatggggtagaaaatgccagaaaagtaaagggagccaaggtttgaaagcagaataaatatagtattagtgtagtgggtatagraagaggcagaaagactaatctcagtgaatcaaaacattcttgtaagcaagaaacacaattgtgtttaactgaagacaggttagctgcaacagcctcgaatgtcaaacatggacatgcagttaatggggagtcattaacggtttcagaaaagttaatgatatgataaatggtagttttggggattattctggttcgtgaaatttaaaataaattttattctgatatttttgacattta

SEQ ID NO: 768274 - DNA, 598 bp, Homo sapiens
ctgcaaaatggtataactaccttttttttttttttttgaaatggagtcttactctttcgccaggctggagtgcagcggcgtgatcttggctcactgaaacctcgaacttcctggttcgagctattctcctgcctcagcctcacgagtagctgggattacagacacgtgccaccatgccctgctaatttttgtatttttttagtagagatggggtttcaccatgttggccaggatggtctcgatctccttggcagwttcttagaaagctaaacataaattttccattcagcaatcacagttctagttaacttatctaatggcttcatataaatatagatagttacacacacatgtattcatatatatttttgtatacacaatttagtatacaagcatgtattcctttgttctgtcagcttagagggactagaaacaactatatcctgatagcaaaaatcttacctagtgttcaaatcttgatttctcattctccaaccaaaggaactaggacgtttaggaaaaaatagttaattataggactgaggcagaaaatagacaagatgagcctggaatctcttatagttctagagaaaaagaa

SEQ ID NO: 768275 - DNA, 596 bp, Homo sapiens
actaaaaaaaaaaaaaaaaaaagctgggtgtggtagtgtgtgcttgtaactccagctactcgggagattgaggcaggaaaatcgcttgaacccaggaggtggaagttgcagtgagccaagatcacgccactgcactccagcctgggtgacagagtgagactctgtctcaaaattaaaaaaaaaaaatcaatgaattaattcatgtagtaactacaaagtagctttgattaaagtgtcaaatgatttagtagaaaaagtagataacaagcatgaatcaatgaggaatttcagtaaagctggaccttatggaaagaataatttggaaaaaaatggaaaatataaattaagaaggtatttaatagaatcactaratttgatagatgaggggaaaatcagccaacttgaagataaagcactagtacttatccaaatggaacataaagagtaaatagagtaaaaaataaaaacaaaatagagcatccactagatggtagggaaaggtttatagagcagtactaaatggtgccaatatacatgtgatatgagttccaataggaaaagaaacaggatatagggttcaagttatatttgaagac

SEQ ID NO: 768276 - DNA, 465 bp, Homo sapiens
ttcatgaggcagcgtgagtacaacatcatgaaaaaattggagccagaatcatccagcaaatttactcttgaattcctgatcagataattgtgaaacaaatgtcttgttttaaagttctaaatttaggaaaaattttaattgttatgggcatcacatagttctgtaaagagaaaaatgggtgacagaaacatttgtgatacctttttattcatcacaatccacaaactccctgtttgctagaggtaaattacartaactctcaaattacaaatttttgtttgaagagtaggatatttcctattagaactactcaagcaaaaacactttcttgtttctctgtctatgaggtatgctcttaatattgccactttatttaattttcagaatcgacttaatacatttatgaaagaaaaatgcctgtttggattccctactattccgtaaaaaccccaagcttcctgtcct

SEQ ID NO: 768277 - DNA, 614 bp, Homo sapiens
agtagtacttgatttctgatcccagctatcctgtcaattagctctatgaccttgggaaatcaaatttctgggcttcaaaatatgcataggtaatgtgagaaagttgtaattgatagataatttcaaaatttattttaagtttgtatcatttttatcatgcaattagtcaagacatagataaatagaaaataatcaatatatgttgaatccttacatatatatacacacatatgtatatatatttatatatactatatatattgagttacatcttaataagccatggtatatcgaaacaaactcattgtaatttgaaaatatcataaataaaaaatgtatttaatgctcctaacctattaaacctgaaggttagcttaacctagwctactttaattatgctcagaatagttacattatcctgaagttgggcaaaatcatcttaacaggaagcttattttattataaagtgtttaatattttatatagtttattgagtattgtactgagtgtgaaaaacagaatgtttacatgattactcaaattatggtttctactgtgttgctttcacactaccatgacatcaaaaaatcgttaagtcaaactattataagtag

SEQ ID NO: 768278 - DNA, 564 bp, Homo sapiens
ataattacagaaagagcactgagtcagctattgtgaataaagaataaataacttaataaacattttatgatctacaattggacatgactttatacatccttaaaaagtggttgtgccttttttatggatgtgtcattgcagtattgtgcctgtccaaaagagaattttctacaaaaattattttaaaatagcccccctttaatttttacttaaaatatatatttttgttacgtagatacaaaaacacatagggtagaatgtcagcatacatcctgagcaagccagggataatgttggaaaacaagtaaaacaggaatacacagtttttcaaattttattggcaataaacagcccttctttaccttcagagttagtaatgatgcgtytatgatggatttttaaaaactgtatatgctaacaacatttctgctaagagaattatggttcttaacataagatagggcaaatcccagttcaaagaaagcactgtgtgtgtatggaaagcaaacagcagactggaacagatacgcatttgataagcaaaataaagtgttttctgtataa

SEQ ID NO: 768279 - DNA, 535 bp, Homo sapiens
tgcatattatttaggatgcccagaatcctggaaggctgccatattgtgagtgaatcatttgctttgactgcatggacgacatgagtcatggaggataacttgtggtttgctcaaggtaacaaaacaaaaggtattattttacaaatacaaaaacagtcttaaatcaatcctgtaaggtgtgtggaactgaaagctatagactagaatatttttaaatattctgaaatctcttcatactactctctagctgagtatcagttctgtctttgttctagattatttatccacaatataatcaaatcactctgtattacaacctgttttcatcataagcctcatatcatatgtgttttgtttaaaatattatttattasatggattttattatatatgatagattttatcatactcaagtaattcatactaaagcatttgagtgtgtttcaatttgtaaataatattagaaataagtggagcaaccagctagaaacttaaatatatacatacatatattcatatacatttctgataaatg

SEQ ID NO: 768280 - DNA, 622 bp, Homo sapiens
gccagttagaatggcgatcattgaaaaagtcaggaaacaatagatgctggtgaggatgtggagaaatcggtattcatttttacatttgtttgacccatattagataaatatctttttctttataggctttaatggagttgtagttggatataattatgttttctaaatagaaatttatttgtttaataattaaactttttttcaactttattttaggttcgggggtataagtgcgcatttgttacatgggtaaattgcgttatcactsaggtttagtgtaagaatgatcccgtcacccaggtagtgagcaaaatacccaataggtagtttttcaatcctacccccaaccacactccctctctagcagtccccagtgcccagtgtctgttgttcccatctttatttccatgtgtactcaatgtttagctcccactaataggtaagaagattcagtatttggttttctgtttctgtattaatttgcttatgataatggcatccagctgaatccatgttgtcaaaaacatatgattttgttcttttttatggctgcatagataaatatttaataatgtttttctagtacttttgtgtgttgtaatggtatatttttaaaaatatt

SEQ ID NO: 768281 - DNA, 501 bp, Homo sapiens
accctggggtcgccactatgtattaaatataggatctgctgtcagagtagttgatctcaatagagaaatcctacagggttttgaggatacatgttatacaaaaattctatcccctgtacagtccatgttcacatatgaaggcaatgggaaaaataatttcaaatacatcaaaatttagcaagcctaacaagaaacaaataaataatgactaagagggatagggcattaaaagttccataygattctgaaagaacatgttgcccaactttctgtgtcatttcatattgtccttaaaagtattttaacaaaatataattttatatagacattagtttcttttgcagtcaccctaagaacacactaatattttaaataatattactattaagaaagagaccctataaaaatattggtaggaaaggtgattaggtagctcaccaatattggtagatactagattaccatccagaaatcaacaacattgttatatgttagtaatta

SEQ ID NO: 768282 - DNA, 555 bp, Homo sapiens
tagaggagtgaccacagacacaattatgctataacataccatctttaagtgaagcctgccttgactctgtagaatctgctaagtgggagtgtacctgcttgttgagactgatatattttcacaataggacagcagcaaaactaggatcatcccccaaagccttctaagaatkagttctcatgtttctgtgatctgagacactggaccatagaatgctgattctggtcattgcaactgtttttaatctgcctctattgaaactgtgtggaaacataccataaagctaaaaaagcacatcgatgacacagtactgttttgctacttgtgcatgcaaggattaatatttactggcttggcacattatgcacaagagaaattttaattctgggaaatctgctccttgctaacaaatttaactttaatttgaaatctaatattagagacttaccacctgaaatttgtagttgactttctgctagattacttaacattatgtatgaaaaattaaatatctcttatatttcttgacttttagtttagtttctgactttttag

SEQ ID NO: 768283 - DNA, 566 bp, Homo sapiens
actaattgtgaccagacaaattaggagggtcctctgagttaggactgctagatttccatcagcagttccttctgagatcccctccacatacacagacacacacaaaaatgagacagacagaaggccttccaaatcagatccctaaccaagaactccaagattatcccttccaaactatcctcctatattccatctgagaaatctcctcagatcttcctgattcaggagaagtctcctgaaccaagactcttcctactagttagggagagccaactgagacctccccaggagmcaaactgagacagatgacactcggtggtggagctacaaacagacatcccacaatggggctacagacaccccaccatgaggttacagacagataccctgtgatagggctatagttaagggacatcttcccaggactatttctgtattgcaattaaatccatgcacattgggtcagcagtgccccaccagtagacagtaccagagccagcccctagtccaagagaactaggaggcctcttgggctggcctccggatccattgctggagggggctac

SEQ ID NO: 768284 - DNA, 600 bp, Homo sapiens
tctatgtcccaggaattttgtactgtaaaccagtactctgtcctcataacgcctataatctagagacattgaactgtgagcacaggaataagcagtgtactttcagaatgtaatcagtgttctcaagggaggagattatgatgtaacagagcttcttttcatctcaaaggaaggccattaagaagggccagtcaggacaggtgatgctggcaggaagggagccagcctgcgacgtgctgggaagacaggcagagagactatacgtkcaaagggtgtgaggcaggcatgagtttgcagaaagtgtgctaagggcctggagcagagtgagtgagggggaacaaagacagggaggtgttaaagggccaggaggggctggaccctctggagcattgatgactatgctgtggaatgaatttggatgttgtttaaggggaatgggaagtcattgaaatattttaagtagagaaatgggatgcactgatttaccttatgaaaagagttctctagctgctttgagagaatggattatagtggggtgatatagtttggacgtttgtcctctccaaatctcgtgttgaaatgtgatgctcagtgttggag

SEQ ID NO: 768285 - DNA, 601 bp, Homo sapiens
tgacctcgtgatccgcccacctcggcctcccaaagtgctgggattataggctcgagccaccatgcccagcctatgttattatttttaaggtctcctataacaaaaattccccactgaaattaattaggtatctttttatctaagtatataaaatataaatagtattagatataaaggagaggtaactatccatggaatttttcttttcttttcttttctttttttttttgagatgktatcttgctctgtcacccaggctggagtgcagtggtgcgatcttggctcactgcaagctccgtctcctgggttcatactattctgcgtcagcctcttgagtagctgggactacaggcgcccgccaccacacccagctaattttttatatttttagtaaagacggggtttcactgtgttagccaggatggtctcgatctcctgacctcgtgatccgcccatctcggcctctcaaaatgctgggattacagatgtgagccaccgcacccagcctatccatggatttttttttttttttacccttttcttagcagctgctcaaccattcattagcaccacattctgacttgggagacagggcatggac

SEQ ID NO: 768286 - DNA, 601 bp, Homo sapiens
tgacctcgtgatccgcccacctcggcctcccaaagtgctgggattataggctcgagccaccatgcccagcctatgttattatttttaaggtctcctataacaaaaattccccactgaaattaattaggtatctttttatctaagtatataaaatataaatagtattagatataaaggagaggtaactatccatggaatttttcttttcttttcttttctttttttttttgagatgtwatcttgctctgtcacccaggctggagtgcagtggtgcgatcttggctcactgcaagctccgtctcctgggttcatactattctgcgtcagcctcttgagtagctgggactacaggcgcccgccaccacacccagctaattttttatatttttagtaaagacggggtttcactgtgttagccaggatggtctcgatctcctgacctcgtgatccgcccatctcggcctctcaaaatgctgggattacagatgtgagccaccgcacccagcctatccatggatttttttttttttttacccttttcttagcagctgctcaaccattcattagcaccacattctgacttgggagacagggcatggac

SEQ ID NO: 768287 - DNA, 589 bp, Homo sapiens
cctgattccttttgggtaaaagagcattagttattgatttttttttttttttttttttttaatgacagggtctcaccctgtcgcccaggctggagtgcagtggtgcaatcttggctcattgcagcctctgcctcctgggttcaagcaattctcctgcctcagcctcccgaggtgctggaagtacaagcacacgccaccatgcctatctaatgtttgtatttttagtaragatgtggttggccaggctggtttcgaactcctgaccttaagtgatcctcctgccttggcctaaccaaagtgatgggattacaggcatgagccactgcccccggcatgatttttttttttttaattccaggtttgaggctcctagacaatcagtcagttcataatcctccaagtcgcgaagtacccactcccaccaacttttataaacccctgtcttcgaacaagatgaccttggctttctttcagcctcctttgctgaagccgttgactggtatcaccaggataaacacaggcgtgggctgaccacagggagcagaggtgctgggcctgatttagcctctaggccttgagggggtagctg

SEQ ID NO: 768288 - DNA, 545 bp, Homo sapiens
tcctggtcagaaatagaattgttgggaaatttcttacctggacaagaattctgagatgttcagaggaggacagacagctaccaggttccccagaaagacacaaaggagcaaggattccttggttctgcctcgagtcccagcatgagtgggtctcctggctgcagtgttcatgagttctgtgtcttggtcgagctgtctcagtggagacttgactgtgcaggatgctgtgagtttgtgtgaagttcatggcaatcctggggggaaaggcctttcttttcgtggctccattcattgtactttttctctgggtcaaaaaagggatatactatcaggctttcagtaaattttaaagagttattgaattttgaatrcattttaaagaacattatacacatgcgcatataaaagatataaagaaaaaataaaatgaatatacatctactgtgcatcaagcttaagaaattgtttttatatatattgtatgttattattatttagttcaaaataattactaaatttccattgtaataaccttgaaaactccc

SEQ ID NO: 768289 - DNA, 679 bp, Homo sapiens
ttcatgtatttatttgtcttccatataccctctttaattaagtgtctgttgaaatcttttgtttatttttaaatgggttgttttcttacagttgagtttcgtgagttctttatatatcgtgcttttattgtcatgtctagtaacagcctaaacctaggtcatgaatattttcttctgtgctttattctaaacattttataattttagactttacatttaggtctataatccattttatttatttctatttgtttaaatttttgtgggtacatagtaggtgtatatgtttgtggggtacctgagatrttttgatacaggcatgcaatgtgaaataagcacatcatagaaaatggggtgtcccctcaagcatttattcttagagttacaaaccaatccaatgacactctttaagttattttaaaatgtacaattaagttattattgactatagtcaccctattttgctatcaaatagtaggtcttattcattctttctaattattttttgtacctattaaccatctccacctccctctcagcctcccactacccttcccagcctctggtaaccatccttctactctctatgtccatgaattcaattgttttgattttcagatcccacaggtaagtgagaaaatgtgatgtttgtctttctgtgtctgggttatttcactta

SEQ ID NO: 768290 - DNA, 585 bp, Homo sapiens
ggatcccgctcagctgtgctgctcaaagcctttacctgtagcccctctcccttcattcagccccctcgccctcctccctcacgctcctcattctttgctgagttagccctgctcctccatcacatcatattttgaatgcttctccttcctggtggccttccctgacccctccaaaatcttggccgtatgtacgcagcctttttttcctctctcactctcctacgtgcttatctcacctgtactgatgtcatcctcagggcatttgtttaatgtctgtcttaaacaagtgttgacgaactagggctaatgggccaaatttggcctgtggtctatttttgaaagacccttgatatgagaatggttttttatattttttagtgttgttaaaaacaagcatacaaaaaatacaaagaaaatatgcttcagagactgcawgtggcctgcaaagccttaaatatttatgctctggctctttatagaaatgtgtgatgatccctggtcttacctactatcaactccctgggagccagaatcttgtctgttttatttgctgctgtgtctggaaaatcttgcaaggggtctggc

SEQ ID NO: 768291 - DNA, 591 bp, Homo sapiens
ttgaaatggggatcagggaaggtttcttagaagaggcagaatttaagctgaggctgacgggatacaaagaacttagccagtgtagctagagccagaggtggaggtgggagtgttgtaggagttgggcacaaggtctggaggcctcagtaggatgctacctgtgagttcctactgtgagtaccagtgttgggtgttgtcagggcctcctgggcccacgggagctcctgtgggggcagttgccacctatttctcccttcctcatcgggtcttccctgtattctttgtccacctttttttctttcccttctttgttcctaaagccttggccctgacagcaatctcaggggggacaggttaatggcctctagtctagatacagtcccwtgggggtaggaggtgtgcacgggctagattgtcatccttctggtctggggactctatgatcccagatcttaaacaccagactcatctttctctgcgatatcgtttccagtagagcagttctgaaccatcagtcacatggaggctgtgctggtctctctcccatgcatccagcatcctggcaccacttgtcccagaacatgaataaaa

SEQ ID NO: 768292 - DNA, 635 bp, Homo sapiens
atattccatggtatggatacaccatgttttgtctctccatacacaagctgatggacatttgggttgtttccccctgttggcaattattaacaatgctgctagaaacgtttgtgaacaagtttttgtgtggacatgttttcatttctctgtagtgtaaacctagaagggaaattgctgggtcatatggtaactctatgtttaactttttgaagaacattcaggctgtttttccmaagtggctgcaccattttatactcccatcaacagtgtaggagggttacgatttcttcacgttctcaccttcattttgctttttggttataaccatcctatttggtgtgaaatgccatggctttgatttctatttccaatacctaatgatattgagcattttttaatgttctaattggccatttgtaaatcatcttccttggataaacatctaatcagatcttttgcccatatttaaattgaattatttatcttgttatcattaagtagtaaaagttctttatatattctagatacacattctttaccagatatatgatttaaaaatgtctcttccattctgtgggctgtctttttagtttcttgatataataatatcctttgagcataaatatttttaattt

SEQ ID NO: 768293 - DNA, 668 bp, Homo sapiens
ctacccagtagcgtgtagtcccagctactcgggaggctgaggcaggagaatgacaggaacccgggaggcggagcttgcagtgagccgagatcctgccactgcactccagcctgggcgacagagcgagactccgtctcaaaaaaaaaaaaaaaaagaaaaaagaaactgttattaacagctctataccaacaaattggataacctagagtaaatggataaattcttagaaacacacaacctaccaggattgaatcaagaagaaaccgaaagcctgaacgaccaataacaaataaaaggactgaagaacctcccaacaaagagaagctcaggaccaaatggccwcacagctcaactcttccaaacattcaaaaaagaaccgggcgcggtggctcacgcttgtaatcccagcacttcgggagtccaaggtgggcagattacctgaggtcaggagttggagaccaccctgatcaacatagtaaaaccctgtctctactaaaaaaatacaaaaattaaccgggggtggcggtgcgtccgtgtaatcccagctactttggacgctgaggcaggagaatcgccttgcagtgagccgagatggcgccactgcactccagcctgggagacggagcgagagtctgtctggggaaaaaaaaaaaaaaaagaaagaaaaa

SEQ ID NO: 768294 - DNA, 668 bp, Homo sapiens
ctacccagtagcgtgtagtcccagctactcgggaggctgaggcaggagaatgacaggaacccgggaggcggagcttgcagtgagccgagatcctgccactgcactccagcctgggcgacagagcgagactccgtctcaaaaaaaaaaaaaaaaagaaaaaagaaactgttattaacagctctataccaacaaattggataacctagagtaaatggataaattcttagaaacacacaacctaccaggattgaatcaagaagaaaccgaaagcctgaacgaccaataacaaataaaaggactgaagaacctcccaacaaagagaagctcaggaccaaatggcctcacagctcaactcttccaaacattcaaaaaagaaccgggcgcggtggctcacgcttgtaatcccagcacttcgggagtccaaggtgggcagattacctgaggtcaggagttggagaccaccctgatcaacatagtaaaaccctgtytctactaaaaaaatacaaaaattaaccgggggtggcggtgcgtccgtgtaatcccagctactttggacgctgaggcaggagaatcgccttgcagtgagccgagatggcgccactgcactccagcctgggagacggagcgagagtctgtctggggaaaaaaaaaaaaaaaagaaagaaaaa

SEQ ID NO: 768295 - DNA, 564 bp, Homo sapiens
gtcctttatctggtgacttctccttgctgtctaatagggcatttgtttctcaccatgtcttctctctctcgttcatcttatttttctaaaattttttccagtttcagtggaccagattataatgttagtgattataacgctaattcaacatcttccacatccttatgtaacaatttcttccaatagatttatatatataaatatatgcatttatgtcattggatatatatattatgcatatttggcatgtatttttaataaaatgtagatatatgctatatacatatctgcatgctcatttcatcaatatctcatgtttagtctatccaattcttttctctcatatgttcatttaatgttgagttttagaatctcctccctcccaaaacacmgcctgtatccagtctgacttccttgcctttgccttatctacctggaaactatttgtgtttattgatcctaaattttttgaatatgtttgtcagttgggatcaccttttcctcctggcaatcttgtcattactgggtgatgcatgaaaaatcaacaatacagaaaataccaaa

SEQ ID NO: 768296 - DNA, 629 bp, Homo sapiens
agttgcataatctaagtatttcagttcaacacttgctgcccttgtaccatatgctagttacagtagtccctctttatccacagtttcactttccatggtttcagttatctggggtcaaccacagacaaaaaacattaagatattttaagagagaccacattcacgtaacttttcttttttgagacagagtctcgctctgtcgccaargttggagtgcagtggcgcgatctccgctcactgcaacctccgcctcctgtattcatgccattctcccacttcagcctccagagtagctgggactacaggcgcccgccaccatgcctggctaatgttgtttttgtatttttggtagagacaggttttcatcgtgttaggatggtctcgatctcctgacctcgtgatctgcccaccttggcctccctcacgtaacttttgttacagcatgttgttataattcttctattttattgttattgttaatctgtcagtatgtgtaatttgtatgtaaacctttatcatagttatctatgcacaggaaaaaacagtatacacaggcttcagtgctatctggtttcaggcatccactgggcgtcttagaatgtatcccctgtgggtaaggggcgactgcc

SEQ ID NO: 768297 - DNA, 629 bp, Homo sapiens
agttgcataatctaagtatttcagttcaacacttgctgcccttgtaccatatgctagttacagtagtccctctttatccacagtttcactttccatggtttcagttatctggggtcaaccacagacaaaaaacattaagatattttaagagagaccacattcacgtaacttttcttttttgagacagagtctcgctctgtcgccaaggttggagtgcagtggcgcgatctccgctcactgcaacctccgcctcctgtattcatgccattctcccacttcagcctccagagtagctgggactacaggcgcccgccaccatgcctggctaatgttgtttttgtatttttggtagagacaggttttcatcgtgttaggatggtctcgatctcctgacctcgtgatctgcccacctyggcctccctcacgtaacttttgttacagcatgttgttataattcttctattttattgttattgttaatctgtcagtatgtgtaatttgtatgtaaacctttatcatagttatctatgcacaggaaaaaacagtatacacaggcttcagtgctatctggtttcaggcatccactgggcgtcttagaatgtatcccctgtgggtaaggggcgactgcc

SEQ ID NO: 768298 - DNA, 629 bp, Homo sapiens
agttgcataatctaagtatttcagttcaacacttgctgcccttgtaccatatgctagttacagtagtccctctttatccacagtttcactttccatggtttcagttatctggggtcaaccacagacaaaaaacattaagatattttaagagagaccacattcacgtaacttttcttttttgagacagagtctcgctctgtcgccaaggttggagtgcagtggcgcgatctccgctcactgcaacctccgcctcctgtattcatgccattctcccacttcagcctccagagtagctgggactacaggcgcccgccaccatgcctggctaatgttgtttttgtatttttggtagagacaggttttcatcgtgttaggatggtctcgatctcctgacctcgtgatctgcccaccttggcctccctcacgtaacttttgttacagcatgttgttataattcttctattttattgttattgttaatctgtcagtaygtgtaatttgtatgtaaacctttatcatagttatctatgcacaggaaaaaacagtatacacaggcttcagtgctatctggtttcaggcatccactgggcgtcttagaatgtatcccctgtgggtaaggggcgactgcc

SEQ ID NO: 768299 - DNA, 526 bp, Homo sapiens
tttttctgctcaaaaagcgatcatggatcctctttgcatatataatagaacacagttcttagcctagcattaaacatgttccgtaatctgagcctagtatgttttttctggctctacttcattcttaagctatctatgcaatacagatacgaatttgaacatgcccaacctctcttgcctcagttatttcatttgtccaattcctttcatctagcatgcagtcaccaggatttgcctgtgctgtaaaccccactgtagctcaaggctccattcagattcaccctcctccatcaagcctactcttgacggttacatttaatccttcctgatagattaagtccttatcttcatggtggaccttctgttctgggtgctrttattcaccttgtggtttctgggctgtcttggccaagtcttcccccataatgttagccatctcccagacttaaagtttacaaagcgtacattgtcctttttttgtttgtttgttttttgttgttgttgttgttttggtttctttttttga

SEQ ID NO: 768300 - DNA, 664 bp, Homo sapiens
aataaagtaaaagggcttttccttggacaaaccttttatcacggttctgtagtcctagtatttatactcagtcagttgtcattcgctggctggtagattcaggcagggagcacataaagattaagtaatgtttaacacaagcctgctctcccagcctgggatctcagctcctcccttcttcagggagtttcctctgctctaactgctggagagtctcagccctcatgtgggtcatttctccatggtgatacctattattttcttcctctcttggagataagagagggcagagattggytctgggtctccacaattctaggttttctcctaaaccagccagctcagctgaaagcaatcatgacagagaggtcaggtcagtgaagagggtcccaggggagcagggggtcacaaggacagcccctcatggagatggtcaggaccgtgacctgggcaacatttgaccaattctgctggggatgatgtgcaaaggattaaggggaggatgctgccataaggagaaaggggaagaaccaagggagtaagagaggaaggaaaataaaatgattgccataaaggtagaaagaaatgcagactccagaggcaaagccccatgtcacagaagattagttccaggttgtggatcctaaccacgcaattcctgctg

SEQ ID NO: 768301 - DNA, 604 bp, Homo sapiens
ttgagtttcacagattatgggttttggcaattatgtaatgtcctaaatccccaatacagcatcatgcaaaatagtttcactgctgaaaattccctgtacttcaccatttcgtgcctcctcctctcctccacccctgacaaccactcatcattttactacttctatctttttgactttccaagaatgtcctagagttggaattacagtatgtaggtttccagactggcttctttctagcattatgtacttttaagttcctccacgtcttttcatgacttgacagcttgttttgtaaaatcactgaatcagatttcattgtatggctacaayacagtttgtttattcattcacttggtgaaagacgtcttgggtacttccaagttttgacaattatgataaaattgctgcaagtacttatgtgcaggattttgaatgaacttaagttttccaaagtgactgtacacttttgatttccactagctatggagagttctggttgttcctcatcttcgacagcatttggtgtgttcaccgttttgtgttttagccattctgataggtttacagtgatatctcgttgttttaatgtgcaattccctcacaa

SEQ ID NO: 768302 - DNA, 775 bp, Homo sapiens
actttccaagaatgtcctagagttggaattacagtatgtaggtttccagactggcttctttctagcattatgtacttttaagttcctccacgtcttttcatgacttgacagcttgttttgtaaaatcactgaatcagatttcattgtatggctacaacacagtttgtttattcattcacttggtgaaagacgtcttgggtacttccaagttttgacaattatgataaaattgctgcaagtacttatgtgcaggattttgaatgaacttaagttttccaaagtgactgtacacttttgatttccactagctatggagagttctggttgttcctcatcttcgacagcatttggtgtgttcaccgttttgtgttttagccattctgataggtttacagtgatatctcgttgttttaatgtgcaattccctcacaacaaatgattttgarcatctttctcatatgcttatttgccatctgtatatcttattaatgaggtgttcagatctttcaccttttttttttttttttttgctttgtgttgtttatttctcaaaattcttcatatattttggacagcagtttttccatcagattattttgtaaatattttctcccagtctgtgacttgctttttccattctcttaacagtgtctttcacacaacagaagtttttaattttaatgaggctcaacttaatttttttttcattagtagattgtgcttttggttttgtatctaagaagccatcattgaacccaggatccctcagattttc

SEQ ID NO: 768303 - DNA, 775 bp, Homo sapiens
actttccaagaatgtcctagagttggaattacagtatgtaggtttccagactggcttctttctagcattatgtacttttaagttcctccacgtcttttcatgacttgacagcttgttttgtaaaatcactgaatcagatttcattgtatggctacaacacagtttgtttattcattcacttggtgaaagacgtcttgggtacttccaagttttgacaattatgataaaattgctgcaagtacttatgtgcaggattttgaatgaacttaagttttccaaagtgactgtacacttttgatttccactagctatggagagttctggttgttcctcatcttcgacagcatttggtgtgttcaccgttttgtgttttagccattctgataggtttacagtgatatctcgttgttttaatgtgcaattccctcacaacaaatgattttgaacatctttctcatatgcttatttgccatctgtatatcttattaatgaggtgttcagatctttcaccttttttttttttttttttgctttgtgttgtttatttctcaraattcttcatatattttggacagcagtttttccatcagattattttgtaaatattttctcccagtctgtgacttgctttttccattctcttaacagtgtctttcacacaacagaagtttttaattttaatgaggctcaacttaatttttttttcattagtagattgtgcttttggttttgtatctaagaagccatcattgaacccaggatccctcagattttc

SEQ ID NO: 768304 - DNA, 587 bp, Homo sapiens
aaatttgagcacattttatggaaaattattgagctcagtcttttcatgatccctgtatgctgtgtgtcctgagggcactaactcagagtgtcctgttactccctcatcagtgtgtcatctggacaattcactgagctcgttctctgtgtgtgtgtgtttgtgtgtgtgtgtgtgtgtgtgtgtktgtgtgtctatctgtctttctctttcattcttttccatttggccccgttgtgtcccaacatgaaggcaataatttgttacctcattaatggatctatccttttagttttttaaccacttccctatgctacccatgaaacctagttggggctctgttgtgtctgatttcccctggcttattctttactttttcctccttttccaggctcagcagggagctgctggaggtagtagagcctgaagtcttgcaggactcactggatagatgttattcaactccttccagttgtcttgaacagcctgactcctgccagccctatggaagttccttttatgcattggaggaaaaacatgttggcttttctcttgacgtgggaggtgagtacctttctatgaaggtgata

SEQ ID NO: 768305 - DNA, 564 bp, Homo sapiens
gagcacagtcttttcatgatccctgtatgctgtgtgtcctgagggcactaactcagagtgtcctgttactccctcatcagtgtgtcacctggacaattcactgagctcgttctctctctctctctctctctctgtgtgtgtgtgtgtgtgtgtgtgtgtgtgtgtgtgtgtgtgtgtgtgtctatctgtctttctctttcattcttttccatttggccctgttctgtcccaayatgaaggcaataatttgttacctcattaatggatctatccttttagttttttaaccacttccctatgctacccatgaaacctagttggggctctgttgtgtctgatttcccctggcttattctttactttttcctccttttccaggctcagcagggagctgctggaggtagtagagcctgaagtcttgcaggactcactggatagatgttattcaactccttccagttgtcttgaacagcctgactcctgccagccctatggaagttccttttatgcattggaggaaaaacatgttggcttttctcttgacgtgggaggtgagtacctttc

SEQ ID NO: 768306 - DNA, 525 bp, Homo sapiens
attttaaggcctctgtatctaataaccatgtgacaattttagatctctttaaaaaggtaatatgtttaattmaggaattgcgaaaagccttgcagcagctacaagaagaattgcagaataagagccaacagcttcgtgcctgggaggctgaaaaatacaatgagattcgaacccaggaacaaaacatccagcacctaaaccatagtctgagtcacaaggagcagttgcttcaggtgagtttacatgatttcaatgaaaactgggctcatagaactctgaaatttgtttatataattttaagatattaatccacctgtgctgagtccctgccatatggaaaacattgagagaggtgggaatcaggaggatttaaaataaatagaaaatataatttgtgaattaagatgcttactaacaagtataagaaacagtacatatagccctgacttaagcagtcttttatgaagtcttttataaagacttaatattcagaaaatagttattaagcacctctgtgaatcaaac

SEQ ID NO: 768307 - DNA, 637 bp, Homo sapiens
tttacaattttccatatcctattcaattcatgtataatacttctatagcaattttaataatggcaccctctgctcctctttcagtttatataccttgaaaattttaaggcctctgtatctaataaccatgtgacaattttagatctctttaaaaaggtaatatgtttaattcaggaattgcgaaaagccttgcagcagctacaagaagwattgcagaataagagccaacagcttcgtgcctgggaggctgaaaaatacaatgagattcgaacccaggaacaaaacatccagcacctaaaccatagtctgagtcacaaggagcagttgcttcaggtgagtttacatgatttcaatgaaaactgggctcatagaactctgaaatttgtttatataattttaagatattaatccacctgtgctgagtccctgccatatggaaaacattgagagaggtgggaatcaggaggatttaaaataaatagaaaatataatttgtgaattaagatgcttactaacaagtataagaaacagtacatatagccctgacttaagcagtcttttatgaagtcttttataaagacttaatattcagaaaatagttattaagcacctctgtgaatcaaacacttttctgggt

SEQ ID NO: 768308 - DNA, 630 bp, Homo sapiens
taaacaatctcataatagtacagggtatattaatttcacaatatttaagaagtaaattcttttttttttttttttttgagatggcatctccctctgtcacccagctggagtgcgatggcgcaatcttggctcactgcaacctctgcctcctgggttcaagcaattcttctgcytcagcctcccaagtagctgggattacaggcatgcaccaccatgcccgctaagttttgtatttttagtagagatggggtttcaccatgttggccaggctggcttacgattcctggcctcaagtgatccacccatctcagcctcccaaagtgctgggattacaggcgtgagccaccatgccctgcccatagtaaagtgttaatttttcctcatttctatgtgttttctcctcaaggctaaaaactcttagttgacttgtgctgcatttcagataccagtagctcagaatccccgtagtcagtttttagaggaagatagactcttttttgcctatgttatttgaccccataatattttcttatgttttcttatgttgtgaaaggattatactccactattctaattgttaggcccactgaagtaaatacacatctttctagaaaggtcctgctgtgtgct

SEQ ID NO: 768309 - DNA, 630 bp, Homo sapiens
taaacaatctcataatagtacagggtatattaatttcacaatatttaagaagtaaattcttttttttttttttttttgagatggcatctccctctgtcacccagctggagtgcgatggcgcaatcttggctcactgcaacctctgcctcctgggttcaagcaattcttctgcttcagcctcccaagtagctgggattacaggcatgcaccaccatgcccgctaagttttgtatttttagtagagatggggtttcaccatgttggccaggctggcttacgattcctggcctcaagtgatccacccatctcrgcctcccaaagtgctgggattacaggcgtgagccaccatgccctgcccatagtaaagtgttaatttttcctcatttctatgtgttttctcctcaaggctaaaaactcttagttgacttgtgctgcatttcagataccagtagctcagaatccccgtagtcagtttttagaggaagatagactcttttttgcctatgttatttgaccccataatattttcttatgttttcttatgttgtgaaaggattatactccactattctaattgttaggcccactgaagtaaatacacatctttctagaaaggtcctgctgtgtgct

SEQ ID NO: 768310 - DNA, 630 bp, Homo sapiens
taaacaatctcataatagtacagggtatattaatttcacaatatttaagaagtaaattcttttttttttttttttttgagatggcatctccctctgtcacccagctggagtgcgatggcgcaatcttggctcactgcaacctctgcctcctgggttcaagcaattcttctgcttcagcctcccaagtagctgggattacaggcatgcaccaccatgcccgctaagttttgtatttttagtagagatggggtttcaccatgttggccaggctggcttacgattcctggcctcaagtgatccacccatctcagcctcccaaagtgctgggattacaggcgtgagccaccatgccctgcccatagtaaaktgttaatttttcctcatttctatgtgttttctcctcaaggctaaaaactcttagttgacttgtgctgcatttcagataccagtagctcagaatccccgtagtcagtttttagaggaagatagactcttttttgcctatgttatttgaccccataatattttcttatgttttcttatgttgtgaaaggattatactccactattctaattgttaggcccactgaagtaaatacacatctttctagaaaggtcctgctgtgtgct

SEQ ID NO: 768311 - DNA, 650 bp, Homo sapiens
aaaaaagaaaaaaaaatccctaagagaaccactaacatccactggttttgtagaaacagcatacccttagtgcacttaaagttggaaaaatggctctgcctttagggccatgcaatgaaacagaatgtgtggtagttgacacaggaagagcagagcagagtttataacaatggccacaaracagttaagaaaatgctttggggcttttaagcagcagataaggtgactcagaggaatgttagacaatcgcagaaaagcaacttcagcaaagtttttgattcagtgggcactgcatacttagtccatgctctgcatctgttctttcacagtctgtcccttcatcgacttgggcctacaatgacttttctgggaggggacagggatcaacacaacagcatgcacacacctgaaataaagaatgaatttctgattttcagattttagtctctgacataaccaaagaagtgactaccatagatgttaacttttttttttattattatactttaagttttagggtacatgtgcacaacgtgcaggtttgttacatatgtatacctgtgccatgttggtgtgctgcacccattaactcatcatttaacattaggtatatttcctaatgctatccctcccccacccccccagatgtt

SEQ ID NO: 768312 - DNA, 548 bp, Homo sapiens
gcactaatcaaaaaggcagataataacaaagttggtgaggttgtggagacactggaaccctcatatagtgctgatgggaacttaagatggtgttactttggaaaaacagtttggaagttcctcaaaatgttcaatatgaaattacgatatgacccagtaattccaygcctatgtgcctatccaagagacataaaaacacatattcacgcaaaaacttgtactcaaatgttcatagcaccattattcatagtagccaaaaggtgtaaacaactcaaatgtccatcaactgattaatggataaactaaatgtggtacattcatacaatggaatattattcagtcataaaaaggaatgaagtactgatacctgctacaacataggtgaataggtgaaccttgaaaacgttatgctaaatgaaagaagccacacacagaaagctacatcttatataattccatttatgtgaaatggctggaatagacaaatctataaaaacagaaagtacagtagtgttttccaggggttgaaaggaagggagaatggggag

SEQ ID NO: 768313 - DNA, 579 bp, Homo sapiens
aatgtacaatactactccagaggagtgaagaactggaaccaataattcaatttatctcattatgtatgcattatattagggcagtagtatacacacacatacacacaaacatgcacacacctggagccactatataacttatagatacatatgtgtttttatatatatatatatataatataatatatatattttatacatacacayatacatacacacatatatgtaaatatggaactcaaaatatttcatggatcaacagaatttggacacagcatcatattattaccatatggtaggtagtacgtctgttagtgctcagtagtcattgattgcctctcccaggaatcataaatacccttttgttgacagttgaaaatacttagccatgctgtcttatatccagtggcacatcagtgtcctaaggaatctcaaggtcttgtgacataggtacctcagatgctgagattcaggagaaccaggttcccatccagctctgccacttacaaaccacatgatattgggtctccctctgaatgttttgggggctcagtttcctcttctgtaagagggagctat

SEQ ID NO: 768314 - DNA, 407 bp, Homo sapiens
caaatcaacagaatatgttcttctcagtgccacatggcacttattctaaaattgaccatgtgatttgaagtaaaacactcagcaaatgcagaagaactgaaatcataacaaacagtctctcagaccacagtgcattcaaattagaactcaggattaagaaactcactcaaaaccaaacaattacatagaaattgaacaacctgctcctgaatgactcctggtaaataactraattaaggcagaaatcaggaagttctttgaaaccaatgaaaacaaagagacaatgtaccagaatctctgggacacagctaaagcattgttaagagggaaatttatagcactgaatgcccatatcagaaagccagaaagatctcaaatcatcgccctaacatcacaattaaaagcga

SEQ ID NO: 768315 - DNA, 625 bp, Homo sapiens
ctcttgcttgccaccatgtaagacatgactttgctcctcctttgccttccaccatgattgtaaggcctctccagccatgtggatctgtgagtcaattaaatgtcttccctttataaattacccaatctcgggtatgtctttatcagcagcatgaaaacagactaatacagttattttataaaaatgtatttytatgacatcccaagagttcatccagctctgctgttaaacagatttagtaagagaagagaagacttgctatcctccaggtcaatccaccctgtaattaaaggattctaagttttttaaaaaactattttggctgggcgtggtggctcacgcctgtaatcccagcactttgggaggccgaggtgcgtggatcacgaggtcaggagatcgagaccattctggctaacacggtgaaacctcgtctctactaaaaatacaaaaagttagccaggtgtggtggcggctaactttttgcagtgcactgcactgcagcctgggtgacagagtgagactccgtctcaaaaaaaaaaaaaaatatatatatatatatatatatttcttatgttgatacaaaatatactttcttacaactttacaactaatcctgatttttcca

SEQ ID NO: 768316 - DNA, 625 bp, Homo sapiens
ctcttgcttgccaccatgtaagacatgactttgctcctcctttgccttccaccatgattgtaaggcctctccagccatgtggatctgtgagtcaattaaatgtcttccctttataaattacccaatctcgggtatgtctttatcagcagcatgaaaacagactaatacagttattttataaaaatgtatttctatgacatcccaagagttcatccagctctgctgttaaacagatttagtaagagaagagaagacttgctatcctccaggtcaatccaccctgtaattaaaggattctaagttttttaaaaaactattttggctgggcgtggtggctcacgcctgtaatcccagcactttgggaggccgaggtgsgtggatcacgaggtcaggagatcgagaccattctggctaacacggtgaaacctcgtctctactaaaaatacaaaaagttagccaggtgtggtggcggctaactttttgcagtgcactgcactgcagcctgggtgacagagtgagactccgtctcaaaaaaaaaaaaaaatatatatatatatatatatatttcttatgttgatacaaaatatactttcttacaactttacaactaatcctgatttttcca

SEQ ID NO: 768317 - DNA, 625 bp, Homo sapiens
ctcttgcttgccaccatgtaagacatgactttgctcctcctttgccttccaccatgattgtaaggcctctccagccatgtggatctgtgagtcaattaaatgtcttccctttataaattacccaatctcgggtatgtctttatcagcagcatgaaaacagactaatacagttattttataaaaatgtatttctatgacatcccaagagttcatccagctctgctgttaaacagatttagtaagagaagagaagacttgctatcctccaggtcaatccaccctgtaattaaaggattctaagttttttaaaaaactattttggctgggcgtggtggctcacgcctgtaatcccagcactttgggaggccgaggtgcgtggatcacgaggtcaggagatcgagaccattctggctaacayggtgaaacctcgtctctactaaaaatacaaaaagttagccaggtgtggtggcggctaactttttgcagtgcactgcactgcagcctgggtgacagagtgagactccgtctcaaaaaaaaaaaaaaatatatatatatatatatatatttcttatgttgatacaaaatatactttcttacaactttacaactaatcctgatttttcca

SEQ ID NO: 768318 - DNA, 608 bp, Homo sapiens
tttagtagaccttcttgggagaggcacacctggagatttcagttatctttgctcagtagtccttcaaaaagacatctattagatctcagagctaaatatatctgttgatgatgaggtcaaatttccaacaaagaaacaatttctgaagcactgacaggatgcttgagacaacttggcagaactagatgccatttttagaaaaacaactaaaactacacccatctttctgttaggcaaacaaagctctgggcttcctctctccaacatggacaagcaggcagcaaatacaagcagatacacatggaatcaagtcagatatggggcatggcagtaactgtcataaaagtaggagaagtcagatatgtatccaacaaatatataggaagcacttaccatgtgayaggaacgatgttgtgaatcataagacactgcatttgtcctctgggagcttatagtcttatgagagataaggacaagtaatcagacaattactataaagtagcataaacattatgagaaacatgtgtagggtgctttgaaattaggaagggggtaccatatctagtattggggctgtaggaaaggatttctagaggagattttaaaga

SEQ ID NO: 768319 - DNA, 622 bp, Homo sapiens
agctttttgttattaaaagatcactctagcaaaagggaaagatatttggaaggaggcagacacaaaaataatggggagaacagatcagaagatacagaagataaattaggaagtcttgaccccaaaacatgtcaaaaggcatcagttgaaacaatgttctcrttatatatcagtctaatctacaaagatataaaattaaaatctataggaatcagaataataatcacttatgtatgtggaggtattgaatacttttcacatagtcataagtaaatttaggcactttttaaaaataaaatgctaaaaaaaggacatgaaaacaattttctcaaaatagttatttttgttacaaagcttttgcaaaaaaaaaaagactatcctaattagcattcaattttgcaacaataagtggaaatggcaggttgtacctttccctttaggatacagctcctcgaggctttcctatctgttctgcttttgttggaggcaatttctccatttcaatctgtaaatgggttctacctccatgtcatgtttcacttgctctgtgtgctaagaaaatgctaaatgttagaactgagaaatgagatgccataatggtagttctgcttcttgtgttgtc

SEQ ID NO: 768320 - DNA, 472 bp, Homo sapiens
ccaaaaaataaaaacaacaaaaactagaacagcctaggaagcaggattttggaaagttaaaaaaaaatggtatgtgactcatatcttaatttgctgcatacttgccacggaactttgggtaagttatttaacctgtctaaaccccagtattctsacctataaaaaaggattacaatagtaccagaatggttttaaagaccaaatgaaataatgtaagtacattcatttgcaaggagcctcactataagactttaacaaatgctagaattaataatattataatggctatatattattgtaacattgctacaacaaacaatagacatcaatattatcataaacatttttatcattcattagaaaaaattcttatgatggagaatttgttttgttttattttcaatcataaaaatattacacaataaaatctgaaaaatcctcattgtaaaaaattcagacaatgtagaaatat

SEQ ID NO: 768321 - DNA, 614 bp, Homo sapiens
  misc_feature 466: n = A,T,C or G
tagttgctattacactagaggctaaaggcaacaataagccatatggaagtagaaccattcatctccatcaagtgctcatattttcagaaattatgctgagccctggcttcctgacagctcttgttcctattacctcgcctgtgtttattgcacatctttatagaaaagttaaaaatattataagagtgaagtcttaatggaatataacctggaaaatctctaagtaggaaacacgaactcttaggagaacattgttccaaagagcaagcctacagtggagtccttagaaagactcaagccagccaccacctggaagcaaccattkcagggctgtgaatcacaggctggggagcaagtgccttaatgtcaagttcaacttctcaatgtgggaagtttatggcaatgtgtgatcaataaagtccacccaagggcgggcagagggagtcgttaagtagttataaaaacnatttcctaattagttttctacattctgaaaaataaaatttagtatggcatgttttgcacttcttgaaatgccataatactgtgcagtgggtttgttaatctcctgcagggtatgacagggaaaagtttgcccttttttttttttaagt

SEQ ID NO: 768322 - DNA, 612 bp, Homo sapiens
aaggagaagctgtgaacaagagcaccagtcccagctcttaaacacagtggtgagtcccgtcagaagggtgtgttgcaaaggtaagacctcgagagcttcacgaggcaataggaagggtgagatgccctaactccagaagagctggcgttttcaccacgttgggacaagtttatacctaagaaaagcaaagagacagagggtagaaaaacccatgatgtaaatcagtccaattgaaacctaagaggaaaagcagagaatgcattcagctaaatttggggctttttaggacacctcagaccatttgttcaaatggaacactttctccaaagtgttcttaaacaaaccacctctggcttcatgcaatggacaggaagcattaggatcagtcctttctaatccakcatggcagccccatagaactctgctttataaatgctgaagaacacagctgcttagagcaggtaaattctgatcattcataagaagatcaactcccagttgagaagctgtttgactggttgtgagccacttcagaggagaacaaagtgcattttctcagtgtgaatacgagagggctttatacagattaaggagatccggatcctaggatta

SEQ ID NO: 768323 - DNA, 620 bp, Homo sapiens
aatccaacacaatttcaaaaaaggactaaaaaattctggcctgcattgagtatcgctgaactgagtggttgctccccatctcatcaaagctgcctccttactcctgcttcggaagctgcctgaaatcttgtcaccaaagtcccttgtacataggttcctctaatcccatgacttttcaaattactttacagacgtattcatcactcagtcttttagaaacagggaacatgaattctgtcagaaacagtctttggaattcacagcctggaggctccacgaagctgggcggcttcatcatggacaccccgtctcatccgtatggtgccgctgccygccatgtgggtgtgatcctgctgtgatgacagcgctactcctgcacacgcaatcggggtgtttgcactgagactttcagggttggtttttaagtgaaactatgtgtcaagggcaatctttagaaagttctgctgccagttcttcaacaggaatgattttatttttgttcacttaaaggcagcaatgtcttgtctgtaacaacagagactaaaacagtagtaggcttagctgtgtccatggtaagtcctcagcgactactatggaggaagctttgacctctgtgcaac

SEQ ID NO: 768324 - DNA, 542 bp, Homo sapiens
gatgcacccacataagtgggtccactggtcctgcagagtgaaaaggtcatgtgccctgccctcctggagcctctgaattctatgcaagccatcacctgtccaacacaggggcttcctcatctgcacataagggtaataatcccacaggcatctcggcttcgttctaaagttttcacgaatgtgcccgtgcagaacgtgtggcatgcatcaggttaagctactggttatggaaggttctggagacatgctgcaaagtccgaaattgagggaaccrgggtacacatcaaatacactttatcattttatgactcactcctggtttgttaattccccaaaaaatgaaagaggaaaacaaaggtcaggaatgataacggtgagtaattggtctatattccacaccagatatgatatgaattcctttcattctaagaatttggataagaaaaaggtattttaaagaatattcagatagccctactctgatatctcatgcaattcacccagtaatcacaggtcaccttaaaagtcaatgttgttgcaaa

SEQ ID NO: 768325 - DNA, 641 bp, Homo sapiens
ctagtcacactctggagacctctcattcacagtccattaaagacaaccaaaaagtgtatccaggcagacttcagagtgtctgtttgcatgatgacaaatttccagtttaaaaaacaatttttatttcatctgctatgaactaaattatgccmcctcccaccattcatatgttgaaatcctaactccagatgtgaggatatttggatatggagcctttgggaggtgattagacaaagatgaggtcatgaaggtgtagcctttatgatgcgatttgtgtccttgtcagaagagacatgagagagctgtctctctgattagtgctctctctctctctttgtctctttctggctggctctctggctctctgtttctcagccacatgaggacgtgaggaaaggacagcatctacaagccaggaaggacattcgtgttgagaaacaaatgacctggaaggtgattcagagatcatcagggcacctggctcagtgctttcacctgtagctgtgggtgtgggattccccagcagagccttgggggcaggacctcacctgcagtgctagtggacctagaggacagaatattgaaccagggaggatcaccctcaagtcttaaaatctgacagaatttgccttattgtttta

SEQ ID NO: 768326 - DNA, 560 bp, Homo sapiens
ttgccgctgtgccaatgctccgcaccccacctctttcatgctgttacccagctgggatggagaggctgccttttcccagttgtcagaccagacaaatggtggctagaaaagctaaccactgacttctccctggtctccccgttacacagtggggaagccaaggctcccaaaactcctccctggtatttctgatggagacagcatggcagggaaaagctgtttttttcctctaaaaccttcaaccaggccccacagaaccaatggaattacttgagccctgggttcctgtcctggaggccctgagtctgcaggtgaagtgaagacatatcagtaacatgrgagtgctctcagggaggcttcaaaaaggaagtaactggacagaaaccattagctctaacatcccaggggcttcgtgagctcttacagatctttaattttggcttctatgtcattgaattaacacctatcaataatttgctctaattttacccaaaagtctaaaatctcttactcatttcaatgcaatatccattcacaattgtatttcataatgaatgtaa

SEQ ID NO: 768327 - DNA, 588 bp, Homo sapiens
ggtttcaccgtgttagccaggatggtctcgatctcctgatctcgtgatccgccgcctcggcctctcaaagtgctgggattacaggcgtgagccaccgcgcccggccctctctgcagcacatttaagatcagcagcatttcagatccacggtggtcmgaggtcctggcatgccttggaacacacatccttctgatcaggaggttcagctccatctctttacaggcttacaaggtgagtccagggacagggcgatcagtcaccagtcacattgctatgcagaggcagaagcagcactgaagctcaggtctcctagtttattatcacatcccctgtgtgtctccagaagccacgacagttcatgggctgagattcctgtctgtatttctgtgtggcgaacactttgttgctctcctcactccctgcaggtcggggccgcagatctgccttgtggagaagtccgctggagtctcacccttacatgtgcctccagatagtttctagtatgcaccagttttgtctggagaataatgtcttgctgttcttatttaagtggaaaataattaacttcctaaatgtttatttaacttc

SEQ ID NO: 768328 - DNA, 560 bp, Homo sapiens
ctgagagtttcactgtcttagaggttagatgaaatcatacaagtcaccaccattgaatgtgaacaggttaaaataagagttataaagtgaggggtggggtagaagttgctccttggatactctgcaatctcagagtcttggtggcagcacaaattagcaagtattatgtrgagagatttgcagaaatctccatgcctccataaaataagtttcggaaggttttatatcaaaaagaaatatagaaaaatgttaacgtagattttgctggtgagtatgggaatattcattttctgttgtttcgtgtatgttatacttaaagcattctcaaattgaaaagagaaatcttcatgagctggattttgaagcctgacaggggtgcccagctgctggaagccggtcctgtccttgcacgaaggtcaaaaggccactgagttggagacacgtctcctatcatggtcaataatcgcctaagtgatcccaagcagtggttttgggttggggatcacagagttccttgttttctagccaagaaacagcaaacagccccatccacagcagag

SEQ ID NO: 768329 - DNA, 642 bp, Homo sapiens
aaatcatacaagtcaccaccattgaatgtgaacaggttaaaataagagttataaagtgaggggtggggtagaagttgctccttggatactctgcaatctcagagtcttggtggcagcacaaattagcaagtattatgtagagagatttgcagaaatctccatgcctccataaaataagtttcggaaggttttatatcaaaaagaaatatagaaaaatgttaacgtagattttgctggtgagtatgggaatattyattttctgttgtttcgtgtatgttatacttaaagcattctcaaattgaaaagagaaatcttcatgagctggattttgaagcctgacaggggtgcccagctgctggaagccggtcctgtccttgcacgaaggtcaaaaggccactgagttggagacacgtctcctatcatggtcaataatcgcctaagtgatcccaagcagtggttttgggttggggatcacagagttccttgttttctagccaagaaacagcaaacagccccatccacagcagaggtggagctccacaagcatctgtggccagagccgcttctgtgaattccgacagtcgtcagcatcaaggacagactggtgtggtcggcaagaacacacactcctcctcctcaatc

SEQ ID NO: 768330 - DNA, 642 bp, Homo sapiens
aaatcatacaagtcaccaccattgaatgtgaacaggttaaaataagagttataaagtgaggggtggggtagaagttgctccttggatactctgcaatctcagagtcttggtggcagcacaaattagcaagtattatgtagagagatttgcagaaatctccatgcctccataaaataagtttcggaaggttttatatcaaaaagaaatatagaaaaatgttaacgtagattttgctggtgagtatgggaatattcattttctgttgtttcgtgtatgttatacttaaagcattctcaaattgaaaagagaaatcttcatgagctggattttgaagcctgacaggggtgcccagctgctggaagcckgtcctgtccttgcacgaaggtcaaaaggccactgagttggagacacgtctcctatcatggtcaataatcgcctaagtgatcccaagcagtggttttgggttggggatcacagagttccttgttttctagccaagaaacagcaaacagccccatccacagcagaggtggagctccacaagcatctgtggccagagccgcttctgtgaattccgacagtcgtcagcatcaaggacagactggtgtggtcggcaagaacacacactcctcctcctcaatc

SEQ ID NO: 768331 - DNA, 642 bp, Homo sapiens
aaatcatacaagtcaccaccattgaatgtgaacaggttaaaataagagttataaagtgaggggtggggtagaagttgctccttggatactctgcaatctcagagtcttggtggcagcacaaattagcaagtattatgtagagagatttgcagaaatctccatgcctccataaaataagtttcggaaggttttatatcaaaaagaaatatagaaaaatgttaacgtagattttgctggtgagtatgggaatattcattttctgttgtttcgtgtatgttatacttaaagcattctcaaattgaaaagagaaatcttcatgagctggattttgaagcctgacaggggtgcccagctgctggaagccggtcctgtccttgcacgaaggtcaaaaggccactgagttggagacacgtctcctatcatggtcaataatcgcctaagtgatcccaagcagtggttttgggktggggatcacagagttccttgttttctagccaagaaacagcaaacagccccatccacagcagaggtggagctccacaagcatctgtggccagagccgcttctgtgaattccgacagtcgtcagcatcaaggacagactggtgtggtcggcaagaacacacactcctcctcctcaatc

SEQ ID NO: 768332 - DNA, 503 bp, Homo sapiens
cacaagaatctgtcgcattttcagacttagattaagcacactaatgtcctctgaatatacagacagtagcaaataaattttaaaaattacctttcatttcttaatttatcatagttcaacatacacatagtgtcaatgtacaaaaataaggcatgtggtcactgctgtagaagagctttctgtatggatagttcaagtaaaaaagttactgtgatatcaaacaatgaatgctaagaaccgtaatagtgtagatgaaagtgctgaaaaggctaaagtaggaagaaacggaatytaactgggcgtggagattagaaaagacttcatggttgagaaggtaatttaagatggatcttgaaagttgatgcttggtggacaatgagggtgggaaagcgaaggtctttagaggtgacagaaacagcctgaaacaaaggcataaataagtgagtgatgtttaatgaatattgagtggccagatcatagggagtaagttggaaagtgtagga

SEQ ID NO: 768333 - DNA, 614 bp, Homo sapiens
tgtgaaagttttcatagatcatattacatttgagtgggtaacaagttacgtggtgcaagaaccaggggcatggagtacatgggtgtttgagcagtgacttgaagaaatagtagggatttatcaagtagaaacagagggcaagggcattccagccagaggaaacagcatttgtaaaagcacagatgtgtgaagaagctagatgtatgtagaaaactgcaaatagttcaatgttttagtcaggtctttttccattgcaagtgacagaaactcagtttgaacagttttaagttaaaaaaatcagaattggcaaataaaatcaggaagtccaggagtgtatgtgtctagagacttggctaggtacaggaacttgatgaatataaccaagacactctgtaaatcttatcctggcatttytctgttggctacattcacaggaacacactgtagaaaaagtggtcattggcaactctaggcttctgttgccctcagatttagcaatctaagcaaaaagaaagcactctttttttccttatatctctagcaaaagttcttaggagactccagccaatcaggctttgaccacataatcatctttttttttttttttctgtagc

SEQ ID NO: 768334 - DNA, 551 bp, Homo sapiens
tattggtgtataggaatgcttgtgatatttgcacattgattttgtatcctaagactttgctgaagttgcttatcagcttaaggagatttggggctgagacgatggagttttctaagtatacaatcatgtcctctgcaaacatggacaatttcacttcctcttttcctaattgaataccctttatttctttctcttgcctgattgccctgaccagaacttccaacactatgctgaataagagtggtgagagagggcatctctgtcttgtgccagttttcaaagggaatgcttccagttttttgcccattcagtatgatattggctgygggtttgtcataaatagctcttattattttgagatatgttccatcaatacctagtttattgagagtttttagcatgaagggctgttgagttttgtcaaaggccttttctgcatctattgagataatcatgtggtttttgttgttggttctgtttatgtgatggattatgtttattgatttgtgtatgttgaaccagccttgcatcccagggatgaagccaacttg

SEQ ID NO: 768335 - DNA, 586 bp, Homo sapiens
atccaaatgagaaggaaccataaaagtaattctggtaatatgacaaaataaggttctattacaccccaaagaccacactggctccccagcagtggatccaaaccaagaaatctctgaattgccagataaagaattcagaatattgattattaagctactcaaggagataccagtgaaaggtgaaaaccaacttaaagaaatttaaaaaaacaaacaatacaggctatagatgaaaaattctccagagaaacagatatcataaaaatataatcacaacttctggatatgaaagacaaactcagagaaatacaaaatgcactggaaagtgtcaataatagactaggacaggtagaagaaagaacttcagagctcaaagacaaagcttcctaattaactcaatcagacaaagacaaagaaaaaagaacaagaacaacaaaaaaagaagaaagcctccacaaattttaggatggtgttaaatggccaaacctaagaataattggtgttcctgaggcagaagagaaatctaaaacttyggaaaacttattttaggaaataatcgaagaaaacctccgtggccttgctagag

SEQ ID NO: 768336 - DNA, 518 bp, Homo sapiens
gtctctgtagactgtttttgccttttaccttgccttataattttttttgaaagccagacatgatgtaaatgtaaatgaaaccaaggtgaataggcctttaatgtgatatttgatattatctggctgggggttaggctgtgtttactggttgttgtagctatggtgtctcargctaaaatgtcctctaatgtcattgttttttactcccctgttttatttagcctttctgagggactctttaaatagggtttgtggcacagttcctttagctataatctgttattgcacaggaaccccactgatttgattgtaaggtatgagtgtaggaagggcattctatagttctacaattaggtctcagtcttttagtgagtctgaattggatattacccttcttccacatcaaaggccagagggggctggagtggaatatttctcttcctccagctgaaggctagagggaggtgaaattaggttttcctttcccaaaggtcagttagtctttggtaaaacaccag

SEQ ID NO: 768337 - DNA, 548 bp, Homo sapiens
cttgtaaccttaattctctgacagatctaagaagagttgttgattttcagtatgtccatctttttttcttgttttgaggatgggagtgatgacttccaaattccttacatttcataccagaaaacacatttatttatttacttatttagaggcagagtcttgttccgtcacccaggmtggagtgcagtggcgcgatctcggctcactgcaacctccgcctcccaggttcaagtaattctcctacctcaggttcctgagcagctgggattacaggcacccaccaccatggctggctaatttttgtgtgtatatatatatatatatatattttttttttaagtagaaactaaatgttggccaggctgatctcaaactcctgacctcaggtgatccacctgctttggcctcccaaagtgctgggtttacaggtgtgagccaccgtgcccaactcagaaaacactttactattgtcaacctaaatgacaaagagaaagaggctctctaaaataaataacgaatttattttggaatagagcattgcaatggga

SEQ ID NO: 768338 - DNA, 551 bp, Homo sapiens
taaaacaagctttgggtctcttagagtacagtttaggaaacaactaatgttactcaggcaaaaagcgaggtaagagaggggttttactccatctacagtagcttatcaaagttttcctccaacccacatacactgctactaagtagggttccagtaaatgcattttttctgactcattaatgttccagtgccattttactacttatatattggcaccgcaggaacttacctagcagccagctccttaatgagtaagtgcattatcatccacttgtctcataaactcagaaacttaagtacaattctagatactatcctctcctcccaactctacattcaatcgaacatcaagtcttatcaatyttacctcttaaatctttcaaatccatccacttctctccattcccactgccatatcccataatgcctccatctttctgttgcctagatttttgcaagaatcctagtctccctgccccctgttttgtacccatctagcctattctccacacaaatacaaaacccaaatctgattgtatcatttccatact

SEQ ID NO: 768339 - DNA, 610 bp, Homo sapiens
agatgagagggatgggtctcctgtggtgcacattcacagcttgagtttaacaagcctacactctgctttcttgctccagctctcacactgtaaacaaatgtcctttttgcagtatttcatgmcatgttttaaacatttttgagctcttctgggggcaattcactatttaaaatggccccaagctttcatgctgaagggctgtctagtgttcttaagttcaggaaggccatgatgtgctttacaaaaaatatatgtgtgataggatttcttcaagctgagctatagtgctgttggctgttcaatgttaatgtattggtaatagatatatatacacaaacatatattaaacaagatatctttaaacagaaacatacataagacgaggttttatgttgatatgttaataaaaatattttggttattgtggtcacctctgtggaatcagatgttctcaggaaactagccttgtctttcccctaagagcaatggttcagtgttcactaattcaatgtttgtggcaagtttataaagcataactactcaaatttatctaggttcaatgcaatcccaatcaaaatcccagaaagattttgtaaataatgacaaggtg

SEQ ID NO: 768340 - DNA, 604 bp, Homo sapiens
cactcagatcaatagctgcagcattctcatggtcacacgcagatgggcacagagagatgagagggatgggtctcctgtggtgcacattcacagcttgagtttaacaagcctacactctgctttcttgctccagctctcacactgtaaacaaatgtcctttttgcagtatttcatgacatgttttaaacatttttgagctcttctgggggcaattcactatttaaaatggccccaagctttcatgctgaagggctgtctagtgttcttaagttcaggaaggccatgatgtgctttwcaaaaaatatatgtgtgataggatttcttcaagctgagctatagtgctgttggctgttcaatgttaatgtattggtaatagatatatatacacaaacatatattaaacaagatatctttaaacagaaacatacataagacgaggttttatgttgatatgttaataaaaatattttggttattgtggtcacctctgtggaatcagatgttctcaggaaactagccttgtctttcccctaagagcaatggttcagtgttcactaattcaatgtttgtggcaagtttataaagcataactactcaaatttat

SEQ ID NO: 768341 - DNA, 610 bp, Homo sapiens
agatgagagggatgggtctcctgtggtgcacattcacagcttgagtttaacaagcctacactctgctttcttgctccagctctcacactgtaaacaaatgtcctttttgcagtatttcatgacatgttttaaacatttttgagctcttctgggggcaattcactatttaaaatggccccaagctttcatgctgaagggctgtctagtgttcttaagttcaggaaggccatgatgtgctttacaaaaaatatatgtgtgataggatttcttcaagctgagctatagtgctgttggctgttcaatgttaatgtattggtaatagatatatatacacaaacatatattaaacaagatatctttaaacagaaacatacataagacgaggttttatgttgatatgttaataaaaatattttggttattgtggtcacctctgtggaaycagatgttctcaggaaactagccttgtctttcccctaagagcaatggttcagtgttcactaattcaatgtttgtggcaagtttataaagcataactactcaaatttatctaggttcaatgcaatcccaatcaaaatcccagaaagattttgtaaataatgacaaggtg

SEQ ID NO: 768342 - DNA, 611 bp, Homo sapiens
tttctgcagccagcttaaatttgtcctcagaaaatgggatttccttttctacacattgtcaggctgcaatttttccaaacttttatgctctgcttcccttataaaactgagtgcctttaacagcactcaagtcacctcttgagtgctttgttgcttagaaatttcttctgccagattccctaaatcatctttctcaagttcaaagttccacaaatctctagggcaggggcaaaatacctccagtcactttgctaaaacataacaagartcatctttactccagttcccaacaagttccttatctccatctaagaccacctcagcctggatttcattgtccacatcattatcagcatttttgtcaaaaccattcaacaagtgtctaggaagttccaaactttcccacattttcctgtcttcttctgagccctccaaactgttccaatctctgcctgttacccagttacaaagttgcttccacatttttgggtatctttttagcagcaccctggtctactggtaccaatttactgtattagtccgttttcatgctgctgataaagacatacctgagactgggcaatttacaaaagaaagaggtttaatggacc

SEQ ID NO: 768343 - DNA, 598 bp, Homo sapiens
cttgggatattgaggtaagtcaaagaggggccaaatacgaggaattaaaaagggtacagggaaccctttggggtaatgaatatcttcattatcttaactatggtgatggtttcatgggtgtatatgttaaaagtgtatatgtcaaaaacttaaactgaacactttaaatatacacaatttatttatttattgtatgccaatgctttattatactyagataaagctgttttttaaagtctatgagatatgaatagttattcccaaagttaatttcatagacttaaatctttacattgctaagtgagaaataataaactaataaaaaatcttcagaaataagaaaaataagaaataacaaaaaatgaaaaaaaggaaaaagtcaatacagaagaagcaagattttaagaaccaggaaacaattaataatagaactgacaaatctcagtgcttgttcattatagatcccaggatagagttgcaccaactgcccaggctcattaataaacaaggtaagggaaggtataagcacacaaacttagcactgtgtgccgggacatagccacaggtacaaagaaaaaaaagaagtatgacaggacac

SEQ ID NO: 768344 - DNA, 618 bp, Homo sapiens
atgggtcagaaggagaggtaggggcacacacatgggcaactgttgagtagacttctggctgcgccatgatctcaactggccaatgccaggagttcaggatgacagctttctgcctctagtcagccctcggcttccccaggaaaattgaaagtggaagctggttccaggcagaccaacactcccaacagttgttagaaagcccttccccagacagcctcacacctgagtcttaagtctggcggccacgctaatcgtttttaactggcgacaggtgcccagtattttcctccaattctaaggggataggacagaatagcaaatgaaagtggtccaatattactcaccactttggaggtcccttcatggtcgccaaaatgttaccagggggtccttgttcttagagctcccaagtggtggcaggccgcttccaagatggaggcaagccttttgttctctgacctggggttmttggcctcacagattccaaggaatggaatcttgggccatgcggtgagtgatatagctctattcagctcaattaggacaaacccgggcacttagccatgcaggaataatggcaagccttttgcccgatcaggagtggcaatgggtgcctca

SEQ ID NO: 768345 - DNA, 597 bp, Homo sapiens
attgagattccaattatgtgttataaaacattgcatgacatccttattctttgctaaagttgcaatggccaaaaaaaaaaaagcgttcagaagcatttttaaaggtatattacatattagtattaaactctgatatttgtgaataaagttacatttgttttatgaatatttcattattgggtcatgaaatttagctacaattaattmaagattcttttttattttttaaataagcctttcattattaaatgagtggtgttcattcttattgctggtgccttagaatagcaaagatactgtatggtatatatctggctgtagcatttgtcctttctgtactgcattcaatatttactgtggcatctagataagttattgattattggtatcagagatctattgtttttcatgctatttgtgtaatgggtccttgcaattaaattattcctagtgatgaagtctcctgaaaatacttgaactaatctttttagtcagtagtaatttcttccaaaataatgtagcttacaacattataaagtcatatctctaaaagttataattttttcataaggacaatatctaattttgatataacaa

SEQ ID NO: 768346 - DNA, 585 bp, Homo sapiens
cggccctgccgtgtgctgttttgagtagcatgatgaaatctcacaacatccactccagcctgcctttgcccatctttgctgtgcaaagattattccctttgtttagcatatccatctgttatacatgacctgcctactaatcaacaacatccatcatctactcctaatatccagccatcaacatcatcatggcttgatgatccaagcatcactcgaagtagataatcctccttctgacataggaaggtcaatagtagcttwatgctacattgcaatgtctgtatcattcacctcacttcacctcataacacaggcattttatcatctcacatcatgacaagaagggtattttcagagtgggaaaatatctcataatttttattacagtatgttgttataattgttctattttattattattgttaatctcttactgtgcataatttataaattaagctttatcataggtatgtatgtataggaaaaagcttagtgtacatagggtttgctactatctgcagtttcaggcatccactgggtgtcttgggacatactccctgcagataagggaaaactacattattg

SEQ ID NO: 768347 - DNA, 585 bp, Homo sapiens
cggccctgccgtgtgctgttttgagtagcatgatgaaatctcacaacatccactccagcctgcctttgcccatctttgctgtgcaaagattattccctttgtttagcatatccatctgttatacatgacctgcctactaatcaacaacatccatcatctactcctaatatccagccatcaacatcatcatggcttgatgatccaagcatcactcgaagtagataatcctccttctgacataggaaggtcaatagtagctttatgctacattgcaatgtctgtatcattcacctcacttcacctyataacacaggcattttatcatctcacatcatgacaagaagggtattttcagagtgggaaaatatctcataatttttattacagtatgttgttataattgttctattttattattattgttaatctcttactgtgcataatttataaattaagctttatcataggtatgtatgtataggaaaaagcttagtgtacatagggtttgctactatctgcagtttcaggcatccactgggtgtcttgggacatactccctgcagataagggaaaactacattattg

SEQ ID NO: 768348 - DNA, 604 bp, Homo sapiens
atgtttaaagttctgataaagtgttatttctgtacagaatcaggaagatcagaagatcagatgagagacgatcgggggctaagatagaaactttgttaagggttgaagaaaaggactaagcactgtcaggaaagaagctagaagggtcccaagtaaacaacagaaataaaaatgaagaagagagtttgggttctgctaaaagtaaattcttaaaagaacactatgtagwagagtgacagaggaaattttaaagggggattgtgtgctaagaacatgatcagaaatacacaaatcatttgagaatttggttaagaaaaaaagagaagtaggaggttgtaataaaattcgttttcccagaatagatagtactaaaatatttatttaagttagactaaaaaaaacaaagaacaaaaaaagattggtattcaaaatactagagtttgggcaggtaggaatgttaactttcaaatgaaggatttgagcatatgtgtatgtgtgtctgtgtgtttaagggataatgttgttagtattattttctttatataaaaattaattttggtatttgaaaagaaatcttgtagcgttagtcccttatttttttaag

SEQ ID NO: 768349 - DNA, 604 bp, Homo sapiens
atgtttaaagttctgataaagtgttatttctgtacagaatcaggaagatcagaagatcagatgagagacgatcgggggctaagatagaaactttgttaagggttgaagaaaaggactaagcactgtcaggaaagaagctagaagggtcccaagtaaacaacagaaataaaaatgaagaagagagtttgggttctgctaaaagtaaattcttaaaagaacactatgtagaagagtgacagaggaaattttaaagggggattgtgtgctaagaacatgatcagaaatacacaaatcatttgagaatttggttaagaaaaaaagagaagtaggaggttgtaataaaattcgttttcccagaatagatagtactaaaatatttatttaagttagactraaaaaaacaaagaacaaaaaaagattggtattcaaaatactagagtttgggcaggtaggaatgttaactttcaaatgaaggatttgagcatatgtgtatgtgtgtctgtgtgtttaagggataatgttgttagtattattttctttatataaaaattaattttggtatttgaaaagaaatcttgtagcgttagtcccttatttttttaag

SEQ ID NO: 768350 - DNA, 546 bp, Homo sapiens
attcctttgcttggataatttaatatgtcttattgttgagctcactgattctttcttctacttgatcaagtctgctattgaagctttatattgactttctcggtttagttattgtattcattattgctacaattttttcttacagtttctatttctttgtcaaagttctcagtttgtttgtgaactgttttccacattttaattttctatccatcttttttatccatattatagttccctgaacttctttaagaggattagcttgaattctttgtcagtcatttcttatatctycatcttttgagggtccattattggagcttaatttctttgggtggtgtcatatttctctgatttttcataatatgtctctgcattggtgcctgcacgttgaggaaatgaccatgtcttccagcctttgcaggtattctttggtggtgatcaactttcagaattttgtctagtctgggattctgggcctagctgttgtgacctagaacaggcagattttgatgttgggtcctttagctgggctgggctgctccc

SEQ ID NO: 768351 - DNA, 639 bp, Homo sapiens
agatgtgacgattccttctgcttgagtatcctcagccacctcaaaatcaaagtatgacccaaattaaactcatttgacccctttaccaaaactgcttttccctgtcttttctatccctaaatgattctgccatttatttcttacgttgagccataagaaattacctttttgtaggtcattaatggttgaatactggcaatttcaaatggatcaaccttaacagttgttcaggttaaaaaaaaaatctggtaaaatccttttcatgtcactcccccttcaactcttacaacgagccaatcatgaaggttggtaaattccgtttcaggcaggtccattatccatctctaaggcaaccatcaaagcccaaaccaagttagtgasctggcttcaccaaccctgtctgcgctgccataaaccagagtgtcttctctaaaacacaagttagaacatgccacttgctgcaaaaaatcatccagtggcttcccactgcccttaagaaaaagactgggctgagtgctgtggctctcatctgcaattccagcactgtgggaggtcaaggtgggaggaccgcttgagcccaggagtatgtgaggagtatgtgaccaggctggcaacatagcaagacatcatctctacaaa

SEQ ID NO: 768352 - DNA, 583 bp, Homo sapiens
acaacattcccttaagccaaagtcaatccagagcaaggccctaactctcttcaattcaattaaggccaagagaagtgaggaagctgcagaaaaaatatttgaagctagcagagactggttcatgaggttcaagataaagcagaaagtgctgacagaggagctgcagcaaattatccaggagatctagctaagataattgataaatgtggctacaaaaaacaacagacwtttaatggagacaaaacagtcttcttttggaggaagatgccatctaggactttcatagctggagtggagaagtcaatacctggtttcgaagcttcaaaggacaggctgactctctttctaggggttaatgcagccagtgactttaagttgaattaaatgctcatttaccattctgaaaatcctagggcctttaagaatgatgctaaatctacctgtgccctataaatggaacaaagcctggatgacagcacttctgtttacatcatggtttactgaatattttaagcccactgttgagacctactcaatagtgctcagataaaaagattcctttcaaaatattatcactcaatga

SEQ ID NO: 768353 - DNA, 611 bp, Homo sapiens
gatgagtctcctgtcattgggaacagttaagtctagattggatgaacgcatggcaaagatctgtaggtgtaattcaaacatcagattagggtttggggtggggcacggtggctcacgcctataatcccagcactttgaaaggctgaggcaggcggatcacaagatgagtttgagaccagcctggacaacatggtgaaaccccatctctactaaaaatacaaaaattagccgggmgtggtggcaggtgcctttaatcccagctactcacgaggctgaggctggagaatcgcttgaacccaggaggcagaggttgcagtgagccgagattgtgccactgtactccagcctgagcaacagagcaagactctgtctcaaaaaagaaaaaaaagattggagtttggactagatgacttttaagacccctttcaaacctgggattatatgattctgtgaaaactgtgtaactctgtaaatctttattaccatcattcatgctgccccagctctatcaggtcatacagcagctgttcacccaggaacactattttatgtcagctgtccggatccacatttgaaggtggagaatgaagaggcattgacacttagatatc

SEQ ID NO: 768354 - DNA, 612 bp, Homo sapiens
tggtgtccactgcagaactgatggcttgctcggtatttgagggtggggagaaacatacacatttgatcacagcagttttctgtgttgattgttatggtgtgaaagaagaagtaagacagtattttcctctcaagtccctttgggggaagaaggggaagaatcttcacaggctcttcctcctagagagcaagccacttattcagacagtgactcyagatctaaaaattgcctcggttctggaaacggagcaaggaatcgtggtgttttattggagtgaccacccttagcctcctgcctctccactgtctgttgttgttgctgttgctttagatgttaagcaggacccatgctggctgcccctgtattttgctcctagggattccctgctccattaaccacatccacagtcctgcaaaccaagctcctttggatgcccctctaccttgccagttgttatggtaatgacagtctcccggctcgtggtgctaaatgctgccgcctggctttgtttcaggggacccatcattcccacactcccagttctgggacctctctcctaccaactgtgttacaaaaaagagccacaccaacgtgcccagggatgccggcacc

SEQ ID NO: 768355 - DNA, 612 bp, Homo sapiens
tggtgtccactgcagaactgatggcttgctcggtatttgagggtggggagaaacatacacatttgatcacagcagttttctgtgttgattgttatggtgtgaaagaagaagtaagacagtattttcctctcaagtccctttgggggaagaaggggaagaatcttcacaggctcttcctcctagagagcaagccacttattcagacagtgactctagatctaaaaattgcctcggttctggaaacsgagcaaggaatcgtggtgttttattggagtgaccacccttagcctcctgcctctccactgtctgttgttgttgctgttgctttagatgttaagcaggacccatgctggctgcccctgtattttgctcctagggattccctgctccattaaccacatccacagtcctgcaaaccaagctcctttggatgcccctctaccttgccagttgttatggtaatgacagtctcccggctcgtggtgctaaatgctgccgcctggctttgtttcaggggacccatcattcccacactcccagttctgggacctctctcctaccaactgtgttacaaaaaagagccacaccaacgtgcccagggatgccggcacc

SEQ ID NO: 768356 - DNA, 574 bp, Homo sapiens
atgtaggttctgcaacatcagatattttttgtttgattcactgtttaaattcatacaaggtgatcaatagatttctgttcagtgaatcatatattattattggtgttaatttaagacttgtctatacattagactgtaaggtacataaaaagaagaacaacgtctgttttgctcaccagtgtatttttaatacctagcattgtcacaggctagaaagttttttaaatatcattttaccaataaataaatgaatagatggattgtacttcagaatgaattatttcaaaagagatttaaaagcccgtcaccttgaaagtggcttataaacatgcaactaaatgtgaatcaaatcaattatttattgataaaagtaataataacatgatttaatgtaaaaraatatatcattacagaaaatcacttagctattcaaaataaaacattcaaagataaagtaaatcttgtaaacacaacactgggtgacatacagcaaatttcagaaaaatacatgtattgtgatatctaccttatgaatgtaaagcatgcaatatgactcaatttattgctaagagag

SEQ ID NO: 768357 - DNA, 780 bp, Homo sapiens
ctatggatccctcacccacttgtggtgcctctactcatattgctcctcctccctataatcccgactttgcggaataaccatcttgtgagcctgcccccaccaacctattaagtatccctcattaaaggagcttcaacgtgagatagagcaatgtaaaaaggatattaaaaactttccatttctctccacacctasagagccagatctgactctttccactaagagaggtaccacaaggatggggcggggggctattggctttgtgaacgcccccttgactagttcggaagtcaggtattttaaaaagagcctaagccactactggatgacccttatgaagtagcagatcaaactcatcaatttctagggcctcacatatactcttgggctgagttgatgtccatcttgggcatcctcttttctgaggaagaatgaagtatgattcggagggctgctatggcactttgggaacgtgagcaccctcctggtcaaaatgttctttctgtgggctataaatttcccactcaagacccccattgggacagtaacaatgcaaatcactgggaaaatatgcaggacctaagggagatgataataaaaggaattcaagaatcagtaccccaaactcaaaatctttctaaagcatttgatattcaacaggaaaaagatgaggaacccactggattcttaaatagattgagggagcaaacgagacagcatgcaggccttgatttggaaaacccctcagacaaggaatgtgaaaacttcactttgttacta

SEQ ID NO: 768358 - DNA, 637 bp, Homo sapiens
  misc_feature 531: n = A,T,C or G
aatgaagtatgattcggagggctgctatggcactttgggaacgtgagcaccctcctggtcaaaatgttctttctgtgggctataaatttcccactcaagacccccattgggacagtaacaatgcaaatcactgggaaaatatgcaggacctaagggagatgataataaaaggaattcaagaatcagtaccccaaactcaaaatctttctaaagcayttgatattcaacaggaaaaagatgaggaacccactggattcttaaatagattgagggagcaaacgagacagcatgcaggccttgatttggaaaacccctcagacaaggaatgtgaaaacttcactttgttactaaaagttggccagacatttcaaaaaaattacaaaagatagaaaattgggaggaccatcccctgagtgaattgctcagggaggctcaaaaagtatatgcaagaagagacaaggaaaaactaaaacaaaagacaaaacttatgttatccaccttccaacagatagctccaaatccgcatatccntaagcaaggctttcaaggcgccagagattataaggggcctaaaccctccttgagaggatccaagcctccatctggagggtcaaggccctcatttaataagccccct

SEQ ID NO: 768359 - DNA, 675 bp, Homo sapiens
  misc_feature 590: n = A,T,C or G
tcacatatactcttgggctgagttgatgtccatcttgggcatcctcttttctgaggaagaatgaagtatgattcggagggctgctatggcactttgggaacgtgagcaccctcctggtcaaaatgttctttctgtgggctataaatttcccactcaagacccccattgggacagtaacaatgcaaatcactgggaaaatatgcaggacctaagggagatgataataaaaggaattcaagaatcagtaccccaaactcaaaatctttctaaagcatttkatattcaacaggaaaaagatgaggaacccactggattcttaaatagattgagggagcaaacgagacagcatgcaggccttgatttggaaaacccctcagacaaggaatgtgaaaacttcactttgttactaaaagttggccagacatttcaaaaaaattacaaaagatagaaaattgggaggaccatcccctgagtgaattgctcagggaggctcaaaaagtatatgcaagaagagacaaggaaaaactaaaacaaaagacaaaacttatgttatccaccttccaacagatagctccaaatccgcatatccntaagcaaggctttcaaggcgccagagattataaggggcctaaaccctccttgagaggatccaagcctccatctggagggtcaagg

SEQ ID NO: 768360 - DNA, 637 bp, Homo sapiens
  misc_feature 531: n = A,T,C or G
aatgaagtatgattcggagggctgctatggcactttgggaacgtgagcaccctcctggtcaaaatgttctttctgtgggctataaatttcccactcaagacccccattgggacagtaacaatgcaaatcactgggaaaatatgcaggacctaagggagatgataataaaaggaattcaagaatcagtaccccaaactcaaaatctttctaaagcatttgatattcaacaggaaaaagatgaggaacccactggattcttaaatagattgagggagcaaacgagacagcatgcaggccttgatttggaaaacccctcrgacaaggaatgtgaaaacttcactttgttactaaaagttggccagacatttcaaaaaaattacaaaagatagaaaattgggaggaccatcccctgagtgaattgctcagggaggctcaaaaagtatatgcaagaagagacaaggaaaaactaaaacaaaagacaaaacttatgttatccaccttccaacagatagctccaaatccgcatatccntaagcaaggctttcaaggcgccagagattataaggggcctaaaccctccttgagaggatccaagcctccatctggagggtcaaggccctcatttaataagccccct

SEQ ID NO: 768361 - DNA, 559 bp, Homo sapiens
cttttttgggtttcttaaggctaccctattgagtctctcaaattgcaactcctgtattatggacaatacctgtccaccttaaactggggtccccttgccccaaggggctgccctcttggtcacgatttctaaaacatccacagctgccaatcctccctgtgatttcacacatggttccaggaacacctttgatcctccmatgcaggggagtgcaactctctgttcctctgttcaggtactatgagctgctccagctttctcaggctcatgccagtcaacaaacctctatgtcccccaatttcagggcacacatagcaagctctccatgtagtcctactggagtgcctcacactctatattgagtttagaagcagcctccccatctgcaacaaccaccttgggtagaggaaagaaggaaaaaaggagatatattttgtagcttcttccaaatgtttccttataaaagtcttctctatttgcactctctagattctttcatatctttgcagttttaacatatggtctagtatcccttttggaataaaacatatgccctatc

SEQ ID NO: 768362 - DNA, 401 bp, Homo sapiens
acatgcttgagtcacagattatgtaagtattagtgctggagtgagaaaccttaaaattgaatcctgtcacttaccggttgtgtgcctgttaaccataaagtgatggtattaatagtacccaaattttcataagtgtacagtaaattctagctattatatttccagaagaacagccagagaagtggaaattgtgcattgtaagaaacttgtggctagaattyacagaggttgagctgagtattgaaagatacaaaaaaaatcagaagtaaaaaaagatattctaggcagaggaaattgaagaagcaaagagagatatgaaaatacatatagccacattgcctgcaacagagagctgtagaagatgtacacggtgatgaagttgaaagaaaacaagtggtaaa

SEQ ID NO: 768363 - DNA, 640 bp, Homo sapiens
tccataaaaaggcttgtacataaatgttcatagcaacttaatttgcaatagaaacaactggaaacagccccaatatccatcaataaatgaacaggtaaacaaattgtgatatatctatgcaatggaataccactaaacaacaaaaaggaataaactactgatacatataacatcatgaatgaatctartaacagttatgctgagcaaataaaaaaggagccagaaaataatagagtagatgtcttataatttcattaagagaaaattctagaaaatgaaactgcagccatgacttggtatccatgggggattggttccaggacccccatagatatcaaaatccacagatactcaagtaccttatataaaatggcatagtatttgcatataatctatgcaaatcctcccatacactatatatcatatctagattacttatataatacctaacacaatgtaaatattatgtaaatattttttatattttatttgtattatttttatgttgtattgttactttttaattttttaaatatttttgatccatagttggttaaatctgctgatgcaaaatccacaaatatggagagtcagttgtaaatcatagtaatggaagacagatcagtggtttcctaaagat

SEQ ID NO: 768364 - DNA, 601 bp, Homo sapiens
tcagattctgaatgtgaggaacagaaactggaggaaattaaagaaaagaaaggaaaactgaaaaaagtatgttttactagcccgtcggctccacttgctgaattaagtgaatggccacctcctctctctccccttaataggtgagaaaatgaattagatgaaaaacttatagctcctgtagttgcaacattaaaacctggagcaattggtggtgctatacaaaattctattcaaaaggctagagctgagggagaccttgaagcatggcaatttcctgttactataatccagcaaggaggacagaatatagctaattgggccatctttccatttaaattgttaaaggaattcaagcaagccattagtcaatatgggccaaactctycttttgtgcaaactttgttaaaaaatatggctcttgataaaaggttaataccacatgattgggatactttgaaaaaatctattcacactcaatctcagtacttgcagtttaaaacctggtgggctgatgaagctcaatctcaggcaagggaaaacccacaagcacagccacctgtgcctgtttcctttgaacagttcatgggagttggccctaatt

SEQ ID NO: 768365 - DNA, 604 bp, Homo sapiens
tttttaggtcctgacttaccattatttatcttctgggttcaatgaagtatttttatttctttaaaaatatttttaggccatttaacatataaattatacaagtaggaataaggagatagtgaaaaagagccattaaaaattttaataagaatttaaatagtatttccattttcaaaatgcaatactttgaaaacatttggtgacacatttttgttgaatggagcattgccacagcttctttcctacataataataaaccatttttatttttatatttataaatgccaaatagaatgattatttcaacgagtttcttcatttgtaaattacatatttccttccaattgcttgtatacatgagctgtgcataygcagctattctagtgttttttcacttttgaccatgtcaagtaaattttgatgcaaaaacattgtaaatactcatcctttcagcaaaacagtataatttagattcttgttctgaaatactgtaagatgaagtctttcttgctaaatgattaactgaatgagaaaaccatattttctaattgtcaatatacttgtaagcactttgtgtatattaactcatttaatcatttaatct

SEQ ID NO: 768366 - DNA, 642 bp, Homo sapiens
ttcatgggggatccacccccagaacccaaacacctcccagcaggccttccctttcaacattgccacattggggaccaaatttccacatgaggtttggaggtgcaaaggcccaaaccgtagcacatacacacaaactgaaagtataataataagaaaaagatmcccttttcaacagcaaaaaaaaaaaaaaaaaaaaaaaaagcaagatatctaggagtaaatcttacaacatatattgaatacctgcatggagttacaactttaataaagatattgaagaaacctaagtaaatggagagatacatcatgttcacgagtagatatcagaaagacgttaattctttcccttgtgatctattcagtagaagaaccatatgaaattgtcatctttgtaggtgaaaaacagtttaatgttaatgtcaaaagatttaaactagtatctagtaattacaattctaattcacatataaatagaggttttataggaaattaacacattgattctataatgtctatgaaagagcaaagacctggggatagtcaagacattgctgaacaagtgtcacaagacaagtggatttgctgtatcaggtattataacttattatctaatatttttaattaagatagtgtggcactgac

SEQ ID NO: 768367 - DNA, 642 bp, Homo sapiens
ttcatgggggatccacccccagaacccaaacacctcccagcaggccttccctttcaacattgccacattggggaccaaatttccacatgaggtttggaggtgcaaaggcccaaaccgtagcacatacacacaaactgaaagtataataataagaaaaagatcccctttwcaacagcaaaaaaaaaaaaaaaaaaaaaaaaagcaagatatctaggagtaaatcttacaacatatattgaatacctgcatggagttacaactttaataaagatattgaagaaacctaagtaaatggagagatacatcatgttcacgagtagatatcagaaagacgttaattctttcccttgtgatctattcagtagaagaaccatatgaaattgtcatctttgtaggtgaaaaacagtttaatgttaatgtcaaaagatttaaactagtatctagtaattacaattctaattcacatataaatagaggttttataggaaattaacacattgattctataatgtctatgaaagagcaaagacctggggatagtcaagacattgctgaacaagtgtcacaagacaagtggatttgctgtatcaggtattataacttattatctaatatttttaattaagatagtgtggcactgac

SEQ ID NO: 768368 - DNA, 632 bp, Homo sapiens
tttataaatgtatacatctctcccttcccctgaaggatgatgtctcatcttgccgagtatcagttttaacctgaatactcaattgtactttaaagaggtcatcccatatcctattacactttaaggcctgcagcagcttctgaatgataactcatactgtaggatcactggatcccatgccatactttgtctttaattgggtttctcagttgaatgagatgttatataagatcccatgctgaggcatcaaacactgacatggatagtgttgctggctgagttcaaaaggtaaatataaatccacaatcaatatacctgtaaatcttactyaccattaactgatgttttttccagttgcaaggggtcccatttaaacggattattgatctgcttgagggataatgtcatataatggtctcagcgttggtctgtgttgtaatggaaggagaagtattatacatttgctgtactgtcacaggatccctcctccagaagatctagctgcttctttctttagtgggttccaggtctaaaaactggctccagttcaggaacgaggcaaagcgttgtgcctttttattagagagttgtgtcagttttcttatcatccaatctttattttgatttgaaga

SEQ ID NO: 768369 - DNA, 632 bp, Homo sapiens
tttataaatgtatacatctctcccttcccctgaaggatgatgtctcatcttgccgagtatcagttttaacctgaatactcaattgtactttaaagaggtcatcccatatcctattacactttaaggcctgcagcagcttctgaatgataactcatactgtaggatcactggatcccatgccatactttgtctttaattgggtttctcagttgaatgagatgttatataagatcccatgctgaggcatcaaacactgacatggatagtgttgctggctgagttcaaaaggtaaatataaatccacaatcaatatacctgtaaatcttactcaccattaactgatgttttttccagttgcaaggggtcccayttaaacggattattgatctgcttgagggataatgtcatataatggtctcagcgttggtctgtgttgtaatggaaggagaagtattatacatttgctgtactgtcacaggatccctcctccagaagatctagctgcttctttctttagtgggttccaggtctaaaaactggctccagttcaggaacgaggcaaagcgttgtgcctttttattagagagttgtgtcagttttcttatcatccaatctttattttgatttgaaga

SEQ ID NO: 768370 - DNA, 529 bp, Homo sapiens
aggaatgcttgcagcttttgcccattcagtatgttattggctgtgaatctgtcctagacagctcttattattttaaagtatgttccttcaatacctaatttattgagagtttttaatataaaaagatattacattttatcgaaaggcttttctgccgcttttgagataatcatgtgcttttgtctttacttctgtttatgtgatgaacagatttattgattagcttaagttgaaccatccttgtattccagggataaagcccacttgrtgatgaaggattagctttttgatgtgctgctggattcggtttgcccgtattttgttgaggattttcatatcgatgttcatcaagtatattggttttaagttttccttttttgttgtgtctctgccagattttgctatcagaataatactggccttgtagaataagttacataggagtccctcctcctgaatttcatggaatagtttcagtagaagtggtatcagctcttatttgtacatctggtataattcagctctgaat

SEQ ID NO: 768371 - DNA, 551 bp, Homo sapiens
ctgaggggtttttaaattatagaatcagaatctctgaaggggaagtaggtattctgcaatttaaaaaaatgagttcctgtcacactgatatatattttatattgtagttgggaagccactgattaagattgtatattattaataagctattcatwgtctatcatattctggatctagcaccaaacaatgagcacgcaattatttaatttaccctaagaagtatcccattcttttaaaagatactgaaagaaaaactcaaaataacacaaaaacatgtcttagaaattttattcaattgccaacttacctgacttcagatacaaaaatgtatatacatttccactagaggcgcaccagaactaattcagattatatcattatgcaataaaatataaatggttatattttattctatttgttcttgcttgtaatttttgttctataatttctattatgctaatcagaaatgatagaacagggggacaaatgtggaaatctatttattactgatctgccagatactaatatcaaatattttctttgaaaaaaat

SEQ ID NO: 768372 - DNA, 613 bp, Homo sapiens
aataatacattagtaattttctatctgtttttatattaaagaaaagaactgtgactcaagatttacagataaaatatggttgacctttaaacaatgtagtgattagaggcactgactccctgcccagccgaaaatcctcaggtaacattttactccccctaaacttaactactaatagctgactgttaactgaaagcacattaattatatatactgttgattaacacatttttaatgttatatgtactatatgctgtgttcttacaatcaagtaagctagaacaaagaaatgttattaggaaaatcatgaggaagaaaatgtgtttattgttcattaagtggaaatgaaccatcataaggatactcatctgcctggtcttcacattgaacaggctgaggaggaggaggaagagaaaaggktgttctttctttctcagggatggcagatatataagaggtggaggaagtgtaaagggagtaatgagagacaggcacacttggtgtatctttgtgtaaatacttcacaatttctgtttgacatttttgctttttcatgtctctaaaaatgtttctatatggtaccaatcctcattccattgtttgctttagtttc

SEQ ID NO: 768373 - DNA, 650 bp, Homo sapiens
gacttgagtatgcatgaatttcgttatatgctgagggtcctggtcccaatcccccacatttactgaagcacaactgtagagctagctatccagtcctgccttagatcctggtgctcatttttcattcttactaataaatttccattattacatcttttcttctaaactgggcasttttgtcttcaataaaaacctgctcaggcagacatcctttctcctcaatgattttcatactgatgtctgggaacttgtctgcttcttctccatcagaagaagctgcttctcctgatattgtgaaattttcttaagccaaacctctttctaaaattattaaactatcctttgctggcattaaactcaccagctttagatccctcaccttccttttgctttaaattgtcatgtaactatttcacgtcttctcaaatcattttaaagttcataggtatgtatttcttgtagaactccttcactcacataaaagctatattttcaataggatattaaaagctatttcacaaaaagtagaaggttgttgaacctgctggtatagctgcagcatgggcttcacaaattgtttttatttatttacaatggcccttacgctaaatttctttatcttgaaacgataagtaacaacaactgcagag

SEQ ID NO: 768374 - DNA, 650 bp, Homo sapiens
gacttgagtatgcatgaatttcgttatatgctgagggtcctggtcccaatcccccacatttactgaagcacaactgtagagctagctatccagtcctgccttagatcctggtgctcatttttcattcttactaataaatttccattattacatcttttcttctaaactgggcagttttgtcttcaataaaaacctgctcaggcagacatcctttctcctcaatgattttcatactgatgtctgggaacttgtctgcttcttcyccatcagaagaagctgcttctcctgatattgtgaaattttcttaagccaaacctctttctaaaattattaaactatcctttgctggcattaaactcaccagctttagatccctcaccttccttttgctttaaattgtcatgtaactatttcacgtcttctcaaatcattttaaagttcataggtatgtatttcttgtagaactccttcactcacataaaagctatattttcaataggatattaaaagctatttcacaaaaagtagaaggttgttgaacctgctggtatagctgcagcatgggcttcacaaattgtttttatttatttacaatggcccttacgctaaatttctttatcttgaaacgataagtaacaacaactgcagag

SEQ ID NO: 768375 - DNA, 588 bp, Homo sapiens
tacgctaaatttctttatcttgaaacgataagtaacaacaactgcagagctcaacctatggtacatatcaagcaattcaactttctcttttaatgtaatgacttttctctgcttcttgggaacacttccagcattactagtgccacttcatatagatgccatggtgttattcaaggtttgtaatattgctctaaacacaattaaagatacataaaaatcaagagaaatcactttgtactgcaatatgtgattttcttgacagatgaactgctcatgagaagatgattagtgccacacagcgttttaagtggatactcaaactacttgagctcaacacaataggaatgggagatggctacaaaattattatagtratacagtatgcactacagttaattttatgtagctattatttaatactacatttttgtgcttgtttacatttgtatgtactgcagatggcaccatgtgagttctgacaatagttgagtgcataagttttgacacatttaaactttttataacaggtttatatttatattttattatataaatgatagaatagaccgttatctacatatattttat

SEQ ID NO: 768376 - DNA, 626 bp, Homo sapiens
aaaactattgcacagtgctaggcacatcacttaggactcaatacattttcaatgactaactgggggaagttaataaatgtatgcatttgttcactgattggaatggttaatttaacatgtcaacttgactggattcaggaataactaaataacttgtaaagcattatgtctgaatgtgtctgtgagggtgtttcaagaggagactggaatataaatcaatggacggaatggggaagatctatcctcaatgtggatgagcaacatccaattgtctgggggcccaaatagaacaaaaagacaaaagaaaacaatttccttctccctctgtcctagaactgggacgctttttctccttcctttggacattggaactccaggctctccagcttttggaccctgggaggtttgygcaagaccccatccctcttcgagttctcaggccttcagctcagactgagaattagaccttaggcttccctggttctgaggccttcagacttagatggagccacgctgccagcctctctggttctacagcttgcaaagacttttgtgagacttctcagtccccataactgcataagccaattcctctaataaatcccttctcttacatctatctacat

SEQ ID NO: 768377 - DNA, 644 bp, Homo sapiens
taatttttttaatttaaccaaaagtaagttttttccaaaagtcatttaattctacttaagatcattcagcaacttcccacttttctcagaatagaaacataaaatccttaacttaatctaaaggaaattcagctgttgtctagcattctagtcttatttcatttgtattttcccttttacctctctattttaccaccatactgcacttttgtgtgtgtgttctttaataaattatgcttatttttaaaaaagaggaagcggcaaggccatccaccactcactgcatstcctttatctgcacttgagattccttctaataggtacttttccctgggagatttcattttgtctcagacttagtgaggtccaactgtcactcacatttgtagcacctcccactttataatccctttataatgacctggtcagtgcttatcatcccccttacactgcatgttctgtaagagtagagaataaatcagagaagctcactgtacgaccaacccacagatatcatggaagctggacaactataggtggagagttaatgaatagttggaagctaaatatttgaatggattcttttctgtttgatttagcattaagtagactccattttatattgcattttattattaaaacct

SEQ ID NO: 768378 - DNA, 644 bp, Homo sapiens
taatttttttaatttaaccaaaagtaagttttttccaaaagtcatttaattctacttaagatcattcagcaacttcccacttttctcagaatagaaacataaaatccttaacttaatctaaaggaaattcagctgttgtctagcattctagtcttatttcatttgtattttcccttttacctctctattttaccaccatactgcacttttgtgtgtgtgttctttaataaattatgcttatttttaaaaaagaggaagcggcaaggccatccaccactcactgcatgtcctttatctgcacttgagattccttctaataggtacttttccctgggagatttcattttgtctcagacttagtgaggtccaactgtcactcacatttgtagcacctcccactttatawtccctttataatgacctggtcagtgcttatcatcccccttacactgcatgttctgtaagagtagagaataaatcagagaagctcactgtacgaccaacccacagatatcatggaagctggacaactataggtggagagttaatgaatagttggaagctaaatatttgaatggattcttttctgtttgatttagcattaagtagactccattttatattgcattttattattaaaacct

SEQ ID NO: 768379 - DNA, 644 bp, Homo sapiens
taatttttttaatttaaccaaaagtaagttttttccaaaagtcatttaattctacttaagatcattcagcaacttcccacttttctcagaatagaaacataaaatccttaacttaatctaaaggaaattcagctgttgtctagcattctagtcttatttcatttgtattttcccttttacctctctattttaccaccatactgcacttttgtgtgtgtgttctttaataaattatgcttatttttaaaaaagaggaagcggcaaggccatccaccactcactgcatgtcctttatctgcacttgagattccttctaataggtacttttccctgggagatttcattttgtctcagacttagtgaggtccaactgtcactcacatttgtagcacctcccactttataatccctttataatgacctggtcagtgcttatcatcccccttacactgcatgttctgtaagagtagagaataaatcagagaagctcactgtaygaccaacccacagatatcatggaagctggacaactataggtggagagttaatgaatagttggaagctaaatatttgaatggattcttttctgtttgatttagcattaagtagactccattttatattgcattttattattaaaacct

SEQ ID NO: 768380 - DNA, 616 bp, Homo sapiens
tttctctcatgattagactggtattatgcatttttgagaggaagactacaaagattaaatgccatttcatcacatcatttcaaaggtactatcaacatgacttatcactactgatgttcacttttattacctgacctcagtagtgtttttcaagcttctccactgtagttaayatttttacccaattatccatactgtactttttggatggatgttactatgcaaatacaggaaataaaatttaaaagtagataagttgagtttcataaaaatttaaaactttttcttgctataaatggcacttcaaaaaagtaaaaatgcaactcagaacaggagaaagtatttgcaaatcatatacctgataagagactaatatacctaatatgtaaagaacatgtacaatgcaataataaaaagacaaccaattaaaaataggagatagaaattaaaaccactataagatatgatttttacataaacttgaaaagctaaaataaaaaagagataacaagttttgatgagtatgtgaaaaattggaaccctcattcattgctagttggaatataaaatggtacagtaaatttggaaaacttgtactatttctgaaaatgttaaa

SEQ ID NO: 768381 - DNA, 372 bp, Homo sapiens
gaaaatgttaaacatactcttaccatattacccagtaattccacaccttggtatataccaaagagaaacaaaaacatatatctacacagaaacttgtatatgaatgtggagagcagcatttttcacaatacctataaagtggcagcaacctaattgtccattaaatgatgaatggataaacaaatgtgctatattcatacaatgaaatgtgatttagctatgaaaactaatgaagkactgattcatgctgcaatacagaaagatcttgaaaacattaggttaaaaaagccaatcacaaaaacttatgaaacatccagagtaggcagatatacagagacagaaagtaagctagcagtgttttttgggggatag

SEQ ID NO: 768382 - DNA, 582 bp, Homo sapiens
gctgagaagaaaatgggagaagttttagcataaaatataattatttgggagccaatacgatgcagaaaacaaaggttaagtaagaaaggacattctgagccagaatagtaataagtagaagtagcaagtcagtgtatttcagcaagaatacatatgatttttttttaagggacaggctctcgctatgttgctgaagctggacttgaactctgggctcaagcgagcctcctgcttcaacctcctgagtagctgggactacaggcatgtgccactgcacccagctcttgtatggaatttttatatggaatgtgtaatacataaactrttcaaatcactgaatgcttgtgaggtatccattgcacctggaaattaaaccaggctatctcttcatataaaagtggagaaagcactaaacaggctaaagaaaattacctctttacccttgcctcctgttttctgttagtcttatatgaagcttttaagggatagtcaactgcacaaaagcaacatctgcttggcagatttcctttagtcctggagcccaccattccgttctatctcactgaacatgtttattggaaa

SEQ ID NO: 768383 - DNA, 588 bp, Homo sapiens
ggtctagggggtagttggggggatccatcatcttgtcttgtagctgcctgagaccagacatggcctctgttcataaatccctattaaatgtttcttcctaagaaactggaggccggaatggtcatcttccagtaattcaccaaaatgacgaacacaaaggaaaagagaaaaggcatctgtatatgttctgtataacatggagttgtttagaaacrtggagttgtttgtttggccacgtatatgtgaatttctaagaaagacgatattgtagacataagggaatgggtactgttcaaaaaggaatgccccactaatgctgccatggcaaaaccggaacactctatagtgctacccagcatgctgttggcattgttgtataaaaaacaagtaagggcaagattcttgtgaagagaattaatgtgcatattaagcacattaagcactctaagaaatgagataccttcctgaaatgcatgaaggaaaatgatcagaaaaagaaggaagccaaagagaaaggtacctgggttcaaccaaagcaccagcgtgttctacctagagaaatgcattctgaaagaaccagtgggaagg

SEQ ID NO: 768384 - DNA, 554 bp, Homo sapiens
atgtgatcaatgtaatgaaccagtgtgatatcttgtggaagagaaagtgatcaatatccctgtgaagtaaattatgacatggggctgaagaactatatgcccttgaggcaggacagtgaaggtgtattgctgggcttgtcagctgaaagcaaactgcttccggtaggctttatggacaagaatggagaaagggcgtttgcaagaccagtagctacatatcatgtaccgggggatatgttaatttgctcaagcaattaaacatctggtacagcagctacaattagtgtcaccacctggttaagcttacaataatccactgwcattttcaagcacctgtcttctctacaagtcaaataggaaagttgaatggggatgtggtgggaaacaacacccctgcaattttcaagtccttgtagtggcattaacctctgaaatccctctaggaatgtagtatagtataatttactttctaggtagatgcagttctaatggcttccacttggcttttctcatcataatagcactcactctacaggtcaagaaatcaacgtggg

SEQ ID NO: 768385 - DNA, 660 bp, Homo sapiens
cctgctttagagaagaaggatccaagaaagtcagagagtgcccttcctgggttttatgacctgcttcaggggagagggggaagggtaagttgagggagacattccacttctgcagttttctcaaatgtcaggctgccatattttgatgttcctgtgccccatcacttccctttcctctcttactgagactcrgctgttgccactttctcctcctcctcccaggttcttagctcatggctaagtcttactaataagtagaattcaggggagaaaaagatgacaggagctaaatttggatctttctcataaatatgaaactcattatcctgagaacaaaagatctctcccaaattctcagaaagcccccttaaaaacaggcaaggaattatttcagggtgtccttgtaaaagtcagcacagatggcatttgaatttgtacatcactggcatgcataagtatacgtatagcaacaaggtgtgcaaaacttgtaattccctagactttgaccacaggagaataggatgtgactgttatgctaatgatctcattaatatcatgaatacaattaacaaatgaagtcaattatcactggcaagcattcattacaaagagataagttgctgtgctccaaccacacaagtaactattttgctgcatttg

SEQ ID NO: 768386 - DNA, 550 bp, Homo sapiens
gtcagctaatagaaaatggagggaggagaaaaaaacattgcttgtcattttttcccagactataagagccaaagggaaagaagaagcattttgctcacttttgaactcccaccaaacttagtacggttgcctgcgtaaaagcgggtgctcagtatatcttgagtgaccccagaggatttgggttccttttgcattcacatgccaagtgctgagtaaaacctattaactttaatgttatttatgtcaccaaatatatttgtccatttcattttcrtcacctgagccaaactgggcgtggatgccatacaaggccaagcattaaaacagccccacaaaagtcacatttatacattcagttctttctagtcctctccccacttcatgaatattttaaataatagaatacaagctattttctatttagtgttgctataattagaaattattctgggctacagtaaaagcacaactgatgtgtgattcactttgcaaataaatttactgtttagcattttaaccgtggattcatttactgtatttcagattgttt

SEQ ID NO: 768387 - DNA, 603 bp, Homo sapiens
aaaactgaaactggatcccttccttataccttatacaaaaattaattcatgatggattaaagacttaaatgtaaaacctaaaaccataaaaaccctagaagaaaacctaggcaataccattcagaacataggcatrggcaaagactttatgactaaaacaccaaaagcaattgcaacaaaagccaaaattgacaaatgggagctaattaaactaaagagcttctgcacagcaaaagaaactatcatcagagtgaacaggcaacctacagaatgggagaaaatttttgcaatctatccatctgacaaagctctaatgtccagaatctacaaagaacttaaacaaatttacaagaaaaaaacgaccccatcaaaagtggttgaaggatatgaatagatacttctaaaaagaagacatttatgcagccaacaaacatatgaaaaaaagctcatcatcactggtcattagagaaatgcaaatcaaaaccacaatgagataccatctcatgccagttagaatggagatcactaaaaagtcaggaaacaacagatgctggagaggatgtggagaaataggaaggcttttacactgttggtgagagtgta

SEQ ID NO: 768388 - DNA, 603 bp, Homo sapiens
aaaactgaaactggatcccttccttataccttatacaaaaattaattcatgatggattaaagacttaaatgtaaaacctaaaaccataaaaaccctagaagaaaacctaggcaataccattcagaacataggcatgggcaaagactttatgactaaaacaccaaaagcaattgcaacaaaagccaaaattgacaaatgggakctaattaaactaaagagcttctgcacagcaaaagaaactatcatcagagtgaacaggcaacctacagaatgggagaaaatttttgcaatctatccatctgacaaagctctaatgtccagaatctacaaagaacttaaacaaatttacaagaaaaaaacgaccccatcaaaagtggttgaaggatatgaatagatacttctaaaaagaagacatttatgcagccaacaaacatatgaaaaaaagctcatcatcactggtcattagagaaatgcaaatcaaaaccacaatgagataccatctcatgccagttagaatggagatcactaaaaagtcaggaaacaacagatgctggagaggatgtggagaaataggaaggcttttacactgttggtgagagtgta

SEQ ID NO: 768389 - DNA, 594 bp, Homo sapiens
aatgcagtaggtcaattaggtagggaggtttaagaatgcttccactgtacttatcctgtagcacttacatactgtaattacccattagggtatgtggctaagagagtgcactctgacatctgagttcaaaacctggctttgctacttccaagtcacataactttagacaagttatataacagctctgtgtctcagttycttcatctggaaaataatcataataacagaatctacctcgaagttattaggagaattaagtgagatagttcatttgtatcagttggaggggttcctagtgtgtaggaattcttcaataaatatttattattgttataattactgttggtggtggtgatgtttcctccataatggcagggacttgatctcattcaacactgtgtggctacttaggtggaaaaccagaaatggactaaactcttacctaccattttgaatgtaatgctcttcaaaattcctcatttcttttgccacaattagtggggggcaattagtaattcaggcccctaagtctggcttgtttaaatgcagttccagcacagctgtgtggcaagggcttcactacagttagccacc

SEQ ID NO: 768390 - DNA, 603 bp, Homo sapiens
ctaggaagccacacatacccatcacgtgatgtatgctcagaaaagacctgataagatcctaagcttttccatctggctcatctttaggctcatggaaaataggaagcaaaagataaggcagtgttgtaaacagactagctaagcgtaaaagaagctattcaacgtagaaccaattagcacagtccaggaaagtgctttattttatttactttgctccaggtgttcaaggaaatttatcaggccactagcttatcactaagctaaaaggagagagatttcagagatcacaggcaacacagaatgtatttttaacaaaagtcatttggaaaagtcagtgaacaacaacaacacaayctaacaaccacaaaaagcagcaacaacaaacactggagagggagagaatctgatctccataattactatgttataacattgaaaatttacggttttcaacaacaaaattatgggacatgcaaaaaaataacctaaataaatacacacacacacgaaagtatggcccaaacgacgggaaaaaataaattaatgcaaactgtccctaaggaagctcacacattgagctcagtagacaaatactttaaatca

SEQ ID NO: 768391 - DNA, 588 bp, Homo sapiens
gtatattactatattcttatctccaaacagcccttcagaacagtttctgccatccagaccacctgggtcctgcctacccagagacttttctgctttcctcttgaatgcacatgtctttctggataaaaggaaaaaaagtatcattagattttcagtttctcactgttccctctagagttttatggagaaaaatgraaagagcctttggagagtacaactatttccacagatcctggagaaaggacactcaatattttccagaggagttactgagatgtgcttagtgaatagctgcagcaagcctttgcctaggggttatgagatttcctggtctacgaagtcacatgtgaaccgtgaacaatctctaaggatagaagtgtggcagagatctttcagttacgtaattaattaagagatcttacttgaagatcaattatcaaaagtaaagtgatttgagatttgatggggccactcttgaataaaatttaaatagaattttggaatagaactaattccacaataccagagatcatgttttcataatgccaatgtgtctttagactctagaatggcctctgtttctgatat

SEQ ID NO: 768392 - DNA, 578 bp, Homo sapiens
tgatcaccacagccatggctggaatcagaagtgaagccaagggaaaaggagattgggtagctgataaaacacagaagccattttgggttaggcataatggaaatatatttataattgatctacctgtgtttgaatctggactcgctcacttgctgtgtgggtcattttttaccagtttctcaatgttttaatttccctgtgtctctctttttgtttctccatgtattcattatacaatggaagtgatatgtgcttcatagcaagratttaatagttagcgctattataggcaaagtgtttggtccatattacctggaagacagtaagttatatagaagaagaggaggcttgcaatctcctcacataactttaaaaacacttcgataaaaattatttctgttgaactatatagcaatccttgagttaattagggcaagaattatatttatttcataagtaaggccttgagacacagaaatattatgttttaataaaaatctcttacctggtaaggaacagtgccagttttctgtctccttttctcaatgcttaatctctttccttcgtttttagcaaat

SEQ ID NO: 768393 - DNA, 637 bp, Homo sapiens
aaccaaacacaaaaccagcagaaggaaagaaataacaaagatcagagcagaactaaatgaaattgaaaccaaaaatacaaaagataaatgaaacacaacactggttctttgaaaagataaacaaaatatatagaccattagtgagattaaccaggaaagaaagaaaggtgattcaaacaagctcaattagaaatgaaatgggagatattacaactgataccacacaaatgcaaaagaacattcaatgccactgatacggtttggctgtgtccctacacaaatctcaccttcaattgtaataacccccacatgataaggscagggccaagtggaaataaatgaatcgtgggggcagtttccctcatactgtactcgtatgtagtgaataagtctcatgatatttgatggttttataaatgggaggtcccctgcacaagatctcttgcctgccaccagttttgttatttttttttttaaagagattctcactctgtcacccaggctctagtgcagtggtataatcacagcttactaaagcctcaattcctggactcaggtgatcctcccacctctggagtagctaggactacaggcatgcatccttataccaggataatgtttttgtatttttggtaaa

SEQ ID NO: 768394 - DNA, 637 bp, Homo sapiens
aaccaaacacaaaaccagcagaaggaaagaaataacaaagatcagagcagaactaaatgaaattgaaaccaaaaatacaaaagataaatgaaacacaacactggttctttgaaaagataaacaaaatatatagaccattagtgagattaaccaggaaagaaagaaaggtgattcaaacaagctcaattagaaatgaaatgggagatattacaactgataccacacaaatgcaaaagaacattcaatgccactgatacggtttggctgtgtccctacacaaatctcaccttcaattgtaataacccccacatgataagggcagggccaagtggaaataaatgaatcgtgggggcagtttccctcatactgtactcgtatgtagtgaataagtctcatgatatttgatggttttataaatgggaggtcccctgcacaagatctcttgcctgccaccagttttgttawttttttttttaaagagattctcactctgtcacccaggctctagtgcagtggtataatcacagcttactaaagcctcaattcctggactcaggtgatcctcccacctctggagtagctaggactacaggcatgcatccttataccaggataatgtttttgtatttttggtaaa

SEQ ID NO: 768395 - DNA, 617 bp, Homo sapiens
ggcctcccaaagttctgggattacaggcatgagccaccgcgcccggccatattttttatttttaagtgatcactattctccattatcttttcttttatggttgggagaaactgaggctcagaaagtttatgaatcttgctcaaagtcaccaacaagtcagtggcaaacctagcctcgaacgaaggtggacttkactccaaacttatcagtatatttttaacaaactttattttttaagaagttttagttcacagcaaaattgagcagaaggtacagagagttcctgtataccccctgcccccacacacagcctgttccactatcaacatcctgcattagagggctacattttttaccatcagtgaacctacaatgacatgtcattatcacccaaagtccataattcacattagggttcactcttggtgttgtctctgggtttggacaaatttataacacatatccactattacagtatcatacagaatatttccactgctctagaaatcctttgtgctccacctattcatccttcattccccacttggcatcttttttagtgaagtatgtgttcaggtcttttgcccatttttaaaatagggttgttcattttctta

SEQ ID NO: 768396 - DNA, 516 bp, Homo sapiens
agatggcccttatttgagctggatccattttcttggccaccttactgaatgcggtgcacactcattcaagaaaatgctgacctctgctccaagccgccttgtcggcagtttcccagacatagctcgactgtttatttatttatttttgtgttagcaaaaaggagaaaatcacattggcctaaaatgaatactaatgaaatgctttcgttagcgtcctttgtgataagaatgaaaaatcggatttccgcagaatcacaagctatacatttyttttccccaactttttttttttttttttttttttgccctttcctctaacagaaagattagggacagcctggaaggagagtaaagtcatttcattaaaaatatctgcatttttaagggcgactttgttgcagagggacgtggctgtgcaatttctccaaacccacttttctcagcctgtaaagcaaatgtacctatttgtcctctgctgcaacaatgccagctgcattcaatcaactgagaagctgc

SEQ ID NO: 768397 - DNA, 655 bp, Homo sapiens
ttagccatcaagagctagaccgtgcagtcagatctggagtgtcttagctaatccaaaagtctataatcaatcacagtatgaagagtccttaataaaactaaagtcactaatttcttcctatattcagtgagacaattaatacctatcaattaacaaaaatagggcatttctgaacacatctggattaatgtaaggccgggtgcagtggctcacgcctgtaatcccagcactttgggaggccgaggctggcggatcgtgaggtcaggagatcgagaccatcctggcaaacacagtgaaaccccgtctctactaaaaataaacacacaaaaaaaattagccggatgtggtcgtgggtgcctgtagtcccagctactcgggaggctgaggcaggagaatggcgtgaacctgagaggcagagtttgcagtgagcggagatcgcgccactgcactccagcctgggcgacagagcgagactcygtctcaaaaaaaagaaatatcatttatagaaattatggttttaccttaagatgactcctgccgctaagagtttaagagttttagaatttgagcatcaactccgcatgaatcattcctactccatacagcatatattaaaacactttttcatcaccttcttctgagcgcaatctctttg

SEQ ID NO: 768398 - DNA, 595 bp, Homo sapiens
attgagtgctagctaaaaatagtagccctgcattcttaccataacatatgaacagtttttgagcagacaaatatgagagggagtttcccaggcattttaaatttttctggtaaagagtggtaaagatctagagataaaggacactgatttacattaaactatgttgataacttaatagtcatgtgtttaaaatttgaatattatttattaagctgaaaattgacatccatcaaattttttagcgaagtatatgtgagatactatgtcaaccagtaatataaatatattaattattattattatattcattaaagattctatcaagaatacakttataaaataatagtaagattccctattgggttttgtttttattatttcattaatcaaattttgtctttgttacctattaatatttcactctaataaataagtttagtttacacaatttatgaagctgttgacctgataagactattatgaacttagcatacacactgcatataaacctaggaaatctttcaatcacaaaacatatttgaaatttgtacattaagacaataacttggtacagagttcagcacactctttctct

SEQ ID NO: 768399 - DNA, 588 bp, Homo sapiens
ttggagctaaggagaatgaagaaatgaagggacaggaaagaactgacttaaacagcaccaaagcaatccagcattgatttcctttggcagtagcatatgtttgaaattgacccgttttgttgagggatcttctatgaattcttcagtggccccattgacatgatgcccatgatggaggcagtgcttctgtgtgactggtttctaatgcacctctgctttctgcatccaaaggtatacctccatcatgtattgctcaggtaacttctccactgacaagggctttgaatgaaaattactttcaaagctkcccagtgatgacattactgccatggcttgtatatttgttcttagagaactcttgaatatttgactacatgtattggtagaattgcaggcttttaatataaacagcttctggtactagcaattcctttctaatttgttttcatagaggattcttacaacagttcatttgtcccccaaatccagagggcacatattatattccctgaaaggtttctttgaaccctttctcactagtgttgggctagaagacaagcaactctctaaacagtcctctaatcttcc

SEQ ID NO: 768400 - DNA, 608 bp, Homo sapiens
gacttcctctttattgatttggatgccttttctttctcttgtctaattgctctggctaggacttccagtgcaatgtcaaatagaagtggtgagagtgggcatcctccttgtcttgttccagttctcagggttcaagttttcaacttttccccattcagtattttgttgrctgtgggtttgtcatcgtggcttttattacattaaggtgtgtcccatctatgctgattttgctgagggtttcaatcattaagggatgctgacttatgttaaatgcttttttctgcatctattgaaatgatcatgtgatttttgtttttaattctgtttatgtggtgtatcacatttattaacttgcatatgttaaactatgcctgcatcctgatatgaaccccaggtcatagtggattatctttttgatatactgttggatttggtcagctagtattttgttaaggatttttgcatctataggctgggtgcagtggctcaatcctagcggtgcctgtaatcctagcactttgggagaccgaggtgggtggatcacctgatgtcaggagttcaagaccaccctggccaccatagtgaaaccacatgtctactaaaaatac

SEQ ID NO: 768401 - DNA, 608 bp, Homo sapiens
catagattttgcttcatggaccaaaatttgaaaaccactgcactagtaggataaaatcaataaaacttccattttgttagactacaacttttgccaatctgctatgaatggattacagcttgccatgagatattgatctctgaccatggggtagctgggcaggcctggggctgctggagtcccatagccttygacttggagctgcctcatccagagtgcagtggtctgatagtatgctctcagtccccacaggctgacgatgtgtcttcactcattttcactctgccccaccatgatgtgcatagtactgacaaggaggtactgctatcacctggatctccttcagcagccaatgttaacatgatgttgttgggagagtatagcactagctccaggtggggttgggcccatgtgggtacagctccctgtgataaccccaatctctgccttcacatgtatccgatatttctgtccatttctggcagagtgcctttttagtggcgacttagctagcttcagaatggcctttctaagagcatatgctcattctgaaaatgagagaattaccattattttgagatacttaatatgaaaaaaattcgatggat

SEQ ID NO: 768402 - DNA, 509 bp, Homo sapiens
agtacattcacactgttgtacatccattaccaccatgcagccctagaactcttttcatcttataaactgaaactctgaacccattgaactctccgctcccctctgttccagtctccggcagccatgttttactttctgtctctatgaattgactactctaggaacctcgtataagaggaatcttacagtatttgtccttttgttactggcttacgcatttaacatgatgccttcaaggtccacccatgytgcagcatgtgtcaaaatttccttccttctttgggactgactaaatattttttagtattccattttatttcttctgatagcttctcagatatagtcatgcatcacttaacgacagggatatattctaagaactgcgctgttaggcaatttcgtcattgtgcaaatatcatagagtgtatttagaaatgtgattgtactgaaatactgtaggcaattgtaacacaatggtatttgcgtatcaaaacatatctaggtcaggc

SEQ ID NO: 768403 - DNA, 600 bp, Homo sapiens
ttttaagtggatcgtagacctaagtgtaaaatttatagaaaaggagaaaatcttcatgctgttgtggtagcacaaaaagcattaaccataaaagaaatatttatcaattgtatccattgagattctttctgctcttcaaattgttccatcaagtaaataaaaagcaagccacatgctgggaaaaatattgacaagatacattgggcaaaggacttggatccagaagatataaggaactcttacaactgaataaggaggcaaacaacctagttaaggagttgacagagtacttttgggagaccaggtgggagggtcacttgagcccaggagttcaagatcagcctggamaacacagtgataccccatcttaaacaaacaaacaaaaaaatgaacaacaaaaagaaactgacaaaggacttgaacagatatttcatacaaaaaaaattacaaatgactgataagcaccttgctatggtttgaatgttcttgtcccttccagaaattcttgtgttagaaactcaatccccagtgcaacagtgttgggagatgggaccctttgggaagtgattgggtcatgagtgctctgccctcataaatgaa

SEQ ID NO: 768404 - DNA, 626 bp, Homo sapiens
acattcctcaaaataataagagccatctatgacaaacccatattagcatcataatgaatggggaaaagatggaagcattccccttgaaaaccagcacaagacaaggatgccctctgtcaccactcctattcaacatagtattggaagtcctggccaaagcaatcaggcaagaggaagacatagtttgaagatgacagatagcaggcagaactagcttgcagctcccacttggacagaacagtgtgtgaagactcacatcatgaacttttactccaagaaccactgcargaacataccgggaaagctaagagaatctacagacctttgaagtaactggattactgctgcaggctccctgagaagccaaaaactgtgattctgcttcctttctcaatgaggaggctcgtggtctggagcaagttctcagccctggtcactggctgcctggaaatagactcattgcagctggggagggcacagtaggagtgagactggcctttaggtctccaggctgtgtgggagcagggtgagccctctgactaccggctttcccccacttccctggtgacctgtatgacttatcagagacagccataatacccctgggaatatagctccattggact

SEQ ID NO: 768405 - DNA, 626 bp, Homo sapiens
acattcctcaaaataataagagccatctatgacaaacccatattagcatcataatgaatggggaaaagatggaagcattccccttgaaaaccagcacaagacaaggatgccctctgtcaccactcctattcaacatagtattggaagtcctggccaaagcaatcaggcaagaggaagacatagtttgaagatgacagatagcaggcagaactagcttgcagctcccacttggacagaacagtgtgtgaagactcacatcatgaacttttactccaagaaccactgcaggaacataccgggaaagctaagagaatctacagacctttgaagtaactggattactgctgcargctccctgagaagccaaaaactgtgattctgcttcctttctcaatgaggaggctcgtggtctggagcaagttctcagccctggtcactggctgcctggaaatagactcattgcagctggggagggcacagtaggagtgagactggcctttaggtctccaggctgtgtgggagcagggtgagccctctgactaccggctttcccccacttccctggtgacctgtatgacttatcagagacagccataatacccctgggaatatagctccattggact

SEQ ID NO: 768406 - DNA, 552 bp, Homo sapiens
aagttttatctgagttaatagaggttaaaaaaatagggattttctatttcttctccatttttcagctttccctatctataatgaggaactttcctcctctccccacccccatctgcctttctctcactgtctcactttctgtccctctgtttctctttctgcataccagtaaggattcatggattgttaagaaatcagtgtattgaatttcattatcatcatcttttttgatggccaaattgtcccagatatggagaaggagacaaagcaagagaagaggctggtagacatgggcccagtcattcagaactttgtaggctgagtaatggtgagcmtcaaaggagagaagtactgtgaatatctgtgtgttttgaaacatcactcagacagctgtatgatgaatggctggagggaatcaaggctggagaccaggaatccaccttatcctgctgcactgtccaaaggacagatgatggaggcctggacaaaggtagaggggtggaggtggaaataattgtatgaattcaagagatactaatgaatgtaccaata

SEQ ID NO: 768407 - DNA, 625 bp, Homo sapiens
acatgggcccagtcattcagaactttgtaggctgagtaatggtgagcatcaaaggagagaagtactgtgaatatctgtgtgttttgaaacatcactcagacagctgtatgatgaatggctggagggaatcaaggctggagaccaggaatccaccttatcctgctgcactgtccaaaggacagatgatggaggcctggacaaaggtagaggggtggaggtggaaataattgtatgaattcaagagatactaatgaatgtaccaatatttttgacatgggggtatcaagctgtcaagcagtccytaagctacttagctggttcactgcacattcataaattcagtcagcaaaaagccagtgggcctgaatggatttagactgtttattactcatggcataataggtatcatgagcttcacattaacatcggccccactatctccctaagtcctataggggcaatggagaggaactcaggttagtactgtgcacaccagggtctgtgttacatttgaggaattcagacactacaagatcctgaccatatataggggctattgccaaaaatgctcttcctcacccctagaaataggcattgtcttttatgtgtgtgtggcaaaatacac

SEQ ID NO: 768408 - DNA, 625 bp, Homo sapiens
acatgggcccagtcattcagaactttgtaggctgagtaatggtgagcatcaaaggagagaagtactgtgaatatctgtgtgttttgaaacatcactcagacagctgtatgatgaatggctggagggaatcaaggctggagaccaggaatccaccttatcctgctgcactgtccaaaggacagatgatggaggcctggacaaaggtagaggggtggaggtggaaataattgtatgaattcaagagatactaatgaatgtaccaatatttttgacatgggggtatcaagctgtcaagcagtccctaagctacttagctggttcactgcacattcataaattcagtcagcaaaaagccagtgggcctgaatggatttagactgtttattactcatggcataataggtatcatgagcttcacattaacatcggccccactatctccctaagtcctataggggcaatggagaggaactcaggttagtactgtgcacaccagggtctgtgttacatttraggaattcagacactacaagatcctgaccatatataggggctattgccaaaaatgctcttcctcacccctagaaataggcattgtcttttatgtgtgtgtggcaaaatacac

SEQ ID NO: 768409 - DNA, 624 bp, Homo sapiens
aaaagccagtgggcctgaatggatttagactgtttattactcatggcataataggtatcatgagcttcacattaacatcggccccactatctccctaagtcctataggggcaatggagaggaactcaggttagtactgtgcacaccagggtctgtgttacatttgaggaattcagacackacaagatcctgaccatatataggggctattgccaaaaatgctcttcctcacccctagaaataggcattgtcttttatgtgtgtgtggcaaaatacacataaggtttgccatttaaccgttttaaagatccaattcagggacactaagtatattcacagtgctatccacctatcatctctgtctagttccagaatttttcatcagtccagacagaaacctcataccaattttaagcagttattccccattcctcccttgccccagtcactggcaactactaatctgcatttttgtctctatgaatttacttattctggatttttcatataaatggaatcacacaatatgtgaccctttgcattttgcttttttcacttagcataatgttttcaagattcatacattttgtagcattgtttcttttcatgaattatattctactgt

SEQ ID NO: 768410 - DNA, 624 bp, Homo sapiens
aaaagccagtgggcctgaatggatttagactgtttattactcatggcataataggtatcatgagcttcacattaacatcggccccactatctccctaagtcctataggggcaatggagaggaactcaggttagtactgtgcacaccagggtctgtgttacatttgaggaattcagacactacaagatcctgaccatatataggggctattgccaaaaatgctcttcctcacccctagaaataggcattgwcttttatgtgtgtgtggcaaaatacacataaggtttgccatttaaccgttttaaagatccaattcagggacactaagtatattcacagtgctatccacctatcatctctgtctagttccagaatttttcatcagtccagacagaaacctcataccaattttaagcagttattccccattcctcccttgccccagtcactggcaactactaatctgcatttttgtctctatgaatttacttattctggatttttcatataaatggaatcacacaatatgtgaccctttgcattttgcttttttcacttagcataatgttttcaagattcatacattttgtagcattgtttcttttcatgaattatattctactgt

SEQ ID NO: 768411 - DNA, 507 bp, Homo sapiens
gccactaaaagcaacctgtgcctcctgggttcaaggtgattctcctgcctcagtctcccaggtagatgggactacaggcgtgcactaccaaacctgactaattttgtatttttagtagagatggggtttcaccatgttggccaggctggtctcaaactactgacaagtaatccacccgcctcagcctcccaaagggctgagattacaggcatgagccaacgcacmaggccaagaccaattttattttaatttgcatttccctaatgactgaatatcatcttattgtttgcccattgatgctgaatatcatcttatttgtttgctggcccattgtttatctttggagatgtctattcaagtcctttgcccgtgattaattgggctgtctttttattgttcagttgtaatagtttttaaatatatatagtacacaagtttttttatcagatatatgatttgcaaacattttctattattttgtggtttgtcttttaacccttttagtgg

SEQ ID NO: 768412 - DNA, 525 bp, Homo sapiens
aaaagcttttgtgtgtcaagggccactaaaagcaacctgtgcctcctgggttcaaggtgattctcctgcctcagtctcccaggtagatgggactacaggcgtgcactaccaaacctgactaattttgtatttttagtagagatggggtttcaccatgttggccaggctggtctcaaactactgacaagtaatccacccgcctcagcctcccaaagggctgagattacaggcatgagccaacgcaccaggccaagacmaattttattttaatttgcatttccctaatgactgaatatcatcttattgtttgcccattgatgctgaatatcatcttatttgtttgctggcccattgtttatctttggagatgtctattcaagtcctttgcccgtgattaattgggctgtctttttattgttcagttgtaatagtttttaaatatatatagtacacaagtttttttatcagatatatgatttgcaaacattttctattattttgtggtttgtcttttaacccttttag

SEQ ID NO: 768413 - DNA, 571 bp, Homo sapiens
aggaaggaaagcggacctccttctgaacattagagccagtctcctttctcccctttaactccaggcctcccctcttcccacagcaggaccggaaggggcatatcaggaaaaactctgatccaatatttttctcaaccttagttgcagttagaacttattgtttacacgtgtttccaaaccatcgtcataacagctctactagcaaaaaaaagcctccaggttaaccctaggaaataatttaactgtttacactccacatgatgtggcattatcactgtcctgtagggggagctcttagttaacaaacagccagtaaagcaagaagtacataaggcaggataagcagtagtcactctaaataatgtctctccccaggcacaagcacttaattgacggagctaatagcwcttacaagagcacttgaattaagcaaggaaaggtagctaacatttatacctactccaagtatgctctcttagctctccatgctcatgctgccatttaaaaggaaaaccgccaatggacctcctataaaatatcaccacaaaattagcaggttattatcctcagt

SEQ ID NO: 768414 - DNA, 595 bp, Homo sapiens
agactaaatatatgcagtcattttatggaaccaatctgactagattggatgcagactaggtaggatgcaaatttaaaaaaaactttattcttcttccacttataaactttaaacctgctttgtggagcaagttctttttatctctggggaaagatcctgagtaagtctcatagagttctcattcatttaaatcacaagaacaatcttaggtcagtaattaaactatctggcccagtgtaatactgaaactttcaaatacttatccacttgagctcttctttccatcccagcttggtacttctttggtcctagaagccagcagtggtttatcatcgacttattcttactgactagctccccaatacccagtagctgctgtttctggsccctccaggaatggttttaggaggaaaggggataaggagtaaagggctggtactattgtgatcatgccaaagggcttggtggatattccatgcttccctttctctcaagaggaaactccctttcttggagactctctcactagaactttccagaggtgattcaggggacaagagaataattgtccttaggcagactctttttcaagctg

SEQ ID NO: 768415 - DNA, 425 bp, Homo sapiens
aacagggttttgccatgttggccaggctggtctcgaacttctggcctcaagtgatctgtgtgcctcggcctctcaaagtgttgggattacaggcgtgagccaccatacccagtctttttttatttttttaaagacaggttcttgctctgtcgcacagagtggagtgcagtggcacaatcatagctcactgtaacgtgtctaccaggctcaacagatcctcccacctcagtttctcaagtatctgagactacaggcatgtgccattacacctggctaatttttaaatkttttgtaaagacgaagtctcattttattgcccaggctggtctcaaactcctgggctcaagccatccttctgccctggcctcccaaagagctgggattataggcatgagccactgtgccccaatttatttattttttat

SEQ ID NO: 768416 - DNA, 555 bp, Homo sapiens
cacaacgcctggccaatttcattcttttgtatatggatatccagttgtcccagtataatttgttgaaaagacaattctttctacattgaattgtcttggcacctttatcacaaatcaatttaccataaatgtaagggtttatttttagactctcaattctattccattgatctatatgtctatccctatgccagtaccatcctgtcttaattactgtagctttgtagtaagttttcaaatctggaagtgtgagtcctccaattttgttctttttcaagattgttttgactattctgggtcccttgcattttcacatgaatttcaggagcagcttgccaatttctggaagaagaggaggaggaggaagaggaagacraagaataagaggaagaggaggaggaggagaagaaagaagaagaaaaaaccccactgggattctgacagggattgcattgaatctatagatcagtttggggagtgctgccatcttaacaatattaagtcttccaatgcatgaacgtataaagtaaaaggcaatgtgagccactctttact

SEQ ID NO: 768417 - DNA, 646 bp, Homo sapiens
ccatgtgtgctgtgctctgcactgggatcccagcaataaacaacacagaaacaagacaggttatactgtagagaaggagacactagacaaatatttgttggtcaacagaatttgtggaagccaggcaggactctaagtgaggacaaatgacaagaagagggagaatttagaaaataagatatcagtgaaacgactattataggaaaaaggtgtttaatggattcattcagcaggtaatttattgaatatccactgatacaaatgtattcccaggtattagggatatatcagtaaataaagcaaagtcctttcccttgtaragcttatattctatcatttagaggcatttttgaaaagcaaagcacctaatattggatgaagcccatctgtgggaggacagcagtgaaggagttaaaatgcttctagggctccaggctttgttgaaacagatggtttctttgcactagggaatgtttttaagagggattagaggactgggctgaggaagggctgagacctctttccctcacgccatagcacacacacctgctgttctggcgcctggtagctatgtaacttgtcccccacttggtaggcacttgtttgcaggcttgtgattgtgactgtagggctggctctaagcttc

SEQ ID NO: 768418 - DNA, 518 bp, Homo sapiens
cctttttgatgtcagatccctctgaataacaagttatttgcctttttttccctccataagactgtgagcaccttgagagctgcgagaacatctcacttatctttgtatctctgatgtttaggacagtgtccagctcaaagtgtctataaatgtatgttgcattgaatagtggagggaagctttaaatacatttactgcagacagatgtatgcttagcatatttaattgggagacattattagaaagtggagatggataaagaaaggaatttttgtggatatgatatagagaatttttgtttcctaaggatttaaaatttttgtttgtttatttattkgtttattttttagagatggggtcttgcagtgttgcctaggcttgtcttgaactgctgccttcaagtgatcctcctgcctcagcctcctgagtatgtggaattacaggcatgagccactgcacccaacttgcctaacaatttttagagtaacagttattttgcggttcctttacgtggagaa

SEQ ID NO: 768419 - DNA, 590 bp, Homo sapiens
attgtacaactagaattcagttcaattattcagggaaacaataacaatagtaatatgtttatgagcacatgtatctggcaaattacattcttcaaaccaagttagaaaagacttggaaaagttaactgtagttatgaattacattataatttacctaagtatgggtaatggtatttatattttaaatttttatataacaattatctaaacataatttttaatagcatatactttaacaatgttaaattaacaaaaattcatggcaaaatgttagtaacagttgcaagaaaacattaggratacagtaacaaaatttatttttcaacattaataggacatgtactgcttgacatttggatggggactttttttttaacatgaattatgtatagttgaacaaaaccttcaaacagcttttaagatatgctcaatttatctaacattcttcttatgaaactgtttcataaaaagtatcaaatattttctaacagaataagctaaatctagcatatattataatgtgcaagatatttatgaataagtaacattatcaggaaacatagctaggtttacgaattcatttttaattc

SEQ ID NO: 768420 - DNA, 623 bp, Homo sapiens
aatatatgagaattaaaaatatgtatccatctgttttaaaagatatagaaatactacatgtagattctgcatgtgcaaagctaactagaacagttctccatcctggagataaaaacagatacagtaaaatatgttaartgataaaagagtacttagcctattataggagttcagggaagccatgctggggagatgatgacaagctgaaatcttaaagaatgtgtgagaccgtaaaaacacacaatatgaagtttataatataacagtatgaagtatttgggaaattcataacaaaaacaatattaaagaatacatgaaagtacagacataggtaattatgtgtcattttctcctcttatataaagaaaatctaaacttgtggcaggacaaaagcttatctcatgtctagatgctggtgtgctcacctcttaaatatttgtaatatttattttaagtgtagtcagagaatctagaggcaggaggattggcaagaatacagtcgttgctgaaattgtacacagtatagagtaatcaaaagttatcccaaagaaagggctagtaaaaatcattccgtctgtgactttctacagttgattattgaaccattctaagaaagcacccaa

SEQ ID NO: 768421 - DNA, 623 bp, Homo sapiens
aatatatgagaattaaaaatatgtatccatctgttttaaaagatatagaaatactacatgtagattctgcatgtgcaaagctaactagaacagttctccatcctggagataaaaacagatacagtaaaatatgttaagtgataaaagagtacttagcctattataggagttcagggaagccatgctggggagatgatgacaagctgaaatcttaaagaatgtgtgagaccrtaaaaacacacaatatgaagtttataatataacagtatgaagtatttgggaaattcataacaaaaacaatattaaagaatacatgaaagtacagacataggtaattatgtgtcattttctcctcttatataaagaaaatctaaacttgtggcaggacaaaagcttatctcatgtctagatgctggtgtgctcacctcttaaatatttgtaatatttattttaagtgtagtcagagaatctagaggcaggaggattggcaagaatacagtcgttgctgaaattgtacacagtatagagtaatcaaaagttatcccaaagaaagggctagtaaaaatcattccgtctgtgactttctacagttgattattgaaccattctaagaaagcacccaa

SEQ ID NO: 768422 - DNA, 633 bp, Homo sapiens
ccttcaatatcctgcattatctctgcccccattacctatctgacctcatatcctaacaccctcctttgtgcactctactctagtcacacagacttccttgctgttcctaaacctgcaagacatgctcctaccttggaggcttagctctagttggtccctcttcctagaatgctctaacttcccctatgtccttccagtctcttctcaactcaacctccctaataaagagtaccttgacaaaccagcttgaaaaaaatgccacctgcccccaaattacttgattcccactctcctcacttwccttaatttttctttcttccatgttattttcaccatttagcccaccatacaacctatttattatgtttattttcacttatctgtttccctgtctgaaacatgaagatacaaatctttgtcagttttatacactaatacactccaactgcttcaaacattgcgcggcacatagcaggaatgcaataaatcattgatacttgaatgacagaaatacaccctagtaagtgtcttacaaactgtcaaggaaatatgaatgtgttagtgtttgtgtattccatgaaattaatattagagtcacatgctgaaagggacattatcacttacaggaatgac

SEQ ID NO: 768423 - DNA, 432 bp, Homo sapiens
gaagctgacttattgcctcttgtttcagagttggggaatgttagccaggtatttttgatgttgaagctctggggcgtgatccagcaggtggcatgtaggcttattgatcagttggtagactctttcttggctgtgtgtctcccccacatttcctcacagttgcatcctgaatgtcacctcagatggaaagggagggtgttgcaacagcagaggagatgcaacaacaatggtttccctttcggcgcckgcaccttttgattagaagcagcgatgagtgatcaggcaacagatcaccaatatttagaggaaagggttctttttgcctgctgtggctgttgcaatctatgtgcgggctgctccaggagcacacacacaactgtctaccaagaggatagggatagggaatgggttgctgctgtgctaaaagctgaa

SEQ ID NO: 768424 - DNA, 509 bp, Homo sapiens
ctgagaggaaaatttataacactaaatgcttaccttagaatggagaaaggtctcaattcaataattaaagtttctacctcaagtataatattcaaatacaaactttaattattgaattgagatctttctctatctcaaggtaagcaggaagtgtttttaatgttacttgaatgttgcttcctgggttaatgtacttattattatcttaaraaaaattatctttcttctgtaactattttattctatataaacacttttactcaagagcttgaaagcatgcctactgagagtaagtgactcagagtgagatgacctcaccctgttggggctgctcctggattggctggacaggcagttgttggtgaattgagcatttcactcaacaacttatttctcaggtgatagtgtctgatgaatttttactctcactacaaattctactttgaagaataagaaccaaatccaaaggagcatatttgatttgcacaagaaatacaccagtcttgaga

SEQ ID NO: 768425 - DNA, 507 bp, Homo sapiens
ttattcattattatttattcattcagcctatgtcccaaggactgttctaggtgctggaatgtagcagtgaacaaaataaagaccctgtctgagagttctacttgctgtagaaagcataaaatattgaacaacataatgtctttccccaggagtttgcagtctaataggggaaatagctgtatatccaatgaaatgggcagctggaatgtaaagcgtcagatgggaaccataggagagcttasacaatgaactgaggacaagacaatgtttggagatggggtcaagaagcacaaggaaaaacttttattaagaggctgagttggggttatgaggaaaaagatagatggtttacaatggaggagaaaaggggttgacattaggaagataagggtagggacaagaaaatacaaggctaggggccaccagagcctgccaagcagggaacaaatgtaacagacacttggaagcagtaataactgagtggtaaccattataaatgtttactct

SEQ ID NO: 768426 - DNA, 634 bp, Homo sapiens
gctgggtggctgtgacaatttcttaaaataacacaacattgaagtttgccacatcagtgaactcttcctttcacaagagatttctctgtagcatgtgatgctgtttgatagcagtttacccacagtagaacttctttcacaattggagtcaatcctctcaaaccctgtcactgctttatcaactaagcttatgtaatattctaaattatttgttgtcatttcaacaatgttcacagcatcttcaccaggagtagaagccactttctttgctcgtccataagaagcaactcctcatcaattcaagtttgatcatgagattgcaacaagtcactcgcatcttcagggtacacttccaattccagttctcttgctatttccaccacatcagcagtgactacctccactgaagtcttgaaccactcaaagtcatctataagagttggaatcaacttctttcaaayccccattaaagtggatattttgacctcttcccatgactcatgaatgctcttaatggcatctgaatggtgaatcctttccatacgttttttaatttactttgccccagtccctcagaggaatcactttctattgcagttatagccttatgaaatgtttttcgtagataaggctt

SEQ ID NO: 768427 - DNA, 566 bp, Homo sapiens
tgctcctgcagctgagcagggcaaaggcctgacgacaacaggggcgttaggagatttcttctgttagaaccttaagtacaagtcaaaggaaataatcatgtcagtactgacctactgaactcaatttttaaaattttgagttgtattttccttaaagccaataagtagtgcattctacagaaatttacctaagtactcattttaatcaagtccacaattccggtgttcaaagttaatatttaagaaakttaaggctaggtgtggtagctcatgcctgtaatcccagcactttgggaggccaaggcaggcggaccacctgaggccaggggttcgaggccagcctagccaacatggtgaaatccgtctctactaaaaatacaaaaattagccgggcatagtggcacatgcctgtagtcccagctgcttcggaggctgagggaggagaatcacttgaacctgaaagggggaggctgcagtgagccgagatcgtgccactgtactccagcctgggtgacagagtgatactttgtctcaaaaaaaaaaaaaaaaagtaaaaagagtgaatg

SEQ ID NO: 768428 - DNA, 630 bp, Homo sapiens
aagcattgagttaaagtctcatagctctccatgcctttcctcctattagaaggtgagtacaggtaccagaggggcggagaggtggagggtttagagagggacaatttggggtatgggccacttccagagaggcagtgtcaggattgggcccattgtgggttttgtcagagcatgagagcccttgctggagtaattttatgagctaatgaagtaaaatcaataaaccgagaatgtggtaaaatgtcaaaaaattgaggagattgaagtataataccccaatatttttccagtataacaaacactgttatttcataaaagagaggacatttcttgcccttttttcttgccrttggtgatattaaaaagtaaaaaagtgagtctcaattgcttaaacctgggaggcggatgttacagtgagctgagattgcaccactgcactccagcctgggcaacagagtgagactccatctcaaaaaaaaaaaaaaaaaaagtgtgagtctgtggtctttgaataaatggccttttttcccaagaaagaacattcataaatttataatcatacacacatactatatacatacacatataagatatatctaatatcattgcccttatttttctgggtccata

SEQ ID NO: 768429 - DNA, 519 bp, Homo sapiens
agctctgctcctgacctatactcaggactccaggctgatacagcagctggcatcttcaatgggatgaaggcaataagtaccctggagaatcttgcactagcaattatgtgtttaattttgttcaaaatttattggccagaacgagtagrtgacatggccccacctgatcacaggggccataaaattgaattctaacaagtgcctagaaggcagagagtggcaaatattgggtgagctactaaagcttataacagcaagctttgaaagggtaacccactttatagggtaaccaactttctagccacgagagtgaaaagcctctccactccatctcctaccctgacaactaattccatagtttaggtttgttccctgcaattcccaatctcttggtgccaatgtctacagtattcagaattattctggcttttgaatatatggaattattttgtatatatgattaagaaatccaggtttacattgtgctttgggcatagctggagacaacagctcaaatat

SEQ ID NO: 768430 - DNA, 646 bp, Homo sapiens
cgctgccacacttccttaggcttcactgggcagctgcctttctaaagggctgtctccttcttgccctgatcctgctgccctctgggagaggcttaggctgcattccagaaggtttccactttctgctgcttctggtccatggatcacatttgaaaaaacacagctttggagtttccaaagcactcgtatacctgctctcatctgacacaaggcttgcaacagccaagacgtatgcaagacacaaatgccggccccattttccaggcacggatgttaaggctcaaagaggtcccccacctggtgagtgcagggtggggtggagttgaggtctgctgctcaccactgcccagtgcttccatcacctctccctccttgggcatgacacttcaactccatacatgtgggtgtatgtgcttcctctgcagtgcaggcacagagagaaatggtgtggctctytcaccccaaaaggcaggttaccgactcggggtacacccagcattgcctaacacagtgtgccatcccatcaccaatccatttacctcccagatgcctactgcatggcagaccccacactaggtgctgggggcacagctgggaccatgtacatagagtcctgtcttaaggagcagacactctagaactttct

SEQ ID NO: 768431 - DNA, 708 bp, Homo sapiens
atatacgtattatgctgagtaaaagaaaccagacgcaaagcagcacaatctgtaagtttccatttacattatgcacaaaattctctgaaaagaaatttagaggaaagagactttagtacagaaaacagtttgcaaacttggagatgcaccctccactggaaaatgaaggggagttcccaagaatgagggaagcatcaagttttgcgcaaaagttcctgcccaggttcccaatcagatcaagatgtgcaaatgaaggattgaaacttgcttagttctgattggtcaatatagctgagctctcattggttgatacagccaaaccctgattggtttatacacttgagccctgattggttggttcaggtgagctgagaaagtaccaaagataaaaaggtgcaggttttcyggggaagtcagggtagttgtgtaaccatagtcagcaagtggctgcttcattctattttaaatttaggcccacttacccattcttatttgggggggggggtagtatttatttattttgtagagaacagggtcttggtatgttgcccagtctggtcgtaaactcaggggctcaagtgatccgcccaccctggcctaccaaagtgatgggattacaagcaagaacagcggagcctagcccacttagccactcaggatccatcttgaaggtctggccctttcaggttcacatttgttcacagaagt

SEQ ID NO: 768432 - DNA, 648 bp, Homo sapiens
aaagttatttatcattcaaaatgcagtaatttttcttttcataattaacattctattccattcaagtacaattacctcttccactccatcctgtgtaaattgaatttcctacttgttcttacactttaactaggatcttcttcactttattcaaaatgaaatagagtcggaatattagtggtcttagtagatgtgtttaaccatacctgttttatcccccaaaatatctcatcattaaatcaatacacaagccagttgttttctatgtgtgcactggtctgtatatacatcaggrtgtgtgggtgagggaagggattagttataaaagagcaatactcaactgctcaggtgatttgaaaaagttctaagagataaaagtaaatctgtgtatcaaaataaatgctatgttatctcggcatatgttttaaagacttcttttagcaagccttcttagaaactttgaagttcttaggtgactttatagatatgactttatagatataaagcacttttaagcttcctaccttaagatttattttaaatcctcttaatattttcaatgagattaagctttactaagaattgagtctgatacagtagaatttatattgtattggggggaaatgcctgaaaaatcagaaaaagata

SEQ ID NO: 768433 - DNA, 648 bp, Homo sapiens
aaagttatttatcattcaaaatgcagtaatttttcttttcataattaacattctattccattcaagtacaattacctcttccactccatcctgtgtaaattgaatttcctacttgttcttacactttaactaggatcttcttcactttattcaaaatgaaatagagtcggaatattagtggtcttagtagatgtgtttaaccatacctgttttatcccccaaaatatctcatcattaaatcaatacacaagccagttgttttctatgtgtgcactggtctgtatatacatcaggatgtgtgggtgmgggaagggattagttataaaagagcaatactcaactgctcaggtgatttgaaaaagttctaagagataaaagtaaatctgtgtatcaaaataaatgctatgttatctcggcatatgttttaaagacttcttttagcaagccttcttagaaactttgaagttcttaggtgactttatagatatgactttatagatataaagcacttttaagcttcctaccttaagatttattttaaatcctcttaatattttcaatgagattaagctttactaagaattgagtctgatacagtagaatttatattgtattggggggaaatgcctgaaaaatcagaaaaagata

SEQ ID NO: 768434 - DNA, 606 bp, Homo sapiens
gctcttcagaaatcttgtatctactgaactccaagaacatcatttattcagtacccaaggatgggacatagccaatgatgatgatgggaacattttcaggaactgtgctcactcacatagatttttgttcatggaataagtttctgaaggtctgtttatcagggtaaaacttsagtcctgtatcaactaacaatcccatacagaagggtcactgtttatatttctccaaagcctggtcaaaagtaactttgactaatttgattaaattgattgataaagtaaatcatatcaccaaaacacttctcattccaatgcttgatagttatggaatttgctgagaccacccactgaatacccgttcaaatgaatggaatctcacagagcacacataatcatctctgacttttgtagccatagggatacattaatacctgtgcctcatacttaactgaaaatcaccagttgtctgctgagtagtttactgcatgtcaaatctgaggtccagtgtaatagactgttttaccacttctattcagaattttctaattcatagacattctaattttatttgtctttttctctcaaataccatgatagggtgaaagt

SEQ ID NO: 768435 - DNA, 595 bp, Homo sapiens
atgtgaaaaatgtgaccagggtgggtgccttaaattcttcaggattatgtgaaagctgtagagacttcaggccagcagccctcccggaagactcaagatgaaaagggcactgacttttgttatgataatgtcagagtgtcttgtggacatcaaggacagggaattagccacccctcccttaaggacaagctggaaccaacgcttttatttctgcttctctctgatagagaaaagctctgtttctcagtgcatgtctcagccaatgaccaccaactttcccaagcttatatcccttcttttcaagaagaaagctaagacagagactcgatgcctaaatttcattcctgtcgcagactggcctagtttggggcaggtgttcacctataaaccagtcagcagcccagggcaggcaggatcatgcttcactgttgctatytccatagagatggtaccaagaaaagggaattttctgagggctggttagtatagcactgtttgatgacttcacattcattcagtggacactggttgatcactcttaatgttctggacactaaattggcctctatttcacgggctttatggtctctttaat

SEQ ID NO: 768436 - DNA, 647 bp, Homo sapiens
tggctttcctcccttttgacccttggctcagcctagaagtgcaggaaaagcagaagctgattccaggcaagccaatgctcctgactctgaagagttgggggctgttagagagccctttcctagaaagcctgacacccgtgtctttagcccggcagccatgytagtcacttttaactggttgacaggtgcccggtgtttagccccctaattctaaggaaaaataggacagaatagcaagcaaaaggggtccaatggtactcactgcatggcgatatcccagatgagcccccaggatgtgtccggagttggttccttctggtgggtttgtggtctcactgactttaagaaagaagccgcggacctttgtggtgagtgctatagcccttaaagatggcacggacccaaacagtgaggagtagcaaggtttattgtgaagagcgaaggaacaaagcttccacagtgtggaaggggacccgaacgggttaccactgctggctggggtgaccagcttttattcccttatttttcccctccatgttccgtttttgtcctatcagagtgcccttttttcaatcctccctgattgactacttttaggatcctgctgattggtgcattttacagagcactgattggtgccttttaca

SEQ ID NO: 768437 - DNA, 466 bp, Homo sapiens
gggcccaaatctcttactgctcatgaactaaactcttggtgccttgaattctttatctagagagtgggattataacagaattcatcttacaggattgtgctaagaattaagttatttgactcctgcaaaacggggcctatatgcctctgctattctgggttctatgctctcttgctcttctgttgaaaatgtaygtgttcaccgggcatagcggctcacgcctgtaatcccagcactttgggaggcagaggcaggcagatcatgaggtcaggagatcaagacaatcctggctaacacagtgaaaccccacctctactgaaaatacaaaaaattaaccaggcatggtggtgtgtcccaagttggttgcttccagtgaatgaagaatgaagccgcagacctttgcagtgagtgttacagctcttaaaggtggcacgggcccaaagagtgagcagtagcaaggtttatt

SEQ ID NO: 768438 - DNA, 493 bp, Homo sapiens
ggtctcatgagacttattcactactatgagaacagaatggggaaaactgcctccataattcaattatctccacctggccccgcctttgacaggtggcgatttttacagttcaaggtgagatttgggtagggacacagccaaaccatatcagtggctgaacctctctgtgctctggtttcctcttctgttgaatggacacattccagcacctaccccaaggctgaggatcaagtgaggggatgcacagagtgtgcttagaaggaacctggcattctgcaagcatccaacacatgtggctatgacgagtagctgttgtcattattgttattcctygatattcttccgtgtgctttcccttaaggccagttttgttgcaccggcctgtgataccagggtgcagagggcacctgacattgctcagggaaagctagctgccacacagtagtcaacctcaaatatgtccttgatggcaaatctacctgacccagatgcc

SEQ ID NO: 768439 - DNA, 628 bp, Homo sapiens
attctgcacatccaggtagaaatccagaacattaactgagtcctacgtaaacttacaaaaatgttccaaagtgtaaaaccacaatctatgagatagggttacaggggcacttgtttcttcccaagggactcactgggagctaccagtggtctcaatctgattcactgtctgagtctgtttgggctaagtctcataccatatatcgggtggctgagaccacagaaatgtattctcagatgtctggargctggaatgtccaagatcaaggaaccagcagattcggtgtccggcctcataaatcacctgctgtcttctccctgtaacctcacagggcagaaggggcctccctggggcctctttcataagatcactcatccattcataagggctccactcccacgacttaatcccctcttaaaggctctatccccaaataccatcaccttgggaatgaggggttcaaaacagaaatttgagggggacacagacatccagaccctagcactcaccttcctcctatttgcacatcccatcgacctttcaatccctgttgatggttaggaataggaaaatcactggggatgacctccccagacggtgtttgattaggtgactaagtgaggaacgg

SEQ ID NO: 768440 - DNA, 532 bp, Homo sapiens
caaaaatgccttccagaaagcattttcaaaagctgtcttcattgcttcttgtttttttcttttttctttttattttaagttcgggggtacatgtgcaggtttgttatgtaggtaaacttgtgtcatggggttctgctatacagattatttcatcacccaggtattaagcctgatatccattagttatttttcttgatcctgtccttccttccaccctccaccctcaggtaggcctcagtgtctgttgttcccctctatgtgtccatgtgttctcattatttagctcccacttataagtgagaacatgtggtatttggttttcggtttttgcattagtttgctaaggawaatggcctccagctccatccatgtacctgcaaaggacatgttctcattcatttttatggctgtatagtattccatggtatatatgtagcacattttctttatccagtctaccactgatgggcatttaagttgattccatgtctttgctattgtgaatagtgctgcgacgcgtgcatgtgtcttt

SEQ ID NO: 768441 - DNA, 641 bp, Homo sapiens
gagtgcgggcctcagctccaggcacagctgcacgcacacgctggcgctgcacagggtctgtccctcgagctttctgaaattaacttcctcaaaatggggccaataataactaccttgcaatactctttggaagtagatataatagtagatgctcaataaaaattattccttttctctcccaagtgccacttgttcccctgggtcatataggacctgtcctctttctcagaatgtctccaggtagaaatgactttatcaaactccaacttgttcaacccgccttattttgctgttgttctgttttgtttagttttaggctttgagcagcctgaagctatggtttttagtttctgtctctagtgataagcagaaaagaggggtgagaaaggggctttactggttcaactagaaatagaaactaagagcccatgagtgtattctctcccttggacrccgctggaagtgttgaattttgataatgaatataggtatgtaatttatatttagcattcctggcatttcatcgtggtcctagttgcaagtattgacaagttccagtttgttggatagtgataaaaaacactgattggcatgggaaacatctgccatcaattcatagccttttcctgcaggagagggat

SEQ ID NO: 768442 - DNA, 464 bp, Homo sapiens
ggtcgcagcgcagcagctgccggccatagggccaggggtctccgtggcgagcgaaggctcatctccccgcggaacgcgaccgcaggcttgcggtgtggccgccctggaatgttggcgccgtcgtgtccctgtccccctttcgtcgccagctgaggtgcaggtcttgctcaagaaggcgcttcgacctgaaagcaggcctttcaggtactgtgcagaggggccactgcctgtggctcgcagatttraaataaagcagaggtcactatatagggttccaccgttgctagcactgagcggctggttcttactaagcccaggtaccccttttttggagcaagactgggttctaaatgtatcaacaaaaagtggggagttggtgcttctgctttagccactagctgttggccagattgtcatctcccccaaccccctgaatggtcagcgctcccaagagtgcatagatt

SEQ ID NO: 768443 - DNA, 613 bp, Homo sapiens
attgagttttaaagttaagaaaaatataaaagttaattataagatgggagtgataaacacagggtatgcgcgctaggccgattaggattattaaccaagtaatcacctcatgccaaaggtggagtgttataggagtcatgggcccatactctgactattgtgtaatgaagttatcatgttttatagaacatgaaaaacttgcttcatttttacacagcacctgtcatctggggaatctcagcactttgaggtgtttccattctctcaccagtttgcctgatgcacattgccgaggtgagcaagacttcgtgtactggcttagggaagaaatkctggatgctaaccattctcaggccctcaggaacctgacacgaatgagaaatccataagcccacaaggcagctcttataggagtaaacctattagcctgccaggaccttctaggtagaggaaaaagagtgctggaaagctacctacagcgggagtctaggtcctggaggcagattgctcagatttgaatcctgggtcaatcactaattctttgaccagctcagctcaccatgccttcgcttcttcatctctataatggagacacaatatcatctacctctta

SEQ ID NO: 768444 - DNA, 589 bp, Homo sapiens
gaagaagctcgggggcagacagcctttatgcctctgtggccctcctcttctgcctacaatagtgccactcagcaatacacaaggtaaaggcttcaaggaacttggctaccaccagtctggggcttcaatgactcactgccaatccctgggcatgatgcatccactcaggggctggtgacagcctagccagaggcttcctttgctctctgctttctggagcgacagcccactggaggcatgtccaatccctgccagagtaacggacaagtctccactgtctccagtgatgccagcagaaactgcaagggcgggaggtggagtgggtgtggatcccarcatggctcctgggtttctgccaggaaggtattctgaggatagcaatctgtgaattccaccactcgtgctcctgaacacgcaccagctcttcattaaaaaaacaagtcttgattaaacagttgcaggcatagtggatttgtcatcatcttttgaggtctcagcctcttcccacggcatttgcccacttgctctgagcttcataaagccaaaactgcctagaccttcttccttcgcaccttcctgtagccatgtc

SEQ ID NO: 768445 - DNA, 589 bp, Homo sapiens
gaagaagctcgggggcagacagcctttatgcctctgtggccctcctcttctgcctacaatagtgccactcagcaatacacaaggtaaaggcttcaaggaacttggctaccaccagtctggggcttcaatgactcactgccaatccctgggcatgatgcatccactcaggggctggtgacagcctagccagaggcttcctttgctctctgctttctggagcgacagcccactggaggcatgtccaatccctgccagagtaacggacaagtctccactgtctccagtgatgccagcagaaactgcaagggcgggaggtggagtgggtgtggatcccagcatggctcctgggtttctgccaggaaggtattctgaggatagcaatctgtgaattccaccactcgtgctcctgaacacgcaccarctcttcattaaaaaaacaagtcttgattaaacagttgcaggcatagtggatttgtcatcatcttttgaggtctcagcctcttcccacggcatttgcccacttgctctgagcttcataaagccaaaactgcctagaccttcttccttcgcaccttcctgtagccatgtc

SEQ ID NO: 768446 - DNA, 574 bp, Homo sapiens
gttctttttagtgtactgtgggattgaattttttaggatattgctgaaattttttgtatctgtgtccctcagagatatggcctgtagcttgcatctctctctctttccttctttctttctttctctttctttctttcttcccttccttccttccttctttctttctttttctttctctctctctttctttctttccccttccttccttccttccttccrtctttcctgcatccttgtccggtattaaaatcaaagtagtgctactcttgtaaaattaatttggaagtatttcattctgttcaattatttggaataggttgaggaaaattactattaattcttctttaaatttttggtagaattcagcagtgaacccattagaccctgagcttctctttgatggaagactttttgttaccgattcaattttcttactaatttttgttctgttcagattttgtatttctacaaaatttaatcttagcagagtgtacgtatccagaaacatatcaattttttctatgttatctaatttgttggcatatagttgttcttaatactctcacatctcctt

SEQ ID NO: 768447 - DNA, 574 bp, Homo sapiens
gttctttttagtgtactgtgggattgaattttttaggatattgctgaaattttttgtatctgtgtccctcagagatatggcctgtagcttgcatctctctctctttccttctttctttctttctctttctttctttcttcccttccttccttccttctttctttctttttctttctctctctctttctttctttccccttccttccttccttccttccgtctttcctgcatccttgtcyggtattaaaatcaaagtagtgctactcttgtaaaattaatttggaagtatttcattctgttcaattatttggaataggttgaggaaaattactattaattcttctttaaatttttggtagaattcagcagtgaacccattagaccctgagcttctctttgatggaagactttttgttaccgattcaattttcttactaatttttgttctgttcagattttgtatttctacaaaatttaatcttagcagagtgtacgtatccagaaacatatcaattttttctatgttatctaatttgttggcatatagttgttcttaatactctcacatctcctt

SEQ ID NO: 768448 - DNA, 574 bp, Homo sapiens
gttctttttagtgtactgtgggattgaattttttaggatattgctgaaattttttgtatctgtgtccctcagagatatggcctgtagcttgcatctctctctctttccttctttctttctttctctttctttctttcttcccttccttccttccttctttctttctttttctttctctctctctttctttctttccccttccttccttccttccttccgtctttcctgcatccttgtccggtattaaaatcaaagtagtgctactcttgtaaaattaatttggaagtatttcattctgttcaattatttggaataggttgakgaaaattactattaattcttctttaaatttttggtagaattcagcagtgaacccattagaccctgagcttctctttgatggaagactttttgttaccgattcaattttcttactaatttttgttctgttcagattttgtatttctacaaaatttaatcttagcagagtgtacgtatccagaaacatatcaattttttctatgttatctaatttgttggcatatagttgttcttaatactctcacatctcctt

SEQ ID NO: 768449 - DNA, 632 bp, Homo sapiens
tctcctgaccttgtgatccgcccgcctcgatctcccaaagtgctaggattacacgcttgaaccatcacgcccggcctgcactgagtctattttctgggctttccattgtgttctattggccgattttttgaccaatacaacactgtcttcattacagtacctttctaataagtctcgaagtcatccctccaactttgtacttattatcgtgaaaatgttatgtcttttataagagttttgtagctttcttcatacagatcttatgcatgctttcttggatttatacctaagtatttctttatttttggtgttaattttatcttgtgtcttccatttcgaattccaattttttattgctggtgtataggaaaataactgacttctgtataataaccttgtatcttgcaaccttgctawaattgtttattggtttcagggtaatttttgttgattctttggattttttccacagacaacgtcatctgtgaaataggtttatttctcccgtcttggtctgtacagcttttatttccttttcctgtctcattgcatttgctcaaacttccaacatggtaagagtgttttgcttctgatatgaggggaaattgtccagtttctcaccatgaagtatg

SEQ ID NO: 768450 - DNA, 632 bp, Homo sapiens
tctcctgaccttgtgatccgcccgcctcgatctcccaaagtgctaggattacacgcttgaaccatcacgcccggcctgcactgagtctattttctgggctttccattgtgttctattggccgattttttgaccaatacaacactgtcttcattacagtacctttctaataagtctcgaagtcatccctccaactttgtacttattatcgtgaaaatgttatgtcttttataagagttttgtagctttcttcatacagatcttatgcatgctttcttggatttatacctaagtatttctttatttttggtgttaattttatcttgtgtcttccatttcgaattccaattttttattgctggtgtataggaaaataactgacttctgtataataaccttgtatcttgcaaccttgctataattgtttattggtttcagggtaatttttgttgattctttggattttttccacagacaacgtcatctgtgaaayaggtttatttctcccgtcttggtctgtacagcttttatttccttttcctgtctcattgcatttgctcaaacttccaacatggtaagagtgttttgcttctgatatgaggggaaattgtccagtttctcaccatgaagtatg

SEQ ID NO: 768451 - DNA, 627 bp, Homo sapiens
cttggtctgtacagcttttatttccttttcctgtctcattgcatttgctcaaacttccaacatggtaagagtgttttgcttctgatatgaggggaaattgtccagtttctcaccatgaagtatgagtttagctacagggttttttgtaaatattccttatcaagttgasgaagttccccctgtattcttattttgtagagagttttattatgaatgggtgctgggttttggcaaatgcttttgctgtactatagacatgatgtaattttttcttccttagcctgtgaatgattacaattttcagatgttgagccagccttgcatacctggataaatccagcttggtcatggtgtaaaattatttttatacgttgttagatttgattccctcatactttgctgaggatctccacatctatgtttatgagaaatactggtctgcagtgatcctttctttaaatgtctttttctggttttgatttgaggggaatgctaaataattttatagaattatttagcatttattccctctatttctgtcttctggaataggttgtggagtactgaaataattatcttccttaaatatttgatagaattcaccaatgaacccatgcgggcttggtg

SEQ ID NO: 768452 - DNA, 670 bp, Homo sapiens
tctttctcaatttcactgtgacagcgtcagctccactcggcactttctttcacgcaactctgtttttatgtgaaaaaagactgatggacaaaaccacagtcattgggatttggcaacatggcagacattctatttttaaaaaagaatcaaagacactataactttcagaaaaacaactgaaagtatttgctatcagtgatcaaatttaagcttccaagcaaaaattagaaatttaaaaatttgggccaggcacggtggctcacgcctgtaatcccagcactttgggaagctgatgtgggtggatcacgacgtcaggagttcaagaccagcctggccaacatggcgaaaycccgtctctgctaaaaatacaaaaattagccgggcgtggtgacaagtgtctgtaatcccagctactcgggaggctgaggcagagaattgcttgaacctgggaggcggaggttgcagtgagccaagaatgcaccactgcactccagcctgggcaatggagcgaaactccatctcaaaaaaaagaaaaaagaaaaaaaagaaacatagaaatttcgaatatctgtatttaacaccatgagccaggaagctttccaaaactttaaaggcttttctgatgaaattggtagtgatattaatgaatgagatttttccatgttgtata

SEQ ID NO: 768453 - DNA, 569 bp, Homo sapiens
tgtcacatcaaagatgcaaacatgagactccacatgcttctaatataccagaaattagagaagtctgaaaaaataacataaaataatgctactcatcacaaatttggtaaggtgttttgtggacaataggtgttttttcatatatacctgtttcttttattaatatgaaatatgttgattatttttattttatttttatttttttgagatcatgtatcacwctgtcacccaggctggagtacagtggcgtgatctcagctcactgcagcttccatctccctggctcaaatgattctcccacctcagcctcctgagtagttgggattatagacgcccaccactacacccaactaatttttgtatttttagtagagacggggtttcaccatgttggccaggctggtcttgaactcctgacctcaaatgatccttggcctcccaaaggattatttttaaatgaagcactaaataatttgaaatgttctccattttaatttcgaatgcaataaacatcaagagacataaacagaagctctggggaattgttggcccttagtaatagcatcaag

SEQ ID NO: 768454 - DNA, 570 bp, Homo sapiens
tctcccacattgtctcctaggacttttatagttttgcattttgtgttaattttgtaaagggtgtaaggtctggttctgggttcattttgttgcacatggaggtcccattgctccacaccatctgttgataagagcatcctctctccattgaatggcctttcctccttcatcaaagatcagctggctgtatttacgtgggtctgtctctggaccctctgttctgttccaytgatctatttgtctatttgtttaccagtgccacactgtcttgattactgtagctttccagtaagtcttgagatcaactgtcagttctgtgactttgttctccttaaatactgtgttaacttgtctgggtcttctgcctcttcatgtaacctttaggatcaatttgttgatatccacaaaataacatgctgggatcctgatggggactgcgctgaatgtatagaacacgttaagaaaaatggatatctcaacagcacggatcttcctgtccagggatatggggtgcctccccattacttagatctcctttcatttctttcaacagagttttgtagttttcct

SEQ ID NO: 768455 - DNA, 620 bp, Homo sapiens
ccttatttctctcttgtctgcagggaggtgcagttcatgctatgctgctgcaaacctcccctcagctccctgttcagtgatgtcataagggtggcttggagggagcctggtgggagaatttacacagtgggaatcagcagatattttgcatcagactctgatttattgttttggtgatcgtgtagacttaaagtgatggggaatatgttattagtacagattaaacctagaagtgtattacatctgtggccattatattgtcaatagcataaacatttgaggttatgttyttttaatattcaaaactattatctgattcagcaaaaaattgttcacaccattgacaaatgagtgaaattctgacatggttcagcaaaaaattgttcacaccattgacaaatgagtgaaattctgacatatatcttcatttttttcatttttatcctgctcattaacctaaagaaaaatgtccaccggcattcattttggagctgcagtcatttgtcaatgacaccagcagcttctttgctgagtcagatagtgatcaagcttttcttcatcatcttatttggtgacaatattgttactgatagagttataaaaattgatggtgggtttgc

SEQ ID NO: 768456 - DNA, 620 bp, Homo sapiens
ccttatttctctcttgtctgcagggaggtgcagttcatgctatgctgctgcaaacctcccctcagctccctgttcagtgatgtcataagggtggcttggagggagcctggtgggagaatttacacagtgggaatcagcagatattttgcatcagactctgatttattgttttggtgatcgtgtagacttaaagtgatggggaatatgttattagtacagattaaacctagaagtgtattacatctgtggccattatattgtcaatagcataaacatttgaggttatgttcttttaatattcaaaactattatctgattcagcaaaaaattgttcacaccattgacaaatgagtgaaattctgacatggttcagcaaaaaattgttcacaccattgacaaatgagtgaaattctgacatrtatcttcatttttttcatttttatcctgctcattaacctaaagaaaaatgtccaccggcattcattttggagctgcagtcatttgtcaatgacaccagcagcttctttgctgagtcagatagtgatcaagcttttcttcatcatcttatttggtgacaatattgttactgatagagttataaaaattgatggtgggtttgc

SEQ ID NO: 768457 - DNA, 620 bp, Homo sapiens
ccttatttctctcttgtctgcagggaggtgcagttcatgctatgctgctgcaaacctcccctcagctccctgttcagtgatgtcataagggtggcttggagggagcctggtgggagaatttacacagtgggaatcagcagatattttgcatcagactctgatttattgttttggtgatcgtgtagacttaaagtgatggggaatatgttattagtacagattaaacctagaagtgtattacatctgtggccattatattgtcaatagcataaacatttgaggttatgttcttttaatattcaaaactattatctgattcagcaaaaaattgttcacaccattgacaaatgagtgaaattctgacatggttcagcaaaaaattgttcacaccattgacaaatgagtgaaattctgacatatatcttcatttttttcatttttatcctgctcattaacctaaasaaaaatgtccaccggcattcattttggagctgcagtcatttgtcaatgacaccagcagcttctttgctgagtcagatagtgatcaagcttttcttcatcatcttatttggtgacaatattgttactgatagagttataaaaattgatggtgggtttgc

SEQ ID NO: 768458 - DNA, 631 bp, Homo sapiens
ccatggaatattttaaaggctgaaaactactgaacagacaaaaccttctgcaaagatccttttatattcataaggttgataacgaaacttgtctctccatcatgagagaactgagaacaaacagcctcactcacggaaggactttcattaatgwagccacatcccatcgacaggcacaaacctgagcctccggccactccaccctaacacaatgttccttcagcacgggagccagcagcctccagaacggcctttgctttgctcaaagcacacacgctgaggacacgggatccacaccctgctcagacgccatttcttccctgttcccatggtgacactggggccctcggagaagagctctgtagtctctaaacgacaggaatgacccccccagaaagaaacctgagtgattctggggaagtaactcacagcctccatctcacaatcaaagaaaagttactataagtaaagaaggctttggtctagccagagagttcctgccttctgtgagtcctctctcagctctggagtggagaggaacagaggggagtggtccctggagccagaagaacacagcatactggtctgaggaactactttaaacggtgttgtggttggatttctcctgagt

SEQ ID NO: 768459 - DNA, 631 bp, Homo sapiens
ccatggaatattttaaaggctgaaaactactgaacagacaaaaccttctgcaaagatccttttatattcataaggttgataacgaaacttgtctctccatcatgagagaactgagaacaaacagcctcactcacggaaggactttcattaatgtagccacatcccatcgacaggcacaaacctgagcctccggccactccaccctaacacaatgttccttcagcacgggagccagcagcctccagaacggcctttgctttgctcaaagcacacacgctgaggacacgggatccacaccctgctcagacgccatttcttccctgttcccatggtgacactggggccctcggagaagagctctgtagtctctaaacgacaggaatgacccccccagaaagaaacctgagtgattctggggaagtaactcacagcctccatctcacaatcaaagaaaagttactatmagtaaagaaggctttggtctagccagagagttcctgccttctgtgagtcctctctcagctctggagtggagaggaacagaggggagtggtccctggagccagaagaacacagcatactggtctgaggaactactttaaacggtgttgtggttggatttctcctgagt

SEQ ID NO: 768460 - DNA, 598 bp, Homo sapiens
gagaagagaggaccttggatttagtcctaaggatattttgtacgtatattttgtagtttttcctttgacacttcagcaacttgaccaaggtgctactaaactcttctccagggagaaagcatgcagtacctgagtttgaactatcaatggtcctccatccctccatcatgtccatcactgacctcctgtagaccatgtggggctcactctgtattggccgtgggctcagtgctctgggggatgacagcaatcctgccaccgcccccatgttggagatgagaacaagaagtcgtaggaagcctgagtatcctgcccaaggtcacacagttgagaaatagyagcattgggatttaacctaggtcatctccacccaactgcattcttactacaccttggcagcagctgaatctgacctctcatcatctggtgtggtcacttcagtgtatacgccaggaaataaaattctgcagcagacaactggagactgaactgagtttgaattgagaggctggccagaaggttgacatttcagagccaaactcatagagggaatttgatgcctttgacagggatggatgaactctctcaagcaaggccc

SEQ ID NO: 768461 - DNA, 634 bp, Homo sapiens
gaatcaatattgttaaaatgttcgaccgggcatggtggctcacgcctgtaatcccagcactttgggaggctgaggcgggtggatcacttgaggtcaggagttcgagaccagcctggccaacatggtgaaagcctgtctctacaaaaaatacaaaaattagctgggtgtggtggcaggcacctatartcccagctactcaggagactgaggcttgagaatagcctgaacttgggatgcagaggttgcagtgtgccaagatcatgccactgctttctagcccgggcaacagagaatctgactcaaaaaaaaaaaaaaaaaaagtcatagtgcccaaagcaatttacagatttaacactattgctatcaaatcactaatgtcattttttgcagaattagaaaaaaaatccaaaatttacatgacatcaaaaagagcctgaatagccaaagaaatcctgagcaaaaagacaaagctggaggcatctcattacccaactttcaactatactacaagaccacagtaaccaaaacagtatggtactgacacaaaagtggacacatagatcaatggaacaaaacagagagcccagaagtaaagccacacatctacaaccaactaatcttcccaccctttaat

SEQ ID NO: 768462 - DNA, 605 bp, Homo sapiens
tgtggctgtgttgagaagaaattggagaaaggggcagactgtggtttgctcatgttagtaaaaatacttaaactaaatgaactgatcaatagcacaccagcaaatgtccagctgaatgccagtaatgctgtttttcaaaaatgtgtgctgacagaakttggaaaagtccttcacaagcttatttattagctttgcataagggctgttttatggcccgtagatttttgcggctcattgtttttattgaagaataatgtacatacagaaaaatgcacatcaaatgtacaacttcatgaattataaaaaaatgtaaatatgcctttttattaaataatcactgcccagctcaaaaactagaacatgagatgcaggcatctgcccccttgagccttctccctattctttctcctttattcagtctttccattctcctgacctctcacctgcagttttgcctatttttaaactcagtgtgatgaatggaatgaaataatgtttgctgtgtgtaccaccagttcattcattcatactacgctattcatgtactatttgtccgtgtgtgagtatactgtagtttatccatatattccaattgtccagtggat

SEQ ID NO: 768463 - DNA, 602 bp, Homo sapiens
ggagatatagaaactcatccattgcttgagtgaaggtgcagtgccacagccaccctgaaagagtgaagcagtttcttataatggtgaacgagtcttaccatactatctagcaattgtactttgggatatatatgcaattgattgaaatctttgttcacaccaaaacttgcaggtgaaatgttttagcagctttattcttaatcaccaaaractgaaagcaatcaacatattcttttaggtaaatggattttttaaaaacctggtacgttcatacaatgaaatattatttcagcaatgaaaagaaattagccattaagtcataaaaagacacggaggaagcttaagtgctcattgctcagttaaataaatcaatctggaaagtttacataatgtatgattccaaatatgtctcattctagaaaagacaaaactatagacactatagaaagatggtttctaagagggaggggatgaaggatgactatgtgaagcagagggaattttcagagcaggataactattctccatgatactgtaattgtagatatatgatattaggcgttgtcaaaacttatagaccttcacagcgcaaagaatgaacc

SEQ ID NO: 768464 - DNA, 585 bp, Homo sapiens
tagcatattgaaagaggaggtaggagggcgggagataaccccgagaaatctgcagaagggggaatttaatcccacaaagacaccaggaaggagagcaggagaccaagccccaccctgactttccacaggggcttggatgagctcccgagggcaggcgctcgcacagcctgagtctcaaacacaccatgctcttttcctctgcgagttgctaaccagcgatgttcagggatgtaatcatwtcagggcctcagctactcccacatgtgaaagagcttccctggcaaacgcttggtttgaatcaagccagcttgacggagctgctgctgtgaagagctcagagaaatttggcagaaattccgggaacagttttcagttctctttaagagaaacactcagtgtgaatcacacagcgtgatgtacatttggacaattttaccttcttgtatttttcagagcagtttcaaagttgaatatcaattatatctaaaaaaatgtttcccagtgggtgtagcttctggatggaaagcacggagttttcttatgttggttggtagtaaatagtgtggagaggcctcactcagggtg

SEQ ID NO: 768465 - DNA, 691 bp, Homo sapiens
tccccaaagccactgtcattacattcttacctgcccatcatggagaaggccctgcggaccagtgcaagaccctctatatgagctttatagtgtcctctgaagtgttgaatattttcggtgtagtgtgtggattcagycattctgcgcaaactcttcctttgtccccaacaggctccaagttaaagagcctttctaggagatactattacagcaaaatagataccttgatgggtagacgttaatactagagttaaggttttagtgctcagagtagggaagcatgatatgtttaggaaccccacttcataattttgcattaatgaggctaacttttctctgaatgtgctacctttgcctgaacacaggtatgcacctgattagcttgtccaaatattacacacaggatggaaagagctagttgtccaaccaaacacatcttgtgctatggctgccctgtatctcccagcctctattaggggtaggtttgttcacatggctgatatctcaccagagagctgcaggtggaagttctgggagctactcttagccctgggccgtgtagcactactgtgactcctcaaaattctcttccttcttagcatcttctgggaccacatctgtgtctatcgcgcttcaactatgccaataacaataatgttcccaagctttaatggacatcagaatcacctgg

SEQ ID NO: 768466 - DNA, 565 bp, Homo sapiens
tttttaacctctttctcaactccttaacttcataaatcagagcttgttaacataaccccagtccttttcagatttctttcagaagtaatatttctgaatattacttctgaaagaaatttcataatattttgtgtgttatgaaaacccagatgctgagcacaaactcctatgtcatcaatgattttctggcgattcacagggaaagaacaggaagcactagaagccattggaggcgctgtggatgcgtccgccaaataaacctgcgggtggtaaatgcagattcgtcaggagtgatcgcaggaagcctgcctgtaactctcttctgcttgcgcacatctgctcttttcactcctccgtccgtcctcgggtgtatgtagctgctgttggagaaatgcactttgtttttgtgtcatygataaggacatcgcctttccctcatttttagaaactctttattctcacctgcggctctgtcagcaagtccctgcaggagaacttcctgtgtgtagtttggagacaagggctggagagggcgggaactcaaggctcgatcacgtccaagagc

SEQ ID NO: 768467 - DNA, 662 bp, Homo sapiens
ttcacaaaatgtagcctctctctgatgatttgattccagaacactctcctctgtctttgcaatctccttttgataagtcacatgaaccttcacgatggagaaaaaccatgtgcttcaggagcacaaaatacagcagaaacagaaataataaacggcagcaaaagcaaagcataaaacagaccgcagaatgaagttgactatgtcatttttcttttgtctaatagccgtatgaaaacaaatctgatctgtttgtttgtcttgacctttttataaaggtaaagagtgagcagtgcctgttagataggaatgtgatattgctctcttaattgtaaatagtattcatagttgtattaagtacaaatttatttcaactattgcaatcaaagagtagctttgatttgtattgtttagttsccctatttctgttatttcgctattaaaattatgcacagtggtcaggccttcccccactttttctgaaggatgttacagctatggtctgaagcattccacattcattcgtattcctgtatttattcctcattcaggatttgtttgctctgactagtatttggtatggctaatgtctcactttcattaccaagaagtccataagttctaaagaaaccaataaatttaccattcaaaattgtgtaacatgt

SEQ ID NO: 768468 - DNA, 612 bp, Homo sapiens
tcctaattgaaggggactgatgactaagagcagaaacatgagccaacaccatagacatctcaattcattcagcttacacaattctgaccgaaaaattcaagttgaccaaactgatcatgggatgggtgcaaaaccattgtgcccaaacaagctgcagacaagagcagagctttcaatggaaattttaaataagtgggattaagttcctaaagcatttatttgaagaactctagccagagacgaagcatagctttaccagtacaatcctgaatacacaacaaaagcaaagcaatggctaccaagagggggacatgtttcagtcaaagcacattgaactagtcaagagcgaagttcatggcaacagttttttgggatgytcaagacattttgtttgttgtctttctggagcgtaaaataacaatagcatctgcatattatgagagtgttttgagaaagttggccaaagtgttaggagaaaaacactgaggtaagcttcaccagtgagtccttttccaccacaacaatgctcctgctcatttctctcatcaaaaacggcaattttgtgagagttttgatgggaaatcaataggcatctacctgaccgtcctgctt

SEQ ID NO: 768469 - DNA, 633 bp, Homo sapiens
ctactgtatggacttttgctccagcttccatttatgagctgtcagtaactctatgattaaaatggggacagtaatggtactcagctcactgggttgtgtatgcccaaatacatgcaaacacacacacacatatttcrcatataaatattttatataagcctattgtaccatggtagtttatttgacctaaagatattcacgttcaagtttctctcaacactcaattataacaaaagctattataacacatgttgagcatttcccatgtgcaggcacttttccacatgcttttcaagtattaattcatttagtactccccaaacctgtgaattaggtggtgctatgttcctgttttagagatgaggtgtttgagacaaagaaagataattagattcacttgctaagatcacaaaatgttgggatttctttaccatgtttattgtccttcaactattgaacaactctacacatgcacacacataagcatgcaaacacacacgcgcatgcacacacacagactctcaagggatccaaagccatagccaacatgtgtttgctttcttgtcattttcacaccccaaggaaaaggaagcctcccttttcactctcctttcctgggatgttgaagaaact

SEQ ID NO: 768470 - DNA, 631 bp, Homo sapiens
cagccagtgagggggaggttacacctggtacttagagcctggacacttccctgccaccaaggggccaggacaccataagctgagcatgccaggtttggaaatgggccttgctgtggtgaaaagaggtatcagggccgggcgcagtagctcacgcctgtaatcccagcactttgggagttcaaggcaggtggatctctcgagcacaagagtttgagaccagcctgggaaacatggcgaaaccccgtctgtaccaaaaatacaaaatgtaggcaggtgtggtggcatgcacctgtggtcccagctacttgagaggctgaggtgggaggatmgctggatcccaggaagtcgaggctgcagtgagccacgactgtgcccctgcactccagcctgagtgacagagcgagactctgcctcaacaaaatacaataaagaggtgtcaggaggccctgaggtgtaatggcagatggcagatggggcgttggcatccccatttcgtttcatctgaaagctttgctctgtgttctgcctgaagctcgctgccccaatcctaccccttctactggtgccatctcttcacagtggctggcgtggctcaccgattccacagtacttgcggcaagaacgtcactct

SEQ ID NO: 768471 - DNA, 537 bp, Homo sapiens
tctgattaagatagttgtttatggtgacgccctattgggggatggatcctggatatttaaatgagctccagtcagtgaggtcaggatctctgggactcagtgctgcaccgcgtgtacaaagacaaagagatgaatctggggtagatttaggtgctaggaatattgtttcttgagttcttgacaggtgcagcttcggggctgcattccttctgtctcctaattttcatctctttatcaggtgatagyagaaaaggctcccaaagctcggataggagacctggacaaaaagaaatacctggtgccttctgatctcacaggtgggaacctgatccaagactcaggcttgcttcctgtgggtgggagtgcagtctctgcgggaggaggctccacctagcagctgttcttttgagggcatttttgacctctgtgactttcttgcatcttgtatcttttgcagttggtcagttctacttcttgatccggaagcgaattcatctccgagctgaggatgccttgtttttctttgtcaacaatgtc

SEQ ID NO: 768472 - DNA, 663 bp, Homo sapiens
cttcctccaaaagggcagagtagctttcatatagaaggcacaattcctttcccatgaagaacattttaactaatgcttcctactaggcaacgatcttcagttggattcctcaaaaggagaccctgagataaggatttgtatgcaagtgatttattaaataagtttgaggaaaaactagtaagtaaggaaagcaaaaagcaaaaggaagcaacagtgcaatttcacacaaagctttcagagctgaaactcaatctgatctaacagagagaccctggaagtatggaagtataaattatgtctcagcactattgcaacctaaggcaaagagctgggcttttaaacctcctcacccataggtattcrttggctaaggatcacccttagaaatgagtagggtgaggtataaattcccaggcactgcccactttttatacttgagggacaaagtggttccagtagcctgagagtggcctccaaggtggagccactggtataggtcatcgacgtcaaaagccacagaagccaagacaggtgccgaaaacagtaggaaagatctgttttgggacaaacattgagtgttcaatcaaggagcccccctgcctttgagccacagtgctggacctctttacacaggctctgagagagagtttacagagacattta

SEQ ID NO: 768473 - DNA, 594 bp, Homo sapiens
cccggtccttttcaccttctcaaggtctttgcttctgcaattatatcttcctttattcctgaatcatcacattatccctttcaactagtccatttccattattatacaaatacgctcttggatctcctattaaaaaattgatctcttatttccttccaactaccactctcttcactccgttcacataaaatcttgagcttattatctacaatcattatttttacgtcctttctgacattcttaacctatctgatcagactttcctccccaccactccactagggccactatcatcaaggtcaccactgatctatgtattgccaaatctagagggttttcccttgttcttgtctaccatgaccttacagtagcaycacatatagtcaggccctgcctccttgaaacacttctttgagttcacaagactccatatcttcagtcttcctctgacttaactggccacttctcaaattcctttgctggtctttcctcctctgatcaatctgttagtatgacattccctatggatatgccttaagaaccatctgctgaatatgccaggtcttttgctcttgcccgacagcacattgagtc

SEQ ID NO: 768474 - DNA, 531 bp, Homo sapiens
cacttgtaaagaggatttggccagttattcggtagactgcccttgtttgaagtttgtctaatatttcattatgattatattcaggttgtagatttttggtaagaatatcacaaaagtggcattgtgtccttctcagcgtgccattttaggaggcacaagttgtcaatatgactgttactgcttaggttaatgttgattattttccatgtaaaggtcactgcacacttcctgtgatatttctacttgtaaccaatatacactgtgggttttttttcactcaggtataatatggaggttcagkgttctctaattattgttgcttctaccatctcattgaatatattaatatttttagttgatggaataagcccaagacagagatattcctccctattttacctaagagaaaagtaaaactttcatttactttaaaagttcagctacttgttccgaactttgtaagagacctaaatttaaatactggtatggctgatgccaaagttccctctttctgttataccatgtaccctc

SEQ ID NO: 768475 - DNA, 558 bp, Homo sapiens
aatcagagggcaatggtgatggtctccatgctacttgcagctcatcctccagtgggggctggagcccaggcccttcccagcctctcctcccctcacccaccgactccaggatgtctgggaaaaggcattatgttggtgttgcctatgcctgtcccctgagcagaaggatagctgcctctggacctcaatacaaataattctccaggagtgagagccgtggttttgtggcttcctcaacctagccttcctcactgtctctgaagcctatctataaatgagtgtacaaagccagcccctctgtaagaacaggaacactctcacttctayttgtggactgacaacattttgcttggcttctactgaattcaacaaacagaggctagggtttggacatggcattgggcacagtacaaacgtagtcttactatgctgtcacagaaggggacagggtttcaatgactgaggtctcgtcatgaattacacaataaggtagattatttagatggtagattggctctatcccttggtctgcctctttgtggccactttcctgctcat

SEQ ID NO: 768476 - DNA, 558 bp, Homo sapiens
aatcagagggcaatggtgatggtctccatgctacttgcagctcatcctccagtgggggctggagcccaggcccttcccagcctctcctcccctcacccaccgactccaggatgtctgggaaaaggcattatgttggtgttgcctatgcctgtcccctgagcagaaggatagctgcctctggacctcaatacaaataattctccaggagtgagagccgtggttttgtggcttcctcaacctagccttcctcactgtctctgaagcctatctataaatgagtgtacaaagccagcccctctgtaagaacaggaacactctcacttctacttgtggactgacaacattttgcttggcttctactgaattcaacaaacagaggctagggtttggacatggcattgggcacagtacaaacrtagtcttactatgctgtcacagaaggggacagggtttcaatgactgaggtctcgtcatgaattacacaataaggtagattatttagatggtagattggctctatcccttggtctgcctctttgtggccactttcctgctcat

SEQ ID NO: 768477 - DNA, 505 bp, Homo sapiens
agcctttggactgtcaccaaacaagccatccgttcaccaaatacttattaagcgcctaccatgtgtctggcaagggaggtgtaacagtgagaaaaactaggtgtggtccaggccctccaggggctcaggggctcgtggaagaagtggacattgaagtacttaccacacaaatgagcatgaaagtacaatagcaatatctgccacgaaggcgagcagacagagctagcagggcttccaggaggagttttgatcttgcagggacaggaaggaggagttagctcctggggggcgggattgggggtggtggtgatatagacgtgrggacagagtggaaaacaacaaaaatataattattttagttcaaagttattgtgtcttgagttgaaaggcagggcagttagcgacacggttcagatttcagtactgcccctgaaatctgaattgtgttcaaagtctaaaacgtttaccttagcaaatccctcataaaactccatttggaagagtc

SEQ ID NO: 768478 - DNA, 614 bp, Homo sapiens
ttgaaacactttctttccttggattccaggacatcacactcttggtttttctcctttctcattggctgttcttttgcttgttcttcctcctctccctgacactttaatcttggagtgccccaggatttacacttggacttctctatctacatgcactctcttttttatctcattcactttcatgttttggatattacatttatgtcttcasccctaatccttccctaaacaccacagtagaacatccaactgtttactctgcaccactggatgtctaataggcttctcagacttaatacaccccaactgcactccaagattcctctccaaaccagctcctccaggcttcctcatagcaaaatatagcaactgtaaattctagttgcccaggctaaaaaccttggcattatccttggctgctttttctctcacaccttaaatccaatcagagcaaatgctattggctgtatctccataagtcattcagaattggagcacttctctccacttccatcaccttggtccaagcaaacctcatctctcacccggaccactacaatggcttcctaacccatctccctgtttccgcccttcccttccgatggtctgctctc

SEQ ID NO: 768479 - DNA, 559 bp, Homo sapiens
ttaaatcacacaaatttgtaaagtggcaaagaggaagttaaagcagagaatgagttggaagctgagtcaagagagtccctcacgtgtccggggaaggttagcaaaaagctcaggctggaaatagactagactgagttccagatagctgtagtcagaagaagggtgatctcactggtgataaagaccactcaatggtgaaccacacacacaaccttcttgcctsgagggctttcctcttcccagccacatctgtcctgctggtaagatgctcttcctccaagaattattttttaacttttccctgctcattctgcatttacagcatggtttccactaagtcatctatatagcacttcctttcacagctatttgttgcccattgcatatcactttttaagtcagatattaccaagcattggcaaaaaggtggggaaagagagccttcacccactgcagatgcagccgttctgaaggacaattgtgcaccttaaatccaccaagcccactcctgggtatacacccggggaaattcttcccagggaacacaagatgttcctaa

SEQ ID NO: 768480 - DNA, 559 bp, Homo sapiens
ttaaatcacacaaatttgtaaagtggcaaagaggaagttaaagcagagaatgagttggaagctgagtcaagagagtccctcacgtgtccggggaaggttagcaaaaagctcaggctggaaatagactagactgagttccagatagctgtagtcagaagaagggtgatctcactggtgataaagaccactcaatggtgaaccacacacacaaccttcttgcctcgagggctttcctcttcccagccacatctgtcctgctggtaagatgctcttcctccaagaattattttttaacwtttccctgctcattctgcatttacagcatggtttccactaagtcatctatatagcacttcctttcacagctatttgttgcccattgcatatcactttttaagtcagatattaccaagcattggcaaaaaggtggggaaagagagccttcacccactgcagatgcagccgttctgaaggacaattgtgcaccttaaatccaccaagcccactcctgggtatacacccggggaaattcttcccagggaacacaagatgttcctaa

SEQ ID NO: 768481 - DNA, 559 bp, Homo sapiens
ttaaatcacacaaatttgtaaagtggcaaagaggaagttaaagcagagaatgagttggaagctgagtcaagagagtccctcacgtgtccggggaaggttagcaaaaagctcaggctggaaatagactagactgagttccagatagctgtagtcagaagaagggtgatctcactggtgataaagaccactcaatggtgaaccacacacacaaccttcttgcctcgagggctttcctcttcccagccacatctgtcctgctggtaagatgctcttcctccaagaattattttttaacttttccctgctcattctgcatttacagcatggtttccactaagtcatctatatagcacttcctttcacagctayttgttgcccattgcatatcactttttaagtcagatattaccaagcattggcaaaaaggtggggaaagagagccttcacccactgcagatgcagccgttctgaaggacaattgtgcaccttaaatccaccaagcccactcctgggtatacacccggggaaattcttcccagggaacacaagatgttcctaa

SEQ ID NO: 768482 - DNA, 559 bp, Homo sapiens
ttaaatcacacaaatttgtaaagtggcaaagaggaagttaaagcagagaatgagttggaagctgagtcaagagagtccctcacgtgtccggggaaggttagcaaaaagctcaggctggaaatagactagactgagttccagatagctgtagtcagaagaagggtgatctcactggtgataaagaccactcaatggtgaaccacacacacaaccttcttgcctcgagggctttcctcttcccagccacatctgtcctgctggtaagatgctcttcctccaagaattattttttaacttttccctgctcattctgcatttacagcatggtttccactaagtcatctatatagcacttcctttcacagctatttgttgcccattgcatatcacttkttaagtcagatattaccaagcattggcaaaaaggtggggaaagagagccttcacccactgcagatgcagccgttctgaaggacaattgtgcaccttaaatccaccaagcccactcctgggtatacacccggggaaattcttcccagggaacacaagatgttcctaa

SEQ ID NO: 768483 - DNA, 616 bp, Homo sapiens
acagtcacgcatatggtttggatgtgtgtctcctccaaatctcatgtggaaatgtgatccccagtattggaggtaggatctgatggaaggtgtctgggtcatgggggcagatccctcatgaatggcttggtgcccttctcatagtaatgagtgaattctcactctgagttcacatgacagctaattgtttaagagtctagcacctccttcccttctcctgctccctctcttgccatgtgatgcctgctccccttcgcctccaccatgaatggaagcttcctgaggcctccccagaagcagatgccaccactatgattcttgtacagcctgtagaatttggagggctcagaagaagacaggaagataagggaaagtttggaacttcgtacagacttgttaaatggttttggccaaaatgctgatagagatatggacagagaaggccaggctgatgaggtctcaggtggaaatgasaaagttattgggaactagagaaaaggtcacccttgttacaccttagcatggaacttggctgcactgtgcccaggctctagggatttgtggaaggttgaacttaggagtgctgtcttagggtatcaggcaggagaaatttcta

SEQ ID NO: 768484 - DNA, 563 bp, Homo sapiens
aaaggatctaaccaggcagtgtggcaccagagcacacttttttgttctttagggagatgggatctctctctgtccctcaaactggagtgcagtggcctgatcatagctcactgcagccttgaactcccgggctccagcaatcttcctgcctcagcctcctgagtagctgggactacaggcattcaccaccaacccagctaatttttaaaaatcatttttctagagataggatctgatcccaaactcctgacttcaagcgatcctcctgcctcagcctcccaaagtgctgggattacagttgtaagcccctgcgcccagcccagagcacactttttttttttttgagatggagtctcactctgtcacccaggctggagtgcagtggcaagatctcrgccctgtggggaacagcaagagagatcagattgttactgtgtctgtgtagaaagaagtaggcataggagactccattttgttatgtactaagaaaaattcttctgccttgagattctgtgaccttacccccaaccccgtgctctctgaaacatgtgctgtgtcaactc

SEQ ID NO: 768485 - DNA, 563 bp, Homo sapiens
aaaggatctaaccaggcagtgtggcaccagagcacacttttttgttctttagggagatgggatctctctctgtccctcaaactggagtgcagtggcctgatcatagctcactgcagccttgaactcccgggctccagcaatcttcctgcctcagcctcctgagtagctgggactacaggcattcaccaccaacccagctaatttttaaaaatcatttttctagagataggatctgatcccaaactcctgacttcaagcgatcctcctgcctcagcctcccaaagtgctgggattacagttgtaagcccctgcgcccagcccagagcacactttttttttttttgagatggagtctcactctgtcacccaggctggagtgcagtggcaagatctcggccctgtggggaamagcaagagagatcagattgttactgtgtctgtgtagaaagaagtaggcataggagactccattttgttatgtactaagaaaaattcttctgccttgagattctgtgaccttacccccaaccccgtgctctctgaaacatgtgctgtgtcaactc

SEQ ID NO: 768486 - DNA, 594 bp, Homo sapiens
aaattgtgaagactctctttgcagtgggaaagtcgctctggctatctcttcaacactaactgtacaatccagttttgttcctagaaatgctctttaatatagttgccttctggaaatgtaatattgcattatcctattgtacccaagcaattatctgtattcataatccttcctccttagtgggtattctgaaagtgtaatcgccctttattgatctttatactgggtgatatggtttggttgtgtccccagccaaatctcatmttgaattcccacgtgttgtgggagggacgcggtgggaggtagttgaatcatggggcgggtctttcccatgctgttctcatgacggtgagtgagtctcatgagatctgatagttctatgagaggagtttccctgcacaggctctctctttgcctgctgccatccacgtaggaagtgggttcctcctctttgccttccgccatgattgtgaggcttccctggccatgtggagctgtaagtccaattaaacctccttcttttgtagatcgcccagtcttgggtatgtctttatcaacagcatgaagacagactaattcactgggatatataac

SEQ ID NO: 768487 - DNA, 594 bp, Homo sapiens
aaattgtgaagactctctttgcagtgggaaagtcgctctggctatctcttcaacactaactgtacaatccagttttgttcctagaaatgctctttaatatagttgccttctggaaatgtaatattgcattatcctattgtacccaagcaattatctgtattcataatccttcctccttagtgggtattctgaaagtgtaatcgccctttattgatctttatactgggtgatatggtttggttgtgtccccagccaaatctcatcttgaattcccacgtgttgtgggagggacgcggtgggaggtagttgaatcatggggcgggtctttcccatgctgttytcatgacggtgagtgagtctcatgagatctgatagttctatgagaggagtttccctgcacaggctctctctttgcctgctgccatccacgtaggaagtgggttcctcctctttgccttccgccatgattgtgaggcttccctggccatgtggagctgtaagtccaattaaacctccttcttttgtagatcgcccagtcttgggtatgtctttatcaacagcatgaagacagactaattcactgggatatataac

SEQ ID NO: 768488 - DNA, 623 bp, Homo sapiens
ggagaataaaacataaataatttggaaaacatatttgagagaataattcgagaaaatttccctaatcttgctagagaggtagatacccagatgagagacatttagataacatctacaagataccatacaagataaaccaaagcatatrgtcatcagactatccaagttcaacactaaagtaaaaaatcttaacgggctatagaaaagggtcaaatcatctataaagataaacccatcagactaacacttgacttctcagcagaaaactgacaagccagaagagactggggatgtatttttagctttcttaaagaaaaaaatgctatttaagaattttatatcctacccaactaaccttcataaataaaggagaaataaaatcattcccagacaagcaaatgataagaaaattcttcaccactagactggctctacaagaaatgctcaaagtagttctaaacacggaaatgaaagtaagatagttgctatcataaaaacacacataagtacaagtttcacagattctataaagcaattacacaattaagactacaaagcaactagctagcaacaccgtgacaagaacaaaacctcacatatcaatattaatcttgaatgtaaat

SEQ ID NO: 768489 - DNA, 517 bp, Homo sapiens
catccttatctggagggtaaaattaatataatatctatatcagggatgagcaaaattatgaagcagggtgtcatgtagctgtatcctacttctggtaaaatgggggtggatatgaagagtgaagaaacactagagcattcatatcttcatctactctttaacattttggagattccatcgtattaaaacatttcctctatgtgaactttgctgctcttcagaggaccattaaattacataaataaaactaccaaattgtctattgattacaaacaccaaaagcataggtaaagaggagtagatttttggaacaccagatattttaraagctgagagagcaaggttatgcctgacagtaaagcaccgtggccagaactttctttttctctttgttgcaaaagttttacaaacaaattaaacagtaagacttatttttcatcctttgtccaggacttgaaaatacttaccataaaacaatggtagtgttagagtaggtagtcaggcagacctgagcagg

SEQ ID NO: 768490 - DNA, 544 bp, Homo sapiens
agaagagcattgaatctacgattgctttgggcagtatgaccattttcataacattgattcttgctatccatgagcatgtaatgtttttccattgtttgtgttatttgatttttttcatcagtgttttgtagttccccttgtagatatctttcacttccagatatattattaggtattttgtttgtggctgttgtaaatgggattgtattcttcatttggctctcagcttgaatgttattggtatacagaaatgctactgatttttgtatactgactctttatcctggaacttttaagttgtttatcagttggaggaaasttttggtggagtctttagagttttctgtgcatagaatcataccatcagtgaagagagataatttgacttcttttcctatttgatgctttttctttctttctcttgcatgactgctctgggtaagacttccagcactatgtttagtaggagtggtgagagtggacttctttgtcttgttccggtttgtagggggaatgcttccagcttttgttcattcagtataat

SEQ ID NO: 768491 - DNA, 608 bp, Homo sapiens
taattacttaatttgatcgttatagattgcatacatgcatcagaacattacaccgtaccccataaatatgtaccattgttatatgcacactgtttgattatttcttacactaggataaattggtgtttacactactttgaaccaaggaaaactgagttaaaagaggttgcttagccaataagtttcctaggtcagactctggcagataataagatgtgaatcaggataagtaaagaacagtttgaataatacataccaaggcattgtagtctcaagtgtccctaagcagggaaggctgataaacatttttcaggcaccattagtaattctatcatatgcttgtgccatttagaaggctagagcaattcartgattcaccacacccaccactaatctttcatttcaaatgctatttactctgagaagaatattaattaaatcagttatatagagatatagtctcatcaagtgcaaaagcaaacacttgaagtactctcatcaagactgatattaatattaggttcatctacaaaatcccctgagtatctgaaaaacacatactttaggttttgaaaaatatttggttccaacatttcaatttattcaag

SEQ ID NO: 768492 - DNA, 600 bp, Homo sapiens
aaatccagaagaaatggatacatttctaaacaaatacaatctaccaagattgaatcacgaagatctccaaaacctgaacagaacaataacaagtaacaagatcaaattcacaataaagtctcccagtaaagaaacacttgagacctgacagcttcactgctgaattctgtgaaacacttaaagaagaattaataccaatcctactcaaactcttctgaaaagtagagagagagtgaatatttgcaaactcattcaatgaagccagtattaccctcatacctaaactagacaaagacacaacaaaaaagaaaactacagaccaatatatctgatcaacgttgatgcaaaaatcctcaacaaaatactagcaaaccaaattcgacaatacattaaagaaratcattaatcatgaccaagtgggatttctcccaaggatgcaaggatggttcaacatatgcaaatcaatccgtgtgacccatcatatcaacagaatgaaggacgaaaaccatatgatcattttaattgatgctgaaaaagtacttaataaagttcaacatcccttcataataaaaatcttgaaaaaactgggtatagaaggaa

SEQ ID NO: 768493 - DNA, 534 bp, Homo sapiens
agggaattcctacatgccacgtctaaggggagaaagttgctcttggagtctggcattctttcccaagttggggaagttgtgagaaaggtcctagagaaacatgtggctctgctgaaaccaagcttcttttgcttaagagtttagggtaagtgatacacgtcaagttatgttcaagtcaagtaatgatagtaataaattactatttcacacaattgaacctctacgtacgtcctaaagcagttacataacaaaacactatcaccttcccyccaaaggtctcttttgcttcttccaggtaatcactattcaactcctactttcttactctcccatatatgcccctagggtttcaagttatctaccagccatttgaatgtcttctttttgtgaaatgcctatttatgttctttgtatatttttgttttgggtgatcatctttttcttacaaatttagaaaaaccctttattattaagaacattaattctgactttacgtgttgcaagttatctgcttttaactttgtttttagttat

SEQ ID NO: 768494 - DNA, 534 bp, Homo sapiens
agggaattcctacatgccacgtctaaggggagaaagttgctcttggagtctggcattctttcccaagttggggaagttgtgagaaaggtcctagagaaacatgtggctctgctgaaaccaagcttcttttgcttaagagtttagggtaagtgatacacgtcaagttatgttcaagtcaagtaatgatagtaataaattactatttcacacaattgaacctctacgtacgtcctaaagcagttacataacaaaacactatcaccttccccccaaaggtctcttttgcttyttccaggtaatcactattcaactcctactttcttactctcccatatatgcccctagggtttcaagttatctaccagccatttgaatgtcttctttttgtgaaatgcctatttatgttctttgtatatttttgttttgggtgatcatctttttcttacaaatttagaaaaaccctttattattaagaacattaattctgactttacgtgttgcaagttatctgcttttaactttgtttttagttat

SEQ ID NO: 768495 - DNA, 591 bp, Homo sapiens
atgatataaaatgaaatgggctatctgtcataactgaagaataaactgtgatggagatttaaatcagggtattctacagccaatgatgagggccaatggaaaagagtgctttgggcaggaggttttgtactttagacaaaggtcagattttgctgtcattcaatcagctgtgtgttgtgtaggcaacttattatcattcaggttacagtacaagaatttacaagtgactcctcctcctctttctccttcttcatcaaagtaaattagaaaatactgcagattatccccatataatattcctctcactcttgctctgaaatattttaatgaatgggacagaaggcgctaaaattacaatcagaagagcacataactggagatgctggtttcttacaaaagtacttatttctttatgttgttgttctggtgtgattattgatagtatccttttcastttcaaaaatgtcctgagttgggcaattcatcctctggtcaccagacacgcaccaacagtctatctcatgaaagctgtaacagcacacggagtggcacaagtgggtatgatgcatcgtccacatccactgacatcac

SEQ ID NO: 768496 - DNA, 654 bp, Homo sapiens
ataacaggctcctttctccttaatagtagaggagaaataaatcttaaaatctacttgacgggtttgttttattgtttggtgataaaacttgatgatattccagatatctttagaaagagtttagtattctccctggcaggtttctgattaacggcacttgaagatgagactgcataatctgagtagggtgatgtgcttccgtggaaacctcacagtgaagacatctacacaggctgctgctttggattttagggagggcttcagtatctctttccttgccccatttatttcctgaatgtctttttgcatgtctaatatctggacttaggagcggctagaaataacagcaatcctgtgtataacgtctcctgatctcttagggacttgtagatatgcatacacacatgcacacatgttcacaaattaattgaaagctgtgtatttttcagaactctgattttgtcattgtctttgacattagyatattcagtcactcatttttggactgtgaactaaaagcacctgtgtctttaaaggtgcagcactttaaaaaatgttcaaagatgaggttcttttttaaaccttatgctacagaatttatagtatatccttcaaaaatcctgtttcctagtagttatcactcgctttcaagct

SEQ ID NO: 768497 - DNA, 593 bp, Homo sapiens
taacgtggaaaaactgagcccatcctgaatgctattctgttataaatcatagaatgcctgggatgcagctccctcttgttgccattttatcccttggtgtcctgcaggacctaaccttatgtcccatctctttcttgatgtctttttccaccactttgccccctttgatcttcctttttctggactcttactggattttgtcatcttttcctagtttgagctttgcaaggtcagtgcttagagtctttattgcatttgggccgmctgctgtccccaggtgaatatacctccttatgacctaatgtttccaacagctgggctctccacggggaaggttaagagcaaaagatagtagcattcacttctattaaataatactcaagactaaaagatgttagaattacttttactagaaatactgaactgacacattagcttacataaataatcattggatttaaatagataattaccactgctattgagaggggctatttttgtgtgttgttttacctattttttttggtctattctcaatgctatagcccaagcatctagaggagtgcccaacacatagtaattacgtttgttgg

SEQ ID NO: 768498 - DNA, 626 bp, Homo sapiens
tagaaggagcatgccttgagtctcaaatgagacttgggacttttgaattaattcttaacttttagttaagattttgagggactattgggaagggattatgttattttgtaatgtgagaaggacatgagatttggggggccagaggttgaatgatatagtttggatgtttttcccctccagattttctgttgaaatgtgatcgccagtgttggtgatggagtctggtgggaggtgtttgggtcatgtgggcagatccctcrtgaatggcttatgctgtcctcatggtaatgagtgagttcttgctctgagttcataggagatctggttgtttaaaaagatcctggccactcttccctctctttctccaactcttgccatgtgatgcacctgattcccctttgccttctgccatgattgtaagcttcttgaggccctcaccagcagtagtggctggcaccatgcttcctgtagagtctgaaaaactatgagccaattaaaccacttttcttgataaattacccagtctcaggtgttcctttatagtgatgcaaacagactaacacagggataaaagccatatgttattcagttatttgccaaaagtggcaaagaattaaggaacaaaa

SEQ ID NO: 768499 - DNA, 626 bp, Homo sapiens
tagaaggagcatgccttgagtctcaaatgagacttgggacttttgaattaattcttaacttttagttaagattttgagggactattgggaagggattatgttattttgtaatgtgagaaggacatgagatttggggggccagaggttgaatgatatagtttggatgtttttcccctccagattttctgttgaaatgtgatcgccagtgttggtgatggagtctggtgggaggtgtttgggtcatgtgggcagatccctcatgaatggcttatgctgtcctcatggtaatgagtgagttcttgctctgagttcataggagatctggttgtttaaaaagatcctggccactcttccctctctttctccaactcttgccatgtgatgcacctgattcccctttgccttctgccawgattgtaagcttcttgaggccctcaccagcagtagtggctggcaccatgcttcctgtagagtctgaaaaactatgagccaattaaaccacttttcttgataaattacccagtctcaggtgttcctttatagtgatgcaaacagactaacacagggataaaagccatatgttattcagttatttgccaaaagtggcaaagaattaaggaacaaaa

SEQ ID NO: 768500 - DNA, 584 bp, Homo sapiens
cctctcttaccactcctgttcaacatagcattggaagttatggccagggcaatcaagcaagagaaagaaataaagcatattcaaataggaagagaggaagtcaaattgtctctgtttgcagatgacatgattgtctatttagaaaaacccatcgtctcagcccaaaatctccttaagctgagaagcaacttcagcaaagtctcaggatacaaaatcaatgtacaaaaatcacaagcattcctatataccaataatagacaaacagagrgccaaatcatgatcatgagtgaactcccattcacaattactacaaaaagaataaaatacctaggaatccaacttttaagggatgtgaaggacgtcttcaaggagaactgcaaaccactgctcaaggaaataagagaggacacaaacaaatggaaaaacattccatgctcatggatagggagaatcaatattgtgaaaatggccatactgcccaaagtaatttatagattcaatgctattcccatcaagctaccattgactttcttcacagaattagataaaaactactttaaatttcatatggaaccaaagaagag

SEQ ID NO: 768501 - DNA, 521 bp, Homo sapiens
aacctggaactaggtaatgatatggatagtctgtgttcaaatggaaaataatttattgagatttttggcatgcaatttcacccctgctggtctagaaactcattacaaggtgaaaagtgattgctaatcaagatttccaggctatattccttccctggtaagtcttatccctctgactcctgacattttatcctaattttcagctgatatcagcatgtagcatgtcttaccgtaagtaataaaatattagggaggtttatgtgacattttgaaatattagggaatagtcataaattatgtaaaatgattttcctttatttggattttctaatcatgatgtgtctgaaatggggaatgtttgaatctgaggaattacaccattaaaatggcccattatctggaatctcatcttctcattggtctataaaagcttgaaaggtgccttatgcctattccctagtyctccattcctagatctctgcagggttagagctagtagggatggcatcgtggttggggcc

SEQ ID NO: 768502 - DNA, 640 bp, Homo sapiens
agatttccaggctatattccttccctggtaagtcttatccctctgactcctgacattttatcctaattttcagctgatatcagcatgtagcatgtcttaccgtaagtaataaaatattagggaggtttatgtgacattttgaaatattagggaatagtcataaattatgtaaaatgattttcctttatttggattttctaatcatgatgtgtctgaaatggggaatgtttgaatctgaggaattacaccattaaaatggcccattatctggaatctcatcttctcattggtctataaaagcttgaaaggtgccttatgcctattccctagttctccattcctagatctctgcagggttagagctagtagggatggcatcgtggttggggccaatggggcattcrtaactggtatgaactatttctagggcattgagaaatatgggggagtggaaatggccgaaatgggatttagagtggaaccatatgggaaaaatgttacatgtgttttcactcttaattatttcacaaccacaattaaacaaaaattgcaatgtgctgtttggttttgatacttaagtccattaaaatgaaattaataatagttaatccatattctgagaaaataatggcatttatac

SEQ ID NO: 768503 - DNA, 617 bp, Homo sapiens
gaaataaagtttatataaagttaacccagccccattcaagttattttagtaataaaactgtcaccaaaaaaaaaaaaaaagttgagtagataatataggattccaacttatatcttgggctagactataaaatggcaaaagattagatagtaatgaamctttaaaaaaaaaagacaccaaacttggaaagattttgtttgttttcttttttactttcttcttcctcctgaagcaccatgattgcaatcatctaaggaaaattctaggtgttatattttcctattctgatctcagatgccagaaattagagactttcagtattaaaccacattttgaaacttttaaagtgaccacaaattacttttcttgagtacccagatatacagaaagtggaagcctataaaagcttattctaaaacctccagatttcagatcttttttcccccaacccaaaaggaacaatatgaaggacagcttagcttgagaaatgccttaaagagaaggtatttcatactgatttttcttacactgattctaaatgtgatacatttggtaattaatcaaaaaacatattatgaaagtaacccataaaataaattatacaaataacggtccta

SEQ ID NO: 768504 - DNA, 608 bp, Homo sapiens
aagcctcatgagagcaaagatttgaccttatttaagtgctggatctccagggtctagaacagtgtttgtcacatactagctgctttataaatatttatggaatgaatgaactatttcccataaacatctgaacttcattgcctccgtgccatgacacttaaagttttctctaagtaraatgcctatatgctccaccaactatgtcttcatcatctagctgaaatttcatagcagttatgcttgtcaagagttgccagtgtgaaactacagctccccttctagagtggaaaatatttaggggcgttagctttttatggtttgttttttcaaacacacacacacacacacacacacacacacacacacacacacacactagcagggtatcactcagtatctattacattaatgaatgaaactgttgtcccattcaaattctacatatgatttcaacttagctagaatttagcaagaaaagtgggtctatcatttggttagtgctgtagaagggcaggagaaatatataaattacatgtgttcaatccacacagaaacagctagagttgcaaaattctgatgtaaattcagatcgttagcaaataagcctg

SEQ ID NO: 768505 - DNA, 617 bp, Homo sapiens
ggctttattaacccaggacttgcctggttgctggttctccagagatctccacagcagtggcaataataaagtctctcctccagagaccagggtctgcctctcttgtctggtgggaattttattccacaaaaattatgggcaccagctggggagaggcacaggggctgggtgtgttagacttctgagacttctctaagcagccatttcccaaaggttggcccagggagccccgatctgcagggaagtgctaagtgtgaagtgtcaggagagccccctgccctggtcgggtgggggagtcttctgtggcagatgaggtcctcctgaggtgcayggtgaatccccagagggactggaacacagggttacccctcaaatttccttttccagggagactttgtttatttgtgtgtttgttttcagtggcggtgaatataacagaccctgctctttctagcatgttctgggtcattccaccaatgacacccagggctgtgctctcaggaatgggtttggatttctctgtgggctgcccaggggcaactatcgggatagaagggtaggtagagaaggttgtggtcaagctgcatttgcatagcaagctcactgcattgataggt

SEQ ID NO: 768506 - DNA, 626 bp, Homo sapiens
atgtaggaagaagggcaggtaggcaataaagcgaatggttatagtcctgggagactttagtgtccagtaattctgtattttacatagataaggtgagtgtttgaaggaaaaagagaattaaaggaagaatcaatgacacagatgtctctgggtaagtggwggaatggctgatcttatctttgttctgcatctggggagatacactcgtaatggaaattatcaatcagtgtgcaatccaacggactttagttttaggagctagacttggattgcagacctgaagttacgattgacttgtccttgtttatgggagtccagtaaagaatgtgaaaccacctttccaaaaattataacaggaaattatgacagtgaaagagatcagacctaactgactccatcttgcttctaacctataagctgtccttgttcattcctgggcagaggccaaactaactttggaaggaattcagttcatggtttgactctgaaacaaaattgataacagccctttcccaaaaagacccccttattgcctggggaccagtctgcttttgtaggcctaacaaattagctataatattagacattgcagtttaggggtcatgcagcctctgactccaagagtc

SEQ ID NO: 768507 - DNA, 577 bp, Homo sapiens
tttcatgggcactttatttgccagatactatgctaaaagttttatacatgtatagcatctctttccctcctcccaatagccctatgaaataggtaggattattgtccccattttatagatgaggcaattgagaataacaataataaaataaataaaatgaacattctgccaatatgccctgcttcctttaaatcagctttcagagagcagtctcctctcctccaaatttgctgagagccaggcagacaaagactcagcgccaacacagctgagcccatccagtgaaagagcagcaaggtgacgggggttgaaggactgggcytcggggggcaagcgctcctctggcacctgtccctcccctgcccagcagctgacccaggactcaaggatcaggagccgaactccaactaagggaagagccttcccctcaaggagaagcccccaaagccactctccccagttgcattactgttcccagtgcctcttcgtgccccacagccacacctcgtgtcatgtgactttgtagttccctccacaagaggtgtaatatatcacccccactgacagtgggcccatg

SEQ ID NO: 768508 - DNA, 577 bp, Homo sapiens
tttcatgggcactttatttgccagatactatgctaaaagttttatacatgtatagcatctctttccctcctcccaatagccctatgaaataggtaggattattgtccccattttatagatgaggcaattgagaataacaataataaaataaataaaatgaacattctgccaatatgccctgcttcctttaaatcagctttcagagagcagtctcctctcctccaaatttgctgagagccaggcagacaaagactcagcgccaacacagctgagcccatccagtgaaagagcagcaaggtgacgggggttgaaggactgggcctsggggggcaagcgctcctctggcacctgtccctcccctgcccagcagctgacccaggactcaaggatcaggagccgaactccaactaagggaagagccttcccctcaaggagaagcccccaaagccactctccccagttgcattactgttcccagtgcctcttcgtgccccacagccacacctcgtgtcatgtgactttgtagttccctccacaagaggtgtaatatatcacccccactgacagtgggcccatg

SEQ ID NO: 768509 - DNA, 580 bp, Homo sapiens; identical to SEQ ID NO: 734178

SEQ ID NO: 768510 - DNA, 626 bp, Homo sapiens
acacagatgatggatcctcctcctggaggcactttgtttggtttccaggacactaccccctcctggctcaccttatgttccttggtacttctttttcagtccccacagcctattccttcttatctttgtgatctctaattattggaatgcyaggagtctgtcttagccatctttatctttttagttgttcaggacaaaaactttggaatcttccttgattccttttatttacccttcctccacctccccagtcagtcagtccatcagcaaatcctgtcagctctaccttaaaatgtacttggaatctatttctcatcacctccactgcatccatcttagaccaagccactacttcttggcctcgtgattaaagtagtttcctaaccagtctcctagcgttgtgcttttgtccctccttcttctcccctccccctccagatttttactacagtagccagaattctctttctaacaggtgagtcagaacatgcagtcttacacttaaaacactccaatggatctccctttcaatgcttttttggttttagcatcttaaaatgtcgtttagcatcttaaaatgtccaaaatcaaactgctgattttgccccgaaatcttttgtgtccat

SEQ ID NO: 768511 - DNA, 626 bp, Homo sapiens
acacagatgatggatcctcctcctggaggcactttgtttggtttccaggacactaccccctcctggctcaccttatgttccttggtacttctttttcagtccccacagcctattccttcttatctttgtgatctctaattattggaatgccaggagtctgtcttagccatctttatctttttagttgttcaggacaaaaactttggaatcttccttgattccttttatttacccttcctccacctccccagtcagtcagtccatcagcaaatcctgtcagctctmccttaaaatgtacttggaatctatttctcatcacctccactgcatccatcttagaccaagccactacttcttggcctcgtgattaaagtagtttcctaaccagtctcctagcgttgtgcttttgtccctccttcttctcccctccccctccagatttttactacagtagccagaattctctttctaacaggtgagtcagaacatgcagtcttacacttaaaacactccaatggatctccctttcaatgcttttttggttttagcatcttaaaatgtcgtttagcatcttaaaatgtccaaaatcaaactgctgattttgccccgaaatcttttgtgtccat

SEQ ID NO: 768512 - DNA, 626 bp, Homo sapiens
acacagatgatggatcctcctcctggaggcactttgtttggtttccaggacactaccccctcctggctcaccttatgttccttggtacttctttttcagtccccacagcctattccttcttatctttgtgatctctaattattggaatgccaggagtctgtcttagccatctttatctttttagttgttcaggacaaaaactttggaatcttccttgattccttttatttacccttcctccacctccccagtcagtcagtccatcagcaaatcctgtcagctctaccttaaaatgtacttggaatctatttytcatcacctccactgcatccatcttagaccaagccactacttcttggcctcgtgattaaagtagtttcctaaccagtctcctagcgttgtgcttttgtccctccttcttctcccctccccctccagatttttactacagtagccagaattctctttctaacaggtgagtcagaacatgcagtcttacacttaaaacactccaatggatctccctttcaatgcttttttggttttagcatcttaaaatgtcgtttagcatcttaaaatgtccaaaatcaaactgctgattttgccccgaaatcttttgtgtccat

SEQ ID NO: 768513 - DNA, 626 bp, Homo sapiens
acacagatgatggatcctcctcctggaggcactttgtttggtttccaggacactaccccctcctggctcaccttatgttccttggtacttctttttcagtccccacagcctattccttcttatctttgtgatctctaattattggaatgccaggagtctgtcttagccatctttatctttttagttgttcaggacaaaaactttggaatcttccttgattccttttatttacccttcctccacctccccagtcagtcagtccatcagcaaatcctgtcagctctaccttaaaatgtacttggaatctatttctcatcacctccactgcatccatcttagaccaagccaytacttcttggcctcgtgattaaagtagtttcctaaccagtctcctagcgttgtgcttttgtccctccttcttctcccctccccctccagatttttactacagtagccagaattctctttctaacaggtgagtcagaacatgcagtcttacacttaaaacactccaatggatctccctttcaatgcttttttggttttagcatcttaaaatgtcgtttagcatcttaaaatgtccaaaatcaaactgctgattttgccccgaaatcttttgtgtccat

SEQ ID NO: 768514 - DNA, 519 bp, Homo sapiens
cacgtactcccctctgaataagaaggctgaatctcagtggtcagcaatgagggagattcattttggtatttttttcttttttcttttataggcaatctttcttctcttccttctagattaacaggattctttcagtcagctttcaaaactcattcagtgtagatctggtttgttttcttccttgaaaaaaattattaatataataccacagtctctgcaccgaacatcatgatgcatgcctataatcgcagctactcaggaggctgaggtgggagaatcacttgacaccaagagtttgagcattttttagagatgggaccccatttcttaaaataaataaataaataaataaataaaaaggtgtctgtgtrtgtgaaaccacaatctccacgttctgaatgtaattatgccaaatatattttcttcttacattctttgcatttcttttaaacatgttttaaaatttaattttcttttaaaataggttttgttttcccattttcttcacaatttccttaa

SEQ ID NO: 768515 - DNA, 451 bp, Homo sapiens
taataccacatgatgggaaggcgagagatgagatatcacactttttccacactccctaatgatactaataatacttgttagctcctcacatggtgtaaaagtctactcatttgaccccgacagccacctatgagctaggtaggaccgtggtctctacttcatggaagaggagcaggctgagactagcaagtgaattattcaggcatatgaagctgctccgtggcagagcccagttcattccttgccctcctactctgaaacctgtgtgctttcccgagtccctgctggctggccaggccaggtggcagyaggggaaggcaaaggggctgggctggagccagcagaggctcaggtcctctggtgcagtgtcaagtgtgacatcagagccggatgggtgtgacacattgtcctctatctggcccagcagcggccgcaccttccaagcttctcc

SEQ ID NO: 768516 - DNA, 504 bp, Homo sapiens
aaagcccaattcccatgaatcattctttgctctgttacatttattttgtttaaagttttacttctatcatctttaacttgttctaaacaaaataaaaaataaaatgaaatcagcattctttcctataattgactgttttgctgcatttggattatccatgccatatactagatgagaatctaaattaaaagaggagccacttaactaggggttagctctcctgactgctgcamctttagcttagcaattcggttttccatctgagcaagttaccattatcgagtgcttactgtgggcttgggactatactgaacattttacatgagttatctcatttaatcctcacaagctccttccacctcaagagggtaagtatttacttgtgcttatgactctcagcctgctgcttcatctgtaaaaatgggataagtgactttctcaaaatctaaaaaaggatattgaactggatccacaactcagatctgcctgaatcaaatacaagtt

SEQ ID NO: 768517 - DNA, 688 bp, Homo sapiens
aaggatcaagggctgtatagatgcgaggccgttctttcttaagagacagggtggctgtgcccacttgtggagctagcatgcggtttggtttaatgacctgcatactggtcaggggacccgtactgcacacagccctttcaattgaactggtcacttggtctccaccctttaagctgccagagaacctggagcggataatcatgggctsgggtatggtggactgggctctaggactgtgcaaagagatcttcaagttgggctgcagtttctggatttcaaggggaatactggttcgtttcacatctataggaggattgctcaatctcaaccgatcaactgcacgttggattgattttcctttgaaattcaagaccttccttgggtatgaaattgaaggtccccagacatcagtaatttctgtttggggcctacagggataggcaaattccccggaattacgggcgtgctgcagggcgctaacagtcaggaggaattggtcaggtgacatagggattttccaagactttttctttgggtgactgggcagttttccaggagtttccaattgtccttgtttttgtgctttctccgcatcatctgctttttcaaaaaaaagaaaattttaaaaaatcggcgttctatgaaaaatattaagtacgtatgcattaagtacttgggcattcaaact

SEQ ID NO: 768518 - DNA, 581 bp, Homo sapiens
tattttcttagtcctattttgtgatatagattctttttttctttgtgtgtgctcatacattcatactttccttctttggatttggaagcttattggaagcttattgtcttttttcagttcttctggtagttacctttaattactttatatgttatatcattaccctctttcatgaattaggaaatktattcagtatttatggagttcctgctctggaaaatgggaaactttacgctaatatggtttctttaacttctccctcctcctacctctagagttttgcttattatagtcttattttagtccttctagtggttttctttgtaacattaattaatgtacttaaacctgtttattgacttaatagactctgtttagaaagggaagaaaataaacactcatattccttcctatgagtttcctcctttctctcttgtttgttccaatgttatttttgtgttaccaagttttataatagttatcttttgaaaacatatttcttactggttgttcagtctttgatctgttttttaaaaaagtcaattcattgcctatcaccagtcttattgcagcttctcctt

SEQ ID NO: 768519 - DNA, 468 bp, Homo sapiens
ctgttctacacttaccacttggtattttctatttaaccattctggtgagtgggtagtgattaacaccaccttaaaataagaaaaattaaattcagggggatagactgtcttgtccccagatgccagcaaaggaagcacttgaatgagttctgtctactcaraacacccacagctcctttgcagtagtagtattctgcttttttgttctctaacgtttttatcaacactctctctattttttccatagataattatacctttgcttttaagagctgtcataaataattaaaatatttgagctgaattaaataccatagctcagttaataacatgggctttatttaggaccagacaagtctgagttcaagccctaacttcaatcttactagctatagttctctaggcttcaatttcttcacctctaaagatgagaatgagggtagaaactagctcctgaagaggtgatga

SEQ ID NO: 768520 - DNA, 646 bp, Homo sapiens
ccacacctggccattagtttggatttttaaactatttcattaaaatattcttttgactactgaggttttttggcatcccttttacatttggtggccaagacaagaacctctctaacctcaccccagtcctgccctggacttcatctgagagggagagggaggtgtctgggacgggtcaagaaaccagagagttctgagaaatgaccccaccaatgaacacacgaggcagatgattataaygtagtgcagagaaaacaggagacgatgttggagaactctgatttaaacaggtgtgggaaagataagttttgaagcccagaacagatagctatattgagtattaaaatttggacgggataaaacgacatcttcactttaagatgtaaaatgtattcttggatgaattagctggtgtcaacagcatttgaaaggtacaagtacatgatgctaacaaagttgataataagttgttaaaaagaaaacatagggaaccatcacatacaataaaggatgagcttaattttttttaaggtatttattttaggattcgaaggttacacctaaaaatgtgactggtgattatctctgagcagtatcattctaggagattttcttttcttctgtagataaatgaagtaactattgt

SEQ ID NO: 768521 - DNA, 646 bp, Homo sapiens
ccacacctggccattagtttggatttttaaactatttcattaaaatattcttttgactactgaggttttttggcatcccttttacatttggtggccaagacaagaacctctctaacctcaccccagtcctgccctggacttcatctgagagggagagggaggtgtctgggacgggtcaagaaaccagagagttctgagaaatgaccccaccaatgaacacacgaggcagatgattataacgtrgtgcagagaaaacaggagacgatgttggagaactctgatttaaacaggtgtgggaaagataagttttgaagcccagaacagatagctatattgagtattaaaatttggacgggataaaacgacatcttcactttaagatgtaaaatgtattcttggatgaattagctggtgtcaacagcatttgaaaggtacaagtacatgatgctaacaaagttgataataagttgttaaaaagaaaacatagggaaccatcacatacaataaaggatgagcttaattttttttaaggtatttattttaggattcgaaggttacacctaaaaatgtgactggtgattatctctgagcagtatcattctaggagattttcttttcttctgtagataaatgaagtaactattgt

SEQ ID NO: 768522 - DNA, 640 bp, Homo sapiens
gtcgttcatattggctaaatacaataatccaaaatgttgaggagaaaatgtgaaattattttagatttaaaaaagatttttttaaattaggaaaaaccgagttaacatacctttagaattaaggttagctctcaaaatattccatgttttggatattctcacccatatttttatttacaaaaatattayactgttataaacttatttttagatgaaattctatagtaatgcattatataaagtaaaatgcatccattataagtgaacagttctatgaattttgatatatttatacacccatatacccactagtacagtcaagatatagtacattgccattatcccaaaatgctcctttatgtctctttttaatcagttccaatatacctttccaaatttccaagccccagataatcaatgatttgctttctgtcaataacaagttagtttttccttttgtagaatttcacataaattgaattgtagagcatacactgtactctgttgtgtctggcttcttttgctcagcgtgctttcaatatttatctgtgttgttgcatgtatatgccacaatatgagtatccatacacaggttgatggacttctaggttgttttcactttttggctctgatgaataga

SEQ ID NO: 768523 - DNA, 603 bp, Homo sapiens
tcataagtgtgagaaatggattaaaagggagaccaactatagagaaggagagcaggtgcaatactttaagtatatggtatagaaagattttatagtgaggaaatggaggagcgtcagctgtgtggataattttcccaaatctatttaaacatctaccaacacaaaagaaaagtaaaatattggcttaaaaaagacaactcacaaaacacttgtaagacttaataacaggtcatgaaactagatagggattacaccaaacactttgcattccattttttgtttatcatttttaatcccagcaaaatcaaaatattctcatttttgagaaagcctctaaatgattaagcaacttgtccaaagttacgcagctggaaaatggcatggcaagaagtgaaatmcagggctcttcttgtcagagccatgtgactcagagcaactccattttaaataggagctggataaaatgaggctgaaacctactgggctgcattcccagatggttaaggcatttgaagtcacaggatgagacaagaagacaacacaaaacagaggtcatcaccaacatggcacatgtatacatatgtaacaaacctgcacgttgtg

SEQ ID NO: 768524 - DNA, 603 bp, Homo sapiens
tcataagtgtgagaaatggattaaaagggagaccaactatagagaaggagagcaggtgcaatactttaagtatatggtatagaaagattttatagtgaggaaatggaggagcgtcagctgtgtggataattttcccaaatctatttaaacatctaccaacacaaaagaaaagtaaaatattggcttaaaaaagacaactcacaaaacacttgtaagacttaataacaggtcatgaaactagatagggattacaccaaacactttgcattccattttttgtttatcatttttaatcccagcaaaatcaaaatattctcatttttgagaaagcctctaaatgattaagcaacttgtccaaagttacgcagctggaaaatggcatggcaagaagtgaaatccagggctcttcttgtcagagccatgtgactcagagcaactccattttaaataggagctggrtaaaatgaggctgaaacctactgggctgcattcccagatggttaaggcatttgaagtcacaggatgagacaagaagacaacacaaaacagaggtcatcaccaacatggcacatgtatacatatgtaacaaacctgcacgttgtg

SEQ ID NO: 768525 - DNA, 549 bp, Homo sapiens
ccagtaaatgttacagtcaacaatactatctccaatgtttactactacttgggttattattctgttagctttattgaaacaccccaataatgctactagattttttttttttttttttttttgagacaaggtctcattctgttgcccaggctagagtgcagcagtgccatctcggctcactgcaacctccgcctcctaggctcaagagatcctcccacctcagcctcccaagtagctgagactacaagtgcacaccaccatgcccagctaatttttgcattttttagagacaggcttttgccatgtttcccaggatggtcttgaacttctgagctcaagccatccacctgcytcagcttcccaaagtgctgggattacaagtgtgagccactgccaaggccttagattttttcttatgtctttacatcttaatataaatgatcaatttaacaatagaatgcctgataggaaaatgaaagcctcctcttattctactaggataagaacaagattctctttgatagaccatttatccagtcttaccccaca

SEQ ID NO: 768526 - DNA, 623 bp, Homo sapiens
tattttgataagttcatatgcattgcaaaatgtaaggccattcaggaaagtacataatcaagtgttaagtaatacacgggaatggtaattcagagaaagaaaaaacaataatctatatgtacatggttgtaaaggggggaatacagtagaatgaaagagacaacaggtcttcatggataagcagtaaataatgagcaaaattatttttagccatccaaggtgaaaggctagtactgcaaagatacagaggcaaaagtaaaaaagaagatgagggtaatattctaacaaatgtttattgaattaacataaagttaaatacaaagatcattatgctcacaagyaaggaataaatttagttagacaggatttatacagattatgaaagatcttgaaaatatgattcattattacatttggtctggagaccaatataagtgctagaaaagagaatatctagtcaaaacagtgtgttgggaaaatgtgtctgatagtaatacgcatactgaaaatatctaagttctactgagtcatacaattgcataagattgtgaagccttctgtatgatttttattgtaatttaataaatgcaccaaataaccaaaaagtgtggtagaaaccagtg

SEQ ID NO: 768527 - DNA, 672 bp, Homo sapiens
cattgggaaaatgagaagttttactgggctagttcttccatgatttgaggatgatattcagattataagataccctttgtctttcttacagtaatgaagtataagctccatatctgttccagagactttaacttgactttgcttcattcacaaagaacagagttcaagaagcagtgcatcctgtgagaagtgtgaagtgtttgtacatcactttaaatatattacttaatatattctaagttgctgtgtggagcagtatactgttgttttaaaaatgcaagattcagacaaattttaatattrtctcattaaaataatttaaataatggtataaaatatctatatcattaaaataattttccatagtgtttagaaaccatgaaaaagaaaacatagcaggagaaaatatgacaggaaaagaaaacctaacaaagcccagaacccacagttaaccaaactagactgactttgttattacccattctttgttagtattggatggggaattaggataatgagccattaggcagttctgaaatggaaagccctgaaatttagtgcaatgtaactttaaaactgaaattatataaagagtagaagtttaatcatgtttaattacaaccaaaagcctgttgcctttttgtacagaaatctccttaatttcaggacatg

SEQ ID NO: 768528 - DNA, 672 bp, Homo sapiens
cattgggaaaatgagaagttttactgggctagttcttccatgatttgaggatgatattcagattataagataccctttgtctttcttacagtaatgaagtataagctccatatctgttccagagactttaacttgactttgcttcattcacaaagaacagagttcaagaagcagtgcatcctgtgagaagtgtgaagtgtttgtacatcactttaaatatattacttaatatattctaagttgctgtgtggagcagtatactgttgttttaaaaatgcaagattcagacaaattttaatattatctcattaaaataatttaaataatggtataaaatatctatatcattaaaataattttccatagtgtttagaaaccatgaaaaagaaaacatagcaggagaaaatatgacaggaaaagaaaacctaacaaagcccagaacccacagttaaccaaactagactgactttgttattacccattctttgttagtattggatrgggaattaggataatgagccattaggcagttctgaaatggaaagccctgaaatttagtgcaatgtaactttaaaactgaaattatataaagagtagaagtttaatcatgtttaattacaaccaaaagcctgttgcctttttgtacagaaatctccttaatttcaggacatg

SEQ ID NO: 768529 - DNA, 581 bp, Homo sapiens
tcagcaagagtgggagatacgaaggaagcaaaattgaccacaagttgataattactgaaactgattcttcatatacatatgtttgaaaacttccataacaagatgttaagtattcaataacctatcttagcttttactctatcttattcctcttctcatgttttttttttctatttttatctctctttaactcgtatataacattcttgctaaattttctctttttatttttgttctcattctcccraagtcacctgtcagtatttccttttcttccacaagtgtctgtctctgtatatctatttcaatctgggatctgccattttctactcgggcaaactgagagaagaaaattatctctgagcctctatttcctcatctataaaatcaaataaatacttcctgtcccatgggattattgcgaaaattgagattatgaataccaagttgttagagcagtagcacatggtaaggaagcattaaatagtggctatgaataaaaatgttggtgacaatataacttgaagaatagaaactgatagtccacatgtaaagagaagattggtgaggtgtttcacatt

SEQ ID NO: 768530 - DNA, 664 bp, Homo sapiens
aattctatgacactgttttttaaaaaaaatcttcataaaacattctctatgaaaatatcatcaaaacctctcttctacttcctcagtctcaccctgtcagaaggctccttatgttgaaagctaatgagatgttaagtatagaaattgaaagtaaagatcaagtgagagcaaagagaataaagaactgaagagatgcagtgctaggtttctgagaatggttactaatgttactcaaaaacttactcatactgaattttttttaactttttttattttagccacatttaataaagctttgtggttgtttattttccacggtaatacttctaaatcattgagatatgtaaataaaacaatctacgaaaaatagcatattcttaaataccatttgattgaataaaacaataagaataatctttaattaaaaacataataagactaatgtagataatagcttttctatcctaaagaaacaacaaaagaggctggaatacgtttctagcatctgttttattttacarttaactggcattcaaggaaaggcacaggctgataatggatgcatagcacgtattaaaaagtaggctttctccatataactgtaatgagtataaatttgatgctactgttcacccttaacacattataataatagaacaaatgg

SEQ ID NO: 768531 - DNA, 554 bp, Homo sapiens
tatccaccccaaagtcactcccatgaagatcttgggacaggtgttttccatggctctcagctacattgtggcctggagatagcagtgtctttctgaactgagagtctcgagtcctaggacagggatgtgacagagaaasagttcacattcctgcctgcccaggacagggagctggtgcagccccttttcataaatgacaaaattaaagcggaaacttacaagccagagacctcagcccatttcaccaggagctcaaccacccacccctatcagggctggtgcctgtgcttgtcactggggtatttatgagtgagcttggtagttggtggcccaactctacccagcttggtcctccccaccctctccactccctgctgaccaaggaacttaaggcaaggggcactccacagagaagcccatcacctgaaataccagagaacacctctcaataagcaaagactaagcacacactcaactgctgttgcagccaattcttacatgtaagtgccacctactggcctggaggttgaactgctcatcacaacacaaaaact

SEQ ID NO: 768532 - DNA, 610 bp, Homo sapiens
caccccaaagtcactcccatgaagatcttgggacaggtgttttccatggctctcagctacattgtggcctggagatagcagtgtctttctgaactgagagtctcgagtcctaggacagggatgtgacagagaaacagttcacattcctgcctgcccaggacagggagctggtgcagccccttttcataaatgacaaaattaaagcggaaacttacaagccagagacctcagcccatttcaccaggagctcaaccacccacccctatcagggctggtgcctgtgcttgtcactggggtatttatgagtgagcttggtagttggtggcccaactctacccagcttggtcctccccaccctctccactccctgctgaccaaggaacttaargcaaggggcactccacagagaagcccatcacctgaaataccagagaacacctctcaataagcaaagactaagcacacactcaactgctgttgcagccaattcttacatgtaagtgccacctactggcctggaggttgaactgctcatcacaacacaaaaactactgacagaagtgtaccaggctaaaaaagtaaagtcaaaaaaaccctaaacaacagacac

SEQ ID NO: 768533 - DNA, 616 bp, Homo sapiens
ctactgacagaagtgtaccaggctaaaaaagtaaagtcaaaaaaaccctaaacaacagacactacagtcatactttcaatggttagaaaaaaaatcctatccaaataaaagtaaattcaaaaataagaagtaacagtttctccaggtgaaaaggacccaaaactcyggcaccatgaaaaatacagtatcgtaacacccttcaagaatcacactacctatctagcaatggatcctaaccaacatgaaacttctgaaatgatagattaaaaaattcaaaatatagattgtaaggaagctcaatgagatctaagagaaaattgaaaaccagcacaaataaatcagaaaagcagtgttggatgtgaatgcagataggtatcggaaaaacaaacaaaccaaacaaatggagcttctggaaatgaaaaatttactgaaggagttacaaaatacagctgaatgctttgaggatagtctagaccgaacagaagaaagaatttcagagcttaaagacaggtctttcgagcaaacccagtcagacaaaaataaagaaaaaattttaaaaaatgaaaacaatctttaagaaatatgggattatttatagtgacaaaacctacaagtt

SEQ ID NO: 768534 - DNA, 616 bp, Homo sapiens
ctactgacagaagtgtaccaggctaaaaaagtaaagtcaaaaaaaccctaaacaacagacactacagtcatactttcaatggttagaaaaaaaatcctatccaaataaaagtaaattcaaaaataagaagtaacagtttctccaggtgaaaaggacccaaaactctggcaccatgaaaaatacagtatcgtaacacccttcaagaatcacactacctatctagcaatggatcctaaccaacatgaaacttctgaaatgatagattaaaaaattcaaaatatagattgtaaggaagctcaatgagatctaagagaaarttgaaaaccagcacaaataaatcagaaaagcagtgttggatgtgaatgcagataggtatcggaaaaacaaacaaaccaaacaaatggagcttctggaaatgaaaaatttactgaaggagttacaaaatacagctgaatgctttgaggatagtctagaccgaacagaagaaagaatttcagagcttaaagacaggtctttcgagcaaacccagtcagacaaaaataaagaaaaaattttaaaaaatgaaaacaatctttaagaaatatgggattatttatagtgacaaaacctacaagtt

SEQ ID NO: 768535 - DNA, 616 bp, Homo sapiens
ctactgacagaagtgtaccaggctaaaaaagtaaagtcaaaaaaaccctaaacaacagacactacagtcatactttcaatggttagaaaaaaaatcctatccaaataaaagtaaattcaaaaataagaagtaacagtttctccaggtgaaaaggacccaaaactctggcaccatgaaaaatacagtatcgtaacacccttcaagaatcacactacctatctagcaatggatcctaaccaacatgaaacttctgaaatgatagattaaaaaattcaaaatatagattgtaaggaagctcaatgagatctaagagaaaattgaaaaccagcacaaataaatcagaaaagcagtgttggatgtgaatgcagataggtatcggaaaaacaaacaaaycaaacaaatggagcttctggaaatgaaaaatttactgaaggagttacaaaatacagctgaatgctttgaggatagtctagaccgaacagaagaaagaatttcagagcttaaagacaggtctttcgagcaaacccagtcagacaaaaataaagaaaaaattttaaaaaatgaaaacaatctttaagaaatatgggattatttatagtgacaaaacctacaagtt

SEQ ID NO: 768536 - DNA, 586 bp, Homo sapiens
gggtattatgttttaaaacttaattttatgaacttattctataaataaacctatttatttctcataaattagacaaaataagcttcaaatagaaggaaataaaatcatctataagcctgaggtcaatatcaatgttttgtttgtggaggattgaattactgattccaattttttatccctcccatatatctatggtatttgttaggtgacatgcattccctccaactaaaggttgtgtattctttcctgtgtcttgatttctgaattatccatgtgacttgctttggtcagtgtgatattagcagacgtgacacaagcagtggcttgaaatgtgactgctttcttacatttytgccatgaaaaaaataagctacttcctaatccaaaaaggatacagacttacaaagaaggcctgaatcctgtcaacaccttgaagccaatttcaaaaaagtctagcctagattagccaataatcatcaaacaaccaacagcatgtgatcaagaataaatcactgttttaatccactgagttttggggtggtttgttatgaaggacaattttgtcaatagctaatacagtgttttc

SEQ ID NO: 768537 - DNA, 654 bp, Homo sapiens
ggaaggagtgcttcatgggaaaggaaagagtagggaacctggaggcccaactgctctatatgagactttcaatcaatcttcctgtttctctattttcatgacctttctaacccaccatttgtagtaccttttgatccgatgttgaattcataaagattctgctgggcccatctggcttattctcattgctgctcacctcatgcaaacttcctataagtcagccaccacttctccatcagatttctctgttctaaacatttattaaatactttcacttgctacttcccttttccctttgctawctttttagtattgtgtaggaaagaaaaagaaataaacctgcatgataatccagatttaatgtaaaccttttaagttttccaccaacataaacatctttgccttttagtcttgattttgaaactaatagttcatttatattatcatttgtttatttacaactaatgtttttaagtgtttacaatatgccaagcaccattcttagcccctggaagtgcagtcctaaataaggtacacaagattgctgagctaaattttattttagtgggcactggagacagacaaagggagaacatacaagaaaccatctgatagtggtaatggggtattgtataaatgaaatcaggggaatat

SEQ ID NO: 768538 - DNA, 562 bp, Homo sapiens
tcaaaacaaactttccaataatctgattctacttcaaatatatatagtaaaatttacaaaattttcagttccttccttacaatctttgtattgttatacattttatttatgaatgtaataagccctatatttgtattaattatccctttgactataaagtatctcaatgtcattaaaaataaagataaaaagtatttttaaaaactgatttttatttttttattatgtctggagcataaactartttctgcttggtatcacttttcttctgtgtgaagaacttcctttaacattgcccacatcataagtctcctggcaaggaacttccagcttttgttggtctataaaagtctttacttggctgggcgtggtggctcaggcctgtaatcccagcactttgggaagccaaggcgggtggattgcctgaggtcagaagttcgagaccagcctggccaacatggtgaaatcccatctctactaaaaatacaaaaattagtcgggtgtcgtggcacatgcccgtaagcccagctactcgggaggctgaggcaggagaattgcttca

SEQ ID NO: 768539 - DNA, 562 bp, Homo sapiens
tcaaaacaaactttccaataatctgattctacttcaaatatatatagtaaaatttacaaaattttcagttccttccttacaatctttgtattgttatacattttatttatgaatgtaataagccctatatttgtattaattatccctttgactataaagtatctcaatgtcattaaaaataaagataaaaagtatttttaaaaactgatttttatttttttattatgtctggagcataaactaatttctgcttggtatcacttttcttctgtgtgaagaacttcctttaacattgcccacatcataagtctcctggcaaggaactyccagcttttgttggtctataaaagtctttacttggctgggcgtggtggctcaggcctgtaatcccagcactttgggaagccaaggcgggtggattgcctgaggtcagaagttcgagaccagcctggccaacatggtgaaatcccatctctactaaaaatacaaaaattagtcgggtgtcgtggcacatgcccgtaagcccagctactcgggaggctgaggcaggagaattgcttca

SEQ ID NO: 768540 - DNA, 635 bp, Homo sapiens
tcaatatctttcacaaagctatatagttagtaggctcttcaggtttaaaatagtagcctgatacttttgtataatttttatcttgattactagctatctatggagctaatagaaaatcaaataaggttttgagaaatcaaaggtttccagcattctcctactttattgaaaaaaagaaagagaaaaaagataaaagagagagwctaaaaaaagaaatataaaggagatgatatgagaattgcagatagtagttagctattttccttccggctaaagggtttaaaagacaacctgtgagtccatatttttatagctttcatttgcaatatacaaaagtattattaggcaagcaagtaaattgctatatatatcacatgtggggaaaaattcttctttttctattacataaatatacatcttgaacaaaatctggtaagacattaaatgttggccccaaatatctgcattaccgcagcctatatcaataaaatgaaatcttaggtttgtgccatgaatctttattcagattattatttgtagattgatgacttgctgaaatgaaactaggatggcgggtcaagatttttctactgagttttcttcatgaactgtggaacatatggcattgctgtgac

SEQ ID NO: 768541 - DNA, 635 bp, Homo sapiens
tcaatatctttcacaaagctatatagttagtaggctcttcaggtttaaaatagtagcctgatacttttgtataatttttatcttgattactagctatctatggagctaatagaaaatcaaataaggttttgagaaatcaaaggtttccagcattctcctactttattgaaaaaaagaaagagaaaaaagataaaagagagagactaaaaaaagwaatataaaggagatgatatgagaattgcagatagtagttagctattttccttccggctaaagggtttaaaagacaacctgtgagtccatatttttatagctttcatttgcaatatacaaaagtattattaggcaagcaagtaaattgctatatatatcacatgtggggaaaaattcttctttttctattacataaatatacatcttgaacaaaatctggtaagacattaaatgttggccccaaatatctgcattaccgcagcctatatcaataaaatgaaatcttaggtttgtgccatgaatctttattcagattattatttgtagattgatgacttgctgaaatgaaactaggatggcgggtcaagatttttctactgagttttcttcatgaactgtggaacatatggcattgctgtgac

SEQ ID NO: 768542 - DNA, 644 bp, Homo sapiens
aggtttgtcacacaggtaaatatgtgccatggtggtttgctgaacagatcaatccgtcacctaggtattaagctcagcatccattagctattctccctgatgctctccctcctcccaccccaacacatgacaggccccagtgtgtgttgtttccccccaagcgtccatgtattctcattgttcagctcccacttgtaagttagaacatgcggtgttcagtttcctgttcctgcgttaatttgctgaggataatggcttccagctccatccatgtcccttcaaatggcataatgtaattcctttttatggcygcattgtgtatatgtaccacattttctttgtctagtctatcattgctgggcatttggattgaatccatatctttgctattgtgagtagtgctgcaatgaacatatgtttgcacgtatctttgtaatagaatgatttatactcctctgggtatatacccagtaatgggatttctgggtcaaatggtatttctgcttctagatctttgaggaattgccacactatcttctacaatggttgtactaatttatgttcccaccaagagtgtaaaagtgttcctttttctacgcaacttcaccagcatctgttgttttttggctttttaataatcgcca

SEQ ID NO: 768543 - DNA, 597 bp, Homo sapiens
gggatgcaatgttggttcaacatacacaaatcaataaatgtaatttatcatataaatggaactaaagacaaaaaccacatgattatctcaatagaagcagaaaaggccttcaataaaattcaacatcctttcatgttaaaaactctcaataaggccaggcgcggtggctcacgcctgtaatctcagaactttaggaggctgaagtgggcggatcatgaggtcaggagatcaagaccatcctggctaacacggtgaagccccgtctctactaaaaatacataaaatagccaggcgaggtggcgggctcctgyagttccagctactcgggaggctgaggcaggaaaatggcatgaacccaggaggcggagcttgcagtgagccaagatggcaccactgcactccaacctgggcgacagagtgagactctgtctcaaaacaaacaaacaaacaaacaaacaaaactctcactcagctaggtattgaaggaacatatttcacaataataatagccacatatgacaaactcacagtcaatatcatactaaatggacaaaagctggaagcattctcattgaaaactggcacaagacaaggatg

SEQ ID NO: 768544 - DNA, 617 bp, Homo sapiens
cagctaggtattgaaggaacatatttcacaataataatagccacatatgacaaactcacagtcaatatcatactaaatggacaaaagctggaagcattctcattgaaaactggcacaagacaaggatgccctctctcaccactcccattcaacatagtattagaagttctgcccagagaactcaggcaagagaaagaaataaagggtattcaaataggaagagagaaagtcaaattatctttgtttgcagatgacatgatcctgtatctagaaaaccccagtgtctcagcctctttttaagaaaagcttcttaagctgataagcaacttcaccaaagactcaggatacaaaatgaatgtacaaaaatcactagyattcctatacaccaacaacaggcaagcagatagccaaatcatgactgaactcccattcacagttgctacaaggagaataaaatacctagaaatacagctaacaaggtgtattagtcagagttctctgaaggcacagaactaatagatgtatatatgaaggggagtatattaaggaatactgacttccacaatcacaagatgaagtctcacaagaggctgtctgcaagctgaggaacaaggaag

SEQ ID NO: 768545 - DNA, 617 bp, Homo sapiens
cagctaggtattgaaggaacatatttcacaataataatagccacatatgacaaactcacagtcaatatcatactaaatggacaaaagctggaagcattctcattgaaaactggcacaagacaaggatgccctctctcaccactcccattcaacatagtattagaagttctgcccagagaactcaggcaagagaaagaaataaagggtattcaaataggaagagagaaagtcaaattatctttgtttgcagatgacatgatcctgtatctagaaaaccccagtgtctcagcctctttttaagaaaagcttcttaagctgataagcaacttcaccaaagactcaggatacaaaatgaatgtacaaaaatcactagtattcctatacaccaacaacaggcaagcagatagccaaatcatgactgaactcccattcacagttgctacaaggagaataaaatacctagaartacagctaacaaggtgtattagtcagagttctctgaaggcacagaactaatagatgtatatatgaaggggagtatattaaggaatactgacttccacaatcacaagatgaagtctcacaagaggctgtctgcaagctgaggaacaaggaag

SEQ ID NO: 768546 - DNA, 647 bp, Homo sapiens
cccaaggatatcccttgccatggaatcaggtccagagagggaaggggaacagaaacgaattcttcaggcttggcttcccagccaccttgtctgtgaaatgaactttcttttctaagaaaagcctaaaggatttcatccttccagctactccgtagttgaagcaggattactaatctggctgatttacacccaccactaaattatctataagagagaaatttttcccctttgcagtagtctcaaatttatacatatatagacacacactcacgtaaacttataaacatatatatatatgcatgtgtgtgtatatatataattagttaagactaaaatttgtaatgtgcttcagtttgcaaagcaatttcatcgtatgctcttccttctgattatcatacagggcagattattatccctaaayttaaggagatggcgaggtcatgtaacttgtctgatgtcacacagctataatgatggttccccaatgtatacatgtatcaaatcatcttgttgtatgccttgagtatacacaatttgtatttgtcaataaaagatttcaaaatttaaaaatagaaaaaagacattgctaggaacacataaaaaatacactttgttttaaactttagtttttatattatgtaattata

SEQ ID NO: 768547 - DNA, 523 bp, Homo sapiens
tccaagcttttatgctctgcttcctttttaaacataaattccaatttcaggccatctctttgagaatgagtatggctgtgcactgctaggagcacccaggccactgcttgaatgctttgctaatcagaagttttttccaccagataccctaaatgatctctctcaagttcaaagttccacagattcctagagcagagttacaatagcaccrgttttctttgctaaagcatagcaagagtgacctttgctccagttccaaataagttcctcatctctatctgagaccacctcagcctggacttcattgtccatattactatcagcatgttggtcaaaaccattttacaagtctctaggaatttccaaactttcctcatcttcccgtcttcttctgagccctccaaactgttccaacctctgtccattacccagttccaaagtcacttccacatttacaggtatctttatagtaatgcctcactttcctggtaccaattttcagtattagtccattttcacacta

SEQ ID NO: 768548 - DNA, 607 bp, Homo sapiens
tgagctgctcttgccctgagaggcatgggggctgggcagagagaggccacaggaagttcctttgcatagaggtgtgaagccagggaaggctgtgctcctacagcatttccagggtttggttttctcaactcactggccttcatcattacgtttatggccaaccaggggtgtggcctttgtctttgggggagggggctggtcaccaccagggcggttccaaccttcctgaatcacttcaactaagccaaccacctttcctttttcagtcctcctgaggcctttggtagacagtccaactgatgtccccagaaggctgtaaaatggatcagaytaatgcatttgtctcaaggctcctctgtacccactgctgaagactcattccccactctgtttcccattccaaattccatccagtcattttatccagcacagctcatcagaggctctgcaacgaagttaaatgatagcgttgagaccattcaataaaaaaggccaaccacttagagatgctcctgacttgaatataaacccctttccatgatgaatttcccagagaggaattaaagtccccaaattaaatttccttgcaagttgaagtccaaagaaa

SEQ ID NO: 768549 - DNA, 571 bp, Homo sapiens
cttgagctgtggtgggctccacccaattcgagcttcccggctgctttgtttacctaagcaagcctgggcaatggtgggcacccctcccccagcctcgctgctgccttgcagtttgatctcagactgctgtgctagcaatcagcgagactccgtgggcgtaggaccctccgagccaggtgcgggatataatctcctggtgcaccgttttttaagcccgtcagaaaagcacagtattagggtgggagtgacccgattttccaggtgccgtctgtcacccctttctttgactcggaaagggaactccctgacyccttgtgcttcctgagtgaggcaatgcctcgccctgcttcagctcgtgcacggtgtgctgcatccactgtcttgcgcccactgtctggcactccctagtgagatgaacccagtacctcagatggaaatgcagaaatcacccgtcttctgcgtcactcacgctgggagctgtagactggagctgttcctattcagccatctaaagtgtggaaagtaatagcctcaatgtccaacaatagcagtgtagttaagtagattgtta

SEQ ID NO: 768550 - DNA, 577 bp, Homo sapiens
cagtctaaggtgagtatctttacagcagtgtgaaaacggactaatacaaatctacatatttaaaacagtaataaaaattggaaaattatacaaacaaatggaaagatatctatttcttatgaattggaagaattaatattttgtaaatgtccgcattttccaaagcaacattcaggtttarcacaatctttttcaaaatcccaatgacattctttattttttttgagacagagtctcactctatcgcccaggctggagtgcagtggtgcagtctcggctcatcgcaacctctgcctccctggatcaagcaattctcttgcctcagcctcccgggtagctgggactacaggtgcatgccaccacacccgaataattttttgtattttagtagagacaggttttaccatgttgcccaggctggttgtgaactcctgagctcaggcaatccacccacctcagcctcccaaagtgctgggattacaggcatgagccactgcacccagccccaaatgacattatttatataaacagaaaaataattataaaatccatgtggagctgaaaaaaacaaacactt

SEQ ID NO: 768551 - DNA, 543 bp, Homo sapiens
aaggataaaattatccatacatttgaccataagctcttcttcacttttgcttttttttttttttttttgatgcttcgatgacatagcctgatgtttatgcatagtgggtactgaacatattttattgacgtatcctgattatttgttactgtatttacatggtcagatataaaatttgtactgaaatccatgtcattaggttaaattcatccataattaaaataattcaaataaaaaatcaattttacaaatgccattttcaatatgacagattcatagtaattgtcacttttctttaraaaagttttatgaactttgcattttcactcaaatctcaaggtcaatttataaaatcctatttgtattcctttaagctttattaaagtataatttatatacaaatgttgctcatgtttaatgtatacattttgatgagtttgaacatatacatacacctgtgatagtatttttaattccagtaccaaggtaatagacttatatgcatcgcctccaaaagttttcctgagagctgtcgaaaacaag
